United States Patent Application Publication US 2006/0134663 A1 - sequence listing, part 117

SEQ ID NO: 362095 - DNA, 1464 bp, Homo Sapiens
ggggggaccgtctctgccaagcgcctgttggtaggaacctgcttggtcgcgtctgagggggcttgtaggtggctctggctgaaacaggcgcctgcgagagtctgtaggagggaaaccgccatggacgatcagggttgccctcggtgtaagaccaccaaatatcggaacccctccttgaagctgatggtgaatgtgtgcggacacactctctgtgaaagttgtgtagatttactgtttgtgagaggagctggaaactgccctgagtgtggtactccactcagaaagagcaacttcagggtacaactctttgaagatcccactgttgacaaggaggttgagatcaggaaaaaagtgctaaagatatacaataaaagggaagaagattttcctagtctaagagaatacaatgatttcttggaagaagtggaagaaattgttttcaacttgaccaacaatgtggatttggacaacaccaaaaagaaaatggagatataccaaaaggaaaacaaagatgttattcagaaaaataaattaaagctgactcgagaacaggaagaactggaagaagctttagaagtggaacgacaggaaaatgaacaaagaagattatttatacaaaaagaagaacaactgcagcagattctaaaaaggaagaataagcaggcttttttagatgagctggagagttctggatctccctgttgctctgcttttggctcagcataaagatagatctacccaattagaaatgcaacttgagaaacccaaacctgtaaaaccagtgacgttttccacaggcatcaaaatgggtcaacatatttcactggcacctattcacaagcttgaagaagctctgtatgaataccagccactgcagatagagacatatggaccacatgttcctgagcttgagatgctaggaagacttgggtatttaaaccatgtcagagctgcctcaccacaggaccttgctggaggctatacttcttctcttgcttgtcacagagcactacaggatgcattcagtgggcttttctggcagcccagttaaccatttataagatttggaccttggagctgaaccagggagctagcaaaagtaaagcagacttataaaattatagctatgtgcagctgcacaacacagtccttccactagcagctgtgttaaagtatttataaggagaaaatttcagaactaagttgagtaatataggggatatatatttgtgaaaaataatttttacttatatttttcagaggatttgacacgataagcctcatctgatggaagagaggaataaataattcacctatatgtgtttgaggttgtgacagacttataaaatctttttaaaaaataaagctataatttatattaagttctgtggtttttctcttattacagtgttttacttgaacacattttaaataccattttgattacaacatttactgttaata

SEQ ID NO: 362096 - DNA, 543 bp, Homo Sapiens
  misc_feature (395)..(395): n is a, c, g, or t
  misc_feature (421)..(421): n is a, c, g, or t
  misc_feature (438)..(438): n is a, c, g, or t
  misc_feature (449)..(449): n is a, c, g, or t
  misc_feature (462)..(462): n is a, c, g, or t
  misc_feature (467)..(467): n is a, c, g, or t
  misc_feature (500)..(500): n is a, c, g, or t
  misc_feature (512)..(512): n is a, c, g, or t
  misc_feature (533)..(533): n is a, c, g, or t
acctgcttggtcgcgtctgagggggcttgtaggtggctctggctgaaacaggcgcctgcgagagtctgtaggagggaaaccgccatggacgatcagggttgccctcggtgtaagaccaccaaatatcggaacccctccttgaagctgatggtgaatgtgtgcggacacactctttttcaacttgaccaacaatgtggatttggacaacaccaaaaagaaaatggagatataccaaaaggaaaacaaagatgttattcagaaaaataaattaaagctgacttcgagaacaggaagaactgggaaggaagctttaggaagtgggaacgacagggaaaatggaacaaaggaaggttattttattacaaaaaggaaggaacaactggcaggcaggtttnttaaaaagggaggattaaggcaggcntttttttaggttgagcntgggagagttnctggttcttcccngtttngccctgcttttttgggctccagccttaaagttngttcttaccccntttagggatttgccacttttngggaaccccc

SEQ ID NO: 362097 - DNA, 462 bp, Homo Sapiens
aaatagaaaaccctaaaatgcaaatcaagaaattcagttacaggctgcaagtgacctaaaattcccctactctagctcagcagccatcagtcagtatagcatcagccacaggtcactgctctgcatacagttccttttcaacccttacaagacctgcttcattgctttaaaaatgtagtgttgatacttgaactgaatttagtcattggtaacttaaatattcacaaaattgtcataaagcttctgaaacatctggcaatgccagatctgtaatcatcacttttaaattgaatttgcagaattaactctaaagttgcagcaaccatatttattagagaaatctttaagcatatacatatggttccctataagcattcattcagagatcatctgtgcctaaaagaaaatgataaaaatgtgtcataatatcaaaggggtctagatcaggggttggtaaactac

SEQ ID NO: 362098 - DNA, 442 bp, Homo Sapiens
tcttttcctggactctacctgcttggttcagtgtcctgaagagttatttaaatgaaccactaattactaagtagtggttcatttttaaagtatctacttctaaaattacctagttgaaaatatgaaggatatgcttagttttagaaatatcatgaagcaaggatctagtcagtgttacagggtaaaggtggagttttttaaagtctgtatttaaatggtgcactgatggattcatttttaatttgcattacaaaaatgttgctcaggtaatcagtattttcttccacgtatgtgcatattgcactgttagatcatagaaatatctgaatgctttaatttttatgtatgcaaaatctataaatcttttgtataatgtattttatacaaatgtaactgtagaacattgttagcatgtgtatctgtaaaaccagtttttaaaatt

SEQ ID NO: 362099 - DNA, 475 bp, Homo Sapiens
aataactagaaccaggagtggttcaaaatttaatttacacatctactccctgtgttatttgcctgctcttagtgtgccaaatgttatttagtacatttgaaaggatgaatctcagtatagactgagtttgtattgtggtccccaatgtttagatcatatatctgtatacctatctctgcgatgattttcatcatcatttcagtaactcagatttaccaagttcttattctgtatcaggtgataattgtaatccctgtatgtcttatgtcacttaaactatacaactgaggtgggttctatccccatgttgcagtgaggaagctaaagtacaaactagctgttaagtggtagagacagaattcttgattggatttctgatcctgcacatataatttaacttgtaattatgatatctcttgatatttatactattatgtaaaagtgcttctgtaaaaaattaaatttgaaatttcaa

SEQ ID NO: 362100 - DNA, 643 bp, Homo Sapiens
tcagtattttaactcactgtgtttttaaaagagcaaaaaagggaggatcgtgaaaacctgggaatcacatataagttcatcctgaatcctgatactcccctccccttccctgaggtggaccacatttgaagtcagcagagaaaaagtgtgatattcagaagaaatgcgtgattttggagtcgctttggaggaaatattttctttctctatgcctaaagaaactgaagccagactgaagttttgcaccctaaaaaaggaacagcattgtttgagttacttgagcaaatgttggtggtccacgttaagacatatttttaaaacttccaaaagtgtcgattattaaaattgtagtattttacatttcattttggggggaaatccaagtatggtgtttgtattgaagtcagacagtcatacttgtgcttttacatgaagtttaaatgatacatattgtaaatattcaataactacagtgtttaaaaagcatgcttcaacatagaagtagcagcaatgtaattatttgaagtaacacttaacacactccgctgcattgaatgcagtggattgatcagaatgttaagactgacatttccaaggttggctactatgtaaaattaaaattacccaaattgtgcaaaaaaaa

SEQ ID NO: 362101 - DNA, 1437 bp, Homo Sapiens
cggattgttactcgtcctgctctgctgcttctccccccaattctctgtccccgctggtctctactggtgccttctcgtgtacttgttcccccacgtgacctcctcgccacgcgagccaatccgcgcactgggttccccttggcactgccccgggaccctgggatagacccacatgccctgttggcttggtctcccctggctgtccgtgaactcctccgccctttccggccaagcgcaaccttccgcgtgcggtggaagccgctcgtgccattggcgccttgcggcccacgagatggcatcccgcggcccgcatgttccactctctcgcgcccggccttcccgagccctgcgcctgcgcagacccgagcccggccccgagccggtcgctgtccaagcgcccggccagcgcttccggctgccgaggctgcagccttcagtgagctgtggctcttgccgccccgggagggaacaaatggcggatttcaggcctccgggccatgcagcctccctctgaggccccaaaggcgcgatagaggcggtgagatgcggctggagctgggaacgattcccggccggcggggaggccgcccagcccggtgcgctgaccgcactcgccttgctttcacccctcggtcgcctctcgcacctcgcagccgaaagcccctccgctgggtcacgtttctccatcccgctgcagcctgagcaaggtcgccttcatcctttacagacagaagttcctctacccggaggcccggagcctgggagagggccactgggaacgtcgcatttgcagagccccagtaaccgggctgtggaccgtcttcttactgcttgaagtttcaggctcagagcaggaaacgattccagagctcagccaggcaccgatgagaagaaaaacagaagcagcacattgcccagggccatggagcttgccagtgaagagcaaaccaggccacgtagggccgctgcttgggaccctgtcctggcacccccagctcttggagaaagtcagcgctcccaaggcctccaggcccgccagcatcgtctggccctgactgctctccaccataccccactctccactgcagctcttccccatgtcccggctgtgcacatccggctccatgatcccagccgcgcccagcttcactctctgcccagcaaactcttgcttgtcttctaggtgttggcttagaaaacattctccctgcaaagttttctaggcgttccccgcacctctcacacaaccctatgcaacactgtattccagggtagcccacacagaacctcacctgcttgttcacttatctgacccagaatacgaaaggcccacactaggtcttaattaatatgtcccctacatcccagctgccccatccaagtccccaatttctgggcccatgtactttttaccgtgttgcccactggccctaaaaa

SEQ ID NO: 362102 - DNA, 509 bp, Homo Sapiens
  misc_feature (43)..(43): n is a, c, g, or t
ctttaaaaaatataaaataggattctgcacagcagaaaaatanagccagagaccctcccccaacccctggtttgtgcaaagatactgggtatatgtaaacatgaagaggtaggaggtgcgagttcaggtcctggctccagatacagttaagctgctacaacaaccagggggacccagagggagcaccaggagggggaggaccccctcaagaggtgagaaggggtctgcggcctcgtctccagccgagggcgggaggcgcctcgcccctacacccatccgctccctccaacccaggccggggagggtacccacatggttccaggcaagtaataacaaaataacacggcatcccagttaatgctgcgtgcacggcgggcgctgccggtcaaatctggaaggggaaggagctcaggtagtcgcggaggacggggttgagggggatgcgagccaggttctcgcggcccacggtggccacgatgcgctggcggcacagctcctgcagcggccgc

SEQ ID NO: 362103 - DNA, 486 bp, Homo Sapiens
agagtgacatcatgagcgatgaagatgatgaccaccgtcagactgtgaagcagggcagccctactaaagacatcgaaattcagttccagagactgaggatttccgaggacccagacgttcaccccgaggctgagcagcagcctggcccggagtcgggtgagggtcagaaaggaggagagcagcccaaactggtccgggggcacttctgccccattaaacgaaaagccaacagcaccaagagggacagaggaactttgctcaaggcgcagatccgtcaccagtcccttgacagtcagtctgaaaatgccaccatcgacctaaattctgttctagagcgagaattcagtgtccagagtttaacatctgttgtcagtgaggagtgtttttatgaaacagagagccacggaaaatcatagtatgattcaatccagatatgggttaaattcctcattttacttttaaactggtggtaaagtggaaattgca

SEQ ID NO: 362104 - DNA, 1126 bp, Homo Sapiens
  misc_feature (192)..(258): n is a, c, g, or t
  misc_feature (875)..(1054): n is a, c, g, or t
  misc_feature (1061)..(1063): n is a, c, g, or t
agcggcatgagccaccgtgcctggccagcaattagaattttaacactggcagttatgaataatatgaaggagaggtagatttctgagtgattctggtttaaccagctgggtggatggtggttccacgtattcaggtggcaaacaggaaaaacatgtgttcgaagaagaatggaggtaggtggtctcttaagnnnnnnnnnnnnnnnnnnnnnnnnnnnnnnnnnnnnnnnnnnnnnnnnnnnnnnnnnnnnnnnnnnncaaacttgtcagctattatttgttgagtacgtactatttgatttatgaccacaggcagctgagcctcagtgttggtgcctagtgtacaagattgttaaagaataaagttattttgcaaagtgtaacccatttttagcactgacatagcactgacagtagctgctgatctcattatgggctaaaataagacaatattcaaaggtcagagatatctagccagaatctgatggaggctggatttcagattttgttacagaattagacagaggaacacagaggggacaggctcagttagggtggaggtgtggggtagggaagcaggacttgatataaattattggaatcattgtcttttaaaccagtggtttatgtcagggtatagcgtttcaagggatttgagggtcagatggggaaatgtagccccttattttgccagtgtgaagcagataccctgcttttctttacagtagcggagtcagcttaagagctttaaaggtcctaaacttcaaaaacattacagtgccccatcctccgccttaatgtaattcaaaatacaaacaatactaaactgtaaaataaatgtaacaaagtccaataaagtttttatttttttctcnnnnnnnnnnnnnnnnnnnnnnnnnnnnnnnnnnnnnnnnnnnnnnnnnnnnnnnnnnnnnnnnnnnnnnnnnnnnnnnnnnnnnnnnnnnnnnnnnnnnnnnnnnnnnnnnnnnnnnnnnnnnnnnnnnnnnnnnnnnnnnnnnnnnnnnnnnnnnnnnnnnnnnnnnnnnnnnnnnnnttttttnnncccctcggcccccaaaaaaaatttttaaacaactttttttagggggcggcggcccccccaaga

SEQ ID NO: 362105 - DNA, 825 bp, Homo Sapiens
  misc_feature (615)..(615): n is a, c, g, or t
  misc_feature (815)..(815): n is a, c, g, or t
ctagtgcgactaccacctgccagcttttggggggtatggaaatactatctaaaagttggactgcatgggtcaaatcattatgagacttataaactaaaactttagatacccatatagaaatgtctttgaggcaaaaacaaacctaaagaatgaaggctctttcccttctctgaaaaaaacaaaacactgctcttcacacaaccggaagtcaagaccagagatttggagcaattgtctactaatttggcacaaagatcgtttctttagaaaagtggcattggcttttgaatatgaaatcttctcatagctgcctaaaaaagactagaatgtatatggatatcagaaacctttaataatacataatttatgcaaagataagataaagcaacataacactaattataaaactatttttaaatccccatttttaatgaaaaatatacatttgtatttaatttcctttgaataaaacaattgtaaagtaaatatttgaaatatttctttttgtttatacatgcatgttttttgaataatgagataggtgttcttatacagaattgttgagtgttttgctggatacaaacagaaaagcagtgagaccagaaggtctctggngggaggtgacaacccaacagaggaggtggaacatcacagacactggatggcaccatctacaagggcacgtggaaaaacaagtccacatccgtgtcctatggctttggaataaaataccgaataacctatcgcctggcggttccagatgacgtggcatgtggagaagacgtgagaacttcttacaggcatggatgaaatcngggagagaag

SEQ ID NO: 362106 - DNA, 970 bp, Homo Sapiens; identical to SEQ ID NO: 151839

SEQ ID NO: 362107 - DNA, 897 bp, Homo Sapiens
  misc_feature (220)..(247): n is a, c, g, or t
agcgggcactggggccatggcggcgcaggaccgggcttggcgcaacggcacacgatgcggtcctcgagcctcccgggcgctcggtcaccgcgccgaaacgggagcgggcagagtcgccaccgcctaccgccgggccgcctcagaacaggaagccgtgcgccgaccgcggaagcccgcccccatgtagcgagaagtccgccgaccccaggacaggagcgannnnnnnnnnnnnnnnnnnnnnnnnnnnaagcagggcggccccgcagaggggaagctgcgcctccgcaaacgctcagaagcagcttcgccagacagccgcaacgtacatgttgactgcccgaggcggaagtcgatcggcagagcggaagggggacctgcagaggaccttccgacaggttggtcagaccatgcccatggttcctcctctcgacttcactatgaatgccgcatctgttgaatgaatgcagtttctgctcttgcttttggatagaagtgattgcaaatcttatcaaaataatgaaaaaaattacttttcaattccttttcaacccttttgagtctgaggggcagctgtacattaaatgaaaccatatgtatcataatttcatttttccatcaaaagagctttaaaggaaattcccctttttctccatgttttcaatattttttgttccttttgttaaaatcagattaatctcatgaaacatctgaagcatttaagtcaatttaagagctgagaaaatatcatgctgctagttctgaaacgatctgaagtgtgaatcaggtgatcaccaaataggggaacaactgaaaaatgtgaatgaaagaagtatgtacctatactatagtgtcaaatattgtactgtaagctttaaaatgataaattggaaactttcc

SEQ ID NO: 362108 - DNA, 507 bp, Homo Sapiens
aagaaaatgttcctaagtttagatttattacctgtcatttagggcaaaaatccagtgtccccagcacatgatgacccaactttgtctcacagttgcaagtgtgttgaaaataaagttgctttgtgaacttagaggaaatggctgtgttagattggactgatttagttgcaaaataataccttttagggtcacacttgtattattccctagggtttagccttctctatatacccttggccagactcagaaggggattaaaaagctctggtcttggcctctatcttccttgttgctcctcccagcctttccataacttacccatccacagcccatcagcaggaacacatgagaatgtgggactttgtttctttttttcttagttgtatgaattccagattaggccttatggatacttgtctactaatatatctgaagtttgaaaacaatccctgacaatattgtaggtgcaataaatattagtcaaataaacatttaagtgccaaggtg

SEQ ID NO: 362109 - DNA, 543 bp, Homo Sapiens
ccacacacccatcccctagctactgagaataagggctgctaatggctcagaggttcatccctcattgggaaatgcatgacccaaggcacatcccctcctgggggagagccttagtcaatgactggctgatgggggatgcaaaggcccagctctctcacagtaggacagctctggagggccatcccagctccagagttccctgtagaattaactgaggtctccatggccagcacattgtggggcagctactccctctgccccgtcctgcctcccttgcccccttacaagtacatctcccaagaacactcctaattaatgttctgcgtgcagctctctatatcagagtctgtttccagggagcccaacctcagacatctcccaatctcaggctgagatactgggaaacacaaatgatactgactcagtcccctgactcgagggacccaaacagttacacagtgatctgccaatcaacagttgagcctttgaatggtcttcaggttggttgtttccaacctgttccctctcactgggattaaagga

SEQ ID NO: 362110 - DNA, 772 bp, Homo Sapiens
ggatatcaataggtgttttcctctcttattttgtaaatagtattattttagctattaagctggataccttctttcaaattcagccattcaattgtaaagttgggaagaagtttcttgacaagactctgcaattaaatgcttaaaatttggaggggatccttccttgattacatcaagtatgttggtacatgggtttatacaagttcctcttgagaaggcaaaaagaccaccatgtgtgagagctctttgacttggccaataggggcctatcttaatgcacttgtttggacacatttctgatcttatttgtaaaggctgcaaaaggagaggatgaaatgctgtaaaagtaggaaatgaagtggaagctggaagaaaatgtaattggtggtacagctatgggccagatggtggaggggagggtggggacccctgccggcaagcagagtgtcacagctggctttcctcacttgggaaaagggtactgccggtctagcagcctcctctgtactcagccaggacacccagcgcgtgggacctgtttgtgtctgttttgcttccttgggaacggcacagtcactcaccctgccatttgcggaaatgacctggtgcactttgactgttaagcaatgcgttattgctgtagtcaaggttagtgcaagcaaggaaacattcccagtaaggtatttgtttccattttctgtctgtgcttctgtcagaaacttgctaggacatttagtggccaataaaaaagaaattcctaatttcaacctta

SEQ ID NO: 362111 - DNA, 539 bp, Homo Sapiens
  misc_feature (18)..(18): n is a, c, g, or t
  misc_feature (36)..(36): n is a, c, g, or t
  misc_feature (42)..(42): n is a, c, g, or t
  misc_feature (67)..(67): n is a, c, g, or t
cctacctcaaacctcggnaaaaactacccctaaatnctaaanaaactgaacacagcctacttccccntcgtgtctaaactcgttttcctttgtgggcaaagctacccagggcttttggaaagcccctaaccacctacttttcaacaaaaatggtactttcgttgtattaattgcaggaccttaacaggtagtcacaatagaagggttgtttctgtattttaacatttctatttcacagtcaaactcggcattcttcagtcagcttgaggatttagcattgttaatcttggactccataacttatgagtcctagcactgattttgaggaaaaggaggatcagaagttcaagggaccgtgaaagccctcagagtcagcacctagtttgagaccaagcaccctttcgaatccctggatggctgagggggctgaggccggctctgactgggcagctcagcccctcccccagagcccagggtcttgcacacccctccctgtaaccaaggaacactctgaaataaaggtgaatggctaaaaaaaa

SEQ ID NO: 362112 - DNA, 541 bp, Homo Sapiens
cagggcccctggggcgtcccacgggcgtcatcctagccgcgtgagcgccgagcttgggcaccgggggggttggcgtgcttgtacacttgctccgttttctctaaactgccgcgatgaatgtcagtccccagagccggaaccgttcccggttttctctacttggatctgagaactctgtccctccagccctgcgagcgctttgccagggtgacgggcggaaatgtccccgcatccgtgcctgctttcccagatgggaccctccagcagtcccctccactgcccgtgcttcctcctaaccacttccccccagcgaccgcggaaggcgcttcctcccccgcagcgcgagccccaagctcctccagagccccagctctccccgcccccttcccgaccttgtttcatatgacccctcccccgcacatactcaatttcgtcttcccaaggcgcccactctccacatcctgatgaaaaaaagagccggctgctgtcctatgttattgtcatacttctttcctcccgtgccctacccaacttgaccccc

SEQ ID NO: 362113 - DNA, 1924 bp, Homo Sapiens
  misc_feature (324)..(364): n is a, c, g, or t
ggcagtatctcagcgcgtataaggtagcgaggcctgggtggcgaattcggcacgaggcggagccgggccggggcagcgccgtgggcgcctcgtgggccgccgggggcgccctgctgagcgctacccacgtgctgtctgcgccacctcgcgggcgaccccgcggccaaggcccccggcggagcggctcccgggcgccccgaactagcccccaactttgggcgaagtttgcctgcgcctctccccgcccccacgcggcgcgccggggcctgcggacggcagcggcccccggggatgcgccttcccggggtacccctgtgcgcgccnnnnnnnnnnnnnnnnnnnnnnnnnnnnnnnnnnnnnnnnnggaacgggtgcgcccggccgagctgcgggtccgcgtgcggttgccggacggccaggtgaccgaggagagcctgcaggccggacagcgacgcggacagcatcagcctcgagctgcgcaaagcccgacggcaccctcgtctccttcaccgccgacttcaagaaggatgtgaaggtcttccgggccctgatcctgggggagctggagaaggggcagagtcagttccaggccctctgctttgtcacccagctgcagcacaatgagatcatccccagtgaggccatggccaagctccggcagaaaaatccccgggcagtgcggcaggcggaggaggttcggggtctggagcatctgcacatggatgtcgctgtcaacttcagccagggggccctgctgagcccccatctccacaacgtgtgtgccgaggccgtggatgccatctacacccgccaggaggatgtccggttctggctggagcaaggtgtggacagttctgtgttcgaggctctgcccaaggcctcagagcaggcggagctgcctcgctgcaggcaggtgggggaccacgggaagccctgcgtctgccactatggcctgagcctggcctggtacccctgcatgctcaagtactgccacagccgcgaccggcccacgccctacaagtgtggcatccgcagctgccagaagagctacagcttcgacttctacgtgccccagaggcagctgtgtctctgggatgaggatccctacccaggctagggtgggagcaacctggcgggtggctgctctgggcccactgctcttcaccagccactagagggggtggcaacccccacctgaggccttatttccctccctccccactcccctggccctagagcctgggcccctctggccccatctcacatgactgtgaagggggtgtggcatggcagggggtctcatgaaggcacccccattcccaccctgtgccttccttgcgggcagagagggagagaagggctccccagatctacacccctccctcctgcatcttccccgggagtgttcacttgcaagctgccaaaacatgatggcctctggttgttctgttgaactccttgaacgtttagaccctaaaaggagtctatacctggacacccacctccccagacacaactcccttccccatgcacacatctggaaggagctggcccctcagtcccttcctactccccaacaaggggctcactatccccaaagaaggagctgttggggacccacgacgcagcccctgtactggattacagcatattctcatctctggccccgaggctgcctgtggggcgagtggagacctcccatcactgagacagatcacagaccacgagtgcctttcccggacctggacgttgcctccagagcaggcaccagctctttccctctctagacagaaatatttttgtaaggttctggggcagggagggagcatgaagtacgaggaaaacttgaattccagatttttaatgcaaagtatttatcatttctaccagaaataaacgttttaagtttttacttgaaaaaaaa

SEQ ID NO: 362114 - DNA, 1309 bp, Homo Sapiens
  misc_feature (942)..(982): n is a, c, g, or t
ctggggaatgggtaggggatcgcggagcagtctctcgtgctcaaagaggccgcctacgcgctgccgtaagtgcctaggatcgtctgccacggtatataaaggcgtgtgatataatataccatttgacgctaacaagcagtgtatttgcggcagggatataatctacatctcggcgcgcgcatcgctgttgctgcgcgcgtcggagagcgtctcagagaagccagcgtgggtgtggacgggcgtataagtagtaattagcgaccggactccgcgacgggattacagctttaaagaagtcgcgggagcgacgctgtcgatctctcttagagcccttcattgatcagtcaagttgcatcgggcccattaggggaggcgcggtagcaatgtggtagtgtccgtcccaggccgcatggcgtaggtgaggagtaaggaacttattgaccgatggtgaagtccgtgtagtagggtcgtgtccctcgccaatcaccccggtccctgagaagctgttcgggccccgtcgagcgcacgccctgtcttttgacggggtacggtagacgcggaccgctactggcatggcgcggaagtcgttgttagattcgtcggaacaagacagaacctgggccggcggggttcggcatccccgggtactgggcgttcccatgctcgtgggcatgatctccgttgcacccatatctcgcgtgcccagttcacagggactgtgcattcggcgctgcggcgttatccaagtccgccaggatcagggcccggaacacgttcacatccttatggaagtcgacggcgaaggagccgagggtgccgtcgggcttgcgcagctcgaggctgatgctgtccgagtcgctgtcctcctgcaggctctcgtcggtcacctggccgtccggcagccgcacgcgcacccgcagctcggccggcgcacccgttccnnnnnnnnnnnnnnnnnnnnnnnnnnnnnnnnnnnnnnnnnggcgcgccaggggtaccccgggaaggcgcatccccgggggccgctgccgtccgcggccccggcgcgccgcgtgggggcggggagaggcgcaggcaaacttcgcccaaagttgggggctagttcggggcgcccgggagccgctccgccgggggccttggccgcggggtcgcccgcgaggtggcgcggacgcacgtgggtagcgctcagcagggcgcccccggcggccccgaggcggagacggcgctgccccggcccggctccgcggccccgggctccagcgctgcgagcctgtgttttgcatcccaaaattccggccgtaccagcccc

SEQ ID NO: 362115 - DNA, 228 bp, Homo Sapiens
cctttttgcacaaggtgctttcctgatatgttcaacatgccatctttgggtgataatgtatatgccgtgatggggctcaggccccttaggggagtgtctataagaactgcctatttatgctcatttacctcaagactgtcctctctaccctaatctagttgtcatcactccatcttttgtactgctgttgacacttacaaattaaagataaattttgttttatgaaaa

SEQ ID NO: 362116 - DNA, 509 bp, Homo Sapiens
aaaccaacccctccacacacataacccctggaatatatggtaaaaacaagtagaagctgtttcagcgagtgggttttttccccctgcctgcggggggtgcctttctcattttcagcaaggtgatgattatctcatgggaaatgacaaagatctgcttttgtggcagaggactttgtagatttgttattttaagagaggttattcctttttattccttccctcccactaatttgttggcctttaacagcaattttgaaaactgggtcttctggttatgtttttgttttaaaatctttaaattagaggatgctgtgccattgagtactttaagttaatatgaggttctggttcaaggaaaacttacgttggatctgaaccaatgagcagatattttgatatgtgccactcttgcatatacatctcagtcctaactaaagattctagtggcatccaggacctttagggaggcatttaataaacacttaataaataacaaaactacctttctg

SEQ ID NO: 362117 - DNA, 576 bp, Homo Sapiens
tatcactcggtccctccttctctagatagtgtcatatatttgttgaggcaaagactatggactggaaggcagaaagtgggatcctggccccactctgcctttcctattgagcaaccagctctgggctcagtttcctcacctggagggttggaccactcacctccactctaaccccgaaccctcctgccccaggctttcaggccccatcaggcctgccctgagttggccttgtccactccttgaggcagatcctggcactacctcacagctccctggggacggccactccctggctgagggccctcccctcccctctgcctgtccggaacgggaggctgaaatggaaaagctgccttggccctgcttggctgagtcacaaggggcagtgggctcttgggtgctgttccaccctgaccctggctcacccctcttcctaggcctgggggcaggcagttcctaccatgtacccctctcaggctgcctgcctgacaaggtcagcatcatttgctctcctgaatttatgaggtttatttatttttctctttcctactcctattaaagaacctcgtcccagtg

SEQ ID NO: 362118 - DNA, 465 bp, Homo Sapiens
ccccggctttctctgggggtctcctgctctgtggggcctggagcggcccctccgccctcaccacctttctttggagaaggcctcggtctgcacgaggtcgccagggtgctcggggatgcacgcaccattgaggtcgcccagtttattgtccggcaggtcctcgggcttggtgcagagcttcagggcgcgggagatgaacacgtccaggtcgaactgggggctggcgcccgccgtccaccggggccgggcggccggggggcgaggcagacaagcggcgctcggggtcgtcggcgggcgggctggcgtgctctgggccgccctgcgtgctcttgacccactgcgcgatctccaggaagaggctggccggctcgtcctcgcgcgcccccgtgtccgccagcccccgtgccgtggggggcgcgccggccgcctgcttccagtgcgacaggtccaggatgagcttgggct

SEQ ID NO: 362119 - DNA, 875 bp, Homo Sapiens
agcggagtgctagctcgccgcggccgcctccggggaccacctggcttcatgtgtggatttccacggctcttgcccagaggcgggtacactgtgttccaatgtgccacggaactcacgcagtggcactttgtggcttcatgaaggaagaggcaggccacgcaacacttcctccccaagccaaggagaagtatcacttttagaggcagaggagcggaaggcagtgggtgtgaccaaaagtgccattctgttaaagcttatcttccttgccagattttaaaaactattatggaaaatctcaagcattcacaaaagtagagagaaagaaaggactctcagactgttggagcagaactactgagaaaaaccaggcattgtatcttcagttgtcatcaagttcgcaatcagattggaaaagctcaacttgaagctttcttgcctgcagtgaagcagagagatagatattattcacgtaataaaaaacatgggcttcaacctgactttccacctttcctacaaattccgattactgttgctgttgacttagtgcctgacagtggttgggtgggccaccagtaactacttcgtgggtgccattcaagagattcctaaagcaaaggagttcatggctaatttccataagaccctcatttaggggaagggaaaaactctgactaatgaagcatccacgaagaaggtagaacttgacaactgcccttctgtgtctccttacctccagaggccagaacaagctcattttcaaaccagatctcactttggaagaggtaccaggcagaaaaatcccaaagtgtccagaggccggtatcgccctgaggaatgttacagcttacagagggtcgccatcctcgttcccaccc

SEQ ID NO: 362120 - DNA, 937 bp, Homo Sapiens
agtgctagctcgccgcggccgcctccggggaccacctggcttcatgtgtggatttccacggctcttgcccagaggcgggtacactgtgttccaatgtgccacggaactcacgcagtggcactttgtggcttcatgaaggaagaggcaggccacgcaacacttcctccccaagccaaggagaagtatcacttttagaggcagaggagcggaaggcagtgggtgtgaccaaaagtgccatttgttaaagactgttggagcagaactactgagaaaaaccaggcattgtatcttcagttgtcatcaagttcgcaatcagattggaaaagctcaacttgaagctttcttgcctgcagtgaagcagagagatagatattattcacgtaataaaaaacatgggcttcaacctgactttccacctttcctacaaattccgattactgttgctgttgactttgtgcctgacagtggttgggtgggccaccagtaactacttcgtgggtgccattcaagagattcctaaagcaaaggagttcatggctaatttccataagaccctcattttggggaagggaaaaactctgactaatgaagcatccacgaagaaggtagaacttgacaactgcccttctgtgtctccttacctcagaggccagagcaagctcattttcaaaccagatctcactttggaagaggtacaggcagaaaatcccaaagtgtccagaggccggtatcgccctcaggaatgtaaagctttacagagggtcgccatcctcgttccccaccggaacagagagaaacacctgattgtacctgctggaacatcttgcatcccttcctgcagaagcaacagctggattatggtctctaagtcatccacccaagctgaagctaaacacgttaatccagcccaatccttgaatgtggccatctaaaacct

SEQ ID NO: 362121 - DNA, 1419 bp, Homo Sapiens
  misc_feature (43)..(79): n is a, c, g, or t
  misc_feature (1407)..(1407): n is a, c, g, or t
gatcactatagggcgaatcggaggcttatcgcggtggcggcgnnnnnnnnnnnnnnnnnnnnnnnnnnnnnnnnnnnnnatcaggccaaatcggccgagctcgaattcgtcgagagcgggcgggggacggttgctggcccaggtgagcgggcgcgctggtccaggtgagcgggcgcgtccccgcgacggcgctgcctgcccgaggcggttcacgtaaagacagcgagatcctgagggccagccgggaaggaggcgtggatatggagctggctgctgccaagtccggggcccgcgccgctgcctagcgcgtcctggggactctgtggggacgcgccccgcgccgcggctcggggacccgtagagcccggcgctgcgcgcatggccctgctctcgcgccccgcgctcaccctcctgctcctcctcatggccgctgttgtcaggtgccaggagcaggcccagaccaccgactggagagccaccctgaagaccatccggaacggcgttcataagatagacacgtacctgaacgccgccttggacctcctgggaggcgaggacggtctctgccagtataaatgcagtgacggatctaagcctttcccacgttatggttataaaccctccccaccgaatggatgtggctctccactgtttggtgttcatcttaacattggtatcccttccctgacaaagtgttgcaaccaacacgacaggtgctatgagacctgtggcaaaagcaagaatgactgtgatgaagaattccagtattgcctctccaagatctgccgagatgtaccagaaaacactaggactaactcagcatgtttcaggcatgtgaaacaacagtggaagctctggtttgacagtgttatacatttaggttgtaaaccatatctggacagccaacgagccgcatgcaggtgtcattatgaagaaaaaaatgatctttaaaggagatgccgacagctagtgacagatgaagatggaagaacatacctttgacaaataactaatgtttttacaacataaaactgtcttatttttgtgaaaggattattttgagaccttaaaataatttatatcttgatgttaaaaccctcaaagcaaaaaaagtgagggagatagtgaggggagggcacgcttgtcttctcaggtatcttccccagcattgctcccttacttagtatgccaaatgtcttgaccaatatcaaaaacaagtgcttgtttagcggagaattttgaaaagaggaatatataactcaattttcacaaccacatttaccaaaaaaagagatcaaatataaaattcatcataatgtctgttcaacattatcttatttggaaaatggggaaattatcacttacaagtatttgtttactatgaaattttaaatacacatttatgcnctagaaaaaaaa

SEQ ID NO: 362122 - DNA, 450 bp, Homo Sapiens
taatcagcattttgaaccaggttagctttttattttgtacttaaaattctggtactgacacttcacaggctaagtataaaatgaagttttgtgtgcacaattcaagtggactgtaaactgttggtatattcagtgatgcagttctgaacttgtatatggcatgatgtatttttatcttacagaataaatcaattgtatatatttttctcttgataaatagctgtatgaaatttgtttcctgaatatttttcttctcttgtacaatatcctgacatcctaccagtatttgtcctaccgggtttttgttgttttctgttctgtataatagtatctaatgttggcaaaaattgaattttttgaagtatacagagtgttatgggttttggaatttgtggacacagatttagaagatcaccatttacaaataaaatattttacatctaaaaaaaa

SEQ ID NO: 362123 - DNA, 419 bp, Homo Sapiens
gtttgtctgtgtgtgttgcgggggatgggcacctgcatgaatgtggtagagaaaatggctctgctcagagggaagatacgcatagcaaggcagggaccagaggaatcacaggcgcctggagagcagccgggcaccgcctccagggacctgccggcttccctcagtcctccaggggcccagcactcttcctttaggccctgtgagcgtcccttgtcaggatacattctctcattttgctgaagctgatttgattgggtgtctgtttctcgcagccaaaagagctctgaatgaggaaagtgcttctgtgctaactccccgcgtctcctgaatttcagtcattcatgtacccgcctcgaaatttttgcaatatctgtgtaccaactgtccatttacttaataaagaagttttctttaaatta

SEQ ID NO: 362124 - DNA, 631 bp, Homo Sapiens
  misc_feature (64)..(87): n is a, c, g, or t
tacaagttgcttgtttccattcaacaatatattaaccatgtctctacatacagaagtaactcannnnnnnnnnnnnnnnnnnnnnnnaatggcctgcgacacagccccaggaaatcctgagaacatgtgccccagtaactcctttttcttaactgctgtgtagtttgtttagctattccttactgttggagatttagggtgtttccagttttttgctgttacaaacagtgttgtaatgaatagctctgtaatgtcaccctatgcataagtatggtgactgtttctctataataaatggtgagaagtggaactctgtgtcaaaaaacactaagtttataagtataacacatactattaaattggccttgctagttttgtggcatagttgttatagttaataacagtaatatatgtgaccatcagtttcacatattagtgtcctttaaaactctaggacatctcattgacttaaaactcatgtagtatatagtagaagaacactagattggaaaccgaaagataaaagttcaagtcctggttctgtctctaactactaacttgatcttaggtaatcctttcaatatctaggccccagtttctatacctataaaattagattaaagtgatattt

SEQ ID NO: 362125 - DNA, 324 bp, Homo Sapiens
accgctctcggcccacttcagatatttattttgaggagggagcgcatttagatacagacggcaaatttatttaaatgtctcaatacatttaaatgtagttacctaaatatatctaatatatttaaatgcagagagcaaatttgcgtttacaaatctgacatggaattcaactgtgctagccaagattcggtgtagcttaccagccagaaatcacataccctaacaggtagaaacgtattgcatttttaaaaactgcgcagctatgcaaataaggatgtgtctggacgctctaccgtccccaaaataaccttaattttttacaaa

SEQ ID NO: 362126 - DNA, 510 bp, Homo Sapiens
gataggtcctccacccacccaacctctctgcctggccagggtcctggccctgccacttgtgtggagaggtgtccttctagaccacatcagccccaaggctgggagcagtcgctccagggccgcagcagttcactcccacacatagaacccaggtcactgctggggcgattgaacaggttgcctggcttttctctgctgtcagtttggtgtggaggcctatgttctgccccatacaccccacaggccctgcttatgggaaggaacacaggcctccagcccagaggactgtgccgccctgttcttggccgtccacgtttcctctccctctagcaccagcaatacatttccctggcatggacagaaaagacagagaggacttgtacaaaggctttgtaaaaccagaggctagcttctatctttgtctactgttatttcagctcagggcgggtaataaacatcattggaactagctattaggaaagaaaaaaaacttggttttttttacaacaa

SEQ ID NO: 362127 - DNA, 1122 bp, Homo Sapiens; identical to SEQ ID NO: 249885

SEQ ID NO: 362128 - DNA, 216 bp, Homo Sapiens
  misc_feature (101)..(153): n is a, c, g, or t
atagccttatgatttagaggttacttgttcattcacctagacctcaaattgcattttacagctacttgggaggctgaagtgagtggatcccctgagcccannnnnnnnnnnnnnnnnnnnnnnnnnnnnnnnnnnnnnnnnnnnnnnnnnnnnagacagagtgagaccctgtttcagaaaaaataaataaataaaaccaccagcaccacaaacaac

SEQ ID NO: 362129 - DNA, 777 bp, Homo Sapiens
gcagtatctcagcggtaaggtagcgaggctgggtggcgaattcggcacgaggggcagcccagacctgcctgccttcctgacttctgttccagagcaaaggtcattcagccgcttgaatcagccttttccccccacccggtccccaactttgtttacccgataaggaaggtcagcattcaaagtcaagaagcgccatttatcttcccgtgcgctctacaaatagttccgtgagaaagatggccgggaactcgatcctgctggctgctgtctctattctctcggcctgtcagcaaagttattttgctttgcaagttggaaaggcaagattaaaatacaaagttacgcccccagcagtcactgggtcaccagagtttgagagagtatttcgggcacaacaaaactgtgtggagttttatcctatattcataattacattgtggatggctgggtggtatttcaaccaagtttttgctacttgtctgggtctggtgtacatatatggccgtcacctatacttctggggatattcagaagctgctaaaaaacggatcaccggtttccgactgagtctggggattttggccttgttgaccctcctaggtgccctgggaattgcaaacagctttctggatgaatatctggacctcaatattgccaagaaactgaggcggcaattctaactttttctcttccctttaatgcttgcagaagctgttcccaccatgaaggtaatatggtatcatttgttaaataaaaataaagtctttattctgttaa

SEQ ID NO: 362130 - DNA, 693 bp, Homo Sapiens
gacggccagtaactataacggtcctaaggtagcgaggcctgggtggcgggcagccccagacctgcctgccttcctgacttctgttccagagcaaaggtcattcagccgcttgaatcagccttttccccccacccggtccccaactttgtttacccgataaggaaggtcagcattcaaagtcaagaagcgccatttatcttcccgtgcgctctacaaatagttccgtgagaaagatggccgggaactcgatcctgctggctgctgtctctattctctcggcctgtcagcaaagttattttgctttgcaagttggaaaggcaagattaaaatacaaagttacgcccccagcagtcactgggtcaccagagtttgagagagtatttcgggcacatttttgctacttgtctgggtctggtgtacatatatggccgtcacctatacttctggggatattcagaagctgctaaaaaacggatcaccggtttccgactgagtctggggattttggccttgttgaccctcctaggtgccctgggaattgcaaacagctttctggatgaatatctggacctcaatattgccaagaaactgaggcggcaattctaactttttctcttccctttaatgcttgcagaagctgttcccaccatgaaggtaatatggtatcatttgttaaataaaaataaagtcttt

SEQ ID NO: 362131 - DNA, 507 bp, Homo Sapiens
gctgaaatgcggatgggatgttacatagttgacagatccttattcaaacagagcaggacaggtggagttgatggccattgagttgatggcagttgccgctcagttgatggcagttaatgtccctcctaccccaccccttcagtggccagttcctgaagccttcaaggcttgggaggtctgggaaaagagagtccttctagggacacaagcctcagggtccatccctttcctctgtctccacataggaccagaagttttaaatctacttaagtcagtaaggccaggggccccaatagtcaaacctcagttcctcctcagctcacggctgatgtagggaaaacaactcaggtgtctagtctaatgggacagtagatttgggggtagagagtgatcctggattgtgttccccctcatcatgtctcctgctacctcttgctttcttgtctggttgatcactcaggtcacatctgggattggagatggtgggctaggtcaaggccagtcatt

SEQ ID NO: 362132 - DNA, 691 bp, Homo Sapiens
aattaccatgcttcacaatgttaagttatatggggagcaacagcaaacaggtgctaaattggtttgggatatagtataagccagtgtctgtgtttggaaagaatagaaccacagttggtagtgccactgttgttttgggggggcttttttccttttcggaaatcttaaaccttaagatactaaggacgttgttttggttgtactttggaattcttagtcacaaaatatattttgtttacaaaaatttctgtaaaacaggttataacagtgtttaaagtctcagtttcttgcttggggaacttgtgtccctaatgtgtttagattgctagattgctaaggagctgatactttgacagtgtttttagacctgtgttactaaaaaaaagatgaatgtcctgaaaagggtgttgggagggtggttcaacaaagaaacaaagatgttatggtgtttagatttatggttgttaaaaatgtcatctcaagtcaagtcactggtctgtttgcatttgatacatttttgtactaactagcattgtaaaattatttcatgattagaaattacctgtggatatttgtataaaagtgtgaaataaattttttataaaagtgttcattgtttcgtaacacagcattgtatatgtgaagcaaactctaaaattataaatgacaacctgaattatctatttcatca

SEQ ID NO: 362133 - DNA, 476 bp, Homo Sapiens
  misc_feature (35)..(35): n is a, c, g, or t
  misc_feature (48)..(48): n is a, c, g, or t
  misc_feature (178)..(178): n is a, c, g, or t
aaaaaatcccccgaaaaaacggggtaataaacagngttaaaaagcccncagtcccctgccctggggaaacctgtggcccccccaagtgtttaagatggcccaagattgcccaagaagccggataccttgaccagtgtttttaagacccgtgttacccaaaaaaaagatgaatgtcccngaaaagggtgttgggagggtggttccaacaaagaaacaaagatgttatggtgtttagatttatggttgttaaaaatgtccatcctcaagtccaagtcactggtcctgtttgcatttgatacatttttgtactaactagcattgtaaaattatttcatgattagaaattacctgtggatatttgtataaaagtgtgaaataaattttttataaaagtgttcattgtttcgtaacacagcattgtatatgtgaagcaaactctaaaattataaatgacaacctgaattatctatttcatc

SEQ ID NO: 362134 - DNA, 671 bp, Homo Sapiens
  misc_feature (237)..(284): n is a, c, g, or t
  misc_feature (362)..(413): n is a, c, g, or t
caaagtgctgggattacaggcataaaccacaactcaataaaaaagtttttaaaaatttacaaagctcatatttgatccagctaggattttaccctgtacatttgtatttcttgtaggctggcgcacagatatcttaaatggctactaattgctgctgtgtatgaaaacaaatggctatcaaggccgggtgcagtggcttacagatctggtctgaatctcaagtccagaccagtccannnnnnnnnnnnnnnnnnnnnnnnnnnnnnnnnnnnnnnnnnnnnnnnaactcggcaaggcatggtggcatgcacctgttgtcccagctactcaggggctgaggcaggaggatggcatgagcccannnnnnnnnnnnnnnnnnnnnnnnnnnnnnnnnnnnnnnnnnnnnnnnnnnntgacagagtgagacccccatctccaaaagaaaaggctatcaatacaaaagtttatctaaattactgtacagctatacaatggaatactctacaaaatggagagatccataagataaagcaaatgaataaagcaaaatgcatgtgttgacagctgttgtgatacctcagttcttgtcttcttggtttaaaagaatttaaatgagacagcaaaggagatgcagcataatttattgcaaaagaaaaggagtattttgaaag

SEQ ID NO: 362135 - DNA, 1460 bp, Homo Sapiens
  misc_feature (712)..(712): n is a, c, g, or t
ctgtgctcggccttagtggtgtcggggtctagtggacagagaagactcttggccaggcagatggcttctcggtggcagaacatggggacctccgtgcgccggagatctctccagcaccaggagcagctggaggacagcaaggagctgcagcctgtggtcagccatcaggagacctctgtaggggccctggggtccctgtgcagacagttccaaaggaggctgcccctgagagccgtcaacctcaacctccgcgcagggccctcctggaaacgcctggaaaccccagagccaggtcagcagggcctccaggctgcagctcgctcagctaagagtgctttgggtgccgtgtcccagagaatccaggagtcctgccaaagtggcaccaagtggctggtggagacccaggtgaaggccaggaggcggaagagaggagcacagaagggcagtggatccccaactcacagcctgagccagaagagcacccggctgtctggagccgcccctgcccactcagccgcagacccctgggagaaggagcatcaccgcctctctgtccggatgggctcacatgcccacccattacggcgatcaaggcgggaggctgccttccggagcccctactcctcaacagagcccctctgctctcccagcgagtctgacagtgacctagagcctgtggggggcgggaattcagcatctccagaagctgtcncaagagctagatgaagccattatggccggaaagagggaaacaagccctgtctgaacgccaaggcttcatactcaaggatgtctatgcttccccgtgagcttcctggaaaaaacccccgggaagtcgtcagtaccccctgggccactgctaacaagccacctaacaaggggcccagagccccctgctccagccacatctggacccatcagtgactgcctgccatagcctgagagtgtcttggggagaccttgcagagggggagaattgttccttctgctttcctaggggactcttgagcttagaaactcatcgtacacttgaccttgagccttctatttgcctcatctataacatgaagtgctagcatcagatatttgagagctcttagctctgtacccgggtgcctggtttttggggagtcatccgcagagtcactcacccactgtgtttctggtgccaaggctcttgagggccccactctcatccctcctttccctaccagggactcggaggaaggcataggagatatttccaggcttacgaccctgggctcacgggtacctatttatatgctcagtgcagagcactgtggatgtgccaggaggggtagccctgttcaagagcaatttctgccctttgtaaattatttaagaaacctgctttgtcattttattagaaagaaaccagcatgtgactttcctagataacactgctttctcataataaagactatttgcatttgaaaaaa

SEQ ID NO: 362136 - DNA, 993 bp, Homo Sapiens
taagtttggtacccacgcggtgtagtaagaggcagtaactatacggttctaaggtgcgaggctgggtggcgaattcggcacgaggctcggccttagtggtgtcggggtctagtggacagagaagactcttggccaggcagatggcttctcggtggcagaacatggggacctccgtgcgccggagatctctccagcaccaggagcagctggaggacagcaaggagctgcagcctgtggtcagccatcaggagacctctgtaggggccctggggtccctgtgcagacagttccaaaggaggctgcccctgagagccgtcaacctcaacctccgcgcagggccctcctggaaacgcctggaaaccccagagccaggtcagcagggcctccaggctgcagctcgctcagctaagagtgctttgggtgccgtgtcccagagaatccaggagtcctgccaaagtggcaccaagtggctggtggagacccaggtgaaggccaggaggcggaagagaggagcacagaagggcagtggatccccaactcacagcctgagccagaagagcacccggctgtctggagccgcccctgcccactcagccgcagacccctgggagaaggagcatcaccgcctctctgtccggatgggctcacatgcccacccattacggcgatcaaggcgggaggctgccttccggagcccctactcctcaacagagcccctctgctctcccagcgagtctgacagtgacctagagcctgtgggggcgggaattcagcatctccagaagctgtcccaagagctagatgaagccattatggcggaagagagtggtgacatcgtctctctcattcatgactgaggaagtgcctgcaggaaacaagccctgtctgaccgccaaggcttcatactcaaaggatgtctatgctttcccccgtgaagcttcctggaaaaaaacccccgggaagtcgtcaagtaccccctggggcccacttgct

SEQ ID NO: 362137 - DNA, 1046 bp, Homo Sapiens
  misc_feature (807)..(807): n is a, c, g, or t
  misc_feature (1014)..(1014): n is a, c, g, or t
ggcctgggtggcgaattcggcacgagggaggagcagctgtgctgcggctgtgctcggccttagtggtgtcggggtctagtggacagagaagactcttggccaggcagatggcttctcggtggcagaacatggggacctccgtgcgccggagatctctccagcaccaggagcagctggaggacagcaaggagctgcagcctgtggtcagccatcaggagacctctgtaggggccctggggtccctgtgcagacagttccaaaggaggctgcccctgagagccgtcaacctcaacctccgcgcagggccctcctggaaacgcctggaaaccccagagccaggtcagcagggcctccaggctgcagctcgctcagctaagagtgctttgggtgccgtgtcccagagaatccaggagtcctgccaaagtggcaccaagtggctggtggagacccaggtgaaggccaggaggcggaagagaggagcacagaagggcagtggatccccaactcacagcctgagccagaagagcacccggctgtctggagccgcccctgcccactcagccgcagacccctgggagaaggagcatcaccgcctctctgtccggatgggctcacatgcccacccattacggcgatcaaggcgggaggctgccttccggagcccctactcctcaacagagcccctctgctctcccagcgagtctgacagtgacctagagcctgtggggggcgggaattcagcatctccagaagctgtcccaagagctagatgaagccattatggcggaaagagagtgggtgacatcngtctctctcatttcatggactgaagaaagtgcctgcaagaaaacaagcccctggtctgaacgcccaaggctttcttaactcaagggatggttctatgcttcccccgttgagccttcctgggaaaaaaccccccgggggagtcggtcaagtaaccccttggggccacctggctaaacaaggcaacctttaaccaaggggggcccaaanaagcccccccttggcttcccagcccacaatta

SEQ ID NO: 362138 - DNA, 653 bp, Homo Sapiens
agcggattgtattgcacacctctaaaaaaaacactgcctctgatttatcaatataaaaaagatcctctgagaggaggagggcacttttgtgtgatggcaaacttcacttctaggggaagaaccgaggttgggatcgactcctctggccatgcttgccgctacctgtaataagataggcagccccagcccgtctccctcctccctctcggacagctcttcttccttcggcaaaggcttccacccctggaaacgctcctcgtcctcttcttccgccagctgcaacgtagtgggttccagtctctcaagcttcggcgtgtccggggcctccaggaacggcggctcgtcctcggcggctgcggcggccgcggcagcagccgcggctgccgcggccctggatgtccgactcgttcagctgcggcggctcgcctggctccagcgccttctccctcacctccagcggcggctcctccgcgcactcgcaggacggctcccaccagccggtgtgcatcgtccaaggtgcacacctctgtggacgggctgcagggcatctacccgcgggtggcgcatggcgcacccgtacgagtccgtggtttcaagccctcgcacccgggcctgggttgctgcgggcgaggtgggctcggccggcgccttcc

SEQ ID NO: 362139 - DNA, 314 bp, Homo Sapiens
acctaaaattatctcactccattttatttaaaatttttttatccagttagtaaaaggaagatgtgtctctctttatacatatgtacaagttcagttataaaaatagcacattcaaagagaaaaggcttggcatttttctgattccctctaaatagcatctgtacacaggaatctgggtttgagcaggggaatcttaatgatttaaattaaatgattcccctataccccctactccaaaaaagttttaaaaatcaatctatcgaaactcaattccgcgattttcaggggggcaaatcaaaggcttgcccgcccgg

SEQ ID NO: 362140 - DNA, 395 bp, Homo Sapiens
gcggccgcctacacccggacctgcagtccaacctcctgcaggtggacagtgagttcacagaggaagagattgagttcctggaagccaggggtcaccacgtggagaaagtagatgtcttatcctgggtccatggcagccgaaggaccaacaacttcatcatcgctgttaaggaccctcggagcccagatgcagctggagccaccatcctgtagagcagcggggtggggcggggtctctgctcccccactttgcatgttcccagagtccctccttctcccaggtttggtctcagggggaccccagggatgccccagatcaggggccagaggggatgcttagcaaacccaatcccagagtaactggaaaattctccatcaggaggcctgtggtggtgg

SEQ ID NO: 362141 - DNA, 634 bp, Homo Sapiens
  misc_feature (32)..(32): n is a, c, g, or t
gctcaggcgtaggggaccagggcagggctctntccaggactccttccttcttccttctcccgcagccggtgagggtttggaaaccaggattggggtctgcccaccaccctgcttcctgcttcgttcagcctccctccccacctcaccccaggaccccctgggaggcccccaagcccagctcccctatctaggtgccttttctccagcaaggagtcagcatgcccccctcagggtcccaagctccctcactgccaccggagactgtgtggcccccacgtctccccatctacctctacccttaacctgtttctgagccacggagacagggaggaaggagcgcgacagtgccacctgttgggcatcataaatgcccctgcagcccatgggggaggagatggggaagtggagccaccctgcctctgcagggcaaggcagggcctgccccagtggggcttgggaccatctcgaaccaccagcgtggagaagcagaagcaaaagcactcgccaggctgcagcctcaggcactggcaggggctggtgcggccccactcccctcccccgctcccatttgtgcccatcctgttgtgaccaaccccgttttaaacatgtttcaatagatccagattctctaaaa

SEQ ID NO: 362142 - DNA, 576 bp, Homo Sapiens
atttccatatactatattgtggaaaagactgaagaatacaattctgagaaatacaaaaaaattttaatggtatactcatgttgaaagataaatgttgctaagtcctggtatgatggtgtgagcttccttggggaagtacttcttgagttatgtaactaacaggatgttttactacagatctggatggctattcagataacatggcaaaaaatgatagcagaagatcattaaaaacttaaaatatattttattagaaaacatttatctatgaatgaatatttccttgatgctggtctctgcacacatatgcttggttacttgcatgcattcattggttgttcaataagtgagatgattacagataacttaatactgtattttccttatatggaaaaccgttatagacccaataacaactaaacctttcaaaagaaaatattttctattatgaatgttgattttcataccaaagaagatggagagtctaaaatttggatatgattcttatgtttttttaatagaaaaccttcttcaagtttattttcctaaataaacatcataattgtgaattttaaa

SEQ ID NO: 362143 - DNA, 483 bp, Homo Sapiens
ggctacgggggtacacggtgcaccctgcaacttatacctgagcccagtacaacaaaggtgacgggtgtgtaggtacacaacccagagatggagcactgcaagatcaagcaaacctcaagccccacctgggaatttgctggaaatgcaggctcaagcccctccccacaccctggtgaatgagagagccccagcctgacccaagcccagggcgactcccataccctgaagcctggggcatgctgggcagcaccggtgcccaaatctggctggtggacagaagcacctggagagttggagagctttttaaaaagacatctctcagcacttccctctctgcagattctgactcagtaagtgaggggtgaggcacagtcatttttctctattctgaagctctcccactgttttcaatgtttaaccaactggggacccctgctctttaagtatattacaggtaataaagatattgtttgtatgctttta

SEQ ID NO: 362144 - DNA, 539 bp, Homo Sapiens
  misc_feature (62)..(121): n is a, c, g, or t
  misc_feature (189)..(205): n is a, c, g, or t
agcccccgcgcccagccaaaaaaattgttttaaattagctgggtgtggtggtgcctgcctannnnnnnnnnnnnnnnnnnnnnnnnnnnnnnnnnnnnnnnnnnnnnnnnnnnnnnnnnnngattgctatagctctgattgtgccactgcacccctgcatgggcaatagagtgagaccctgtctctttnnnnnnnnnnnnnnnnngtatcatattgtatgtgttctgtagaacttgctcccacactttaacattttgctttaaagatttgttcgtgtacttagatcattccttttcactgctttatgagctgaatcatttctgctcttctttccatccatacccattggtctccaaagtatccaggcctccccaaaagttcctgcaggagacctcagttccactggctttcaggtcattattgttccagcactacttctccatttctggttccagcccttctctcccacattctcaagcttctagagggtcataagagaggaaaaacgccaaatgcctttgataaaatgttgcctttca

SEQ ID NO: 362145 - DNA, 541 bp, Homo Sapiens
gttcagagagattttcatcgggtgcattctctctgcttcgtgtgtgacaagttatcttggctgctgagaaagagtgccctgccccacaccggcagacctttccttcacctcatcagtatgattcagtttctcttatcaattggactctcccaggttccacagaacagtaatattttttgaacaataggtacaatagaaggtcttctgtcatttaacctggtaaaggcagggctggagggggaaaataaatcattaagcctttgagtaacggcagaatatatggctgtagatccatttttaatggttcatttcctttatggtcatataactgcacagctgaagatgaaaggggaaaataaatgaaaattttacttttcgatgccaatgatacattgcactaaactgatggaagaagttatccaaagtactgtataacatcttgtttattatttaatgttttctaaaataaaaaatgttagtggttttccaaatggcctaataaaaacaattatttgtaaataaaaacactgttagtaataaa

SEQ ID NO: 362146 - DNA, 888 bp, Homo Sapiens
tccccggggcgttcccccctgccccatgggccttgtgcccttggcatggagggcgggcggtgggcactgaagagaatagcttttcaagggggcccaacacttttgcacttcgggctggctgtgagtttctgctttgtaggttgtggtcacatttgcaggctgcgggcagtggcaccgacttgggcctccctttctatgtggcatatttatttatttaaacaccccagggagttacgtggtaacaaggttgtccataaagaggttgcttctatatactagaggccccagatggccaggccttgggctacgtctggcttgcatggtctcccaagggaatcagccccatcaacaaagttcaaatcggggcagaggctgcacttgtgcccccagatgcttctgaggagccagactagggctggcattgctgtagagtgacggctgctgcccagagcgtgtcccagacatcacagcggggctcagcagttcccacagcctctgcctgccttggctaagcatgagttaagcagcaaaacgctcctccatgtctggatggggccggcaggtcctgtgtcccctgcacctggaggagagcaggctagaggcacagcggccacatggtgctggctctgaacgttggttggtggctggaaaacagccctgcttctgagggccgctcagttctgcacacgaaaccacctcctgagggctcagctctgcccccgccctgggctgcagcctctgcacgcaagcaccaggcatcctttgtgttgtcaactccgtgtaaccagtaactacagccatttacaattgactccgtttccttttgtaggtttccctgtctgtctgtgttagtagaaaaataaaatcctatgaaatctgagtacgttg

SEQ ID NO: 362147 - DNA, 487 bp, Homo Sapiens
actggcattgctgtaaaatgaaggctgctgccccaaaaacgtgtccccaaaacatcaacaacgggggctcaaacagttccccacaaccctctgccctgcccttggcctaaagcatgaagttaaagccagcaaaaacgctccctcccatgtctggatggggccggcaggtcctgtgtcccctgcaccctggaggagagcaggctagaggcacagcggccacatggtgctggctctgaacgttggttggtggctggaaaacagccctgcttctgagggccgcctcagttctgcacacgaaaccacctcctgagggctcagctctgcccacgccctgggctgcagcctctgcacgcaagcaccaggcatcctttgtgttgtcaactccgtgtaaccagtaactacagccatttacaattgactccgtttccttttgtaggtttccctgtctgtctgtgttagtagaaaaataaaatcctatgaaattctg

SEQ ID NO: 362148 - DNA, 624 bp, Homo Sapiens
  misc_feature (100)..(100): n is a, c, g, or t
attcaacttcattcagatctcccatggtggcttattctaatccggcagaaagcattggtgggcaaactccaggagaccatgaggtctgtaaagttaccanaattgctgtgctctcactttctgaaatggaacctcaggatcttgagctagagctctgtaagaagcatcattttggtattaacaaaccagagaagatcataccatctcctgatgactcaaagtttctactgaagacctttacgcatattaaatccaatgtgtctgctcctaataaaaagaaagttaaggaaagtaaagagaaggagaagttggagaggagattacttgaagagttgctgaagatgttcatggactcagaatccttttattatagcttgacctatgacctgaccaattccgtgcagaggcagagcactggggagagggacggtcggcccctctggcagaaggtaccactcacagctcgtagagcagggtttgcccttgggaagaagtgatggcctgttttggcttttgtaggaaaactgaaataatgtgtttctgaactattgttcctgcaccttttctaggttgatgaccgatttttttggaataaatacatgatacaagatcttactgaaaaaa

SEQ ID NO: 362149 - DNA, 859 bp, Homo Sapiens
ctgaccaattccgtgcagaggcagagcactggggagagggacggtcggcccctctggcagaaggttgatgaccgattttttgggaataaatacatgatacaagatcttactgagattggtactccagatgtggacttttggattatccccatgatccaaggttttgtgcagattgaagaacttgtggttaattataccgaatcatctgatgatgagaaaagcagcccagagaccccccctcaggagtccacctgtgtagatgatattcacccacgatttctagtggctctcatttcacgccgaagtaggcacagagcaggaatgcgctataaacgaagaggagtggataaaaatggaaatgttgccaattatgtggagactgagcagttgattcatgttcataatcataccctgtcatttgttcaaacacgaggctctgtgcctgtcttttggagccaggttgggtatcgatataacccaagaccgcggctggacagaagtgaaaaggaaactgttgcctatttctgtgcccatttcgaagaacaactgaacatttacaaaaaacaggttattattaacttggtagaccaggcaggaagagagaagattatcggcgatgcttacctgaagcaagtgttgcttttcaacaactcacacctcacttacgtttcgtttgacttccatgagcactgccgaggaatgaagttgagaatgttcagacactaacagaatgccatttatgaccttattcttggatatgacagtggcgtagggttgatcaagctggggtaatatgtaagcaggcaacggatctacgtgtcaatcggatggactgcctggatcgccaacaaggtgtcca

SEQ ID NO: 362150 - DNA, 491 bp, Homo Sapiens
cttcacaggagtttcctccccataaatttcttgtgtatctagtcctgtcttggcatcagcttcttggaggacttgaactgatatgcactcaacaggcaagtaaatcctgctaattcacaaaatccttgattatcagtactaaagaaagacactgggggtgaagatgtcatcttctaaaagacttactggggataatctaccaaaaaatgtaggtggcaaatgccatctttgaatcacataatggaatcaatgaaggaggttattgatctggttcagaggtgacttaagaatgtcccaaaccctttaaatatgtgtgtattgagtatgtgtgcaattatccttgaagaacatttatacctttcatctcattaatctacaaaattatcagcagtggcagctaattgtcagttaactagagaagttgacaagtcacattaacatgaaatctgtgtttcatgtaaataaaaaaaataaaatgacttattttatgc

SEQ ID NO: 362151 - DNA, 380 bp, Homo Sapiens
gcgggtccccacggtttattctagaagcctatagaagagccacattgagtatttccaaaatcacaaaatgcacaacattcatgtttttaatatgcaacatggaatattatatacagattaaaaccacgacagcaaaaacactcacacggtaccagtttcatatcaaaacaaaacacacaagtgctttttcaatattaaaacgactgtgataaaaacatattaatattttgaaccatgtttacaatagagcaaaattcatattttactaaataacaaatatttaacagcaaaaactttatactaaatatctattttgaattataacaaaaatagtacttataatagtttataaagacagacacaaaattgtaacatttatg

SEQ ID NO: 362152 - DNA, 792 bp, Homo Sapiens
aagcgctggtacggtccggaataccgggatatcgtcgacccacgcgtccgggaccggctgctttccagtggtagcccttttgccatggaggtctgggagagagagcagagggcggcagggctaagttggtgatcattgggttcttcaggaccttctatatccctcctcggtaaccccccagcccaaccccttggaatctttcctccaggcttcctgagagccctgggggtgggaggctgtgggaggctgtacatctgaaattcacttcagtccaagtcatacctaggaagctgtctgggcagctgctcgagggaggccctggctctgatcccaggctggatggagtggctggaaggaatggttccaaacaacaccaccgagatctccctcaggctggccaggttttgcagctggaattctcctcttggtcccagggcggggcagggaattctaagtgtccaccccagggaggcaaggggctgctttccactgtgggtacctggtgatcagggcaagctgtggagggccaggggtggggctgagactgggctgacatctagaatcacctgccacctggagcctcagtaaaatgcctggggtccctgctgcctctcaatctccagagccatgtccatggggaggtgggctctgaagggcgaaggtgggagagcagggcccctgaggcctgggtatccaaggaggggcacgtgcacctgattctccttggggcccagaggaagctgatgtcatggctggacaaagtcacggagtaaagccagcaaagccacccaa

SEQ ID NO: 362153 - DNA, 548 bp, Homo Sapiens
gatctgccataaattcttcctaaataatttgtttactaactctttaggccactgtgctttgcggtccattagtaaacttgtgttgctaagtgctaaacagaatactgctattttgagagagtcaagactctttcttaagggccaagaaagcaacttgagccttgggctaatctggctgagtagtcagttataaaagcataattgctttatattttggatcattttttactgggggcggacttggggggggttgcatacaaagataacatatatatccaactttctgaaatgaaatgtttttagattactttttcaactgtaaataatgtacatttaatgtcacaagaaaaaaatgtcttctgcaaattttctagtataacagaaatttttgtagatgaaaaaaatcattatgtttagaggtctaatgctatgttttcatattacagagtgaatttgtatttaaacaaaaatttaaattttggaatcctctaaacatttttgtatctttaattggtttattattaaataaatcatataaaaattcaaaa

SEQ ID NO: 362154 - DNA, 583 bp, Homo Sapiens
ttccaaacataactcagccagacccctctggtctctaaatagtatctcttctctttgtctttttctgtttcaggcctccagttaccaactcctgtctggtttcatgtccttttctatctggcagtgggaataatgtttttagtgaacactgttctctgggtgacaatacgtaaagaactgaaaagaaagaaaaagtggaatttagaaatctctttggattctggtcatgagaagaaggtaatttccagccttcaagaagacagacatttagaagaagagctgaaatgtcaggaacaaaaagaagaacagctgcaggaaggggtgcaccggaaggagccccagggggccacgtagcagcggctcagttggtggccatcgatctggaccgtcccctgcccacttgctccccatgagcactgcgtacaaacatccaaaagttcaacaacaccagaactgtgtgtctcatggtatataactcttaaagcaaataaatgaactgacttcaactgggatacatttggaaatttggcatcaaagatgacttgaaatgaggcctactctaaagaattcttgaaaaacttac

SEQ ID NO: 362155 - DNA, 1340 bp, Homo Sapiens
cggctggtacggccggaattagggatttcactactcccaccagcttggagacaacatgtggttcttgacaactctgctcctttgggttccagttgatgggcaagtggacaccacaaaggcagtgatcactttgcagcctccatgggtcagcgtgttccaagaggaaaccgtaaccttgcactgtgaggtgctccatctgcctgggagcagctccacacagtggtttctcaatggcacagccactcagacctcgacccccagctacagaatcacctctgccagtgtcaatgacagtggtgaatacaggtgccagagaggtctctcagggcgaagtgaccccatacagctggaaatccacagaggctggctactactgcaggtctccagcagagtcttcatggaaggagaacctctggccttgaggtgtcatgcgtggaaggataagctggtgtacaatgtgctttactatcgaaatggcaaagcctttaagtttttccactggaattctaacctcaccattctgaaaaccaacataagtcacaatggcacctaccattgctcaggcatgggaaagcatcgctacacatcagcaggaatatcacaatacactgtgaaagagctatttccagctccagtgctgaatgcatctgtgacatccccactcctggaggggaatctggtcaccctgagctgtgaaacaaagttgctcttgcagaggcctggtttgtagctttacttctccttctacatgggcagcaagaccctgcgaggcaggaacacatcctctgaataccaaatactaactgctagaagagaagactctgggttatactggtgcgaggctgccacagaggatggaaatgtccttaagcgcagccctgagttggagcttcaagtgcttggcctccagttaccaactcctgtctggtttcatgtccttttctatctggcagtgggaataatgtttttagtgaacactgttctctgggtgacaatacgtaaagaactgaaaagaaagaaaaagtgggatttagaaatctctttggattctggtcatgagaagaaggtaatttccagccttcaagaagacagacatttagaagaagagctgaaatgtcaggaacaaaaagaagaacagctgcaggaaggggtgcaccggaaggagccccagggggccacgtagcaacggctcagtgggtggccatcgatctggaccgtcccctgcccacttgctccccgtgagcactgcgtacaaacatccaaaagttcaacaacaccagaactgtgtgtttcatggtatgtaactcttaaagcaaataaatgaactgacttcaactggg

SEQ ID NO: 362156 - DNA, 2108 bp, Homo Sapiens
  misc_feature (1008)..(1031): n is a, c, g, or t
agcgggtgcgcacgcgcgaacgcggggtgggccgggcctcgcgtagcccatctcctcttcctcctcgcggtcgcggccggacggagggtggagggccctgcgcctgcgcggagctggagtccggctgggccgcagccgctgggagaccggcggttgccgtggggaccggtcgggcccctccctcctccggtcccccgccccaggtccttccccaccgagacgcgccggcggaccgcgggcgagtgcagccggtgacccggcgagaggcggcgccgctcccaagatgtcgcagacggccatgtccgaaacctacgattttttgtttaagttcttggttattggaaatgcaggaactggcaaatcttgcttacttcatcagtttattgaaaaaaaaattcaaagatgactcaaatcatacaataggagtggaatttggttcaaagataataaatgttggtggtaaatatgtaaagttacaaatatgggatacagcaggacaagaacgattcaggtccgtgacgagaagttattaccgaggcgcggccggggctctcctcgtctatgatatcaccagccgagaaacctacaatgcgcttactaattggttaacagatgcccgaatgctagcgagccagaacattgtgatcatcctttgtggaaacaagaaggacctggatgcagatcgtgaagttaccttcttagaagcctccagatttgctcaagaaaatgagctgatgtttttggaaacaagtgcgctcacaggggagaatgtagaagaggcttttgtacagtgtgcaagaaaaatacttaacaaaatcgaatcaggtgagctggacccagaaagaatgggctcaggtattcagtacggagatgctgccttgagacagctgaggtcaccgcggcgcgcacaggccccgaacgctcaggagtgtggttgttaggagagcacacaggtgttcatacagtggcatttgggacacaatcgttggaacctgaagaatctgaagnnnnnnnnnnnnnnnnnnnnnnnnactctgtaaggaagtagatctttatggggaaaagagaatttggggtgttctgcaagccagtcaaagtggcacagcaaatcatataaatcgaattaaatggacaacaccgttagatgtgtatgtaaaaattttctgtttcatatttttcctttcactttcggtttaaaacatgctatatgtactgtatgtcctgtagcccagtgcggctccacagcatggaatctgatgtatgatatgatagaatgtggcactaaatgcagtttcagattttatttttcttaatcatatgaactaaaattgtcaattgtgaggtgtgcttttctcatcatgttggttatattgcacaattggttatatttatgacctgatattcaaagactctggcattgatagccagtgtgttttcttatttaactccgtttactacattctacatggtgtttacgtgatccacacttgaaatactagatcagtagacattcactaatataccaaaataaaatgaaaaattgagtttttccgtgaactttatactgtccagctctgttgattttaaagcctcttcatccaggtcagttcaggaagtatatctggagtacctgctctgtttttggctgtgagactagcactaaggattctggtacctttacccaaacctactgggctactaatacttctctcagcagttgatcaaatacaatagaccatgtaagctggggccgctcatccacttccagtttgctggtctccctgctagaaaacacattgtactgtgctttttctggaattcagtataatggcatcactgcctgtttttcacatcttttgtttcctgttcattttaaggaaacctactaaatccagttaatattaaatggacaccactcattaagaaatttctttatggcttctgctgaaacttaatgccttactacagttatccagttgacatgtttttaattcatataaggtatattgggtatatttgaatatatattgtattacaagacttgttcttgtattttaaatgtccgtgcaaaaaataatggtggaacctttctttaaattgaaatgcaa

SEQ ID NO: 362157 - DNA, 551 bp, Homo Sapiens
  misc_feature (53)..(53): n is a, c, g, or t
  misc_feature (59)..(59): n is a, c, g, or t
  misc_feature (157)..(157): n is a, c, g, or t
  misc_feature (178)..(178): n is a, c, g, or t
  misc_feature (421)..(429): n is a, c, g, or t
ggcccaagaaaaaaaatggaaaaggaccggtaaaggcccccaaaggaccctgncccctnaaaccaacgtgtcctggaccccctaataagccctactggttcctcccccccttggtggcgggtggtaacctggccaggcccacgttgggcccctcctngggtaattcctttgaaatacnaaggggagcttcctaccttcagaggcatttaacattggctgttgcccttagccttagaacgctctttcctcccagatagcccgcagagcccgctctctcaccctgactcatgtctctgctcaaatgttaatgatcaagaggcagtccccggcctccctcttaaaattacaacctgtcactctccaatcctttcctcacgattttctcaaaagcacttaccgctaaccaacattatatctaaannnnnnnnngtctctttttattggaatgtaagtttcatgtaagcaggaactgtatatcactgctataccctcagcatttaaaacaatggctgtacatcatacatactcaataaatatttgttggataaact

SEQ ID NO: 362158 - DNA, 529 bp, Homo Sapiens
gcagagatattcagaggtcttttaggatgcgctaaagggtcgtgagggctctcttaaaattttcttcacaagcggttatccagtcgtgccccgcggccctgctgctggccccggggatctgagtcgtaccctcttgtttttctctgagtcagtcttaaggtgaaatgaagtgtggcccagtggctcctcactgtcgcttctctagttttctgcctccttttagaaaattgaattgaaaagacaggatgaagtggacacagcatgtgaagacaattctttcaagaagtttggctgtcaaggaaaacagagaatgtgctaaagaacatacagacacagagcagacaggccacctttgcaaccacatggaggtttgtctgatattgaagctaaagaagctaagctggaagacagagagaccaagtcctgatgacattgtttgaacccagagatccagacatgcctgaaaactagttttaccactggacttatccgttgaatgagccaataaactctcttttatacttaaaaa

SEQ ID NO: 362159 - DNA, 884 bp, Homo Sapiens
  misc_feature (27)..(27): n is a, c, g, or t
ggcacgaggcctgaaaccctagcaagnattctctataagtagaaaggaaaaatagctttatttccagtgcccttgggcatctttcaaggagactgcaccaggagcaagccagtctcccccacgtttcctctccctggaaaggcactgaatgtgataggtttaccttaaatagttcataaagtgagcccacggcttgtttccttgcaggattactcagggtaaaaagaaggcccgaaagggcacaggcagggtctcaggtctaactcacccacccattttgataaatccaaacattgcccatccctagtttttcacagcttaagttgtccagttccagcaaagagatggccccagtgaaaagccacagaagcatgagggccacaaatacagtaattcacaagcaggacctctcgttctgaagcaaatgtcctgttatgtgggctttgactatgtccattcagaccatcactctcaatctgtctatcaccttggaaaatatgtatcgccagcactagagcaaccttagagaagcaagttattcaacctctctatggattcgtgttttgcagcacttgtaaaaagcgtttgtatgaatgatgtaataaaaataatttcgttaagatatggaaagtcctcggtgggctttagtacaggatcttttcacagatgtcactatgcatgttccagtctcaattattttagttacctaatgtggtcccagctgaccggagaatcacttcatttggcaacctcaggaaaataatgcctatgtgcctctggaattgattgaataactgttgttctatctgcttggttcttcaatttattcaccaaaaataaactctacattgagcatatctatattaaatgttataaaatcctgt

SEQ ID NO: 362160 - DNA, 343 bp, Homo Sapiens
ccagctgtcctgtcagttcccctgtttgcctttgaaacgtttggttagtggggacccaaagattttagtgagtcaacatccataactctggatctagttgtattattcatagaaaatcaatctggtgctaatggttggccctggtgttgttgggtggcagctgctccttcgccctcttgtagtggggctgtggagggctctgcctatggggggtggcctgtggcttgtatccttcagtccaccacagcaaatgggtgtagatttcatgctcgacacttaccactcacctatcaacagatcatcctgcttgactggaacaaaataaatagtgtctcttcaagtg

SEQ ID NO: 362161 - DNA, 807 bp, Homo Sapiens
aaggatctttcaaaggtgtccaacaccttatgaatctggtctatcagattaatatctgaagatctacagtgtttttacatttaatttaaatgccattcttagaaggatctgtcacaaagaagcctttacatagccccaccttgtctcagaagctagagttcattatcaaaacttaatttccatttcatatagctcaaaatcttaaaatctagggcatggccaactaaattactttgattctgtttaccttctctgatgacaattccatcaagccttaaataggaaaatgtcgaatctagggtaatttatcacttttgtgtgcatcttatctgagtccagccatctggtactgctgtgcattttgaacaccgtgggcataaacaatttgttgaattactaagtgaaaacaataataaagaagaaaatggtcaggagtgtggtttcagcactactaacagatgactgtttctacctcatttgaccataactgtacttgtgagcttctttccttccattcatgactgaagatctgctcaaatgcaccaacactgccaagtgactaaggtagaaaagaaaaatgacaggtatcgtcatctgaaggacagatgaatctttttctgccccttcttcacaatggaatataaggaacaattatgggatgtcatcagaatggatgccataggacctacagctccctttctctttattgtgattatactttaaatatgacattgtcttttatgtgtatgttcctatattttcaatgtatctttttccttcagtaaacctgatattcaaataaaaaaa

SEQ ID NO: 362162 - DNA, 495 bp, Homo Sapiens
  misc_feature (167)..(280): n is a, c, g, or t
tctctctctcccctagtcttcctaccagtgtctcccattagccaaatctacctagaagccagaaaacaagggaaccctggaaatgtagccccataagataaagagcaccaaaggaaatagatctgagcagacaggcagcacaaaatgcagtgtgtatggtttattcnnnnnnnnnnnnnnnnnnnnnnnnnnnnnnnnnnnnnnnnnnnnnnnnnnnnnnnnnnnnnnnnnnnnnnnnnnnnnnnnnnnnnnnnnnnnnnnnnnnnnnnnnnnnnnnnnnaatcaaagacaaacacaggatatggaataaacccagaattatctcattgtaaaatgtgttaagtaccacgaggagaaatatcagggccatctgacacagctaatgatttgaagaagggtgtgacctgccaccattttaaatctagttatttcactcctgagctgtgtgtgtggaaaacttgtagtaaaaaatagaatgtctatatttataaaaaa

SEQ ID NO: 362163 - DNA, 685 bp, Homo Sapiens
ggcctgggtggcgaattcggcacgaggcttccgagcaagatggcgccgcgggcatttcttccactgcccgtctgagggaacgctaagtagtgtgtccggcgccgtgttccagctccgcgttgttccgcgagaaagcgagaggccgagcccgggctggtgcgatggccgcggtggtggccaagcgggaagggccgccgttcatcagcgaggcggccgtgcggggcaacgccgccgtcctggattattgccggacctcggtgtcagcgctgtcgggggccacggccggcatcctcggcctcaccggcctctacggcttcatcttctacctgctcgcctccgtcctgctctccctgctcctcattctcaaggcgggaaggaggtggaacaaatatttcaaatcacggagacctctctttacaggaggcctcatcgggggcctcttcacctacgtcctgttctggacgttcctctacggcatggtgcacgtctactgaaatgggggcccgggggacttttttaaaaaaccagatcgggaggactgtggccagcaattaacaccatgtagacttccttagttcttaagtggttgaattcgctgcttgttctgtaacgttataaataatttatatctgaagacggagagcctgtaatattcttcagattaaatgaagcgtgagacaaaaaa

SEQ ID NO: 362164 - DNA, 872 bp, Homo Sapiens
  misc_feature (51)..(131): n is a, c, g, or t
  misc_feature (685)..(685): n is a, c, g, or t
ctgttgcggtgtttggtggcgtcggcggtcgtggtgttggttgggcgcgcnnnnnnnnnnnnnnnnnnnnnnnnnnnnnnnnnnnnnnnnnnnnnnnnnnnnnnnnnnnnnnnnnnnnnnnnnnnnnnnnnctcgtgggctggtcgtgtcggtgtttgtgtttcttaggatataaatttagtgtataagcgttacagaccaaagcagccgaatttcaacccacttaagaactaaggaagtctacatggtgttaattgctggccacagtcctcccgatctggttttttaaaaaagtcccccggggcccccatttcagtagacgtgcaccatgccgtagaggaacgtccagaacaggacgtaggtgaagaggcccccgatgaggcctcctgtaaagagaggtctccgtgatttgaaatatttgttccacctccttcccgccttgagaatgaggagcagggagagcaggacggaggcgagcaggtagaagatgaagccgtagaggccggtgaggccgaggatgccgccgtggcccccgacagcgctgacaccgaggtccggcaataatccaggacgccgcgttgccccgcacggccgcctcgctgatgaacggcggcccttcccgcttggccaccaccgcggccatcgcaccagcccgggctcggcctctcgctttctcgcggaacanacgcggagctggcaccagtcctgggcctcggatcttccaaagacgccgaggagattgagggtccgggccggccgggaggtggtggcgcgtctgcgttccccggccacggtggcccagttacctggaacacggcgccggacacactacttagcgttccctcagacgggcagtggaagaaatgcccgcg

SEQ ID NO: 362165 - DNA, 832 bp, Homo Sapiens
gataagaagtgccggtgtgtcctttccaagactatgtcttaaaaggcactgcagctttctcctggccctgccccatgatctctggaatcagctgctcagggagaagccaggtgtcatggtgtgaggacactcatgctgccctacgcagagacccacatgggaagaaactgaggcatcctgccaacggccacaaagagagaacttggaagtggtttctccagctccagctgactgcagcccctgttcaatcttgactgtaacttcatgataccatgggccagaaccatcatgttaaactactcccaaattcttaacccacagaaactggacagataatgtttacctattttaacatactaaatttagggtaattttttacacagcaatagataactaatacaggtggaaggacaaaactccttggcttggaagccccaatacctagaaagccagcttctctgtatctgtgcccttgaaaatgctgtacctatttaaacagaatatgagaactgctgaactcaataaaccacactaaaaagaagacagaatcatgacaatgcatgtctgctgttggaatttgaagggaagtcacttctcattaagctcgattgtccgcccaagtatagaagcatgggttcctcataaaaagaaaactacaaatggtcactaagatgttaagagctgtctcaaagtggtaacttaagagtgctccttctctctaaaaaaccccggacacattattcattaagggtttcatctgtgaggttccctccaaacatgcagaggtaaaccactcaatggactctggcttgttctaaaaataattccatga

SEQ ID NO: 362166 - DNA, 226 bp, Homo Sapiens
ctgatggggcctctttgagatggcttaactgcggctcttctgggttcggggtcaagggaatgaggggtttggatagtggcatctgatccctgcttaatgaatacagtggaggcctttgaaacattagagtaaccagcagtggagctatgccccaagggaaataatggggggtttggaatttgctggtttcctacctgctgggccccataaaagctgagtgcctgta

SEQ ID NO: 362167 - DNA, 480 bp, Homo Sapiens
gtgttggcaattatagattgtgtttgtgtatacttgtacatgtaagtttacatgtgaaaacatctgaaggcctgaaggcttgcgtcctttccattggcttatatttctagagacactgttctctctctcaaccatcttttaaaatttaaactgtctataatcttacactattatgttagtcacattgaatgcaagataaagcattttattctaaagatgaggtccagattctaatcaggagatgagtcaagctcagaaaaggaaatctgatttagagttctctcagtcttcctggcttatgtcttagttcattttcagtctgcttttgtgcttgtttgatgtagtctctgtacaaggtatagtcaccatgtagttgcatgttcactacatgaaggggattgtgctagattcttaatagattattacttgatatcctgtagtaatttgtaactgttacaaagatcagaaaatgtagtgcca

SEQ ID NO: 362168 - DNA, 611 bp, Homo Sapiens
  misc_feature (444)..(444): n is a, c, g, or t
cggccgcccacatgatgcgcaagacgagctgcctgcagtatctggacgcccgcaacacgcccctgctggaccactcggcgcccttcgtggcccgtgccctgcgcatccgcagcagcctggcagtgctgcacttggagaacgccagcctgtcggggcggcccctcatgctgctcgccacggccctgaagatgaacatgaacctgcgggagctgtacctggcggacaacaagctcaacggcctgcaggactcggcccagctgggtaacctgctcaagttcaactgctccctgcagatcctggacctccggaacaaccacgtgctagactcgggtctggcctacatctgcgagggcctcaaggagcagaggaaggggctggtgaccctggtgctgtggaacaaccagctcacgcacacaggcatggccttcctgggcatgacactgncgcacactcagagcctggagacgctgaaccttggccacaaccccatcgggaacgagggtgtgcggcacctcaagaacggctcatcagcaaccgcagcgtgctgcgcctcgggcttggccttcacaagctcacttcaagggcccgtggcggtggcgggatttattgct

SEQ ID NO: 362169 - DNA, 1364 bp, Homo Sapiens
  misc_feature (52)..(238): n is a, c, g, or t
gctaagtcaagggttcactgcatttctccttcctcagaatacactctggacnnnnnnnnnnnnnnnnnnnnnnnnnnnnnnnnnnnnnnnnnnnnnnnnnnnnnnnnnnnnnnnnnnnnnnnnnnnnnnnnnnnnnnnnnnnnnnnnnnnnnnnnnnnnnnnnnnnnnnnnnnnnnnnnnnnnnnnnnnnnnnnnnnnnnnnnnnnnnnnnnnnnnnnnnnnnnnnnnnnnnnnnnnnagttctgttggaccaatctagatagattcattatcccatctagagaagagactttagtcactgtcttcttgcttcagacccatctatatttaaaacaaatttccctaaatcctgagactgagacggagctacaaattctcagatggcgaccgtgtaaatggtattagcggctgaagaaaaaaaatttttcaagacctctgttttttaactgaactttatcattggcattgtgggtctttgaagttgctgggataaattaatataattaaataaaagactgaatttaattgcataaattgtattaggtggcaattaacaaaaggacccagatggcttattgcctaattgggtgaacaaagcaagaatatggtgtttcttgcttccttaaccagctccatgatttattactttattgcagaagtggctgtcaactcagtccctggctggtatttacagacccttaatttaagtaaaacagatgcctccatttagttctagaaggaccttctcctttagtgtaaccaagtgttcaaattcccttcttctctatgaactcagcattcattttatccataatgatcaatttaaaagtagagaaacttgtcagttgagagatctgattcccaagagattggtttcacttgtctacctgaattttgtgattggattttgttgttcgttttttaagattgaattttgttaccacccccaccaagttcatcatcattattaactataccactggggagaacagagagaagtgtccggccagcagtctagagtcccacactcttcatgctgtattacaacagtaagagcagatatccttcctggagagtgcctgacctgtttcctctttggttttaatgccatagatcccactggaaaattcagaattccaactaacaaagacatggtggttgaaaagtcctcagtgacaataatgatggcaccactgcagcagaacttgacattttagaggtcatgttattgtgcttaatgtgagggggttctattctctactgaaaggctatgaaaaagccagttggacaccaagtgatctgtgaccagtcaccaaatttggacaaacaaaatgcaaacaagttgcatttttaaaaagcattca

SEQ ID NO: 362170 - DNA, 1057 bp, Homo Sapiens
  misc_feature (53)..(68): n is a, c, g, or t
  misc_feature (681)..(867): n is a, c, g, or t
aattaattatttttaaaccaataaaccagccttacgagtgagactccatctcnnnnnnnnnnnnnnnngagagaaactctcctgatgccctgttacagggtttgcactgactggagcagaaacagcaacctttctaaaaaagcaaacctttttcctgggaggaaaatgccagagcctgagccaaaattcttatgacaggtaacatttgggtgttaatgtccatgagagctgacagggccatctctgagcccatataactgtctggaacccccaaatgtgtccacaggttgaatgtccatgagtgtgggaagaacacggctcatctggagcacagctgaggctagtaagagctaaatgactttccttgctatgacttggcttacctgaattagctgtaagagttgccgaatgggatgggttctgctatttaataaacagcattcatattcatttttccccagatggagttacctacctttccacatggtcagcttagaaatcttcccctaaagatgctaatctcctttgggctgtctcagaacacagtatccttcaaataagaaaaactgagtgggaagtgcagtgtttccaaacaatacctatcataactacgtattcattgtctacctgctaagtcaagggttcactgcatttctccttcctcagaatacactctggacnnnnnnnnnnnnnnnnnnnnnnnnnnnnnnnnnnnnnnnnnnnnnnnnnnnnnnnnnnnnnnnnnnnnnnnnnnnnnnnnnnnnnnnnnnnnnnnnnnnnnnnnnnnnnnnnnnnnnnnnnnnnnnnnnnnnnnnnnnnnnnnnnnnnnnnnnnnnnnnnnnnnnnnnnnnnnnnnnnnnnnnnnnnagttctgttggaccaatctagatagattcattatcccatctagagaagagactttagtcactgtcttcttgcttcagacccatctatatttaaaacaaatttccctaaatcctgagactgagacggagctacaaattctcagatggcgaccgtgtaaatggtattagcggctgaagaaaaaaaatttttc

SEQ ID NO: 362171 - DNA, 551 bp, Homo Sapiens
  misc_feature (74)..(260): n is a, c, g, or t
actacgtattcattgtctacctgctaagtcaagggttcactgcatttctccttcctcagaatacactctggacnnnnnnnnnnnnnnnnnnnnnnnnnnnnnnnnnnnnnnnnnnnnnnnnnnnnnnnnnnnnnnnnnnnnnnnnnnnnnnnnnnnnnnnnnnnnnnnnnnnnnnnnnnnnnnnnnnnnnnnnnnnnnnnnnnnnnnnnnnnnnnnnnnnnnnnnnnnnnnnnnnnnnnnnnnnnnnnnnnnnnnnnnnnagttctgttggaccaatctagatagattcattatcccatctagagaagagactttagtcactgtcttcttgcttcagacccatctatatttaaaacaaatttccctaaatcctgagactgagacggagctacaaattctcagatggcgaccgtgtaaatggtattagcggctgaagaaaaaaaatttttcaagacctctgttttttaactgaactttatcattggcattgtgggtctttgaagttgctgggataaattaatataattaaataaaagactgaatttaattgc

SEQ ID NO: 362172 - DNA, 548 bp, Homo Sapiens
gcggccgcctgctctgcaccatggccgtcgtcctcctcgagctcctctgagtcgtcctcatccgagtccatctccaggctctccccattcacgtgcaggctgctggcgcccaggtccttctcccccttggaacccacagtggaatgagttatgctcttaaacatctcaatcaccgtcctctgttttaatactttggtctttttcttaggaaccaggctataggttcccattcttcgttttttcttccgagatactgcagctgctgtctgtgattttgtggtggccatgtagcactggttctgaggtagcgactgatgaagggatgggaaggggggtaaaagctgctgtcgtccaaagtcagaaatgtttttgttgatctcctcttttggttccttatgatctctagcttctcgaacttctctgggatctttactggctgcatgcaggcccacgacggacttcggcatggtcttgcgtgccctgtggaccttgacgtcggcgccaggggccgggagcttcctgtcctctgtgtcagcactcccctcccc

SEQ ID NO: 362173 - DNA, 512 bp, Homo Sapiens
  misc_feature (365)..(417): n is a, c, g, or t
  misc_feature (439)..(450): n is a, c, g, or t
aggcccctaatccttccccatgcctccatcagcctcaaagctgctgacagtcatgaactgcaccttccagccctgcccataagctactcaaagcaaattcaaattctcttctggccaggaggaagggcagatgctccctccttcctcaagcctccctggctcattgatccattttgagggcatttgggggtcaaagttgagaccagattgcttcagtttgtataaaattagcatttcttatcacaccaaggccacacctgttctctggcctcacaaaccagtgaggatgtaaaggtttgttgaggtggaggaacagaagtgaaatgagcaatctgctccatttagaagtcagtcgcttcggctgnnnnnnnnnnnnnnnnnnnnnnnnnnnnnnnnnnnnnnnnnnnnnnnnnnnnncctcagtttgccccaaatatgnnnnnnnnnnnntttttggaactgtgaggcttcaatgtgttgtggaccaatatacaaataaaccaatggaaaag

SEQ ID NO: 362174 - DNA, 209 bp, Homo Sapiens
tgaaagaaagaaaaaaatacaattaacaagcctcttttgtaaatgggtttcctttctatgtataaaatcgtggtggtcccttgtttttacatgttcatgctgtgtaattttgagatgttactgagatatgttctgaacataatgtgcatttttttctgtacagatgaaatgggagaatttaataaagagtttgcaggtttttaaaaaaa

SEQ ID NO: 362175 - DNA, 1072 bp, Homo Sapiens
gcacggctcagccacacaagggcctgggcaaaggtcacggccagcaaagaacacagcctgggtcctctgagtcccgagtccacgcgatcctgacccgtccaccaccctcctcgagacacgacaagttaggcgggaacataacctgggagccccatgtcggtttcaggctccacaagggatctctgggtaaagggtttgtctcttccacatctgttcatttaggagaagcaaagaacatggaaagcagaattcctgggggtggcctcaaccccaagccctgccgatgcaaaccggcaccttgaagatgcctttggaatttaactggaagatttgaatgacatgggcagacacagaagagggagaagcattccacaggggaggaaaggcctcagtggggacctatggagctcccaggcccaccgcagggaggcaggtcctcggtcatctgcggagggagaacactttcagtcgaaggagcctgggacccttgacacagaagtgacatgtgcattcggaacctctctgtggaaaacacagaccctttcatgacacgcaaactcgaagccggtgaggccgagtctcagggctgcgccaaccaggaagcctggctgtccaatgttccaaatctggatgtgaaatggaccatgcagacaggacccaaggggcatgggggagctggcagaggcacccgggaaaagtggggaagcacctgtcggccaggaaggtagagaggcacctaccccagaacacggtgccagcgtcacactcttattaacagatgcaataaccaccttcggagaccagacccctcaaagagcactcagcccacaatgtgacgcagagaaaccagagacccaggcagggagtgcacccacggggacactccgagggtggcctcctgcctgccctgattacttaaaaaggagattcttggaaacctttgcgggcccacaggtgcaccctgactcccagggatgggggctgagccacccaggaaacaaatatgaaatcaaagatccagacagccctgaccctcctgattccagggtccacaaataagtcattcttaaaa

SEQ ID NO: 362176 - DNA, 2199 bp, Homo Sapiens
  misc_feature (1505)..(1517): n is a, c, g, or t
gagctggtacggtcggcgttctgggatatcgtcgaccacgcgtcggggtgaaggaagagaccaggaggataaagactgccccatcaaggaagaaaaaggaagccccttaaatgccgcaccctacggcatcgaaagcatgagtcaagacactgaagttagaagtcgggtcgtggggggaagtcttcgaggtgcccaggctgcctccccagccaaaggggagccgtcactgcccgagaaggacgaggaccatgcactgagttactggaagcccttcctggtcaacatgtgcgtggctacggtcctcacggccggcgcttacctctgctacaggttcctgttcaacagcaacacatagcctgaccctcctccactccacctccacccactgtccgcctctgacccgcagagcccacgcccgactagcaggcatgccgcggtaggtaagggccgccggaccgcgtaaagagccgggccccggacggacgttggttctgcactaagaacccatcttaccccggatgtagtgtctcacccctcatccttctactttttgccccttccactttgagtaccaaatccacaagccattttttgaggagagtgaaagagagtaccatgctggcggcgcaaagggaaggggcctacacccgtcttggggctcgccccacccagggctccctcctggagcatcccaggcgggcggcacaccaacagccccccccttgaatctgcagggagcaactctccactccatatttatttaaacaattttttccccaagaggcatccatagtgcactagcattttcttgaaccaataatgtattaaaattttttgagtgtcagccttgcattcaagggatttataaaaaagtacaataataaatcctcaggtagtactgggaatggaaggcttgccatgggcctgctgcgtcagaccagtactgggaaggaggacggttgtaagcagttgttatttagtgatattgtgggtaacgtgagaagatagaacaatgctataatatataatgaacacgtgggtatttaataagaaacatgatgtgagattactttgtcccgcttattctcctccctgttatctgctagatctagttctcaatcactgctcccccgtgtgtattagaatgcatgtaaggtcttcttgtgtcctgatgaaacaatatgtgcttgaaatgagaaactttgatctctgcttactaatgtgccccatgtccaagtccaacctgcctgtgcatgacctgatcattacatggctgtggttcctaagcctgttgctgaagtcattgtcgctcagcaatagggtgcagtttttccaggaataggcatttgcctaattcctggcatgacactctagtgacttcctggttgaggcccagcctgtcctggtacagcagggtcttggctgtaactcagacattccaagggtattgggaacgccatattcacacctcacgctctggacatgatttagggaagcagggacannnnnnnnnnnnnacctttgggatcagcctccgccattccaagtcaacactcttcttgagcagaccgtgatttggaagagaggcacctgctggaaaccacacttcttgaaacagcctgggtgacggtcctttaggcagcctgccgccgtctctgtcccggttcaccttgccgagagaggcgcgtctgccccaccctcaaaccctgtggggcctgatggtgctcacgactcttcctgcaaagggaactgaagacctccacattaagtggctttttaacatgaaaaacacggcagctgtagctcccgagctactctcttgccagcattttcacattttgcctttctcgtggtagaagccagtacagagaaattctgtggtgggaacattcgaggtgtcaccctgcagagctatggtgaggtgtggataaggcttaggtgccaggctgtaagcattctgagctgggcttgttgtttttaagtcctgtatatgtatgtagtagtttgggtgtgtatatatagtagcatttcaaaatggacgtactggtttaacctcctatccttggagagcagctggctctccaccttgttacacattatgttagagaggtagcgagctgctctgctatatgccttaagccaatatttactcatcaggtcattattttttacaatggccatggaataaaccatttttac

SEQ ID NO: 362177 - DNA, 728 bp, Homo Sapiens
agttcgacggagactctcataaaaatatatatttctttgaaaaatataatatttttatgagagtggacgtttgtatttcactaggtacaatggaatacaaccgttgacaagattttcagaggaaaaatacactgtttggtcaagttaaggaaagcagtgtgtaattttggattgcctgcccttggctgaaatacaggggtgcataccatcttgcagtggcttggctgacattgcctctttgtcctggcctctagttttcttttgatatttcatagctctccttagtttactctgcctggatagaaagttgaccactaactgcaggtttaagtactaaactgcagccttttctgtcgccagcaattaaagaccaccaatcttgtttgtccatctacatggtttgtcggggacatttaactcatggaggtgctttagatttcaacatcagatggttgaagctggaagtttaattatatgtagagtgagaaggcagttccagttttagcacagatttgtttatgtgttcagattttaatagagattcaaaaatgactcatttttaccaataatgttaaattagttttggttgtgctagcatgaattaataaccaccattttataccagtatcatcagtgaagaattgtatttcaagattcaaacaataaccagcaattaaacttttttctacaatgtatttgtttgcgagtaggacttgggagtcattggg

SEQ ID NO: 362178 - DNA, 638 bp, Homo Sapiens
  misc_feature (59)..(59): n is a, c, g, or t
cagggccttctgcttgcctgctgccatactgtatgtaggaaagtgttctgtggctgctntgtgtcaagaaaagagcagtcactctcagaatcttgattccccatcagccaaagcaaaagatggctgctgctttgtaggcatgtgcctgcaagtgggaccttgctgggcattatatgccctgtgggggtttcagagaccctgaaagaggagggaggacccgcctccttgtctgcacaactgcatgcacttctctccccatcgctccacaacctgaaaccgagaaggagttgctgaccagtgcccaccccggcagcccgggaggaacacaggcagctcctttcccttcacgtggtctgcagagagcagggtgagctgccagctgcccctctccaccagggtaccctgtcttggtggttaggggccacttttcctttgaggctctagtggaggtggatgtccttctctgccaggcttggcacatgatgtgaagaataaatgcccaattcttactgttcaggtttgatgtggaatcacagctgcagtgatatatattttttatcagtgcttggttggttttaaataaagtgcacgctattttattatcttgttctgaataaaatgtatttactccaaaaaaa

SEQ ID NO: 362179 - DNA, 489 bp, Homo Sapiens
cagtcaccacctattgtgacacatccttagtagctagtgtctgttctagtcactgcactggagtctacgagccggaactcgctatatgcacgtgtgtgtgtccgtatgtaagaaagtgtgcaccgagtgactgaatggttgagatgaattggaatgctgaagactaacgaagaaactagagactgatatcgagcattctgcccacctcgctctgtatttaattaattgtgctatatgttgctttaacaacccattgagcagtcagggaatgtgagtaagcttgctgccaaaggtaactaggaaagcattcatctgctgcctccttgtttttgctcctagagagtgaaaatacaggcaattttactgtgagtgtttcactggaaatgtacaatctttgtgtgttagagtatttgttttagtaagaaatgtttgtttacacagcttgtggaattatttcgtgggaaaataaatttttataacttgctcccc

SEQ ID NO: 362180 - DNA, 486 bp, Homo Sapiens
cagcgtattacatacacccagtgataaggttctttgcatgttttgtgttatgtattactctgactctttagagattatataaatcctccaaaagttagacgaaacaagatagtacattatgagtcttaattttatcattgtggaaaaatgtgtactaactcctgattttgttaattttataacataggttgaattttagagtggggtttttataagtaatggaggataaaatgggtgggagaaaatggcacacagcacctgaagaaagatggggcagtgacctctagaactcatgcattgccattggaaagcctgtgttgggcatcgatgtcagatcctgaagaatcacctggaaaaaatcccatcctagaggcaaggaggctacaccaaaccatacactacagtactttgtcacatggttgtccattatcatgtattagagtctaaatgattacttgaataaagaaaaaaaaccacttaactctt

SEQ ID NO: 362181 - DNA, 1063 bp, Homo Sapiens
  misc_feature (44)..(44): n is a, c, g, or t
  misc_feature (993)..(1005): n is a, c, g, or t
taattaggctgattttgcaggtcttcattgttagagattctganagtatttactgtcaattcataggtttcagtttatttaggaaattagtgtttgacagctttttttaaattatttcactgaagctgagattattagtgatacaaagttaaaatttcaatatttaatttctctatatattattaatattaaattgttttttacttataaattcatgttctcatctgatttaatattaaatttgtataggtggggcgtttcttaccattttgcacaagtttttgtttttctggaaatacttaattgtgcaggctgtaaaaaagattagtgcattttcattttaaggatgctttgctccttaaattgttcgacagaaatgactttttagggaaagtagtttttttggagctactaacttgtatttattattgtacatgcataaccagggtggtgagggcactaatcttgtaggaaacacttacttgatgttttatttgaacttttcctataggtttaacttttactgcatagaattaacactaggaacagtgtcatgaaatctgggttgaaggagaatacagtatatatgagaacacttaaagttcaaatagaaatcatttctgaagacaaaagcagaggaatattgtcagtgccaagtaatggaagaataagggcggcatttacactgtgcaagtattgagaagagtgcataaagacagggaactactctcatggagacagtttctctcttataatcaagtaactagaaggggaaaaatcatctaagttatgaaatccaacataggcgctatattacaaactgtgccggattatgcaaattgtagttgttactgatcaaagtttaattgcttcatttttgtttaaaaagggatactgatgtcagaaaatctgtaatatgttttattcaaaagatgtaaataatgtatacagacttgtatgtgatgggatgggaaatatttaaattctaggtgnnnnnnnnnnnnnaaagaagaaactcaatgtttataagaaaaaaatgaataaatagttacgtttggccatg

SEQ ID NO: 362182 - DNA, 572 bp, Homo Sapiens
ttttcctctgactaggtaatttcgaatgacctatcttcaagttcagggattcttttgctggattctttcttttgttgaatctctctgttgtattttttaatttaattcactgaattcttcagttgcaggatttctggttggttcttttttttatgatttctatctctgttgaatttgtcattcacatcataaatccttttctgattgactgaactatctgtatttccttgtatatcattcaatttcttaaaaaatcataattttgaattccttttctggcaattagttgatttccttttcatgcaggtctgccactagaaagtgacgttccacctgatataatattaattcttttaaatttgttaagacttgtgttgtagtctaacatgtggcctatcctggagaatgttctatgtgctattgaaaagaaaggatgtacattttgtagcttttggattaaatgttctgtcaacgtctgttaggtccatttggtctcaagtgcagtttaaatcaaatgtttccttgttgattttctgtctagatgatatgtccaatgttgagacgttagatat

SEQ ID NO: 362183 - DNA, 466 bp, Homo Sapiens
ggaccgcgccaaggcgccaatactgacgttgtaacctggagccggaggacacgcgaggacgccagagccgaaaccggttccagggcactcggccgttctaaggctcgaactcgccacccaagaccacgcagagcttgcgaaaacggggctgagccggcgcggcgcatgcgcgggcggcgtcccgcgcaccacagggtcctgaacacccgcagttcccggggcagggccgcgtccggaagtccgtggaacggatcttccgatccttgttctttgattcgttaccaaccttccacttccgtagacagttcttcccgccttccgccgtctgctaggcgtgtcgccgcaggaggtgcgcgcccgccctgttttgtttccgggggaatctacttctctgaaggacgctcgggacttccgtttgttcccctcagcttctaattggctacttttatgaatatattagggcccg

SEQ ID NO: 362184 - DNA, 559 bp, Homo Sapiens
aggggtccaggtgcccccgccccacaaggccgcggagcctcagcaggaggggtggcgagttgcgggtgggcagggccaggacggtgtggcgccagccttgaagcaccacggcccaaggatgcggtgtacatactgtatttctagattctcctttgtacagagtcacttcacaagtcaagctactgttttacaggtgctccttatttattagagctgtgagagcttgggggacacacctggcgagcaagctcgctttttaaaaatgaaatttgggggcaggggaagggaaggcggaagggaggggaagctcgcaagcccggggagagatttataaaagtaaacaaaagaaaaccttccagcaacaaattaaaaaataataacaaatcaaccccagcaccaaacccacccaggcaggaagaagccgcccctcctctggggccatatttttctgctgggtcacaacattctcctctccctgactggtgtcagattcatcaaacaaaaaataaatctcgaagaaaaaaatgcacttacatgtgcttatttggcttttctcatt

SEQ ID NO: 362185 - DNA, 415 bp, Homo Sapiens
gccaagtttaataataataaaaggaaaaatttcagcctgcagaactctggttttgaccccccatcggccaagatgcacattttcagggcctgttgagcaccttctgaaaagcagggctccgtaatagactccagcacattcccatcagagtcaggaaaactgcggtgagtcccaaagaatctagggtgcagggcagggagcaggagtcataaggagtgataacctaaactgtgtgtagtcaccggggagggtcttatgttatcaggtgaaatgaaagccagtaagttagttgatcctgtcacaaatataaccctgataacaccccataaatacgcgacacgtgtgtcctgcccctgctttccccatccaacatggttcttctgttccacagacattaaaggggctttctgcaatt

SEQ ID NO: 362186 - DNA, 913 bp, Homo Sapiens
  misc_feature (461)..(469): n is a, c, g, or t
gggaggtagaactgagagatcctctaccgcagtcgtttgaggaggcggaactgaagttttttcttaattatcatgtgacgggttctggatttaatggggggaaaagggcggaaaaggacaaggatccaaactggcgaatttgctgatcttcgcgtccctctccgctttccggccggcagcgctgccagggtatatttccttttttccgatcctgcaacagcctctttaaactgtttaaatgagaatgtccttggctcagagagtactactcacctggcttttcacactactcttcttgatcatgttggtgttgaaactggatgagaaagcaccttggaactggttcctcatattcattccagtctggatatttgatactatccttcttgtcctgctgattgtgaaaatggctgggcggtgtaagtctggctttgaccctcgacatggatcacacaatattnnnnnnnnngcctggtacctcattgcaatgttacttaaattagccttctgcctcgcactctgtgctaaactgggaacagtttactaccatgaatctatcctatgtcttcattcccttatgggcctttgctggctggggctttaacagaactcggatataatggctcttttgggagagactgacttccaagaagctctttctcctttcctattgcgggtccacacagttaccattaaagggggtcctggaatctcggcaggtttcaagaaatccccaagaactggggggcaaaaatccaaaggtgtggtttatccttccttcccccaaagcaggcattggtgggagctccgcgacctttctagcgcgcccccccgcgctcaggttccttccgggagtttgggaggtactcgtgaaaccgccttaatcatctccctgcgtgagaaagagacgggc

SEQ ID NO: 362187 - DNA, 604 bp, Homo Sapiens
  misc_feature (68)..(80): n is a, c, g, or t
aaaaactgaaaataacaccaactagaaataaatagctcagtaatattaaaacaccattatgaaattcnnnnnnnnnnnnnggaatgcagagattaacaagtgtttatgtaaaatagtaaggttggtgattagtgaaacagttttcatttaggtgtggataataatctttgaagagcctgttaaaaaatggatgttcaagcagcatcccgcccctctgaatcagacataggggaagttcctggacatcaatactgtcaacctttctaacaaatgtttctgatgcagatgaaatttttataatccatattttattgttccttctaggggtttcttgtggcgcttacattaaaatccatgtatctttccacagataatattgtccctgctcacctctcagacctcatatcaagacacaactccctctgtcccatactgacctaatttcccccttttagcaccttgacgttcttacaaattttctcaccttttggttccatgtgcaggtggcatcatcgcctaaaaatcttctggcatgttttgtttgtagactggagctttcttatcctatccatgtttaaaataaaatgtcactttatcaggaaaa

SEQ ID NO: 362188 - DNA, 619 bp, Homo Sapiens
tgaaaacacttggaagatggtttaatgatgttttacaacagaaatgaactgtacagttacagtaagtttaatatatatataaaaaattacagcagacaaatgcatctacacaaaatctaccacttcattctgattcactgtcacctacacaatctttcccaagcctacagcccctgcaggcagccctaggagggggaatcatctaaagggcacttttgagagagacagcaccgctcatattccccgccacctcctcaggcttcaggaggcatcagctaattccccaaaatgtaaagttgcctgtgtttcaggttttcaaaaccaagaaaacgtgtgtctcccaggggcacagataacaaggtccagcacgcaagttatcagctgattcttagaaaatattcctatcagaggggaaatatttggctaacaggcactctggggcagtaaggctacacaatagccacccagagtgcagagttatctaagagaaatgtagaaggactcccaataaaccacctcagaattgtcactgcctcattcaagctgctggacaattttggaaagaatcatttacaccacatcttaagtttccacaaagaagaactcaaactcacatttt

SEQ ID NO: 362189 - DNA, 1082 bp, Homo Sapiens
  misc_feature (37)..(37): n is a, c, g, or t
  misc_feature (83)..(83): n is a, c, g, or t
  misc_feature (489)..(519): n is a, c, g, or t
accccacaaaggaggccagacttcgcgttaacttcantaacacaacctcctttaagccaaatacatcacttgcccactatcantgcctgtttgacttgcctttgtataaaatgcctatgtgtagaggttttattatccacaggtgacatagttcagcaggaggcatggaagggctagatctacatcaagttacattcatgaaattgtgatggtaacgtattatacagaatgtatccatcaggcagacaaggggtctgaagtcacaggctcagtagcccaactcagacacaaagccacagacaatatggatgatggtcctcttacccagaaactggagacaactttgcaggcaccctggctgcgttcctgataatgcctagagcatgtagcaatgttcaaggcaggtgccttggaatctgctgtgagttatgcagtactaaccaaacaaagttgctaaggatgagatgttgcaacatttcttgtgtgcannnnnnnnnnnnnnnnnnnnnnnnnnnnnnnaggattcattaagtcatatacttagtcccctgcaaagaagaagacagatgtcccagagcagactgaaagcggggcgtgggatcctaggcaatgcaggagggcaggtgggggagctgtagcagaacaagggtgctaggtgggaagctggcttggggaccacacgtctggctgactcacagggctatagcagcagacagagagccagatgctctactgcaactggtgagttggaggcttgcccacataacactgtctttctctccacccgccaagcatccagggcacagggctggttgctcacagattgagcgaggtagcacctcctaccagcactcaagtttatcagggccgcgttctaaacattctactgaagtttgctaagaaaccattaggtgaggctgagccaccgtgcctggccaaatgtcacttttttgataagtcagcagatccagctcttgagcacatcagaggctagataatcgggacagaaaggaaaaatcaatccatcagaaagtttatacatgcaattatgtaaaataaaatcaagaacaaaaagcataaaa

SEQ ID NO: 362190 - DNA, 807 bp, Homo Sapiens
  misc_feature (674)..(674): n is a, c, g, or t
  misc_feature (729)..(731): n is a, c, g, or t
  misc_feature (733)..(738): n is a, c, g, or t
  misc_feature (740)..(742): n is a, c, g, or t
  misc_feature (744)..(748): n is a, c, g, or t
  misc_feature (750)..(759): n is a, c, g, or t
agaatataaggcatagaagaattgtcctctaaaaatatcaatgatgtatcctggaatgtgaagatgtccctttatagttaaaaattgaattattttaatattgtaccattgttagaccttgaatgagtccatgttaccgtgtgtgtctgtatatctatctgtagagaaagaaaaatgacaactgaaatgttacttttaaaaatcagaataaattgggcactgtctgtgttgcaccactactgtatcttttcgaaagaattaacagtatttgcctattgtaaaggttaattctgatgacgttttcacattcaccagactttttttcctgtattatttgcatccccaaatatttaatacaagtagattctgcatggcttgggcattcagagattaatagaatgatgactcaattttaattctaaagccatgaaaagttactttgagactgaacaattctgaattatttatgatacccaatgtccatgtttctttccctactgtaaaagaattgatcagtttcttcattaaagcagcaaaaacttattaaatcttgtaaataccatgtctctttttagatttctgtgtatgctgtgaatgaaatcattttgagatgaaattgtacaaaggcattttaaaaggctctgcatgcatcgtaccctcaaacagtacatatntcgggaaagtcaaagattccctgggcaaataaataacctaaaaggcaaacacttnnnannnnnnannnannnnnannnnnnnnnnccttgtcgggccggcctcgggcccctgcaagaaagcttttcctagaac

SEQ ID NO: 362191 - DNA, 534 bp, Homo Sapiens
gatccgaaaagcccagagaagctagagctgcccctccaacactctcggatccacatggtctgtgttctctagacccccctgcatgttggcggtgttctctctctgtggactgactgtccttctcagtgaacatgtccacccgacagctcctgagtttatatcatctcaaccctcacaacccacagaggctgtgtctcctagtcacagctttaaattactggaaaaataaatgactggccaaacttggagcaggtgtccatcccagccctgtgtagttagagcaggaatcaagatctcaacacaaatgtggctgccaagcactcagccccggggcgaggggtcaagttcttctcagagaaagaggaataagttggttctcagaagacatcacaagatacgtgtgtacccaacaatctctgatctctgctgatcttttgcttagacgttaacttgatgcatcattggaaaggtgtttctctcatctctgtcctaaggcttgataaagtcattaaaattgtgttcttttgactaaag

SEQ ID NO: 362192 - DNA, 1456 bp, Homo Sapiens
agcggctttccccttcagtgtctcagaggaggggacggcagcaccatggacccccgcttgtccactgtccgccagacctgctgctgcttcaatgtccgcatcgcaaccaccgccctggccatctaccatgtgatcatgagcgtcttgttgttcatcgagcactcggtagaggtggcccatggcaaggcgtcctgcaagctctcccagatgggctacctcaggatcgctgacctgatctccagcttcctgctcatcaccatgctcttcatcatcagcctgagcctactgatcggcgtagtcaagaaccgggagaagtacctgctgcccttcctgtccctgcaaatcatggactatctcctgtgcctgctcaccctgctgggctcctacattgagctgcccgcctacctcaagttggcctcccggagccgtgctagctcctccaagttccccctgatgacgctgcagctgctggacttctgcctgagcatcctgaccctctgcagctcctacatggaagtgcccacctatctcaacttcaagtccatgaaccacatgaattacctccccagccaggaggatatgcctcataaccagttcatcaagatgatgatcatcttttccatcgccttcatcactgtccttatcttcaaggtctacatgttcaagtgcgtgtggcggtgctacagattgatcaagtgcatgaactcggtggaggagaagagaaactccaagatgctccagaaggtggtcctgccgtcctacgaggaagccctgtctttgccatcgaagaccccagaggggggcccagcaccacccccatactcagaggtgtgaccctcgccaggccccagccccagtgctgggaggggtggagctgcctcataatctgcttttttgctttggtggcccctgtggcctgggtgggccctcccgcccctccctggcaggacaatctgcttgtgtctccctcgctggcctgctcctcctgcagggcctgtgagctgctcacaactgggtcaacgctttaggctgagtcactcctcgggtctctccataattcagcccaacaatgcttggtttatttcaatcagctctgacacttgtttagacgattggccattctaaagttggtgagtttgtcaagcaactatcgacttgatcagttcagccaagcaactgacaaatcaaaaacccacttgtcagttcagtaaaataatttggtcaaacaacagtctattgcattgatttataaatagttgtcagttcacatagcaatttaatcaagtaatcattaattagttaccccctatatataaatatatgtaatcaatttcttcaaatagcttgcttacatgataatcaattagccaaccctgaatcatttagaatagtgataaatagaatacccggaataggggatgaaattccatttaaaaaatcccgtttggcctcccaa

SEQ ID NO: 362193 - DNA, 573 bp, Homo Sapiens
  misc_feature (51)..(51): n is a, c, g, or t
cataaaggttataaaaggcttatggaagttatattttataaccaagattanatcttatagtttgtttacaaaattttgaaaatcaaatgtgattggcttcaggctgtttttattagggcttcttgtttagaaagttaagtcacctctctcaaagaatgaaggtttttgctttttttgaaatccttgaattatcacttggattaaataaatgactttacgatgacctgtaattttattttgtaatgtcaagtgttttaaaccttttgtatttgacaagctttccaaaatcaaattataaattatgtatttttctaacctaattaatcctttaagatcttagtttccctaaagtcctaaaatgacataatttggcttatttggtataaaaattatataggaagcattgtcaaatgtgaaatggtgtttggttttctttgggctgtatttgtataaatatgttattggtgtatgttccaaaattatgtgaaactcctataattctaatataacttagtgtacataatcagtaataatcataattgttatattaaaattattgtgtgccacagaggt

SEQ ID NO: 362194 - DNA, 502 bp, Homo Sapiens
gcggccgcggtctcctacctgcggatggagcagaagctgcgccggggcgtggccccgcgccagccccgcatcccgcggccccagcacaaggtgcgcggttaccgctacttggaggaggacaactcggacgagagcgacgcggagggcgagcatggggacggcgcggaggaggaggcgccgcccgcagggcccaggcctggccccgagcccgctggactcggccgccggccctgcccgtacgatacaggcgcaggggggagacgggccggaggagcagtgaggggccgcctggtccccggactcagcctccctcctcgccggcctcagtttaccacgtctgaggtcggggggaccccctccgagtcccgcgctgtcttcaaaggcccctgtctcccctcccccacgttggggacgcccctcccagagcccaggtcacctccgggcttccgcagtccccctccaaggcggtaggtggagccttgggtaaccccctcggccaagg

SEQ ID NO: 362195 - DNA, 493 bp, Homo Sapiens
  misc_feature (107)..(107): n is a, c, g, or t
  misc_feature (339)..(376): n is a, c, g, or t
ggcaaccagcccgcaggtggagagcccctgttcacctgatagggtctagctgtgaccagtaaatataatacccgctgtttccttgggtaccagatttggagtgttcnatgtgatgagactgtaaacctcatttttcggttcctctgtttaaaaaaacatctgaaggatgaactaaggctgctggtgccctgagcaactgataatgcaaatgtggacaaagtgtctgttttctactctagcctgttcatatggaccaaatttcaacaaggaactcaaggaaaatttgtacctgccgtatttatgctttcatgtaaaaaagggttggggggaggggtgtcnnnnnnnnnnnnnnnnnnnnnnnnnnnnnnnnnnnnnnccactgtttctgtctggttttaaaacaaattacagttttgtatggattttttaaatgtacattttggaacaaatgatcaaatattttctgaaataacaataaaaggcagaaaattaa

SEQ ID NO: 362196 - DNA, 1763 bp, Homo Sapiens
  misc_feature (1617)..(1654): n is a, c, g, or t
ggaaaacctaaataggatctctctccagctcaaggttgtcccagtgaggaagactttaccaacttctcactctaccccactactcacatgagtgttagctccaccttgcaaaggctgaagaccagttctccccagtgaaagctgcctcattcttttatggagttccctggagtggcagagctataaagacgagcattgggatttgcagtctccatgtagcctttcgtgcttggcaacccctgtagactttttgtcccaagcagattgcgtgcgtgcgcctgtgtgtgagaataagtgccttactttgctgtgtggttttcaacttgtactccgtggccagcccccagttgccagggctcgacggcagccaaggacaccatacctcagtatagttatatataaaagggacacggattgtgacagtttcaccccatttgtttctaaccccgctgcccaggattagggtctgtggtgtgttctgttttgtttttggtttctcccttgtgtcagttctcttctggcccagctgggtggctgtggaagtctgtgaggtggcccaaccacaagcatacctattaagagaagcccagagcttccagcccccacttcgaaaactctcctctggccccacatagcaaactccttctccgttattttccccacccccagattttttttaaaaggcccacttgccgtaacctcttttggtctattttgcttcccattcagcccaaagtttatatgataaaggtgtttacttttacttcccagtctccaagtgctaacacataaacacatacatgtctgactgttgcaaaactgttcgagctcctaattcagtgttaccttgttttagtcgcagcaaccctctcccctaccccttgcccgcccacgtttttctcactcttccgggttgtgcaataactctcccagccagtggtcctttccacagcctttctgtcccttaaaacacctgcaactgggggagaaatgggacccatgggagggggagtcgtcatcccttacacaagaaatagccactttccttttgttgtcattcttgtgatcctgggtgggtttctgtggcactcttttagaacatgtagcatcatcttagaggtctattttttaaaaatgtgttgaagaggaaaaaaccattctcacgatggggcttaagtcattgtccaggaataagattggcgtggtgcccatgacatcaccgtcactctgcctaaaagcactctagagctacttgttcacgtggagaggaaggatattttgcgaagcaacagccgcaggtggagagccctgttcacctgatagggtctagctgtgacagtaaatataataccgctgtttccttgggtacagatttgagtgttcatgtgatgagactgtaaacctcatttttcggttcctctgtttaaaaaaacatctgaaggatgaactaaggctgctggtgccctgagcaactgataatgcaaatgtggacaaagtgtctgttttctactctagcctgttcatatgggacccaatttcaacaaaggaactcaaggaaaatttgtacctgtcgtatttatgctttcatgtaaaaaagggttggggggaggggtgtcnnnnnnnnnnnnnnnnnnnnnnnnnnnnnnnnnnnnnnccactgtttctgtctggttttaaaacaaattacagttttgtatggattttttaaatgtacattttggaacaaatgatcaaatattttctgaaataacaataaaaggcag

SEQ ID NO: 362197 - DNA, 593 bp, Homo Sapiens
gcccgaggtgtgaagtggccccttccaggccgcatcagcacatcaaagtgggctcggggcttggagggggcggagcctgaccctttgaatccacggcggggggccaaggtgccagccccttgactgcgcctgtttcgccccacctgggccctcgcttgggcgcccgacccagcctctcggccttcccgcctgcgcccagtgttgggtgaagcccggggcgttgggccagccctgcaggttaaaggaagcggggtcagaaaaacgaaatctagatcctaggtttggggcctgccttcacctgttggggaccttatgcaaattcttagttcttttgcaccttagcttccaatttgtataatgagagcctcagggcatgcgccaattggacagtggagtagagtaaggaccaggagcagggaccctcattccctctaaaggtggagaaaacagtaaaccacttctcctttgaggcaggatggccctgggtagacccttccctggtaagaacatgtggacagtgcaaggaagcttgcaccccggcaaattcaataagctgccgagtctggtcaggatgctggaccttctgagcagag

SEQ ID NO: 362198 - DNA, 448 bp, Homo Sapiens
  misc_feature (81)..(90): n is a, c, g, or t
ggggacacactatttttcgttagtttattacaaaactacagatacaatacacaaaattctaattccgaaatccttctacannnnnnnnnnctgagactaaatgccctcaaagcccgtctgcttggcctgtattacaacctgactcctcggctcctggatgcacaggtcagatgttccaacaaccctgaccatggccagtgctatggagtcactccaaaggtggttgagccctctgtgaaaatttaaatggctgctaagtcattctaaataaatagtgaacggattgtttctgcccctaagatgaaatcccacagatcttatgctcaagctcaggtcttcctactgccgccttcgacatctaaaaaggattggggggatcttcactgatttgttaaccctgggagtgccccttgtgatccagatgagtcaaaacaaacggccaggatct

SEQ ID NO: 362199 - DNA, 447 bp, Homo Sapiens
  misc_feature (270)..(295): n is a, c, g, or t
tcagtcggctggaattctatcttctgggggccttccgtctgagatggaagctgtcttgggcttgtggtctcttccttctgttgctccctgcccctcccccctgcctttccactctgtctggtgagctctgctttttcagtgcaccatcaagagatgcagccccgtggacatgaagacacaatctcccacggacagctttcccccttccgccctctcccaccctctcctccccttgcgctcgcgctcgcgctcgctttctcactggcgtgnnnnnnnnnnnnnnnnnnnnnnnnnngtacctttctcatagttgcttcagatcttaggtctcaagggcactttggcgcgtagtaagtgctttatgtaagaaggcagggcaggggggctttttacaggagaaaaaaaatgacttataagagaaagagcctgcagtatttttggaaaaaa

SEQ ID NO: 362200 - DNA, 600 bp, Homo Sapiens
gcactatcactaccaatgagacaattaaaaatcggttggagatggagcttatcacatagtgctactacgactttattttttcttgaaaataaagccttgaggatgtgaacataaatgttggtatcataaaacaagtagtaataaaagcataaattatcaaatatcaggtgatcttactatggagaagaaaaaccaatatctagttacagatgaaaaaatgtttaatacaaagagctgaaaatgtagaaattgagttatcttccctttgcaaaatttttacactttaaattagtaattctttgtttgcaaggttttcatccctatgctgttgttttctactacctgttttactcttgttcatactgctactttcccatgtttcctatatgcctcccctatattggagaggataactcgcgtttacatatgtgatagttatgcttaatactaattcacagagttggctcgatcattttgagattctagttgctttatctcaaagctttcactgaagggctgtaactgaaaattattaaatgttagtctttagtcaaatctctgcattgtttcatgcagaaaataaagatacaattaaggctg

SEQ ID NO: 362201 - DNA, 540 bp, Homo Sapiens
attggcccagaggctccaaaaacacttacctctcaagatgataaacctttgaactatggccatgctctgttacctggtgaaggtgcagctatggctgaatatgtaaaagctggaaaacgtatcccacgaagaggtgaaattggcttgacaagtgaagaaattgcatcatttgaatgctcaggttatgtaatgagtggtagcaggcatcgccgaatggaggctgtgcgactgcgaaaagagaaccagatctacagtgctgatgagaagagagcccttgcatcctttaaccaagaagagagacgaaagagagagaacaagattctggccagttttcgagaaatggtttacagaaagaccaaagggaaggatgacaaataaagattttctgattgtccagaagacatttttaacaacaaaaaagaaagtctgggttccacacatacatagaaaaagattattatgttctgagaaagctttacagtgctactgtgccttctatttaattctttcagtccttcaataaaaagctgcttattgata

SEQ ID NO: 362202 - DNA, 538 bp, Homo Sapiens
gcccgctgccaggccatcctctctgccagaggctttcatgagccccaaggctggggccacagctcctacccctgcccagcagccctgagctcagctgcaggaaggacatcccagaagccatggctcctggggcgcttccaggcattctgccctgccccgacaccagaaccctggtgctggtgggccactagcgtctgcagcctaagcaggtgctggctcagggttcatcgttctgccttgtccactgggggaccagccctgcagaccactctgacaagtcttcagcccacaccctgccagccccacagattttatttttgcacataagccataaccaatcctcaaggctggcacaggctttggggaagccctggagcctgtgaagaccctggaaacctcatgaggctgtggccaacccctgccccttgccccacacagaccaggccttaaatgtcggtccaggccctgtgcaccttaccccagagacagactctttttgtaagattttgttaataaaacactgaaacttcctggaaaa

SEQ ID NO: 362203 - DNA, 536 bp, Homo Sapiens
  misc_feature (97)..(106): n is a, c, g, or t
  misc_feature (455)..(470): n is a, c, g, or t
ggcacgaggcgaccctgcctccgtctcgtgacacaatgagggagcagcccgatccctgagcggtctcttttttggtgcctcctacatttcttgaggnnnnnnnnnntgtgtccttagctaccctgttttgagcagcaatatgcagcctcttccttccaagattacctccggagaacaccgttcttggccaaggacactgaggagctaaatctgcctcactaaggaacgagcttgtttccaagaaatgaggataagatgggtaaaatcctcactaacaaagaatactataaaacctgtgagagccttagaatagcttctaataatcctaggacaggagaaagcgcctggctttgctgtgagtgtatcctcagaaaaagcaggaggtcgaccatctcttcactggagccagcttctcctctagaaacgatgcttttttccctaactaaagagcagcnnnnnnnnnnnnnnnnggggggcgaggggattttttttacttgtttgagaaattataataaaataattgagtatctcctgtg

SEQ ID NO: 362204 - DNA, 1451 bp, Homo Sapiens
  misc_feature (17)..(17): n is a, c, g, or t
  misc_feature (25)..(25): n is a, c, g, or t
  misc_feature (56)..(56): n is a, c, g, or t
  misc_feature (1357)..(1357): n is a, c, g, or t
cctaaaaagggaaaggnccagtatngtagattaaggaatgtagggtcaaaaatccnatcatttttaaaatttttcttcttcctatgattatgttttggttaagcagatattattttcattttttgagcttgcaaaagtctgcctaggaatgtgctaaatcaaaggaaaaatctagcctcatgttcacaattgccctggaatgccattcccagactgagatctaactacacagagtatggctaacggcagaagtcagaggttagggagatctggtgtctccatttatctggaaaacagagcaaagaagggtgatcagttatagaaggccaaacagaagtgttttaagttcagaatttcatctttcgtttaattttcaaagtaacagccactctggatcttttcttgccctcttctctatcagtatgaacagcgtagctgcttctctcctttaggaaagtcagtgtgaggtccctggatatggcctagtctccaggtggtgggagtttacattctgttacctataaacagctaaggcatcgttctaagtttgtttaaaatggttgttttaaatggtaaacacaaaagtccagtgatttttttaaaaactggctttaatggacattaacaaataatatacactgatttatcacctttaagcaacaaaaacatgacttgtaattattcaaataaggtaggatttttctcttaagtacacgtcttaaaagtcattcacaagacgactgggcatccactaagaccaaggcactgtgagggaggcaaacagcacaacatcctcacctcaaggagctcagcctgggatgaagacagacacacacaactccagcatgaggccaaggggtagcctgttatgggatcaagtggtggcagaatcaagaagtggttctgaaagtgttctttagtcacagagaccagtaggtttgaaacccagtgatgttactttttaactttgtgccttacctactataagcctcagcttcatccactacagtatgccaccctcttaatagaatttatgtaagaattacagaaacatacaagtaaaggattaagtgtagagccagcatgaggaaaggttcaggaatgtggttgcctcatatgactgctatgccttacttctgtacatggagcactgtgggagaataaaagaaaggggtggtcattccttagagcatgttctcactgggggaaatcctggcatcttgagcaggacaattcttcactgtataggactaccttgacatttagcatcctggtcccatggcagcagaaggccagtagcacccccatcattatgataaccaagaatcatacccacacatttccaaactccctctgnaaggttaccacccctgctgaaaactgcttttccagagggaccatctacatttagaaacaatttagttctcttaataaaacgagagtgaattctt

SEQ ID NO: 362205 - DNA, 541 bp, Homo Sapiens
ccagccagagtaggctcagagactccagcacagccacatgggagaagatttatggacagaaaaaggaaagtgaggcacagaagcaactagattggttacaggttggcatttgccttatttcaacatgttcaaacaattggctacatttggccaaaactcaatgattggcacaagtgtaagctacggtctgtttacacctccacttgttatagttcacaatgtacagaaaaacctttaagtcgaacttaaaatacgtacagaggcaactttaggctaaacttgatttaacaggactttggagaattgttaatttgagtatattaggaatatagccattttgtgtataaaaaagctatgcgtggttttacaggaacctagttcaagaaaaatcagacatataaaacagactaataaggaagtgcttactctgattagaaaattattcaccttacaggataatttgcatcagagttcattttatctgtgtgcatccgaaatatgattttgtattaaaagtgagtacttattactatcttaaaaa

SEQ ID NO: 362206 - DNA, 405 bp, Homo Sapiens
  misc_feature (221)..(270): n is a, c, g, or t
tttaaccactcctactggatattgggaatttaagagaagacaaaaagaaaggacatgtgggaggtatacattactcccttattttccgattaatatgtcacccagattaaaattaaattactgaaattcatattaaaacagaaatgactagatactaggatatgtgcctatagaagtgtgaaaactccatagcaagataaagtctaaacacaagttttatnnnnnnnnnnnnnnnnnnnnnnnnnnnnnnnnnnnnnnnnnnnnnnnnnnttaagtggagaacaaccaataaagagggacccctttattacacatttataaaataatagaatatagttattaaaaatgggacactttttttcatttttggtatcttgtattcagtttttccatcctcttcacaat

SEQ ID NO: 362207 - DNA, 630 bp, Homo Sapiens
  misc_feature (32)..(32): n is a, c, g, or t
  misc_feature (47)..(47): n is a, c, g, or t
  misc_feature (54)..(54): n is a, c, g, or t
  misc_feature (82)..(82): n is a, c, g, or t
  misc_feature (401)..(443): n is a, c, g, or t
cgcagcatgagggaaaaccggcacaacacaanccttgaggtgccctncctgaancatcagattaaattatgcctccatatgnttttgcttttacctgtatttcctttaaaaaccctaaacctttattcatgtgtcactggattaatttatctgataatgtgtctcacaagaatctgttagatcgtttattcttcagttgtactttgaatggtggggtggaagtttcaggtgaacaatggataacaaaaagcaagttatggaagattgtgaagaggatggaaaaactgaatacaagataccaaaaatgaaaaaaagtgtcccatttttaataactatattctattattttataaatgtgtaataaaggggtccctctttattggttgttctccacttaatcnnnnnnnnnnnnnnnnnnnnnnnnnnnnnnnnnnnnnnnnnnnggtttataaaacttgtgtttagactttatcttgctatgggagttttcacacttctataggcacatatcctagtatctagtcatttctgttttaatatggaatttcagtaatttaattttaatctgggtgacatatttaatcggaaaataagggagtaatgtataccctcccacatgtccctttcttt

SEQ ID NO: 362208 - DNA, 404 bp, Homo Sapiens
  misc_feature (180)..(222): n is a, c, g, or t
  misc_feature (368)..(368): n is a, c, g, or t
  misc_feature (379)..(379): n is a, c, g, or t
  misc_feature (392)..(392): n is a, c, g, or t
gtttcaggtgaacaatggataacaaaaagcaagttatggaagattgtgaagaggatggaaaaactgaatacaagataccaaaaatgaaaaaaagtgtcccatttttaataactatattctattattttataaatgtgtaataaaggggtccctctttattggttgttctccacttaatcnnnnnnnnnnnnnnnnnnnnnnnnnnnnnnnnnnnnnnnnnnnggtttataaaacttgtgtttagactttatcttgctatgggagttttcacacttctataggcacatatcctagtatctagtcatttctgttttaatatggaatttcagtaatttaattttaatctgggtgaccatatttaatcgganaatagggagtnaatggtatacccncccaccaggtcc

SEQ ID NO: 362209 - DNA, 1211 bp, Homo Sapiens
  misc_feature (18)..(18): n is a, c, g, or t
  misc_feature (84)..(84): n is a, c, g, or t
  misc_feature (102)..(102): n is a, c, g, or t
  misc_feature (111)..(111): n is a, c, g, or t
  misc_feature (635)..(685): n is a, c, g, or t
  misc_feature (693)..(701): n is a, c, g, or t
tggaaagcgcggagggcngacctgacccgccgaaagggcctgaggcgaggggagcccgggtcccggggccttggggaaggaccngagccgcacgccgggccncaagtgcanagcattgacacgacccgagcggagagggggcgccctccttctcccgcgcccagaggcccggccgctttggcccgagccccagcctggcctccgacccagctccgggtcgtggcgccgcctgggggtccctgcgccccggaaagagacagcaggcactggaaagcgaggccggtgggcgggcgagtcgggaggctcgggcggccgaggtccgggagcggatcccaggtggcgggagctggtgccctggcaggagggactggcttacgccaccctgtgcaggatcgtcttctcagcttacagagcctagtgtgattcaacaaccctccatctctgcccccaacatgcccaactgatctggtggagggaactgaagatgaaggcctctcaggcaccatggatgggatgggtgtgtgtgaagggggcagggtccccaggagctgccccaggtctggctggacagttgcacgggaagtcctgtttgtgaactcaacgtttccacggcttttccattaaactttaccccnnnnnnnnnnnnnnnnnnnnnnnnnnnnnnnnnnnnnnnnnnnnnnnnnnncaagacannnnnnnnncgcgccgcgccacaagaaatactccccagcagagggggcgcccagagtaatccggcgctaacccaccagagttttgtgggacacgaaggggggccccccataatattggaggaacgcaggattctataaaacggacgaaggacaaggggggccgacgagcgaataatacaacacgcctgctggccgcggcggaacaaaccgtggcctgccgcggaggagcacactcttgtgggagagaggagaaccaccacttatacagtcgcagggccgggggggcaccaaattatggtggggcaccagcacatctcctctaacgagaaagatatttaaaacacccccaagagagccaccaatccatatcacactttttcagcctgctacaacagctggcttttaaaaccccagccggccgacattatctgtagactggtcggaaaacatttgttggtccaaccaacggagcatgatacgtgcgagacaaatattttttacccggagcccatacacaac

SEQ ID NO: 362210 - DNA, 533 bp, Homo Sapiens
ggtgcggcaacgaccagagttcatatttaatattcatgaggcacaagatatacaacacgcacttaatattcattaatcagtatatattcataatatactaaatatacaggagatattaaacgttcacgggtcttaattctgccacccagtggagacactcaaaagtgatctcgccaaagaaatgcaaaacctgtacctgcccaccaggctattagcatgctactgctgtggtcaccattctttcactgcatcgccctgccctgcatcggaatatagcaccttgaacacgggatcaggtttactgaattctgtgacccacgctgggagctcaataaatgtttgctaaacggaaatgaacccaattcagaccgtgtagaaaccccagattatatcttttctccaaacattcaatttctaagcagtatttttgaaaatgcgtgatggctaaattcgagttatcctttttgtatgtatgttaggcacacaaccggcgatgacatacaaggcgaggtgacaccactgcactcccagcc

SEQ ID NO: 362211 - DNA, 1362 bp, Homo Sapiens
  misc_feature (521)..(530): n is a, c, g, or t
  misc_feature (694)..(702): n is a, c, g, or t
ggggcatgagccactgcacccagccttgaatttttaattttatctctgatatacttcattaagtgtctggagacctaattatcctaaaagatcatacattttctacctatgaattttgctgcatacagaaagtgccctttcctcaggaagttgctgtgtttcatttctttggatggactcttatctagaatacatagcagctctgcaaagaaacagtttttaaaaatgggaacttctacattgaaaagtccccatttttgtgccaactatgattagtgagaggaagaaatcttattctatggcatatgtatggaagggtgtaaagattcttttgaaaggtttattcacattgtagaacagcaaatgacatttttacagtattttttttgtaaagcaaactattttgtgccttgaatttggtatatgtgtattagtgaaacattgtaaaggtgaacttctacctctgtatctaaatgtataccatccacttgtaaatgactataaactattatgtgattgcnnnnnnnnnnagaatgtcttgtttaaatagtggccaatgtctaaggctgttaaaataagccaacttttactaattggggagttttataaatgactgattaaatttaaagaattaacttacatgcaattgtgtgattattagttatcagcagtgttgtaaggaaaattattgtgnnnnnnnnnatgatcattatcccactttaggtaaagaaaaatattggaatggaatagtgttgggaaacagacattaacaacctagggtgcctgcactcaaatagccgatgttactgtccctagattagagacttgattaagggcttgtttgtaccaaaagtggggaaacaatgccatgacctgtgttttagtttggctgcaccacagatcaaatctgcactgtgtctacatataggaaaggtcctggtgtgtgctaatgttcccaatgcaggacttgaggaagagctctgttatatgtttccatttctctttatcaaagataaccaaaccttatggcccttataacaatggaggcactggctgcctcttaattttcaatcatggacctaaagaagtactctgaagggtctcaacaatgccaggtggggacagatatactcagagattatccaggtctgcctcccagcgagcctggagtacaccagaccctcctagagaaatctgttataatttaacaacccacttatccaccttaaaactgaggaaagtcgtctttacatctaattttattcttgtgtgttataacttaaacctatttctatttttgtttgttattgcccttataagggtgtccatctccaagttcaataaactaattcatttaacttt

SEQ ID NO: 362212 - DNA, 465 bp, Homo Sapiens
  misc_feature (20)..(20): n is a, c, g, or t
  misc_feature (33)..(33): n is a, c, g, or t
  misc_feature (40)..(40): n is a, c, g, or t
  misc_feature (48)..(48): n is a, c, g, or t
  misc_feature (61)..(61): n is a, c, g, or t
  misc_feature (71)..(71): n is a, c, g, or t
  misc_feature (104)..(104): n is a, c, g, or t
atggtacccccgggaaaaanaacccctgtggangggaaangggaggantcaaaactgtggnaaagataaanaggaagtaactgcaacacaaggaacagtaagantgtcctgttcccctgccagagggataagtgaaggaaactgaatgaaggtgaactgtgaagtgcccggggccctctgtcgttatcctccgaaactccctgaacctcaggtgatcccaccccgcgttggccctccccaacgtgcctgggattaataaggcgtgagcccacccacgccccgccctaaaatccatattcaaagaagcaatttcagttcctttctaagctttgtcagtcaaggggctccactgacttcctaggccctgtaatttaaccagtctttaaggttttgcaggaaagtcccttcttccaagtggtttttccaaatcgcacaatggcaaagccaaacagaggaagaaacatt

SEQ ID NO: 362213 - DNA, 469 bp, Homo Sapiens
catattaaaatcacaaactcatccattaatgtagataaagcactgtttggatatgagatgtagcaaattccaatacattattggacttccatttggaatcatatgggatactgctggtcttatcctgtccctcctccaggtagagagaccacaagcaggctcaacataacataagctagaaaaattagatgactgaatttctatggcatattgataataaaattcattccatttgctgattgtctgaaattttctagaatactaataaaatacatactatagattctttattagtgaagtatgcactaatcaatactttgaacacaaagcctgtgttactgatttggccgttttgtgaagaaacatttatctttgtacgttcttctattgtgctttctatctaatttttattaatttgtaagagtaagcacctttagaatattaaaaattaattctttatcacatgttg

SEQ ID NO: 362214 - DNA, 983 bp, Homo Sapiens
  misc_feature (347)..(398): n is a, c, g, or t
  misc_feature (664)..(678): n is a, c, g, or t
attaaaaccagcctttgacaaatcaaggaaacttttcatgtcgtcactgctacctcatccgtggccacaaaatctcagtcaagatctagggttgatgcaaactggagtcattcccagtatccacaacacttctcttgtgtcttctgggaagctaagatttcatcccttgagtttcattgctgcctgaatctattgcatcttacttgagagcctcatttattccatgctacaagatccatgcaagattccaggatcaccaagatcactccaggaaatgaagagatcaagagagctgccatggacaagtctctgcctctctgcttcagcttctagttccctcataatannnnnnnnnnnnnnnnnnnnnnnnnnnnnnnnnnnnnnnnnnnnnnnnnnnncttcttttctagatggtgacgtgatggcaaccttaaaacctcatgccattcttcctcatcattctctgggttaaagaaaggcctaaacttttccagcaattgacagagccttggtgtgtcatattgcctcattgtgcctcagttgtcccatcactcccacttgggggaggatatgaatgaatggatcttagttttaaagagctgaaggtggaattcagttgcctgattgctagcatagatagtacctctatgtatgtgccatttcnnnnnnnnnnnnnnngattgtttagttcatttatttgtgtaaccaattttgattaaaagctgaacactgtgctggaagctgaggcttcactggtgtagggatgccatttctgccccctaagaatcacaagggctagagcattgcaggaggtccttacagcaacaattaccatgaactaagcctttgcttagtgcaggcactgtgttaagagggaagttagtaatgttcttcccattttagaattttgtaactataaaaatataatgcaggcttaagaaagagcagtttaaaatgacataaataaacctttgttttaggga

SEQ ID NO: 362215 - DNA, 1232 bp, Homo Sapiens
  misc_feature (1003)..(1012): n is a, c, g, or t
ttaaaacgcaaccgtagccacagcaattttttaaacttcaatcaacaacagattttcggaggaggaatatgttattgctgactttgttcagagataccggcacacggtggtaataagcaaactgacttctagtcagttatgattcctaaattcgccacagatagtgcaccccctactgcctgcacctggtactggctgctcccaccctcgcacgcaccctcaatacccacgggtcaccctggaagccgctacattctggctggtagagtcgtggaccctcttctccttggatcagatgcttgtttttgatgtcggcttgttgtggaccaatgtgagaagatgagcttcctgggaattcattcgtttgcttgtggcactaactctagtcacttagggaaaatatcgttgcacctgacttcatctcatgtggctgtgggtagacctgtgcagttagtcagctcccggcctggaaattaacacaaaggaaaaacctgaccacacaggccttcagggaagctgtggtctgagggtggctggtagaactgccagagagtagggcattttccatggctccagatcaccttctgaaaatgcgactatagcccctgcctattcccggggtccacctggtctgcagaccccataataccaggaagagctgggtgttctggcaccagtgaaacaatacctggttttttattttaaaccagcccatcttccccgctgcagttggaaccgttctacgtggatttgggatcaaccagcaggcctttcctgagctgttactgtgtggagtgggcgctgaggctccagccattgatgcaaagaccccaatcctgacctgaaggcgctcacaatctctccccaacggcctggtgtgaaacgcagacgcaacgcagcaggcattctccccagtggctgcctgtagagcaaatggtgcagaaatggtcactcctcaaaaagcaagccggctggagccagcccagctcccagttttgcaagnnnnnnnnnntcacagctccattttcaaagatttcaagggcagctcaagaccagcctggactagcaggcctcaaatgcattactggagacccctttacgctcttaacaagtaccgaccccaaagaggctttttgtataacaatgtctattgatatttactctactggaaattaaaagtgagaaatttataacatgtataattcattaaaaataacatataaatccaaaaa

SEQ ID NO: 362216 - DNA, 818 bp, Homo Sapiens
  misc_feature (805)..(805): n is a, c, g, or t
tagtgtgaattataaaactttattaaaatacattgtagaagatctaaagttaaaaagaggtacacatgttcctgaatatgaagacttaaatgttagttctttctatagattcaaacaattccaataaaaattccacaatattttcaaagaacttaacaagcagaagacccaagaatagccaagatactcctgaaaaaagaaaggagggaggagaaacaccctaccagatagcaaaacttattatatagctctagtaatagataaagtgtggtattcatgcaggaatagacaataggttaatgaaacaagctatgtatacatgaacatttgatgtatgaatgaatcatagcaggtcactgggattaagcaatgaatagggctgggataataggctaccatctgaaaaaaatatatccctacatcaagccatataaaataatcaattagcgatagttcaaaaattgtagtgtaaaatgtttaaacttttagaagaaaatatggaataatatatttactttagtgtagatgaagttttctttaaaagtagaaagaatacactaaacataaaaataaatattaataactttacagtaaaattaacaacttctgttatatcataaagaaataaaatatgagatcaaacttgtttttacaacatctttaatccacagagaattattacccagaatacataaaaactcctaagagttattgagaaaaagacaaataagcaatagaaaagtgggcaaaaggtagaagtagatatttcccagaagataaaacctaagactgtgagtaaaccctnaaaagatgctcag

SEQ ID NO: 362217 - DNA, 358 bp, Homo Sapiens
tataccacatctggaactcaaaatgctatcaggtttgagaagactctggagtaagaggtccaggctatgatactagccatctgacacaaaccagccactccagtgttgctagtaatgcccatgatggataacaatgctgtgtggaatttctggcatggcacagtaggaaagctaaagtgcaaatctttcaatggtatagccagtaaatctaaatggggtagatccatgccttctacagtaggaaatttctcagtgcttataaatagatactatcatgctccttagccctattagagactgagtagatgacaatgggacactgtgttaggttgttcttgcactgctagaagtataaata

SEQ ID NO: 362218 - DNA, 1218 bp, Homo Sapiens
tgccttaaagaaaataataagagaagggtgtgttctcttccaagtaatgagccgatcaaggggaagcaacccaaggctagcaggctcttttcaattcccagctctgccactcttagcatggcagagagttggcctcattatgccagtatggctgaccacagtgtcagacatcacattccaggcagtggaaaggagaaagaaccaaagggcatccctttctcttgaagcagtccctgtgaggggggattatctggaagccccaacccaatttctgcttccaaccattatccatagaaacaactggaagttgagaagtgcagtcttttaggtgggcacctggctgccctgtatgaaaccagaattaggttggtcagcaggaaaacaagaaaacacttactgtgttgactgaggtttttgacgcatcgctttattgtcaaattaaacaactctatctcattctgcactgaaacacgtactaccattgcctataattggaaaatgatcctcagaggcacagaagatgccctgatggaaagtttgccccttgggcaaagagacagccatgggaaccttcagacatagagagagaaggtggcttttctccctacattcctcaaatagctaagatttggccagtgtgttttctaagtcaattctagtgtgtttcatcctcacctcttccctctgtggctttgatgatggaagtgtagtcctaacctactgcacagctgggaccccctgcccctagatcccaatactggggatgggaggaccttgcactattcccctcagtccatctatcgaggtctttgcaggaagcatactgggaattgaaacgagagcctaaatgacatctaagaaaggcagtgttcaataccaggtattaggtgaggatgggattctaaggacatcagtgggaggcagggagccaccttcagacctcagcatggaagcttccaagatccagaggaagaggcaacagcactgagagtcataggtagaagaatcatcacagccctgctaaccaggcagctgatgcccctctcccctggctccctgtgtccaaatcctacaggggcatctgttggctgaactcaacctgaagccaaagagaagatgagtggagagaggcaacatttatagagctcaggtttctagggctggagagggatctggagggacacacaggagacacctggcataaccaaaaaatgatta

SEQ ID NO: 362219 - DNA, 460 bp, Homo Sapiens
gagggaactgaatccagagaggaagagtctatagtcatcaagttgtatccatgccagcctccctccacagaggtggcagcagcgtggctcaatctgatccacctccatggcacccactgggtaggtgcttcataaagctttaccgagttaaatgtgaacaaggcctaccactttgccttgggcagctgcaccaaattagaatttccagatgtgactcatctcatattccaacagctggagtgggtcatcctttacccctgtggctccttcctacagctctcctgatctcagcacaagcaggggagcagctgggggaacacagctttatgtaattacctctgttcaatatttagcaagttgcattgtaacattgtaactgtttgtttctccttggatgatgagctacccccaagaaggggtcatatcagattgggtctcattaaaatgtctgatgaatgaa

SEQ ID NO: 362220 - DNA, 439 bp, Homo Sapiens
agccaggaagatagatggtcatggcaagcgcacagcaccagacttactggctcaccaagatgatggaaaaaggcagatgattttttaaaaagccgtaatgactcctttagaccagccatttagcgtggtaattttgaaaggcctagctccattgcagacttccaaagggtcagctctgagactgccctccaggtgggcagttgattatttccaccagtgttttccagagccttaaactgtcctaagtgacaactacctcagttggcaggaaagagacatatagtagaaagtgaaaaatgagcagtatttgggcagatgctatgggttacagttgaagggtaaaaggaactttacattgggaaacctttatacccttgtgaattatgtacatggtaaaatgttctctctctacaaagaactattaaaacttctgaaatat

SEQ ID NO: 362221 - DNA, 696 bp, Homo Sapiens
  misc_feature (47)..(47): n is a, c, g, or t
  misc_feature (52)..(52): n is a, c, g, or t
aaagactgtttcgtggtaagtaaaggagcaaatactatggacattgngcggncctgtgttcagaacctaccttcctcgtcacaggcttaatgctggtactttgggaacaatgggagttggtttgggatttgctattgcagctgccgtggtggctaaagatagaagccctgggcaatggatcatctgtgtggaaggagacagtgcatttgggttttctggcatggaggtagaaaccatctgcaggtacaacttgccaatcatactgttggtagtgaataacaatggaatttaccaaggttttgatacagatacttggaaagaaatgttaaaatttcaagatgctactgcagtggtccctccaatgtgtttgctgccaaattcacattatgagcaagtcatgactgcatttggaggcaaagggtattttgtacaaacaccagaagaactccaaaaatccctgaggcagagcctagcagacacaactaaaccttctcttatcaacatcatgattgagccacaagccacacggaaggcccaggattttcattggctgacccgctctaatatgtaaataaagacgccagttggtggtcttgagttttctctttcttgcaagatgaaattttattttccacagcaaaattactctactgttaaaattgtgcaaaataaaataaacatttaaaatgacatttt

SEQ ID NO: 362222 - DNA, 488 bp, Homo Sapiens
  misc_feature (11)..(11): n is a, c, g, or t
  misc_feature (29)..(29): n is a, c, g, or t
  misc_feature (43)..(43): n is a, c, g, or t
  misc_feature (86)..(86): n is a, c, g, or t
  misc_feature (93)..(93): n is a, c, g, or t
  misc_feature (99)..(99): n is a, c, g, or t
cccaaccggcngggtaaaaaccttggccnaaaccaaaccggtngggtaagtgaaataaacaagggaaatttcccccagggttttgnatacggnatactnggaaaagaaatggtaaaaaatttccaaagatgcctactgcagtgggtcccctcccaatgtgtttgcctgcccaaattcacattatgagcaaagtcatgactgcatttggaggcaaagggtattttgtacaaacaccagaagaactccaaaaatccctgaaacagagcctagcagacacaactaaaccttctcttatcaacatcatgattgagccacaagccacacggaaggcccaggattttcattggctgacccgctctaatatgtaaataaagacgccagttggtggtcttgagttttctctttcttgcaagatgaaattttattttccacagcaaaattactctactgttaaaattgtgcaaaataaaataaacatttaaaatgtc

SEQ ID NO: 362223 - DNA, 907 bp, Homo Sapiens
  misc_feature (81)..(81): n is a, c, g, or t
  misc_feature (142)..(167): n is a, c, g, or t
  misc_feature (422)..(433): n is a, c, g, or t
gaacatggttatctgtgggacccataaaaaatgggtcctggcaatcttaaataatcaaatagggaaaaatgatgattgttnccatgacctttaaggttctgctcaaatattaaaaactcttaagaccagttataaatgtagnnnnnnnnnnnnnnnnnnnnnnnnnnatttagtacactgtaatttaaaacattagaaatagaattaaagtgttttatttcattgtaaaaacaaagtagtttgaatagggcttgcctttttttctggcaagtaacttaccatactgagtaagcatcttttatgttcacggcaaactgccatactccttctaagtttgggtcagcttccacccttttattgcttgtgctttcaatgttgtgaaatatttctatattcacattaaatatcttttaatgtaaagnnnnnnnnnnnnaaccatcacttcctctgggacgtatctgtctttattgcaaccactttgcttatttgtgttggtaagtttgccttcactaagctcctatgaatacacagcagcaagaacaacattcccatggtcagtgacttcttctacaaattcatttatgtttgattaaaatttcacttccagtgttatcatttttcattgctttgctgcactttcatctttgttgaccagttctttcgagtgttcacttctatagaatgtcaagtagatgacagagagacagcataactacatgctctgctgtacgtgaactgaattaacagatgcacagggacaaaccactggaagaatttgaaagaaataacatgactggtcacaatcatgaagcatatctgttatttacatagcgatttgtagactgaagagctagcagagaggttgtacttcatgtaattactcagttacaatgtgctaactaaaatt

SEQ ID NO: 362224 - DNA, 542 bp, Homo Sapiens
cactctcagactcataagcatttaaaatgggagaccctgggaaagcctgttctagtcagtccaccctattgtcattatgaaagcatcatgaacacaagtggcccctgtggcaggccgggacggctctgccctgatgcagtgggcgggatctctggggaaggcaggaaatagaagggcagtatcaggtaccttgtctcccagcttcccactgtgagactgggtgtgccgagtctgacctgccagggcaggactctggaaacaccaggcttctcccttgagatccacattgattcatccacacctctcagagacagctcatggcaggggttttgagcctgccaggctcttgttcccagggaacccttcctctcctccctcctctcatcttcccagtcacctgccacctccagctccacctggtagtaacatttctctctccttttaaaaagaatatattttgtcaagcattttatttctgaggctgagaagtgacttgtcaatttgctggactggatttttataaaattcgcccattccccggc

SEQ ID NO: 362225 - DNA, 1208 bp, Homo Sapiens
  misc_feature (667)..(757): n is a, c, g, or t
  misc_feature (879)..(938): n is a, c, g, or t
ccaccctcccagccgctgcctgggaccggggcccagttacccccccagccccgataccttggtcgtcccccatcaccaacctcaccacacccccggagctgatggatgtgagcatggtgggcggccttgatgactgctccccacctcacccagcgcatgcccccaagcacccgactgcctcagccatccggactcggatgactggaggtcgtccacccctcccgcctcctgatgaccctgccactctggggcctcacctgggcctccgtggtgtaccccagagcacagcagccagctcgtgaccctgccccctccctggggcccctcctgaagccataccctcccccatctgggggccctgggctcccatcctcatctctctccttgactggaattgctgctacccagctggggtgggtgaggcctgcactgattggggcctggggcaggggggtcaaggagagggttttggccgctccctccccactaaggactggacccttgggcccctctccccctttttttctatttattgtaccaaagacagtggtggtccggtggagggaagaccccccctcaccccaggaccctaggagggggtgggggcaggtagggggagatggccttgctcctcctcgctgtacccccagtaaagagctttctcacnnnnnnnnnnnnnnnnnnnnnnnnnnnnnnnnnnnnnnnnnnnnnnnnnnnnnnnnnnnnnnnnnnnnnnnnnnnnnnnnnnnnnnnnnnnggagggggccgcacaatcaaggcaagacacagacgacaaaggagggacgaagaacagaggatagcaacgcggtgtgacgaacaacgagcaggcacacgcaagcgaaggagggagccagcacnnnnnnnnnnnnnnnnnnnnnnnnnnnnnnnnnnnnnnnnnnnnnnnnnnnnnnnnnnnnaccccacacgcagcagcagacactggagcggagacgacgcacacgacaacaccaggaggagaacgcaccagacagaagggagcacaacacgaaccgcccacagccagagcaagaaccgcagacccacacaagacccaagacaacaaatagacgcacagaaaccgacggcggagtcagactcgacgccgaagccacagcacagcaccaaagaggcgggcagcgagaaagagaaagaggagaagaagacgcaagacaaagacccacacaaca

SEQ ID NO: 362226 - DNA, 329 bp, Homo Sapiens
aaaatcttactgtgtcaaaagaggcattatgttgcttgtgtgatatagtgaatagtgtccctccaaatttcatgtacacctggaatgtcacaatgtgacttaacagtagccacccctcacccccgcccttatctgtggtggatacatttgcaagatccccagtggatgcctgaaaccgcagatagtactgaaccttatatatactgtttgttttcctatgcatacatatccctatgataaagtttatgaatttggcacttaacagcagaactaataagatgaaagagttgtaacaatatactctaataaaagttatttaaaatgtaaaa

SEQ ID NO: 362227 - DNA, 758 bp, Homo Sapiens
  misc_feature (155)..(178): n is a, c, g, or t
  misc_feature (186)..(437): n is a, c, g, or t
  misc_feature (470)..(628): n is a, c, g, or t
  misc_feature (649)..(650): n is a, c, g, or t
ttttatgaaatgcatatattataattatgaattgggtacgtctttattagtcatccaaacatcaatagcctattagcagaacacccagtcataatcataattgtcattgatattttgctgactttcagtcccattaaaaaccatagatttacacnnnnnnnnnnnnnnnnnnnnnnnngagatggnnnnnnnnnnnnnnnnnnnnnnnnnnnnnnnnnnnnnnnnnnnnnnnnnnnnnnnnnnnnnnnnnnnnnnnnnnnnnnnnnnnnnnnnnnnnnnnnnnnnnnnnnnnnnnnnnnnnnnnnnnnnnnnnnnnnnnnnnnnnnnnnnnnnnnnnnnnnnnnnnnnnnnnnnnnnnnnnnnnnnnnnnnnnnnnnnnnnnnnnnnnnnnnnnnnnnnnnnnnnnnnnnnnnnnnnnnnnnnnnnnnnnnnnnnnntgagccactgtgcctggcccaagactctgtctnnnnnnnnnnnnnnnnnnnnnnnnnnnnnnnnnnnnnnnnnnnnnnnnnnnnnnnnnnnnnnnnnnnnnnnnnnnnnnnnnnnnnnnnnnnnnnnnnnnnnnnnnnnnnnnnnnnnnnnnnnnnnnnnnnnnnnnnnnnnnnnnnnnnnnnnnnnnnnnatcagaaacccgttccaaatnnttccactggataaatatctataaagaagattcaacctgtaaggagatggctgtatacactctcatgtaaaggcaaattcatttaccgaaaaagtgggaattaccatat

SEQ ID NO: 362228 - DNA, 767 bp, Homo Sapiens
gtatttagttcagtgaaccgcccgttagttttgtcaaacttcccactgcaatgcctttatttaaaaaaattgtctacttatctaaatattcataccacaatttcaaacctactcatgtccctgataaagctaaatttgtcccttttttattgttattaattgcacttaacatttttagttatactggatattgagtatggattttctctatatttgatctattggtgattaatctttttgtaatcataaattactcaattaggataaaaataaattatgttttaatgaaattcttaaattaacatctttttaatggaacatttaagtgaatatatgcatattgaatttctaaatatttgttgtgcctgtctttaccatgtaacttaatgtttgcaaggccagagtgtttgaaagttttgtatttaactttataattaccttgtcctttctggttgactatactaggctaagccctcttaatagccatgagtgtaaaatttagtttactcatttttcacaaattgtatataaacatgcacttcactacattggtaatacactaaaattgtggtccttttcctcttgtgaccaccacatgtctagtgattattttgtttatttggttgctacttacctagcacattgtaatgttccatgaatgctaatattaaattttgtaaaaataacttatttataaataatttttaaagagaaaaatctcatataatttgtcataacctttcaataaataaaactgttaaatcatg

SEQ ID NO: 362229 - DNA, 489 bp, Homo Sapiens
gggtcacatttgggaattcccacaagcctcttgtcaaaagacgaattatgctcacttgcctgtgcaaccctgagccacaatcccccccctttaccccacgtcaaaactgaaggtgtcataggcagccccaactgggaaagcacagggagcgagcccccggaggggcaaacgaggctccctccaaggccccttttttacaaaagtctctccagcctttgacgggtgcagaaactagacgggccccccgaaagcagaacggcccatttgagcctggattactccccaggtgaaagtgcaggaaagaatatgtttgtttgctcccagcacccatgcctgcctgcctacctcggccttatccaggccctttttttgttgcaggctgagcccagccaggttccagtttgtgttaaaaacagccctctttgcaacccagtggctttgcctgtttttgaccctgtcagggtataaaagcttttgatactttcaggt

SEQ ID NO: 362230 - DNA, 700 bp, Homo Sapiens
  misc_feature (176)..(189): n is a, c, g, or t
  misc_feature (439)..(448): n is a, c, g, or t
tagaagttctaagctgattctaaaatcatatgtaagacaagaaagctatagaaaagaaagagtaatgaagaggttcttgccttactagctggaaagcatactgtaaagtaatatggaaacagtgtggcactggcccaagaatagacagagatacatgagggttatgaaaggtaagnnnnnnnnnnnnnngaatagacaaatggatttgtggaacatactagaaagcccagtaagaggcctctaacaatatagtcatttgaggcatgagccaccacacccagccacaaattcatgtttctatgagactttagttatgttaaatttggcatttcaaattggtggaggaagaatgcactattcgataaatgaccttggggataattgcttaccaattagaaagaaaagatatttagaaacttcctcacacagttcacacacnnnnnnnnnnttccatctccatgacaacctaaatgtaagaaagaaaaaatattagatagaaatataagaagaggatttattaccttggagaagaaatgtcttcttaagtatgacataaaagctataaaagaaaagattgacatgtctgactatttaagtgttaaaaacttcactatggccagggtagaattttttccaggaatgcatggttggtttgatatcaggaataatatctaataaattaccatagcaacaaaaaaaa

SEQ ID NO: 362231 - DNA, 456 bp, Homo Sapiens
gcggccgccagcgactgctggtccagaagcggggcgctctccggaggaagttcggcttctcggccgaggactaccgcgagctggagcgcctggcgctccaggctgagccccaccgcgccggccgccagtggaagttccccggctccttctacttcgccatcaccgtcatcactaccatcgatgaacacctgccgcgtaactgcagccacggtcaagacggaacattgccatcaacccccaaaattctaccatgccttcttggagttaagcctgcccccaaccccagctactggcaagcaaccacagatctgttctctgttgccacagttttgtcatttccagagtgtcatttatagggaaccatgcggtctgtaggctttcgagctcgtcttcctctactcagcttagacatttgagatccatccttggttgccgcaagttacaggagttcattca

SEQ ID NO: 362232 - DNA, 578 bp, Homo Sapiens
  misc_feature (418)..(418): n is a, c, g, or t
tttttcgtttaaatttaaattcttcacaaaacatcaaaaatgaattaccattatattataaacatgatcaaaataaatcttagacatgaaaaaagaacataatctcccaaagtagcacaaatctcacctccttcagaggcaaacatagagcaaaattaacaaaaagatattaacagaattgacctgtaattataacatgacatacagaaaactttttaacagagatgatccctaagaaaattacagttatgaaagataatgaggtgccttaaaatttccgcttgaaaattttgcaaaggctcattgttggtccatttaattactcaggaagatttgatcttcacaggaagcagcttctaatagcagctctggaatactagctgtgacttccacttggaaagtgtgctgccttcaaagncttgatctagatcttcccagtaggtctttcctcatcctctaagcccaacagaaagcgaattcagtgtgcactaattccaaggacatctctgcattcttaagactgatgcatgagtatgattggcggaagctcacaaaggcttcgattcttccagctctcg

SEQ ID NO: 362233 - DNA, 917 bp, Homo Sapiens
  misc_feature (712)..(774): n is a, c, g, or t
ttgaggtcgggtggcacatttggaagctcactgtatttaacttaatcaaatgtggtatgggaggggttggaaaccaagttgtctcctgggggggagaaaacaggttttatttttgtggctgtggttttttcccctttttaatctaactgcctgttgacattgacactcatcacggttgtaggctgtcatgaatgtgtacgtgcttaaccagtgaattccgtgttgctcttatgaggcctttcctgtcatgacccagtgtgcttaagaacctgcctgatggggagtgtcggctgtgaaatctgcaaaaagagctgacattccagctgctgtgatcatgaatttgggggtgtactgtcctgcctgtgcatcttctcgcactgagattttgaggcagttgcagccctcggttagtctcccagtggaaaaatcggttgtgcctccctgcttcccaccatagctgcctgaaaacatgacgctctcaagcttgtccttccttcaggaagatgtccactcatgcccacccatgagagggcttgccgtatgccctggcctttgggcatatttatgtagagttcctttctcctaagacgtgagtttctcatgggggatgtacgagtaaaaaggttaacttctgttcttatgcgtggcgctgtgttcactttccagagtctctgttcgtttgtttggatggcggtctcggggtacggcagcnnnnnnnnnnnnnnnnnnnnnnnnnnnnnnnnnnnnnnnnnnnnnnnnnnnnnnnnnnnnnnnaaatcgtgcaaatctacaacatgtcccagcccattttccgttgaaacagatcacagcaacgacaaacgctcatggcgctgctttgctccacccgcttcagatagatcattgttagatatttcacatttttgtatggtggaaat

SEQ ID NO: 362234 - DNA, 427 bp, Homo Sapiens
tgtccaaaacttggtaaggaaagaagatttttaattttctctttatacaagctgagtcatatttaaataatttgatgttggcttagataatttcagatagattttatattctggatttgtgtttttgttaacaaaatatacaaagactttggtgatcactttggcaaatatttgttaatccttgagtttgagaacctgtcttttaaaaataatattttgtatactaattaagtgtaatggaaatcacaattttaagtctaggaaataaagtattatatatactttcaaacaagctagcaaggcttttattattacttttttatttgaaatatcttatatatttggttagttctgtttaacttgtttttaactgttgcccttatgagttattttatataaatttttacaataaaataatttgattttc

SEQ ID NO: 362235 - DNA, 782 bp, Homo Sapiens
  misc_feature (304)..(304): n is a, c, g, or t
gttcaaatatataccctcttctaaactggtgcgggtaaaaggaatgactgtctttgagagacccaatagttttatcaagggtttatgtagttttgttgctgtaccctaactttgatattcagggaggtaggaaaggtaacagaaaaccagcatatttaatcaaagcaagaagtaatcgctgacagttaaatgtgaccaaaaaatttaaaagttcacaatttttttaatgtagccatttggggttatctctagtaaggcagatacccacgttggtaaatttttaggatattgtgttgcactaganaactaagtggttcatatttctaatgaggaagattaatgaaagaacatggttatattctgcgtgggatattttaaaagttaaaaaaggcatgttaaacattatttcctctatggtagttaaaatacagaattagatttttaacaggtgtcatttgactaaacgtttcggtagaatgcttcatacttgagtgatgctggataaggtattgtatttcaacaatggactatgccttggtttttcactaatcaaaatcaaaattactctttaacatgataaatgaatttaccagtttagtatgctgtggtattttaataagttttcaaagataattgggaaaacatgagactggtcatattgatgaatattgtaacatgtgaattgtgatccatttctgatatgtcttgaactactgtgtctagtgggcaaatgtcattgttacctctgtgtgttaagaaaataaaaatattttctaaaggtc

SEQ ID NO: 362236 - DNA, 1013 bp, Homo Sapiens
ctgggtagttatcccccacgctgtttcctatatacccacgtccggcccccagtggtcaaactcgctgttacaacaccgcgacaagtgtccatgatcgaatgttgcgcctattgggcctttttagttcataagtcacttgacgattgctccggcgctctcattacgttctaataatccgtctcggggcgctatgctgtaacctaggaatgcctgcctataagcctcgagcgaaagtcaaccccagatagggcctatgcgttctaaccgtgtcttggttagttgcctcggagacgccttactgtgcacccgcacacttatgttctacttcctgtctatgaataggtgctcagggtagtcgtcttggcattcgcaatgtagttattaagggctgttcaaccagcctgcattacatgctggaagtcaggacttgggtgctgactatgtacagggcccttgttttcaaaatcgtcacattgcaagtgtaaatgcgcaagaagcctccgttgtcgctttttttcttcctcttcagtaacttttgcaacattattgcatagaagatccctgaccatttactaggaacctggttaagcaagcactaatctcttttcctggagatcaaggatgcaacctcaggttgagaaagaaacagggttccctgggcccattagactgtttgcagggcatcactgcttccccctgacacctcacaactagcaaaaattgtctttgtctttggaaattatagagggatttgggtatccagattgtgcagatgcaaacttaggctgtcttgatgcaaacttagaaccacagaaatgcttttaaaatgcctgttttaagatggaattgttgtttttataatttgattttagtgctaaataaatgattggctttgtacatgaatatgttctgtacaagtgctctttcactagtactacagataatcaaagctatcagaattgtgtctttgatcatatttgacggtaatacacaaataaatccatgttttagca

SEQ ID NO: 362237 - DNA, 795 bp, Homo Sapiens
  misc_feature (496)..(496): n is a, c, g, or t
  misc_feature (781)..(781): n is a, c, g, or t
ctccacgctgttcacggtacagagcctcagtacccggacctcgttctgctgcccgatgcggtgagctcggtcttgggcctgcagatcctgatgaggattccagtcgctgtcaaagatgaccactgtatcagctgcctgaagatttaagcccaggccaccagctcttgtgctcagcaagaaaatgaaatactgggatccaggttcattgaatttcttcagcaaagcagcacgatcttcagacttggtggtgccatcaaggcgtaggtaaaggaagttccgaaaagcaaaataatcctccatgatggtcatgagagatgtcatctggcagaaaagcagcactcggtgattagtcgctctcaattttggcagaatacgatcaagcagctcaaacctccctgaggcccgatacagttcagccccattgatgaccccattcgaatagcctaggtgttcagcaaaggattcctcaatgtgctgaaacatatatgggtggttngcagatttttctcaactgcataatagtgttcataagtgtcttagcacctcctttccccttcttatctgtctcagaaccatctgtgagaaggatccccttggcttgcatatggcgatacagaatcttctgcagagctgacatgtcaccactggatcacatattccactttttccgggaagctgggatgcaacttctttcctcagtctccttaataaaaaatggcttaacaccctatgtagacgcctgatgatcaatatagtttcttcttcatttaagtgcaccccntcaccaggcatggg

SEQ ID NO: 362238 - DNA, 966 bp, Homo Sapiens
  misc_feature (694)..(702): n is a, c, g, or t
acttgcggtatgtgtgtatatatcgacattaatatatacacacttgaaaatgttaatcgaatgaatttactagatatgcatacatgtggctcagttatgcatatttgcattaaccgtgctagcatctctatttgtgcatgttagtgacaactgtctttgattgaaatattgcacagaggcatagtgtgaaaaatagagatacactgaattcaatataccaattgcctgatatagcgtgttgtactgtcagttgaaaaatatttgtaattttgtgcctgttatgcatgtggaaaaaagaggaaatcagaggccctcactataatttttaagggtgcatgacatatgatgtctttaaaatgtggttcattttagtagattatggataaattccaagatagtataaatgatgcatgtaatacctgagtgtttgtattatatatggccaccaaatgtttttgaagccagggtagtagatatctaaaagttataggcaaagaagtatgaaagttaactttctgtgatgtgtttttgaggagttgatactcatcagtaagcaaggaattgagtttattttttctaagaactctttactttgaaatatattatgaatgttgtaaatttggataacgtttttataaagaggttacatactttctgctcacagtttcagttgattggatgtgtattctctttnnnnnnnnncattttgtgttaaaacatttgacacagcaatatattttttaaatccatcaactaagtccatcagcagagctttatagagctaagggttgacaaaatgtttcattgaactacccaattttgaaagttcagttactttgtgctgtggtttcattgtaaaatgttgtaccttgtgtttcacactggaccatgttattcctcttgaagttaactttgtgacacttaccaccttagaataactatataataaacaggaaaaactgccaa

SEQ ID NO: 362239 - DNA, 1003 bp, Homo Sapiens
gggattgtaattctttaaagtcagttgattaaatgcaataaatattggttgctcaaatatgccacaaataactcgaaatttttcatttactttcaacagcataagattctttaatatttaggattgactgttctttccagttaagcactgaaggattatgtcttgtagcttccccaagagaaggggaaggaaaaaaaagcactatgttaaggataatacagaactcttttgaactattttggtagtaccttttaccatactgtttgctttttgatttgggtaaatatcttaagagcaaagaaaacaatacaccaaatgaaaatgctttgaaagtaaatgaaaacagcgcttttgaaaggctggtatagtatgaccctggagtcagcctttgtgttacagcgaaaatgttggtgctataaattctgattgtttacagatgttgattctgcttatgctccaaagtgtgcatgatgtattttacgtagtactctgaggaagtctctttataaaacctactaccacttagtataaatttgtttgaatttatatcatttgttactgtaaattcagcttattccaattaggttggcacagatttaaactgatacacattccacaaaaaccaattcagtgtataagtattgaagtataagcagtcattgcagcttgatgccagatcatgtatgtaataacaagtggaagttaatagggccttctaatactgtatgggtactcctaagaattatttcattttggatataaagaagttatgaggcctcctgtcacattcacagctggttctccaaaataatttggttgtttcaaaaacaaatggtaatcatttggttggattcttcagtatcatgactagatcatgtggttttaccatagttgccaagtggtgggaggtagcatacctgaaaatgtacgtgtgtgtttgttgtattttttcacattttgtgaacaaagcacatttattaaaaatttaaaattttctagtaaa

SEQ ID NO: 362240 - DNA, 491 bp, Homo Sapiens
  misc_feature (167)..(188): n is a, c, g, or t
tacaagatcaaaaacttagccgggtatggtggtgcatgtgtgcctgtagtccaagctacttgaaggctgagacaggaggatcggttgagcccaggaggttgtggctgcagtgagctgtgatgtgcccttatgctatagcctgggcaagagcgtgagaccctgtctcnnnnnnnnnnnnnnnnnnnnnntaactcttttgaacaaacagacaaattagctagtagtatggagatgtataccctctattacacacataaaaccgtaacaaaattcattgtggtgtattataattagttttgtgaatagaaaaataaagcacttatgtttaaatttgttacagtgacttttaaaggattaatgttgaatcacattgtcagaattttttcctcctcgctgttcaattttgtagtttttactctcaaaaaatgaaattctcaaaattatatagctttttgttttgtttgaataaatgattcattcctgtttaaaaa

SEQ ID NO: 362241 - DNA, 413 bp, Homo Sapiens
  misc_feature (33)..(33): n is a, c, g, or t
  misc_feature (65)..(65): n is a, c, g, or t
ccccgggggtgggggccgcccgtgagcctgtgnaagtgcccccctagggcccaaacccccgggcnagagccgtgagaccccctgcctcaaagaagaaaaaaagaggaaaaataacccctttggaacaaacaggacaaattaggctagtagtatgggagatgtatacccctctattacacacataaaacccgtaacaaaattccattgtggtgtattataattagttttgtgaatagaaaaataaagcacttatgtttaaatttgttacagtgacttttaaaggattaatgttgaatcacattgtcagaattttttcctcctcgctgttcaattttgtagtttttactctcaaaaaatgaaattctcaaaattatatagctttttgttttgtttgaataaatgattcattcctg

SEQ ID NO: 362242 - DNA, 442 bp, Homo Sapiens
tgtgtgaactcctgattcataggggagcccacattgatgttcgtaacaaaaaagggaaatacgccactttggctggcatccaatggaggtcattttgatgttgtgcagttgctagtgcaagcaggtgctgatgtggatgcagcagataaccggaaaatcacacctcttatgtcagcatttcgcaagggtcatgtaaaagttgttcaatatttggtaaaggaagtaaatcagttcccttctgatatagaatgcatgagatacatagcaacaattacagataaggaactgttgaaaaaatgtcatcaatgtgtcgaaaccattgtgaaggctaaagaccagcaagctgcagaagcaaataagaatgcgagtattcttttaaaggaacttgatctggaaaagtcaagagaagagagcagaaagcaggctcttgctgctaaaagag

SEQ ID NO: 362243 - DNA, 519 bp, Homo Sapiens
taggctggaaaagttgttcttgcactggatgcagcatgagaagctggctgctaagatgtcactgggggtcactaaagctgaagcctgaaggaaagcctctcattgctgtagagctctccctgcctctctctctgggggcgatggggaaggtcaggagtccagcccattcccagggtgtgtgggatagcgattgcattttccttttgctctggagtttcactccccttctgggtcccaagggcccaatggcctgacttttagaattgcttgcaattggtgttttctcttgaatttgggggctgccatttaaagccaggtttccatgagctgaagaccagccattcaagaatctgaaaagtagacaagaggactccagttgcctcaggttggttctgctgtgctctggaaagtaactgcagccaccaggtatgaaaaggagcctggtggggagaccactgcacccaaaacaaatcctttcttcttctgagaatgtgactttttctggtgttgtaaaaaaaa

SEQ ID NO: 362244 - DNA, 359 bp, Homo Sapiens
tcccctccaccctgtcggagttcggcccgggagcaccccaccccgcagagggcgccactcccggcttcctggagacgcaggaagccctgggggcgcagccatcccacagcgcggccgaggtgggactgggggtcccgcagcgaccgcttttctttggtgggtctgcacgcacctatccgggcaggcggggaaaggggccgggcggccacctatctcctgaggcccgcaaagaccgcccgctctcctccaggtctggccagctactaagacgatcctccgcccgaggctgacggaagtgcttcgccgaggcccgcgccatgctctcctcctcagaaagcgtgaaagaaaaccctaaccca

SEQ ID NO: 362245 - DNA, 780 bp, Homo Sapiens
  misc_feature (58)..(58): n is a, c, g, or t
  misc_feature (93)..(93): n is a, c, g, or t
  misc_feature (95)..(95): n is a, c, g, or t
  misc_feature (100)..(100): n is a, c, g, or t
  misc_feature (174)..(174): n is a, c, g, or t
ccttaggagccatgagatggactgctgacaaacagagtggtcctgctcactttgtccncctgaatggaacaaaactgaccattaacccttaangntggangtggagtggacaaagtgtgcccgaggttgtctcccaaagaaaaaaccatgttcccccaacttgacagatgtcanggaggtgtgacagacccagttcctatgcagtgggacccaggagatgagagtcccctgcaacgaagaatctgggggagcagttttccttgagcggagattcaggttttttcaggtgggtctggtgagctggggtctttacaacccctgctttggctctgctgacaaaaactcccgcaaaagggcccctcgtagcaaggtcccgccgccacgagactttcacatcaatctcttccgcatgcagccctggctgaggcagcacctgggggatgtcctgaattttttacccctctagccatggccactgagccctctgctgccctgccagaatctgccgcccctccatcttctacctctgaatggccacccttagaccctgtgatccatcctctctcctagctgagtaaatccgggtctctaggatgccagaggcagcgcacacaagctgggaaatcctcagggctcctaccagcaggactgcctcgctgccccacctcccgctccttggcctgtccccagattccttccctggttgacttgactcatgcttgtttcactttcacatggaatttcccagttatgaaattaataaaaatcaatggtttccac

SEQ ID NO: 362246 - DNA, 911 bp, Homo Sapiens
gccccctgacctgtcacaatggtctccaggcagtttgttgcactgcctggacaggaggtcccccttgtcagcactgggcagggaggggccctggggcttggaagtccagcatgtgtgtgtgccaggaatggacccgggggcccacccctgttgttgttgggacaggctgcgggggcctctgcctcagtctggtccgtgcctgggccttctcgccagcacagctcccggctgagcgcgtacacctttgtgcgggtcggccgggtcccccgagttatctcgcagcatcacgaagcgacgcgtgctgcgcagtgcgcagcggaagttggttttccagccggcgcgctccgcagtctcagcctcggggggcgggccacctcccctgctgctaggcggccacctgccgcgggccacagcccaggccttgaagatgcgcgcgtcggcctcgctcaggtccttgcgcgcgaagtgcttccagggcacgcggaaacaggtgcgggcctcgtccagccactgcagcccctcatagcagccgctgctgatctctccaaggagccactctccgaacagcacgcgtggggctgccctctcaggagccaaggccattgctccttctgcaggggcagttaggtggcggtcaggtgttataacaggggaggtaagggctcctgtcgcagcagacgccaggccgcggccacaggtcgtgtggccaggtgtcacaggtgtccacaggtgtggactgagggcttgtagccaccgacgctgcctcggtatggatctcttggcagagggggctacaggtgtgactgcaggtgtggccggcgcgcacacatgaagtcacaggtgttgaaccagtgtccaggcctggcgggaaggcgcaggccggacctgggtgccagagccgccgggacggg

SEQ ID NO: 362247 - DNA, 898 bp, Homo Sapiens
acttcccgtcccggcggctctggcacccaggtccggcctgcgccttcccgccaggcctggacactggttcaacacctgtgacttcatgtgtgcgcgccggccacacctgcagtcacacctgtagccccctctgccaagagatccataccgaggcagcgtcggtggctacaagccctcagtccacacctgtggacacctgtgacacctggccacacgacctgtggccgcggcctggcgtctgctgcgacaggagcccttacctcccctgttataacacctgaccgccacctaactgcccctgcagaaggagcaatggccttggctcctgagaggtaagagcccggcccaccctctccagatgccagtccccgagcgccctgcagccggccctgactctccgcggccgggcacccgcagggcagccccacgcgtgctgttcggagagtggctccttggagagatcagcagcggctgctatgaggggctgcagtggctggacgaggcccgcacctgtttccgcgtgccctggaagcacttcgcgcgcaaggacctgagcgaggccgacgcgcgcatcttcaaggcctgggctgtggcccgcggcaggtggccgcctagcagcaggggaggtggcccgccccccgaggctgagactgcggagcgcgccggctggaaaaccaacttccgctgcgcactgcgcagcacgcgtcgcttcgtgatgctgcgagataactcgggggacccgggcgaacccgcacaagcggtacgccgctcagccgggagctgtgcctggcgagaaggcccaggcacggaccagaactgaggcagaagccccgcactgtgccacaacacaggagaggccaggccagagtccggagcgagcaaaccgaccgcaaccaac

SEQ ID NO: 362248 - DNA, 1941 bp, Homo Sapiens
aaaactcccgcctggccaccataaaagcgccggccctccgcttccccgcgagacgaaacttcccgtcccggcggctctggcacccagggtccggcctgcgccttcccgccaggcctggacactggttcaacacctgtgacttcatgtgtgcgcgccggccacacctgcagtcacacctgtagccccctctgccaagagatccataccgaggcagcgtcggtggctacaagccctcagtccacacctgtggacacctgtgacacctggccacacgacctgtggccgcggcctggcgtctgctgcgacaggagcccttacctcccctgttataacacctgaccgccacctaactgcccctgcagaaggagcaatggccttggctcctgagagggcagccccacgcgtgctgttcggagagtggctccttggagagatcagcagcggctgctatgaggggctgcagtggctggacgaggcccgcacctgtttccgcgtgccctggaagcacttcgcgcgcaaggacctgagcgaggccgacgcgcgcatcttcaaggcctgggctgtggcccgcggcaggtggccgcctagcagcaggggaggtggcccgccccccgaggctgagactgcggagcgcgccggctggaaaaccaacttccgctgcgcactgcgcagcacgcgtcgcttcgtgatgctgcgagataactcgggggacccggccgacccgcacaaggtgtacgcgctcagccgggagctgtgctggcgagaaggcccaggcacggaccagactgaggcagaggcccccgcagctgtcccacccaccacagggtgggcccccagggccattcctggcaacacacacatgctggactccaagccccaagccccctccctgccccagctggtgacaagggggacctcctgctccaggcagtgcaacagagctgcctggcagaccatctgctgacagcgtcatggggggcagatccagtcccaaccaaggctcctgtgagagggacaagaagggcttcccctgactgggtgcctgtgctggaggcccagggctccctgctggggagctgtacgggtgggcagtagagacgacccccagccccgggccccagcccgcggcactaacgacaggcgaggccgcggccccagagtccccgcaccaggcagagccgtacctgtcaccctccccaagcgcctgcaccgcggtgcaagagcccagcccaggggcgctggacgtgaccatcatgtacaagggccgcacggtgctgcagaaggtggtgggacacccgagctgcacgttcctatacggccccccagacccagctgtccgggccacagacccccagcaggtagcattccccagccctgccgagctcccggaccagaagcagctgcgctacacggaggaactgctgcggcacgtggcccctgggttgcacctggagcttcgggggccacagctgtgggcccggcgcatgggcaagtgcaaggtgtactgggaggtgggcggacccccaggctccgccagcccctccaccccagcctgcctgctgcctcggaactgtgacacccccatcttcgacttcagagtcttcttccaagagctggtggaattccgggcacggcagcgccgtggctccccacgctataccatctacctgggcttcgggcaggacctgtcagctgggaggcccaaggagaagagcctggtcctggtgaagctggaaccctggctgtgccgagtgcacctagagggcacgcagcgtgagggtgtgtcttccctggatagcagcagcctcagcctctgcctgtccagcgccaacagcctctatgacgacatcgagtgcttccttatggagctggagcagcccgcctagaacccagtctaatgagaactccagaaagctggagcagcccacctagaagctggcc

SEQ ID NO: 362249 - DNA, 1839 bp, Homo Sapiens
  misc_feature (1105)..(1129): n is a, c, g, or t
  misc_feature (1373)..(1381): n is a, c, g, or t
cggctggtaccggtccggaatttccgggatgtcgcctttcccgtctccgcagggtccggcctgcgccttcccgccaggcctggacactggttcaacacctgtgacttcatgtgtgcgcgccggccacacctgcagtcacacctgtagccccctctgccaagagatccataccgaggcagcgtcggtggctacaagccctcagtccacacctgtggacacctgtgacacctggccacacgacctgtggccgcggcctggcgtctgctgcgacaggagcccttacctcccctgttataacacctgaccgccacctaactgcccctgcagaaggagcaatggccttggctcctgagagggcagccccacgcgtgctgttcggagagtggctccttggagagatcagcagcggctgctatgaggggctgcagtggctggacgaggcccgcacctgtttccgcgtgccctggaagcacttcgcgcgcaaggacctgagcgaggccgacgcgcgcatcttcaaggcctgggctgtggcccgcggcaggtggccgcctagcagcaggggaggtggcccgccccccgaggctgagactgcggagcgcgccggctggaaaaccaacttccgctgcgcactgcgcagcacgcgtcgcttcgtgatgctgcgagataactcgggggacccggccgacccgcacaaggtgtacgcgctcagccgggagctgtgctggcgagaaggcccaggcacggaccagactgaggcagaggcccccgcagctgtcccaccaccacaggtacccttctctctgcctgcctctcctcctgccaggccgcggagctgcttacgttcaccctgacttttccctgcagggtgggcccccagggccattcctggcacacacacatgctggactccaagccccaggccccctccctgccccagctggtgacaagggggacctcctgctccaggcagtgcaacagagctgcctggcagaccatctgctgacagcgtcatggggggcagatccagtcccaaccaaggctcctggagagggacaagaagggcttcccctgactggggcctgtgctggaggtgtgggcgtgcccnnnnnnnnnnnnnnnnnnnnnnnnnccagtgcacctggacggacactttagaagggggctggggattggggagctggagaaataagaaggggacaccgttccgactgtcctcccctcctcaagcccagggctccctggctgggaactggaacggtggggcagtaagacgaccccctagccccgggccccggctcgtgtgacctaacgaccgggtaaagaccccgcccccaaaggccccccaaccaaggaaaaagacggtacctgggtannnnnnnnnaaatgtgttggcccccggggggtcacgagacccccatgcccgaggagccgcctgggcggtggacccaccactggaccaaaagggcccgcaccggggcttccccacaaaatggggttgggcacaccccccgacaccgcccgcgccccaaataatagggccctcccacacacacagtatgtccctgggggaccagacacccaacccaaaagatcgaagtcttgttacctagcgccacctgcaatgcttccctacgagagccatcaaaggctctcgtcaccatcacaccggagaatatctgtcgcgaacgaacccgttgctcccctccacggggtactgcctatccgtcgaacgttcttcgcgctcgcacagcgagattaagtgcgatcctgcgcgatagtgactcagctaagcctgtcgcttcatatatctccgtaccgttcctcgatcatagatcagcc

SEQ ID NO: 362250 - DNA, 574 bp, Homo Sapiens
agcggggggtgttccttgcagcggcggggcctgccaggccctccgcggccgccgccactctcaaaccccccgactgctcctgggtccctcccagacgccgtagtcgctacacgtcacttccgggggaggggctgcgaccctaaggggtgtcgtgagccgcatctgccagcaaacccgggtttggtgtggccgggggatgtagctcgggcgcctcctggagtcgtctcgccgctctccgtcgcgttcggtgcggttgcttccaggtccctgaggcgcccgtccggaacccgccaggacccaagctgccgcctgggccgggacctcggactcctcaaaggcgcgccactttctcctcggttggagggaagaggtggcgctcgcagagcaacctgcgggggaccacttctgttggtgctaagctttggcgagagtctcctccctcctgtgtccctcgtcctccttaccactcgctgttagaagttggggccgtcacagctttctcatcgaagtgccagatcccaggacactacaaacgcttgataaatactaaattagcactgtggctttctagcca

SEQ ID NO: 362251 - DNA, 863 bp, Homo Sapiens
  misc_feature (398)..(432): n is a, c, g, or t
  misc_feature (451)..(468): n is a, c, g, or t
ggcaaggggatgtaaaaagaatgccctgtttttatttggctcatgagctgcatctgaatcttctaaatcacccatggctggtccaggatacagaggctgaaactctgactggttttttgaatggcattgagtggattcttgaagaagtggaatctaagcgtgcaagatgattctcttttcagatcttgggaactgaaaccatttgaaatttattactaaggtcgtgatgtgaatatttgctcagtcagcccaccttgtcctgcctttttgcagataggctttcatttggacagctataactgctgtgttttttatattatttttactctttaccataaatcaattacaagaaaagagtttcagtcctagtatttagccccaaaatgaacctttaaacnnnnnnnnnnnnnnnnnnnnnnnnnnnnnnnnnnnaaaaatattaaattctggnnnnnnnnnnnnnnnnnnccccatacacaaaaaacacccaccacccccacaggaacaagtcatattccttggtcggcccagcctccggccctccaaaaaaacttccctaaacccatttcctttggggcccccgggccccaattaggggaattggacacttgggtctttaatttgggtttcccaaaggggaaaccccggaggacatggaaaataaggggtgtgtggaaattctccccccccacaataaaataagaagcgccccggcgccgggcacaacccggaatgtgtttttcttgacaacccatatctccccgaatgagagagttctctccaaggggtccctattattcgtggggactcttatttacaaccagcgccgcctcgcccacgagcgagaggccttctacctatcc

SEQ ID NO: 362252 - DNA, 345 bp, Homo Sapiens
aaggctgagtaccatgggctacagtgtctggccttgggaaaaagtgattctgtccctccaaaaaaatagggcatggcttgcccctgtggccctggcatccaaatggctgcttttgtctcccttacctcgtgaaaaggggaagtctcttcctgcctcccaagcagctgaagggtgactaaacgggcgccaagactcaggggatcggctgggaactgggccagcagagcatgttggacaccccccaccatggtgggcttgtggtggctgctccatgagggtgggggtgatactactagatcacttgtcctcttgccagctcatttgttaataaaatactgaaaacac

SEQ ID NO: 362253 - DNA, 461 bp, Homo Sapiens
aaagtaagcaatgggcccctaataacatagtagctataaattaataaacagagcacaagttttaatccaggcacagttaactagccaggctatctcttctgcattctactttaaaacaaattctggttattgtcacttcatctcctccctagacctagcctctagatcagttctccacctttctctcccctctctgtgcccgggaacagtatggtccattccctgccctctggcttcttgttgagttcctctaacaggaggcaccagtagaagatccgagctagaggaggtaagtccagggtctgaccccctccactcctctgtacttcagagtctggtggttctgacagaagctggttctccaatggcacatctcttactactgctcccgctgggtggctccaactcctctccccgcttcccaaagtgaatcaaagctttttactgtaaatagttcctgg

SEQ ID NO: 362254 - DNA, 510 bp, Homo Sapiens
cttcaggacagtgggctcccttctggcccaaggcaggtccagaattactgtccaggagccaaggctttgaatcagggacctcaagagcccgcttgatgttctacccaactatggctgcgcctgtacctaaggtgcaaaagtcccctttacttttccctctacttttctccagcataaggagtctctccccatagccaccatggctggaaatgtgctgagtctcatttgaagccagctagtctcagagtctcacagaaggcccactgcatacctaggtatcgctggtatcgctggctatttggagcttaagagctcttcaatcctctgacatcttgattgcagcctttgagagaccctgggccagaggatccagctattgccatgcttaaatttccaacccaaatgtaactgtgagataaatgttgttttaagccactaatttttttaattactgtattaattttaacagataatacaataagagttttaaaataaaaattttgatattac

SEQ ID NO: 362255 - DNA, 864 bp, Homo Sapiens
  misc_feature (587)..(587): n is a, c, g, or t
  misc_feature (601)..(602): n is a, c, g, or t
  misc_feature (611)..(611): n is a, c, g, or t
  misc_feature (617)..(617): n is a, c, g, or t
gcggccgctgatgccgaagtcgcttagcttgatctggccccgctcgtccagcaggatgttggagggcttgacgtcgcggtggatgacaccgtgcttctccttcaggtagtacagcgccttcacaatcgccactgtcatcttgcccagaatgcgctcggggatggggccctgcatccgcttcttgagcttctcagcgcaggtgcccatgagctccatggcgatgaagacgtccgtgttggtgatgaacgtcccaaagcactgcacgatgtaggggcagtcgtggctcttcagcaccacatccaggtccatgaggatgcgcttgttctcctccttgttcccggagcgccgcatttgcttaacggcaatgacgtggccggtcttccggaagcgcatcttccacacctggccgcaggtgccgctgcccatctcgcccaagttctccaggtcgttgatttctgcctggtagcgctggcccccgatggtcaggtagcccgtctgcttcatgatctcctgcagcttctggtcaatctcaatgctctccatgcctgcgggtgtgaacagggttgacgggagccccagcatggtgngcgggccccgccgnnggcgtgggngctgcngggagctctctgaggatggcgagcggctgcccccatcgctggccagcgggagctgcagggtggcctggggccgtggggctgatatccaggtgaagcgatctacgcgggccttcggtctctgcttagcttgctccaggcggacagctctgttcaagagacgcgcatcttcccgcgcaccgccgcggcacccgcggcggcgtatacctgtgccgatcttggctgagccaattcccttttggtcataatc

SEQ ID NO: 362256 - DNA, 344 bp, Homo Sapiens
ctccccgtctgcattcttaggcctcttagctattaggaactgtcagatacatactagtagctaattttcctagcctgaaattatatactgcatctgcactatgtacctactagggatctgacctcaagtgttttctgagcccaggcttcctggtgtggtgtcttttaccacataaaattattacaaattgcaaatgttggtattgtgatttgattatctgtacaaagaaagaagctctatgcagtgagtttgtggtttaatggtcacaaaaatgttagcactgctaccactcagcacgtgtaaaattttttaaatttataaatattaaaattttaaacttacaa

SEQ ID NO: 362257 - DNA, 549 bp, Homo Sapiens
ggtgacagctccaggagcaagtatcaagctctcagtcaagatccaaacagtctttcaaacctagatcaggatctccccaataatatgatttaccaagtcgccattaagtctcttcctcaagactggctgtggtgtgaaacctggtgtgatgatgaatccaaacaaagagccaaaacaattgatctgtgcaataatcccaaaacaaaagaatccaaactaaaagctgctgccagaattgtcccagaatgggtggagtatgatgctgagataagacaactattagatcatcttgaaaacaagaagcaagatacaattttgacacatgatgaactctagcactggtgtatatgagaaggaaggcgaaagcatgacaggaaacctgccgcctgctggggaagtctggagcccctgctgagacgatttggaagtctcgttaagatcagtgacatattctttaattttaaaaaattgtaattatttaaaacagttatttaatgtattgaatgagtttaagttatataataaatgaccattgagtatttaaaaaaa

SEQ ID NO: 362258 - DNA, 521 bp, Homo Sapiens
aagattgcaacatcacccctgtgatattcctgctgaagatccataacctggatgtaatcatgaggatatatcagacaaacccacgtaaagagacatgctgtatacaaaactgtaatcttagaaagtgccaaggtcatgaaaatcaaagatagaccctggaactgttccaaactggaggggaccaaagaggcatgacaactaaacacaacacatgattctgaactggatctttttgcttgaaaggaagttacagggacagttggaaaagtttaaatggggcctacgatgccgtggtaatgatgtgtccgtgttaatttcctgattttcatggttgcctgttaagttacatcagaggatgttcttgtttgctggaaagtaaatcaatgtatttggcaggggataaggcatcaaatggtcaccttaatttcaaattattacagggaaaatgtttctctctgtacttaataacttttttgcaatttcttaaaatgaaagctctggagtaaaaacttcaaggatcc

SEQ ID NO: 362259 - DNA, 689 bp, Homo Sapiens
caaacaaaaaaacaccattaggcaaacaccataggaatagttgttgcagacaagaaacacctatgaatgccgaattagtgaacagaagtatgatgggaaacacgattttgcatggttttaagatcccttcacgagatactaattacaaagggaaaaacagtcattatagtgaataagcctgacagaaaccaccttaacccagtgatcaagttaacatcaccactaataagacatactgataccatgtaccttccaatatgatgcactgagaagggcacaattgtcacttctgtggtgttgtcagaaatgtgcaatctcagtgcaatcaggagaaaagatcagacaagcccaaactgagagacactctacaaaataactggccagtacgttttgaaagtgccaaggccgtgaacaataaggaaagactgaggaacagtcatggactggaagagagtaaagaaatatgataactaactgcattgtgagataccgatttagatgttggattagaaaaaggaccagaaataagatttcatcaatgtcaattatttggttttgataattgtactgtggttatgtaagatgttaacattagtaagagctgggtgaagggtacatggaaactattatttttgccaccctttgaaagtctaacttttttcaaaataaaaagttttaaaaataaaaaa

SEQ ID NO: 362260 - DNA, 567 bp, Homo Sapiens
  misc_feature (56)..(56): n is a, c, g, or t
gtgtttcatggggccattggaggagctggtgttaaagccctgctcgctctttgtcnctgcctcatcaaaacaccagaagaagtccaagttacatggccccactgaaacctcaagctgttcaggtgccgcccctactgtggagatggatgaggagctgcattatgcttccctcaactttcatgggatgaatccttccaaggacacctcaaccgaatactcagaggtcaggacccagtgaggaacccacaagagcatcaggctcagctagaagatccacatcctctacaggtcggggaccaaaggctgattcttggagatttaacaccccacaggcaatgggtttatagacattatgtgagtttcctgctatattaacatcatcttagactttgcaagcagagagtcctgaaaaaaaatctgtgctctttcaaaaactaagtgtatgatgtcacacaagctccttaaccttccatgtctccattttcttctctgtgaagtaggtataagaagtcctatctcatagggatgctgtgagcattaaataaaggtacacatggaaaacaccaa

SEQ ID NO: 362261 - DNA, 405 bp, Homo Sapiens
aggcgtggccactttttaggtcacctgaagcagtttagcctttggatagaggaacctgcctgaatttatggcattagtggtggcatttttttgtgtacaagatgtgggtgatggaggggctgtttctttttccgtgtgggtggttaataatcgtcagtctcggagggcgatgctcgtaggatatttcaggtgagtcagggttggatggtcatcggctttcagagggagaccacgggaatgttcagggaaacaatgtcagcttctctgaggaccagaattcatgttcacgggcagtgatgagttggcttatggagtgagtccagtctggaattccgccgtgcattctagcctgtatcatctcatttggacaaatgctggcacgttgaaattaaaatgttaaaaacc

SEQ ID NO: 362262 - DNA, 485 bp, Homo Sapiens
aaaacccctgggaaaaaacccgaacccctaacctttgtccaacgggaagtgttttaacctggaaaaaacctggccccacttttaaggtccaccctgaaaccaatttaaccccttggaataaaaggaaacccgccctgaaatttaatggccattagtggtggccatttttttgtgtaacaagatgtgggtgaatggaaggggctgtttcctttttcccgtgtgggtggttaataatcgtcagtcctcggagggcgatgcctcgtaggatatttcaggtgagtccagggttggatggtcatcggctttcagagggagaccacgggaatgttcagggaaacaatgtcagcttctctgaggaccagaattcatgttcacgggcagtgatgagttggcttatggagtgagtccagtctggaattccgccgtgcattctagcctgtatcatctcatttggacaaatgctggcacgttgaaattaaaatgtt

SEQ ID NO: 362263 - DNA, 550 bp, Homo Sapiens
cggccgccgacgtcgctgttgctgctgtcgtcgtcgtggtcgatccaggctgctgaggctgatgatggtgatggtggtgctgcggcgggtggtggtgatgatgcgcatggttcacccgcgggcaaaactgcgcgtccccaggagccgaagagaactggctcttaagcagaggcagtgcccctgcggcccctgccaccccactgcctccggccccggtaaccccggcccctgcgcccccgctgccggcgcccacagacccccgagaggagtgcaggtgcgaagtgacgcagagagggcacacgcagaacgcgccgctcttgcgagacgggcagccggggccggacacggacatcaccaatgggggcggcatgccaagcgggatgaagaaatccggcccggggtgcggttcaggcagcgagggcgcaggccgtgaggtgtccttgatgatgagcgagtcgacatagaaggagcgcgacatgtcgagaggggtgggtggctggaagccccggcagttcgcggcgacccctctcctctagtgttctaagctctg

SEQ ID NO: 362264 - DNA, 111 bp, Homo Sapiens
aaagaaaagttcttaaaacactaacggaaacccatggagtttgtcctttgtaaaaattttaaacacagtgtcttgatataaaaataaaaaatccagttagcactcccaaaa

SEQ ID NO: 362265 - DNA, 498 bp, Homo Sapiens
cactctctgcctgccaagtttcctcctgttctccatctaatccaaactttccagagccctcctgcccctgaagataccccttaccacagcacagacttaagagccccttaaggtctgaggtccatgtttgaccttctcccgcttgtaagccaaaaataaaattcaaaggcccccagcaaccatctgaatgcactccctccttgaatagggcactcttggtttccacaacctcttactgtagccaagacattcctttctagtgataaccaattctcgacgagaaacagaaaatctatccaaaacctcgaagtgccgcctttctggaccaaaccaatgtatgccttatgtgtatttgattgatgtctcatgtctccctaaaatatgtaaaaccaagctgctccccgcccaccttggacacatattcttagggtctcccaagggctgtgtcacgggccatggtcaactcatatttggctcagaataaatctcttcgaataa

SEQ ID NO: 362266 - DNA, 766 bp, Homo Sapiens
  misc_feature (64)..(64): n is a, c, g, or t
ttcctcttctttttactgctgctggttctatggggaacaagtgtgtcccattcatgcttggccntaagcgtctcaccaaggcctcactggtttgaaattcagcatatacagcaaagtccttctccaatgcaccagggcaatgagtggcatcaacaattatacccagcactgtaagcatcaaaatacctttctgcatgactctttccagaatgtggctgctgtctgtgatttgctcagcattgtctgcaaaaatcgtcagcacaactgccaccagagctcaaagcctgtcaacatgactgactgcagactcacttcaggaaagtatccccagtgccgctatagtgctgctgcccagtacaaattcttcattgttgcctgtgacccccctcagaagagcgatcccccctacaagttggttcctgtacacttagatagtattctctaaggcatccactgcatttcctttcatttgacatagcttctgttacaattgcatccacgttttcttttcttttgttgattttcttgttcccgtagaagaaagaagaaaggtgtttggagaattcgagtgcctaggatgccagaccagagttgagacaaaaagaaataagattattttctgctttgtagttctgtacttttcgagagaagggaatagggaagacagcaaagaaagattcagatttctaaccctgcaacttttgccaagctttattgccctgtgttcacagcaataaaaccacttcctgctgcattctaaaaaaaa

SEQ ID NO: 362267 - DNA, 828 bp, Homo Sapiens
ggatggaatacaatttccaatagtgtctaggccgacacccctccaccctcctttgcctgtcattcaagtcaataccctggagaaaagaggctgtgggggaggccatgttcgattaggaggtttaagagtccatcaaagtgtcatatgtgttaggtgtgaaatggcgacactgggaattactgttaataaggggtggctgcagcacggtgattgttatgagaacatccccaccgccccacttttgtttgaagactttcgtactgaactacatgttgtttactttcaacaacgtatacactacagttgacaaaagttaatctcggtgataagaatatgcctgttaatttatctccactgtgctgaacggttaaaaaattgttgtttcttcaataacaaaaggcttaacattttatttaaaaaaattagaatatcattatttcattattgtaatgggacgaatcctccctcctttctgccctggttggagagaaaggagtgcagcccacttgccctcactaccttcagcctcctcagcagcttctggcgcctccacattcagaggtttcagcttccccgccattttccaacgcggggcctgcgcgcgagcctcgcttgatgactggttaaaaaagaaaccacgtgagggtgaaaggcttttcagcacgcatgcgtgcaacccgcggttacgccagcggttaaatcaggagtcagctctgggcaggcgcagaacacactgcggccctgattgccagcacacatgctacaaccttgaggctgtaactccacaaacaagggcagaactagggtaatggccagttggggagtgag

SEQ ID NO: 362268 - DNA, 914 bp, Homo Sapiens
ggcagcggcgacgctgggtgtgtgggcgcagatggcggcggcgcacggcgcctgagcgggccggggccatgagcgccgcccggccccagttcagcattgatgatgccttcgagctgtccctggaggacgggggccctgggcccgagtccagcggggtcgcgcgctttgggccgctgcacttcgagcgtcgggcccggttcgaggtggctgacgaggacaagcagtcccggctgcgctaccagaacctggagaacgatgaggatggagcccaggcctctccggagccggatgggggagtcggcaccagggattccagccgaacttccatccgcagctcccagtggtccttcagcaccatcagcagcagcacccagcgctcctacaacacctgctgcagctggacccaacaccctttgatccagaagaaccgccgagtggtgctggcctccttcctgctcctgctgctggggctggtgctgatcctggtcggcgtgggactggaggcgaccccctctccaggtgtctccagcgccatcttcttcgtgccgggcttcctgttgttggtgcctggagtctatcacgtgatcttcatctactgcgcggtcaagggccaccggggcttccagttcttctacctgccctacttcgagaagtgatcgcggcgcagcgtggaccccttgcgcccatgggggcgcccctcttgccctgttccgttcccctcatctcaagggaagaggccctccaggaccctcgaaaccccagcccctagggagtttgctcaggaagttcggggcatgcaggcctggccctgggaaagccgcccgtcgcctgctctgtgccttaacttattctcgggccgtgcggctgctaggttgctgttattttgtgctaataaaagagtaattaattccacc

SEQ ID NO: 362269 - DNA, 694 bp, Homo Sapiens
ggcacgaggagcaccccagttcccatagagctgccgcactcagaggcttctgtaacctgcctgctcccagcattctatttagggtctggtatgtccagaatttgcagacacagcaattcctgcagcagcagtgcaccatgtggaaggggccccatgaccagcccactgtgaggtcacacgtgatgactgaggcttcttcacacagcagggctctgggtgtgatacccagggcacacgcgtttgcacaggcacaggccacacaagttctcacatgctcagccccataagccgtgctggacaggcatggccatttacacccaggatcctgctgagaacagcaaccaactcaccacccttgcatcatgatccttgccacacaggggctctggtggctttggtggcctgggctgtggctctgctgccagccaccttgagtgaagatccgggttctctgggtgctactcagctgctatgtggggagctggcccctggggtgatgagggcccttcccaacccgccctcagcccttggacagccaggatcacccggggctgtctgcacacagacttctcaggggagttctcagcttggacccttatctccccagaatcctggaacctgctccttctgctctcgtgactgactgtgttctctatgcaacttccaataaaacctcttcatttgaaaggaaaaa

SEQ ID NO: 362270 - DNA, 593 bp, Homo Sapiens
acatgtattaaattctgtgagtggaatcaaatttataaatgaactttttgacaataattatgttttataatatctgcctaaaaatgctttccacaatctttttggtaacttgcaatcttaaaattatgctaagtaatacatattcattaactatctagattatttctaagtcagataaaccactgaaaatttatttttaagcataagtttaattttatatacttttggcttcttatttttatatcatatagagaggctacatatatttaggtctgttactaaacattctttttgccacattaaaacaattgtattacgaggaagcacatacctataaaaattgtgagatggtatattcataaaatttgctgatctgctacagaatgttggtacttgacagacaactcacaattgtctataacctagttttttctgttaccaaaaaaagaggttacttatggttaaaaattttaatcaacatatgtaaataaagctactagaactaataaagataaagggaaatgacttgcaagcacaatttgcaaagcaggaagaatgtgtttttgtatgggaaaaataaaaatacctgtctt

SEQ ID NO: 362271 - DNA, 477 bp, Homo Sapiens
aggcaccagccctggtaactgcatcttctccccttgccaccccatggccccggctgaaagcttcggccctcctctgctgtcactcaatgatggggagccctaccccagaagtgtatcccacgagggcatcagggacgcagtgagtgttgctcaagggagtcaggaagagacggcaacgtaaaggatgtggctccatgtccatggtgccccctggtcaacataaggagcgtgggatccgatggaaaggtggagctcagggaaaatgggggtccttgcctctcgtgtaccccctcaaggctgaccccttagatggcccaggaatggcaggtgctacaaaaatggtacccacgtgggcatggaaatggggcagattaggggaccactggactcagaggggagggaagggctcatcagcacccgctcagggagcctgtccctttatgttcccaaataaagggtcctagaagactagaaaaa

SEQ ID NO: 362272 - DNA, 2412 bp, Homo Sapiens
agcggctgggcgtccctcctgccagccaggtcgcagccgcagcggcggccgcagctcttagcccacacaggacttgtaaactcttactgcaccattctctcccattaggagcttttcctccctccttccccccaacccctctgtcctcctcactttggggaatttaatgctttctttagcatctttttgtgtgcgtgatctaggggaggagacaccccagagctccaactagctctcagctgaattctacttttgtttttatgtcttcctcgcctcctctcgtgtccctcttatctgactgatctgcgaagtctgatgcttctgccagagggagaggaataaatagatgttgctgcttccgaaggcttagacgttgggaaagagcagcctgggcggcaggggcggtggctggagctcggtaaagctcgtgggaccccattgggggaatttgatccaaggaagcggtgattgccgggggaggagaagctcccagatccttgtgtccacttgcagcgggggaggcggagacggcggagcgggccttttggcgtccactgcgcggctgcaccctgccccatcctgccgggatcatggtctgcggcagcccgggagggatgctgctgctgcgggccgggctgcttgccctggctgctctctgcctgctccgggtgcccggggctcgggctgcagcctgtgagcccgtccgcatccccctgtgcaagtccctgccctggaacatgactaagatgcccaaccacctgcaccacagcactcaggccaacgccatcctggccatcgagcagttcgaaggtctgctgggcacccactgcagccccgatctgctcttcttcctctgtgccatgtacgcgcccatctgcaccattgacttccagcacgagcccatcaagccctgtaagtctgtgtgcgagcgggcccggcagggctgtgagcccatactcatcaagtaccgccactcgtggccggagaacctggcctgcgaggagctgccagtgtacgacaggggcgtgtgcatctctcccgaggccatcgttactgcggacggagctgattttcctatggattctagtaacggaaactgtagaggggcaagcagtgaacgctgtaaatgtaagcctattagagctacacagaagacctatttccggaacaattacaactatgtcattcgggctaaagttaaagagataaagactaagtgccatgatgtgactgcagtagtggaggtgaaggagattctaaagtcctctctggtaaacattccacgggacactgtcaacctctataccagctctggctgcctctgccctccacttaatgttaatgaggaatatatcatcatgggctatgaagatgaggaacgttccagattactcttggtggaaggctctatagctgagaagtggaaggatcgactcggtaaaaaagttaagcgctgggatatgaagcttcgtcatcttggactcagtaaaagtgattctagcaatagtgattccactcagagtcagaagtctggcaggaactcgaacccccggcaagcacgcaactaaatcccgaaatacaaaaagtaacacagtggacttcctattaagacttacttgcattgctggactagcaaaggaaaattgcactattgcacatcatattctattgtttactataaaaatcatgtgataactgattattacttctgtttctcttttggtttctgcttctctcttctctcaacccctttgtaatggtttgggggcagactcttaagtatattgtgagttttctatttcactaatcatgagaaaaactgttcttttgcaataataataaattaaacatgctgttaccagagcctctttgctggagtctccagatgttaatttactttctgcaccccaattgggaatgcaatattggatgaaaagagaggtttctggtattcacagaaagctagatatgccttaaaacatactctgccgatctaattacagccttatttttgtatgccttttgggcattctcctcatgcttagaaagttccaaatgtttataaaggtaaaatggcagtttgaagtcaaatgtcacataggcaaagcaatcaagcaccaggaagtgtttatgaggaaacaacacccaagatgaattatttttgagactgtcaggaagtaaaataaataggagcttaagaaagaacattttgcctgattgagaagcacaactgaaaccagtagccgctggggtgttaatggtagcattcttcttttggcaatacatttgatttgttcatgaatatattaatcagcattagagaaatgaattataactagacatctgctgttatcaccatagttttgtttaatttgcttccttttaaataaacccattggtattagtcaaaaa

SEQ ID NO: 362273 - DNA, 413 bp, Homo Sapiens
  misc_feature (45)..(45): n is a, c, g, or t
  misc_feature (198)..(198): n is a, c, g, or t
ttattctacggaggcaaaaagggaaaataaaaacttgcccttccntggctgacccagtcgggaaggtagggaaggaggtctcccgttgggagagtctctgttcctgctgtattatacaaactgtaccatagtcctgggaaaagggtggactcaccgctgttgttttacgggaagtcgtgtcacccaaggggttggggntgggcagagcctgtcccctccccccttttccaggagccagggggtgactggagagacagacccacccccaagcagggctcctctccccagggtgagcacaggacctctgtaagctgcttgtgtattgtccactttgacgatcagtcattcggtccgttgatcaataatccttcgatcttgtctccaattaaaccgaggctttcaccgaaaaaaaa

SEQ ID NO: 362274 - DNA, 575 bp, Homo Sapiens
  misc_feature (111)..(111): n is a, c, g, or t
gggatttcacgaaggcatgggggtggccataggcggcctgaaatagaagggcaaggagttggtgcacacctacaagggctgcatcaggtcccaggactgctactccggcgnttatatccaccaccatgggccccaaggaccacatggtaaccagctccttctgctgccagagcgacggctgcaacagtgcctttttgtctgttcccttgaccaatcttactgagaatggcctgatgtgccccgcctgcactgcgagcttcagggacaaatgcatggggcccatgacccactgtactggaaaggaaaaccactgcgtctccttatctggacacgtgcaggctggtattttcaaacccagatttgctatgcggggctgtgctacagagagtatgtgctttaccaagcctggtgctgaagtacccacaggcaccaatgtcctcttcctccatcatatagagtgcactcactccccctgaaaagctatctgaacagaggaagataatgtagtgtgaagtccccatttgtcctcagcctgtaactccccgtgtgcctataaagaagttaataggtcaaaa

SEQ ID NO: 362275 - DNA, 464 bp, Homo Sapiens
tttttggagagtctgatttattaggtctgggaagggaactgaaagtctgtacttctgacaacctcctggtgacgccaatgctgttagtccatgaaccatactttgtgtagcaagagacacatcacctccctcaaattagtttaggctattgtattaggccattcttacattgctgtaaagaaatatctgagactaagtaatttataaagaaaagaggtttacttggcttgtggttctgcaggctatacaggcagcatggcactggcatctgcttggcttctgaggaggtctcacaaagctttcaatcatggtggaaggcaaacggggaacaggtgtctcatatagcagagcaggagcaagagagatagagagtggggggaggtgccatacacttttaaatgaccacatctcaggagaactcactcactatcatgaaaacagcaccaagccatgaggaatttgcc

SEQ ID NO: 362276 - DNA, 501 bp, Homo Sapiens
ctaccagtctgattaattcgtaggcttaacacttcctttttctttctccttggaatgcctcttgggatatgcattagttggtcttatgtcttttcttggtctaggtggtgtgtgtgtttggcttgtttggggcacttttagaggctccagctgcacatttccactcctctgtgtgtgttcctctctgcatctgctgtttgtgtgtgtacactttttttctgagcaatctttctccttagccacattgagttctttaacagtttttctgttttcttcttcattaagataattaataatcatactactcacatatcatgttttagaacttcctaagcctttccctttcccaccttttggacctcctaactgaatttcaaagtcttcgttccttagattaaaaaaataaatccaaagataaaagaatgtaatgtcttataagtcgtatcagtgtatattttctctgttattgttgttagtgttataataaatcctaagtgacac

SEQ ID NO: 362277 - DNA, 1035 bp, Homo Sapiens
  misc_feature (231)..(266): n is a, c, g, or t
  misc_feature (435)..(448): n is a, c, g, or t
  misc_feature (480)..(488): n is a, c, g, or t
  misc_feature (982)..(982): n is a, c, g, or t
ggtccggaattcccgggatcaaaggggaaggttatttgatctggaagatgagtgttctgatgtggtggcttttgcaaaaatctttattggtgttgaaaactggaaaaaataactcatccagaattcatattgtcttgacaagaactatggttctctgtttttagatattgtggaaaatgtttttgggcatttttctctgattttatttcttctcccccacccctttttctnnnnnnnnnnnnnnnnnnnnnnnnnnnnnnnnnnnncagaacaaaagaagagagaaggaaattttatcaattaaaaatgctgtgtgataaaatcccagcccagattgctcagctgtttgtacctgacttgccgcctgcataggagccagttctgttccttctgactagcccctcttcctccaggggagaacttccaaatgttaannnnnnnnnnnnnngaaaatataaataattactattttgtcaaagnnnnnnnnncaaagacaagaacatgtagaaaaaggcgaacaacgcgaaaagcacacacaagcggaccgggggcaggtggcagaaaagtcatacgccggatggaacgaaccgggaggggggggcgccataaaacgccccgcgaggggggccccgaactgaagcagtaacacccgtttttctgttccggaaacggggggcgcccaacggaggggggggtcaccattaacacacggggcgcccgtccgggcaatttcttctcacacccccgacccctcgggggaaaacaagtgggcgcacgcgcggtcgttttcggtacacaacacacctaagcttctttggcgtgggggcgagaatatatcaactgaaccaactcacgccccccgcgagtcatcttatgacgccctcgtggggtgggggccaaacacaggaatttatctcgggcggttcccgacgcgtcatcggcagatgcacacacgcctcgtcaagctcctgtgagcgctggntcaacaggcgaccagattctcgtcgtcgcgcccacactggcctcgtctccgct

SEQ ID NO: 362278 - DNA, 538 bp, Homo Sapiens
ttgcccacatttactaaaagatgagtgtgctggaaatttcaagtattatatgagcctctgatacctaccagtatttaaacaggatttaattatttcaacacttcacccatccaatcttcacttctcctgttcagataaaaatgctttcatcccaaataagtaaaacaagaacattaatagtgctaataatataatcttttcattggataggtctgagtttagcgtttgtttgttttcttaatgagatcaaaagttaaagaccaaggcagcaaaatattgtgaaacaagctgaacttggggtcagcatacatttgttcagtcttgtttcatttagtatgactttgggcatatcacttaaatctcttatctataaaacaagtacataaaagtcttgattcctgaagtgcctttctactttaaaatattttgtttaaaatatcaaacttcaatataaatatgttggaaaacaattctaatcaaagaacttctattaagtaaaacaagacaaaatgtgtgtaaaaatatgcctaacaaaaaa

SEQ ID NO: 362279 - DNA, 786 bp, Homo Sapiens
catagcagtagacactattaacgtgctttcctgagacaggacgggggtgaatgaccaatcccttcctttggtcctttggtacgcaccccctcagagctgagatggaagacatggctagttcttttcagccttgtggagcctgtcagtcgccatcatacctcgagtgaggcccagctagataatgacttgtccaagatggcacacgtggaaagttgatctgcaccagaacccggatgactgtcaccttgaagcatcctgttctccttctgtgctgtcccaggaagtgtctggcgggcgtgggcagcacagctctacactgtacgattcactagggcatcctgcgagcctcactagccttctggttcatgcctttgacaagcatttttgtgccccctctgcttactgtgacagtcgatgatgaatcttgcgttgccattttctgctgtgggtaactgcgtgcagtgtcttgccttgctttctcttcttactgtcccacagcttggtttcatgttacaaacagaaaagctcgaggctcccaccccgccacatcccaacttcatttccccctcactgtagcccatttccaccccaccacaaagttgccacaggttttctttgtatagaatatttattttgaagctctattttaatagtatttattttagaaagtctactattgtaagagttcttctgtttgtgaagaaaaaaacaagttaaaaactgaatgtactgatttaggaaatatatataaatatatattgttaaatatacacgggactgccgttt

SEQ ID NO: 362280 - DNA, 572 bp, Homo Sapiens
  misc_feature (16)..(16): n is a, c, g, or t
  misc_feature (33)..(33): n is a, c, g, or t
  misc_feature (43)..(43): n is a, c, g, or t
  misc_feature (49)..(49): n is a, c, g, or t
  misc_feature (54)..(54): n is a, c, g, or t
  misc_feature (76)..(76): n is a, c, g, or t
  misc_feature (81)..(81): n is a, c, g, or t
  misc_feature (89)..(89): n is a, c, g, or t
  misc_feature (122)..(122): n is a, c, g, or t
  misc_feature (534)..(534): n is a, c, g, or t
  misc_feature (561)..(561): n is a, c, g, or t
gactgtcaccttgaancaaccctggttcccctnctggtgctgncccccnggaantgtctggcggggcgtggggcancacanctcctaanactggtacggattcaactagggcatcctgcganccctcaactaagccttccgggttcaaggccttttgaacaaagcaatttttgtgccccccctctgccttaactgtgaacagtcgatggatgaatccttgcgttgcccattttctgcctgtgggtaactgcgtgcagtgtcttgccttgctttctcttcttactgtcccacagcttggtttcatgttacaaacagaaaagctcgaggctcccaccccgccacatcccaacttcatttccccctcactgtagcccatttccaccccaccacaaagttgccacaggttttctttgtatagaatatttattttgaagctctattttaatagtatttagtatagaaagtctactattgtaagagttcttctgtttgtgaagaaaaaaacaagttaaaaactgaatgtactgatttagnaaatatatataaatatatattgttaantataaaaaaaa

SEQ ID NO: 362281 - DNA, 512 bp, Homo Sapiens
ggtcacagttacccagcaacaaaaataaagaatttccccatggactccagatcctttactactgaactcacagggctgtaacactgttactgtacagagaggaccaggacgatgccagcaccccgtttatcctgagtgaactctccggaggcctcttcaagcttgtgggttctctgctgtcttgaagccatccatccatttgataggttttgcaaagacttggtcctgccaagatggttttaatcatttctgctaaaaggaatggactcgaggatttgatctcattttagatgcagttgtcctcacttggccattttacagcactttagtaaatatggccagtgtatttggtcactattaaatcaatccccattcattatctgtcagggcaactcagtgaactaaatactatgttctgacctctggcactctttctcatgttgtttaaatatttaatattgtctaaggcaattcaagtattttcttaaataaaaaatatgaaaactcaaaaa

SEQ ID NO: 362282 - DNA, 462 bp, Homo Sapiens
tgctctttcatttagtaatttttacttccaccttagagaaacagtatcagctaaactattaacaagggtgttcctgacagaccattctgagcatatatgggtaatgtggctcggatctaatccctgtaggcagatggtgcctctccaagcaagatctgcctctactcagcctctgaggcatattaaacacagatggaaatatatgctattaacgtaggccctggagttagataccagtaggatgattagttctgtcttcagccaatcagtttactcattttgccgcttcatagactcacagggccttccttctgtcctagggaaatcgatgttatagaggaagaggatggatcacccacgcaggaaggtgggtaaaagatctggtcctttacttccttttagttatctttcctttcctgggtattctttaaagggggtaaagaaaagggtaccggtatgacg

SEQ ID NO: 362283 - DNA, 199 bp, Homo Sapiens
gaaaccaaatgttaaactatagccttaagaaatgcttggtagaagtgtcctaatgagacaaatttgtacttttatcctcaaggttaacactaatctcctaatccattaaactcttgaacaggtattacaaaggaagaaaacttcaccccttatccttaacatatatagtatatttaaaaaatataaaattgtattgtaa

SEQ ID NO: 362284 - DNA, 470 bp, Homo Sapiens
tctgatctcaccttggcttagctctccaacacaagactctgtggtgtctgcccatgcccactactctcactgttgagaatagtattcaatatctgtttaacatatataactacttttaacaaacactgaatactcctttttactaaaggtgtaaagactgtcaagctttggattttctctgttaataatcaaagtttatagaaattttaatacttacctagatattctgcaaggtgatcaaattctggtttattggcaatgagctcttcttttgtaggaatgtttattcccatgaagcatggatatttaattggtggtgaagctactcgaatgtgtaccttggaaagaaatcattgcacacaaggtttttaagactatgcaaaattctttcattgtgcaaatacaatacaaaattgttttgcagaatattcagtaacaacatatgggtaataaattattctttctacaaa

SEQ ID NO: 362285 - DNA, 759 bp, Homo Sapiens
  misc_feature (323)..(334): n is a, c, g, or t
ctacaatgagaggcaagccccgggcagtaacgtacaggccagaacgtagaggctggacacctatgaggtcaaatgtattctattcaaactttgtgggaaatggtatatttaactcacctgtcttgttggcatcacctctccttaaccctaacttcttgcaaaccctttaaagcatggacttgggaaatgtcagtgaccacctgccttctctgaccaggttaaaaaggctagccaatgcttgtgtaaaaaaaagaacaccacatattgttgtattatatgcaattggaaatgttcagttatcgcactttggtatccttttcagnnnnnnnnnnnntctcaaaacttataaacaaaagcatggcattttacatcgtaccaactgagtaacagtaaatagatgaggtgagaccactataacttcttgaccaactttctatcttgaaactacacacatccaaccctaccagctaccattctaattctacaggatattttccagtgagacaagctgtacaatgaccactcttttcaaaacattccagaccatttccattttcttggatcataatatcgtgctttttctctttctgttttttaaactttatcccttcttgtacagatgaaaccagtccttctactgacagatacacaacactgtttgctcctagatattctgcaaggtgatcaaattctggtttattggcaatgagctcttcttttgtaggaatgtttattcccatgaagcatggatatttaatt

SEQ ID NO: 362286 - DNA, 834 bp, Homo Sapiens
ggccatggacccggccgcggcggatctttacgaggaggacggcaaagacctggacttctacgacttcgagccgctgcccaccctccccgaggacgaggagaacgtgtctctggctgacatcctctccctgcgggaccgcggcctcagcgagcaggaagcctgggccgtgtgcctggagtgcagcctgtccatgcggagcgtggcccacgccgccatcttccagagcctgtgcatcacgcccgacaccctggccttcaacaccagcgggaacgtgtgtttcatggagcagctcagcgacgaccctgagggtgccttcgttccccccgagttcgacgtgaccgggaacacctttgagccgtcagcagccaccatgaatcctgcgagccgccacagtagtcctcaccttggttcgtgagcagggctcccgctctcaggagagccgccctcatcgacgctgggcagccgcagcagacagtccctgtggacagagaggtgggaggctcgactccttctcttcatccacctgttttcaaagcagtgagtgcatccagcgtcctccaacgtggaccagtgagcttggttttatgatcttatgaatttaagattcgcacgtctttgatgggaatttggtctgttctgctgattccacctgaagctcagaaggcacccggtccttgggacgcagctctgctgggctctgacccacttcctggtgtggcagggatgctccagccccttctatggggttcctgccccgaaaatctgatcaaccatttgtctgcagagccctgggcagttgaggccctgtctgggcccaggcggtccttggaagcc

SEQ ID NO: 362287 - DNA, 940 bp, Homo Sapiens
ttttaaacaaaatgaggcctaggttaaatattttatttggcttctcaagatggactgagaagttgggcaccagctccagaccaattcctggacgcacatcaaacacagccctgtcatttatccagtcagtcaaaacaatcttttccatctaaccctttaatgtttatgtcctaaaaagctgctaattgaatccagctcttgagatctatttgctaaaatctataccatctaatttataaatgatgaacaaaaatggaagaaaaaatatgttaactttcctggcaaaacagaagagactccactgtaaccaaagaaggaaggacaatgtttttaatatttgtcaaattttaagagaaaactattcagagacaaatagttgtaagaaactcagagtacctcaaactgtttttactattaagaggacacagggtatttaaaattcctcagaaaaacctgaaacaaaatcactataaatgtagttcaatattcccccttcccctaaattataagcataatctttcctcttaataaactttaattataaattcttataatgtatcataggcagtacggaaaccacagataaacactttaagatctattaagtcatactaaaaacctcaactaaccttatctgcagaaaatcaaaaacccaattttttccctcattttctctacatagcccagaggagggtaaatggaaacagcctatttctgatgctttctgcacacctgggatcacatgttctttccacgatcactgactacagacagcaacagcaacagataaactctaaagcaacaaagatcccctataaaggtttccactgactcctcccaatgtaaggacactgaatgaggggggagggggtggaatacaagtatcctccaatccaggccctccattaagaatcactcagttaatgattcccctcgtgcc

SEQ ID NO: 362288 - DNA, 375 bp, Homo Sapiens
  misc_feature (14)..(14): n is a, c, g, or t
  misc_feature (60)..(141): n is a, c, g, or t
ccggagggcaaggnaagaagccatgatgttttttgtaacctagcctctgaaagtgtcatnnnnnnnnnnnnnnnnnnnnnnnnnnnnnnnnnnnnnnnnnnnnnnnnnnnnnnnnnnnnnnnnnnnnnnnnnnnnnnnnnngtgggcatttttaagtgtcatctggaaggaggctgtcacaacctggaagttaaaagcattgatattctgaaatacagcgtgtataacattgttttagtagggtgtgcaatagttatgttttggtaatagcattaatgaacaatgttattttcatcttccagacatctggaagattgctctagtggagtaaaacatcttaatgtattttgtccctaaataaactatctccctaac

SEQ ID NO: 362289 - DNA, 1961 bp, Homo Sapiens
gaaagggcggtgggctccacctcgtgcctagaaggccagcgggagccgtaggaagccgtcgcgggaagctcagccgaattggagttggagcccccggattgcgctgaccctgagctctcagactccccagtacaatgactcaagcagaaattaagctctgttctttgttgctgcaagagcattttggagagattgtagaaaaaattggagtccatctgataagaaccggcagccagccactaagagtaattgcccatgacacaggaacatcactggatcaggtgaagaaagccctgtgtgtcctcgtccaacataacctgtgacactggagagctgattgttgaggagcttctgttgaacggcaaactgacaatgtcagctgttgtgaagaaagtggcagaccggctcacagagaccatggaggatggcaagaccatggactatgctgaagtatcaaacacatttgtgcgactggcagacacacactttgtacaacgctgcccttcggtacctaccactgagaattcagaccctgggccaccaccacctgcccccacacttgtcattaatgaaaaggacatgtacctggttcctaaactcagcttgatagggaaaggtaaaaggaggagatcatctgatgaagatgctgctggggagcccaaggccaagagaccaaaatatactacagataacaaggagcccattccagatgatgggatttattggcaggccaaccttgacagattccaccaacacttccgtgaccaagccattgtgagcgcagttgctaacaggatggaccagacaagcagcgagattgtgcgaaccatgctccgaatgagtgagattaccacttcctctagtgctcccttcacccagccattgtcttccaatgagatcttcagatccctacctgttggctataacatctctaagcaagttcttgatcagtatctcactctgctggcagatgatccactagagtttgttggaaagtctggcgacagtggtggaggaatgtatgtcatcaacctccataaggcattagcatccctagccacagccactctggagtccgtcgtacaggagagatttgggtctcgctgtgctagaatattccgtctagttttgcagaagaaacacatagagcagaagcaagtggaagactttgcaatgattcctgcaaaggaggcaaaggatatgctatataagatgctctcagaaaatttcatgtcactccaggaaattcccaaaacaccagaccatgccccatccaggaccttttatttatatactgtgaacatcctgtcagctgcccgaatgttgttgcacaggtgctacaagagcatagccaacttgatagaaaggaggcaatttgaaaccaaagagaataagcgtctactagaaaaatctcagagggtagaagccatcattgcatctatgcaggctactggtgcagaggaagcacagttacaagaaatagaggagatgatcacagctcctgaacgtcagcagctagagaccctgaaacgtaatgtcaacaagttggatgccagtgagatccaggtggacgaaaccatcttcctgctggagtcttacattgagtgcaccatgaagagacagtgatccagaagaagcatcttcctcagaagatctggggggatggaaagcaaaataaaggaggtgcctggatgcattatttgcagtgggataagtcgcagagtcttcaactaaacccccctctctatcccctgcagcccaggatacacctgaaagaatttggcatatttagatccattgctgtagtctcccctcatcaaatcttggcagtgggaagaaccttaaatcaacaaggttaatcatctatcagatgcatctgttcccataaagaagttacccacacctatggttacctatatccctggcaataggaaacttcctaaaaagtaaattttattttc

SEQ ID NO: 362290 - DNA, 1168 bp, Homo Sapiens
  misc_feature (995)..(995): n is a, c, g, or t
  misc_feature (1015)..(1015): n is a, c, g, or t
  misc_feature (1019)..(1019): n is a, c, g, or t
caccaaagaggcgcaggaaggagagacaaacggcccgcccgccggctccacaaacagcccctcgctggtcctccagtcttccagcgagaagaaagaaagagcgtccccggaagccgccgaaactctggggtagagtggcacgcgcatttttgcttttccgcgtcttcttcggtggcgatccgcgtcctagaaagggcggtgggctccacctcggcctagaaggccagcgggagccgtaggaagccgtcgcgggaagctcagccgaattggagttggagcccccggattgcgctgaccctgagctctcagactccccagtacaatgactcaagcagaaattaagctctgttctttgttgctgcaagagcattttggagagattgtagaaaaaattggagtccatctgataagaaccggcagccagccactaagagtaattgcccatgacacaggaacatcactggatcaggtgaagaaagccctgtgtgtcctcgtccaacataacctggtgagttatcaagtgcacaaacgtggtgtggtggagtatgaagcccagtgcagccgggtattgcgaatgcttagatatccccggtacatctatactaccaaaactctgtacagtgacactggagagctgattgttgaggagcttctgttgaacggcaaactgacaatgtcagctgttgtgaagaaagtggcagaccggctcacagagaccatggaggatggcaagaccatggactatgctgaagtatcaaacacatttgtgcgactggcagacacacactttgtacaacgctgcccttcggtacctaccactgagaattcagaccctgggccaccaccacctgcccccacacttgtcattaatgaaaaggacatgtacctgggttcctaaactcagctttgatagggaaaggtcaaaaggaggagatcatctgatgaagatgctgctgggggagcccaaggccaagagacccaaatatactacagantaccaggagccatttccagnatgnatggggatttattggcaggccaaccttttgacagattccacccaacacttttccgtgaccaagccaaattgtgaagcgcagtttgcttaacagggatgggaaccgaacaagccagcccaaaatttgtggcggaacccatggctttccca

SEQ ID NO: 362291 - DNA, 585 bp, Homo Sapiens
  misc_feature (421)..(457): n is a, c, g, or t
ctgtgaggtctggagaggatgcgccatcgaccccggcagtaggcggccgaaccttggccccaaatcttctaccccggggtggattgcggcccctagaggaaaggcgtcaggggaccgaccggcagctgtgccgtcgcggcactctggaccacgctgagggcgggccggcttccctgcgcctgcgctgacattttgcagtttgggaaatggcggtgctcggggacgtcgatactgacccagggcgggaggcagctgcgagtggattgtcgggccttttcagaccggggtctgaacctctgggccggggcggggctcgggtgctgcctggctctgccaacgttctgggccctcgagtgtgaatgagctccggcccgccatcccgccttgtagtcctcgcgtccggccaccgggcgcggggctnnnnnnnnnnnnnnnnnnnnnnnnnnnnnnnnnnnnngtctgtttcctttctggtccagtggggacagccctgagtgagcagcgtcgtaggagtaagatacctgggcccccggcctctccttcttgccctgcccccgcaccccctcccgcacggggacccggata

SEQ ID NO: 362292 - DNA, 558 bp, Homo Sapiens
gcaggaagattcctttatgatggcgaattggatggtacacagttctagagtagggtcccagtcactggaccccaggaggcaggaggagcagggctgagagggacgacacactccagggctcatgtcacaccgataggcgcaccaggaatgaccgccatatacttccctaaagctcaacccacccaccagttcagttaagaattatactttaattcgtgtttggccactgaagatcaaatccaccatgatgataggatttcagcacaacgggccctttccagtcatgacagacagagatgtccaggctcttgaggagaaacaaaagttcctttgacttctcttgcaaggaccaaagagataaattttttctttacgatctgttgaaatatttatatagacttttaaaaacaactaacagttcatcctgtgctcagtttccctggaaggtttctcatgatcgccccctccgagagctagaggggttgtgtgtctgggaaccaaggattaagacactttaaaataagcaatgaaaatcctagtgcgacactcagaagcaga

SEQ ID NO: 362293 - DNA, 414 bp, Homo Sapiens
cctaataataaaaattccaaacagaatcgtaaaagaaaaaatttatcctcctttggtcccttgccaaagaagaaagtcaaaggaacttttgtttcctccctcaagagccctggacatctctgtcctgtccatgactggaaagggcccgttgtgctgaaatcctatcatcatggtggatttgatcttcagtggccaaacacgaattaaagtataaatcttaactgaactggtgggtgggttgagctttagggaagtatatggcggtcattcctggtgcgctatcggtgtgacatgagccctggagtgtgtcgtccctctcagccctgctcctcctgcctcctggggtccagtgactgggaccctactctagaactgtgtaccatccaattcgccatcataaaggaatcttcctgc

SEQ ID NO: 362294 - DNA, 477 bp, Homo Sapiens
tagggctctgtcgaggccctcactgtctcgggaaaggaaaagcagagaggtgtccctctcttagtgcttggtcaagaagtgtggctttattacatgggcggtgtagttggctcctgaagcacaggcgtgcctgctcttgctgtcctcctggagtgctgaggaatgctgtttgaccttggtggtgatattgatcaataatcctccacaagcacagtgcagcgactgccaaatgcttagtcaccaggaagtgtccatcagcccacagcccgtgtctgtgcatgcttagcacctgtcctatctggggaaggagtatcctttattcttcaaatggtgtccttcctactatattgtggttaaatcaggtccttctgactgtgtcgctgttatgacatggtgctgttagtagacagtggcttgtctgcttgcattttttttataacaccctttcttggcaaaagaataaatgggtagcaatcc

SEQ ID NO: 362295 - DNA, 662 bp, Homo Sapiens
caactgttgaagaaggggtgagttttctgtgctacaagcacctgtcactgttggtacttgcaggaggcttctgctgggtatgttttggaagtgagtgtcactacttggctttgcttagcaggttctgcttcacacttgttctttgacctgctgacttgtgacttgcagaaacataggcagtagtcctagcctggtaaagaccctccaccacccctataagtttgattgctatgcaggtttgggagaggaggcctattgggctcttggatggaaccctttcccgtattaaacaaaccagagacagaatcagtgctgactcaggatctcctggtttggaatcgtaatgtgcctcaatcctctttccaagcaggcctcaccagtctctttctctttcctgcttcacccctgcaatgagccaagaaccaacactacatccacctagaactgcagaagggcttgtggtttcaaccaagacccatcctgagcaagggacttggcttggtgcttttgatcccaaagttcccacaccggcagtggcctgctggggcaatggcatctgtcacggtgttttctccagcaggtggagattatggaacctacatatgggtctggaaaaactgtacactgttgtcaccttgaccattaaaaaccagaatgaggac

SEQ ID NO: 362296 - DNA, 683 bp, Homo Sapiens
tttgtaacttacagcagtttactcaggcctcacctagatgtcctgtcataaacatttgataccatgattaacaccaggagctcaactagacttacaagagggaaatattattagggaaaactaggaattcttcattcttatttttccactaaaaagggttcacacaattgtggagaaaagagtgtcacaaaaagtaaagtttacaaagtcgtggtttatatgcaaaataaaacaaacacatgtaagtttattctacccttctgggaggaagtggagacacagggtagcaacaactcaattctacaaatatttattttgtcattactgagtgcaaagtatcagggaagtgtagctgtggaataccaatgcttaagagaccacagagttcttgaaacccacgattcttcttcaaatccagatgtgtgtgagccccacctcatcaactctgaaggctgaaggatcagctggaatttctgctgcagggtgtccctgataagctcaaaagcatcagaacggagggagctttctccccttctctcatctcattaaaatgagctttcttgttgtggggggttggggagggacctttaaaaccaaacaatggtgccctcttatcatcttttcctgtcctcctttctccaagtttccagaggggaaaataaaaccaaacaaacccctcagca

SEQ ID NO: 362297 - DNA, 1124 bp, Homo Sapiens
gcggtcagccatggggaacatataatgcgactgaaggtcggcccgcttggactttcttcaggagtgcgtaatctgtatctaaccaggccccttgtccggatggcgcacatctgttggtatcaaccaacattccttgcgttccccgtcggcaataggcggcactcgcgccgttgcagctctggggctttgctgccctgaaaaatctacagggctgtcagggcgggagaagaacagcggtctaagcctagtggcccaatcttgtaatgctgctaggcctagtgattttacacaaggctctagtgtgacttcatgaggcacttacaaagaatagtacgtctatcgatgatggcttcgcacccacactacttgccagcatacacggtgtccttcggggtacatgatggatgaacattcaatccttgccgtcagctagttcactcaagtgaagagttcacactgagatgccagagacggtctggatgacttgcgtcaagttctaccagcatggtagtggcaaagagaggtccagagtcctggcccttgatgcccagactcagtgccacaaagctcaatatggagggatgttccagctggatgagggccaccatggaagcacaggtccaatggctggtcccacaccttatcagcagccacaactctcaggttcactcctgcatgggaaaaatgcttggaactgggagtctgaaatggggctactgtttcagtcctaatgtgctgtgtgacattgggacaacactttgccctctctggaccgtcagtattgccctctgtatacaatggatcagattctctgctgtgagcccaagaactccgtgaaatcatatagaaaggctggggtgggccctgtcattcgtggttgatttacaatacactcaagtgccattcatcctttaagaaaaacatctggatatcaaggtggaaatggcccatttaagtgattgattatatcagtttgtggatatagtaataatctagatgggcctggctgggagtggaagaagggaagccttttgcaaatagtagagtgtcagttgcaggtgccaatgactaactttttgaattctatgttggcattaacaataaagcattttgcaaacactggt

SEQ ID NO: 362298 - DNA, 641 bp, Homo Sapiens
ctgtacccatcatgggagaggccttagttcaaaagtatttctctctgaaggcagtgacttaggggccttgcttaaatagaaattcaagaaagagccagtaagttataaatagtggcaagacaaaggacagccacctttaaaaggcgggaaaacgtggaaagagggtaaaatctgtttccagattcctctggcacctactggtgccctttggataagcaagtgctgactccagcaaggaagggctgatgtcctgccatcaggccagcagacgctggggccaggtgctcccctgcgtcgtgagtgtctcgaacttaacgagcctcaatattctggggagaagttttggtttctttcagcccctgggggtctgccctgggctcccggcctccggggctgctcctcaggctggacagcctaggtgagccctgccccgcctgcccccagagccgacgcgcagcctccaggttccgccagcaccaacgtggtcctgcgccacgatggcgccgtgcgctgggacgcgccggccatcacgcgcagctcgtgccgcgtggatgtagcagccttcccgttcgacgcccagcactgcggcctgacgttcggctcctggactcacggcgggcaccaactggatgtgcggccgc

SEQ ID NO: 362299 - DNA, 859 bp, Homo Sapiens
gatttttgtttctccaataggctctttcaagtgagtcatttgagagacttccagtttttaataagtccgcatggcgccattacaagaccacgcctgaagccgatgattggagcaatcccagcagtgaacccagggatgcttcaaaatacaaagcaaaacaagacaagatcaagactaatagaactttctagaggactgaatgctgtggtcctctctgtgaagaaagattgccttctgcaagtcaaacagagagaactgctttctcccacctgctctgagcgtggcatcacagttattcctagtgcttaaatgtgtattttctctctaccacctggactttcccaaagagtttttcctgtagctactccagatcttccactaaagtagtaactttttaatgacatcttgctgtggtgtgattgatgcctgtcaccgaagagcacagagcctccttacagctcttgtgccctcgtactctccatcttgttatcatagcatctgatgtcttcagtccttccaggattctgtgcgcctttcccattccagatacagcagatcgtactgttgctccttgtgaccaaataccatatttgtcccaaacctccacctagggccctgggaccctgaaagtggaagacatcaggtggccatgccctgatgatttagtcccagagccctccgtctctcccgtgcctccctccgccactctatgatttagacttttgccttcttccatctgatcggattctcattgtgagatgtggtgactttcatgttagatcttcttcattgatgccttggttttattttaaaattcatttgtatatgtctgttgattaaagcattcgaaatgttaaaa

SEQ ID NO: 362300 - DNA, 1037 bp, Homo Sapiens
  misc_feature (32)..(32): n is a, c, g, or t
  misc_feature (40)..(40): n is a, c, g, or t
  misc_feature (98)..(98): n is a, c, g, or t
  misc_feature (110)..(110): n is a, c, g, or t
  misc_feature (120)..(120): n is a, c, g, or t
  misc_feature (123)..(123): n is a, c, g, or t
  misc_feature (456)..(464): n is a, c, g, or t
agaagattttgcactgtgcagatcctttgctntctgactngcatctcttcccccacctgtcagctagccacctgcttgtttgtgttgggatatttttnagcacctgaagnaccatctgtnagnggcaccattttcttcttccctttgatctcacatatgctccctaaaaatccttaagttgtcaatactgatccccagtgtgaggttaatgagcaaaattggtctttggggccctttttgtccaagccccactgaaaggcctcttcagaaaactattatctttaaagccctactttaactccttaattccagcatacagctaaaactggatgtatattctggcaagtaaaggctgaggactcctctttaatcctcagatctagataactcatgacattttatttgaccaacatagcacatgatgagatatcaaggtaattaaaatagcatgcttgnnnnnnnnntacgtaatctgtttcacctgtaactgtttaagccaataaacttttcaaaatttatgtaatgtggggcttttatgtagcactttacgttttcatgctgcttattgttttattctactgaaaaaaatgaatttcaagattctcaacttttttaatttcaaaaattgtttattgttttgactataggaatacaaaatttcctattttgggagaataagaactctttttgtccatttttggctatgaataaactttctggtcttttgagaccacccatttttatagatcagaatcagaaaacaggtaaacctcactcacacatttggactcatttgaacaaaaatctaggccaaaatactgaaaagcctatgtgtttttttaattggaagtatatgtaaggttaatgcatttagtgaacgtgactaacaaagactaatgtgcacattaacagatgtactttttaaggttttatgggaggctgtgcattgctcaaaagctgttgggaacgccttctgaacagttgccttcagaactagtttgagctgctcaataaaaccagtgactttactcataaaa

SEQ ID NO: 362301 - DNA, 2651 bp, Homo Sapiens
tcaccagctacctgtgtatctacccggggcttggatgtctgttctgggcactggctccgagttcccctcctgggatttgcaggagggcagtactgaacctgcattcttctccttgtaaatgtaggccgggtgcccctgttctccgggtttggaacaatacgaggttggtgctgatgggatttacttgcgtacgtgctcttcacaaaaacaccgtggatgctgaagttagagcacgtcgccacagagcttgacatcaatgttagagtgtctcttactccccgcccagctgtgatgtttcatctgctttggttgttttggtggtcttttagtaaaaatagagatttcacatctgcccagaccccactcaaaacgatcttggtcaggttctggcttggacaagtttaaaatcaaagtagtgcccggaattccctcaaaccacccaacttcatccaggaatacagtctgcagtgcagcaacagaaccgcttaccaagaactgtgcttacatacctttgtcatctctcttccccccttggaagttgtcctcagggggatttgttcctgtcctggggatttacctgggatggtggctgcctgtgcttttgctcatggccttgacagtgctctagttgctggatctaatggcctgtcttggtttctatcacatgagaaggggttgtttttttggggtgactcggactgaattccccatactgtttccacgccgggacaccatgttctccatcaagctaaagaaatcacgtgcctgaaactgtgcttaagttttgggggaaagatggagttcctatccagagcccccagatttccagaatcgagtgagcttcctggaaggagactgcgtcttctctcaattccagtcatctcagtcgttgtcgttaggtgacatgtgcactttaaatgctctcatcggttggcttcattttcaagacaatcaaatgtattgactgtgttttcttcttagaaaatggagagggttaaaaacatgcaaactgccactttcaacctttgccagtattccctctacccccgtgagagctatctggggggaagaatccttaccaaggtttttttggaaaggtacgaatcttaacttttttccccttctgtgtctcagggtaatactattcagagtcgcccctttgctcattttctcccgtatttgttaccttcctgaggcctcagtattagtcgtgagcacaaagttttgagacctttggcgttgtttcttgatgtgggaggggaggtgttagtgcatgcaagggttgaactagatagaccctgccttagtagaggatgggactataaccttagaggccagaacttgatccagaagttgctgttccacagaagtgcttttcttatttcatcattttggtttctagggctctttttcttgtagccaggtctttcccaaggattttagtatttgcatggagttgaggtttactctaatgatggtggcccagctgtgcccagaggacagccaggcaggccctgggagggagtttagaaagacagtcctggtgaatgggcttcaagtggtcacaaagagggtggctgtgaggtgaccccagacactgcagaacgatgtgcaccctctgcattttggatgtccttggaatgtgggagcctagaaataaccctgtggatggaattggggcagcggctgctggaagatctgtgtgccttgccttccttcagcaggaccgtctaggtgcgcagccacctatggatgcgtcccagccagccccgtcgctctcgtccatcctcagagacaaagaagagggcagggagtttgggcttggttttgaactttcctttcaatgtagcaaagcattcctagttaaccagagccttggaatctactgcctgctggccaggctttaaaatgacaagtgttttaatgctgccataaaagggaggcgggggggaggaagggaaacataaaggcatctttccaagtactcatctaatctaatgtgtccaaaagattgataggccatgaattacttctccatctcactaagggttaaaggcgtgcaaccccccactggctgtgtcccctgccaccgaagtgagtgacctgccctacaaccaggtgggaccacctgtgctgcagtccggaggggcttctgcaggaagcactcaccccccacaccttccccggcctgagcttcccctacctttcgtcaccacctgagggcatgagcacaggccatggggcgtgcctggtgagtctgcctgtggttcaggcttagcctgtggtctcctgtgtgctgctgcccgcatgggatgcgcaggggaggcgtggggatccgcaggagggtggttgggatacaccggatacctctgctctcattgcttgtttccaaatgctctatggacatttgtgtgctaaatcctattaaataaaaaagacgggttaaaacccagatgctgtatattcatttgtaattatgtataaagtgaagcagttttaaactgtaaagatttttttcagtgtgttttctcgaattttgccacaacatactggcttcgtattttatttatctttctttctagttaccagcttcagacccttgtaaagtctccctcagccctttcaaaaaataataaatttcctgtgaagtt

SEQ ID NO: 362302 - DNA, 384 bp, Homo Sapiens
ccccaattatatctcccccactccactactctcttcctccacttcatttttcccttgtcctttctctctaattcagtgttttggaggcctgacttggggacaacgtattattgatattattgtctgttttccttcttcccaatagaagaataagtcatggagcctgaagggtgcctagttgacttactgacaaaaggctctagttgggctgaacatgtgtgtggtggtgactcatttccatgccattgtggaattgagcagagaacctgctctcggaggatgcctaggagatgttgggaacagaagaaataaactgagtttaagggggacttaaactgctgaattcacctgtggatgtttttgagtaaataaaagctaatagct

SEQ ID NO: 362303 - DNA, 1207 bp, Homo Sapiens
ggaactaagagcagcagcactttcagattcagtccatatagagctgtcctacagcattctggaaacttgaggatgtgcggtgcataaaggggctggaagtgacccacctgtgatgagccctttctaaggagaagggtttccaagagatcaccccaccagaaaagggtaggaatgagcaagttgggaattttagactgtcactgcacatggacctctgggaagacgtctggcgagagctaggcccactggccctacagacggatcttgctggctcacctgtccctgtggaggttcccctgggaaggcaagatgcccaacaacagcactgctctgtcattggccaatgttacctacatcaccatggaaattttcattggactctgcgccatagtgggcaacgtgctggtcatctgcgtggtcaagctgaaccccagcctgcagaccaccaccttctatttcattgtctctctagccctggctgacattgctgttggggtgctggtcatgcctttggccattgttgtcagcctgggcatcacaatccacttctacagctgcctttttatgacttgcctactgcttatctttacccacgcctccatcatgtccttgctggccatcgctgtggaccgatacttgcgggtcaagcttaccgtcagatacaagagggtcaccactcacagaagaatatggctggccctgggcctttgctggctggtgtcattcctggtgggattgacccccatgtttggctggaacatgaaactgacctcagagtaccacagaaatgtcaccttcctttcatgccaatttgtttccgtcatgagaatggactacatggtatacttcagcttcctcacctggattttcatccccctggttgtcatgtgcgccatctaccgtgacatcttttacatcattcggaacaaactcagtctgaacttatctaactccaaagagacaggtgcattttatggacgggagttcaagacggctaagtccttgtttctggttcttttcttgtttgctctgtcatggctgccctttatctatcatcaactgcatcatccaattttaatgggtgagggtacccaccagcttggggctgtaccatggggccaatcctgcctggtccccatgcccaaacttcccattgaatgaaacccccttattccggtcttatgtgcccttttttaaaaatataaac

SEQ ID NO: 362304 - DNA, 506 bp, Homo Sapiens
  misc_feature (463)..(463): n is a, c, g, or t
agtttcacacttaaggtttacttacttacagattttcttcaatttacattgaacaaaataatacagtatcaagtttagcctgggtgaggggacatgttttggcatcttttccctatagtagtagttttggttcaaattaatttttgaaaaatagcttttgtatggaacagtataaatgggcttatagttcagatactgagcaaatacacaatactactttttactaacaggcacataaaggaaatgacaactattcgtgggctcaaaaaactgcatattttaactaattttcaaaatttacaaatcagtatctcagagaagttaaagaaaatggaaaggaacaaagcccttttagaataattaatatacattgccttgcttctttccaaaagggaacatgtacttgtcaccctagcttttggttatttagagcactggtacagatacgctgtcccatacatcnggatcaaattattagtttcagtttcacattgtaggatttaaga

SEQ ID NO: 362305 - DNA, 433 bp, Homo Sapiens
  misc_feature (213)..(239): n is a, c, g, or t
taggccggaggacactgactggtggagtctcgttctgctgaccctggatgtccggccagctggagctgcccagctgaactgtcaacagcgagaaaatggtgattggcaccatgctggtaaaggatgtgatacaggctctgacccagtgacttccaaatgctgtgacctgtttggcgcccatctatacctccccatgacacctaggctgtcagnnnnnnnnnnnnnnnnnnnnnnnnnnnatcatcctcctcatgccagatagcattcagggtgtcctctctccctctggaggaccaagccctcccctaatgccctccccatggattccttagtgatctgtgcaaagagagatggcagccactcccttcagtcctcccagatttctgtagctatttatgtagcaggctcaataaaatgtcttctctctaaaaaa

SEQ ID NO: 362306 - DNA, 529 bp, Homo Sapiens
gatttttgcagttcccgccagcctccaacacggggactctgccgtaactggaatcttcataggtcatattgaaatcttcaaggtgaccatgcccaggcagccccttggactggtcccgggtgccttccaagcacagtctccatgctcccagattctcgaccttcccccggcccgggaggtgcagcctgcgtctgcctctgtcgtgtgtgctgatttgagtggcttagcttgccacagcgcaacctcttctgtccctttcagtcatttgctgtacttccctgtggcacgttaccatggaagccgctccagggtgggtcagggtgcaagctgctggtgaggtttggaagcatcaggctcacgggtgttcatgtgtgttcgtgcgtgtgtgtgcgtacgtgtatataactgaagtgtctgtacggaatgccctttgctagccatgggctggtcaccagattgttttgtaatgcccgccccttgcctcgatattgccagtttcttgtgcaataaacaatcagcagctgtgaaa

SEQ ID NO: 362307 - DNA, 1332 bp, Homo Sapiens
  misc_feature (570)..(570): n is a, c, g, or t
ggttatgtttaaggagtaatttgtgtcatgtacatatttgattgattttttttcttctacataattttatttgaacaaatgtagacagtttatatgtcgcctttttctgttcaaatttgcatggcctattaagttggctggagagtgttttatgtggaaatattttcaagataatgttccttaggaagaaaataacattcttgggttgagggaaggaatgccatacactactgtctcttcagatctgaaatactccagtttagagccaggaaatttcacaggtcacaccgatttttagcattaaaaactaaggaatatacttagcacttacttaatcttttcagttttccagtttacgtctcaggaatgaagtgtagtctatggttgacaatggagttttgtgatcctgcttattgtaactgacaactgttttcaactccaagagctaaactattggcagttcatgttaagttagagtgagggtgtaggtagtgtcagtgagtggctcttgtgcctgctgtagacattaggcctgcactagggccatgtgctgtcaagattcaggaacantggctttaacaagcagatcttgtatcaaggcagaggtgatgccatgccatacttttaggaagtctgagatgataaatatttcaaggtcagtgaagtctatcaatcattctccccttcctcatcagcaatggtagatagaaatgtcctaaacttttctaaatcctagtgatgaggatgtgctgatattcaacatagtccttaaagtgaaaactgagttgttgctgacctccacaaaagaatatggaaaaaagccttgctgtacacctagttgtacagccactctggccaattccatttcctgtccctctgtggttctgactggagaccccagtgtgggggaggtcttaccatttaatatagaaatgatatcaataactaatgctatgtacttggaaaatccaaataaggaagttttaggttggtgcataactttgtttctcaaattttcgttgtcagaacaaatggaaggagaatattatttagactaatccagatttgctttctatgaaaatctaatgtctggattatcttccttttctcatggcctaagaaataaggatcaataaggaatgatttgaatgtaattttgtgaatgtgtggaaaatataaagcagggatttagccttaataaaggtaaccttctgacatctgttgttaatccccctttgtactcttttcctgtatctgcactgttattttgagatgtcatactgtacactgtattgtaaaaataaaaagtaaaattatatttcaaattttaaa

SEQ ID NO: 362308 - DNA, 760 bp, Homo Sapiens
gcggccgccggcggcaaggtcggcagctgcgaggccaagagagaccccaggacacacacagctgcctcccggtgcgagaagaagaccccggcttgagagtgagatggcgtttaatgattgcttcagtttgaactaccctggcaacccctgcccaggggacttgatcgaagtgttccgtcctggctatcagcactgggccctgtacttgggtgatggttacgttatcaacatagcacctgtagatggcattcctgcgtcctttacaagcgccaagtctgtattcagcagtaaggccctggtgaaaatgcagctcttgaaggatgttgtgggaaatgacacatacagaataaacaataaatacgatgaaacgtacccccctctccctgtggaagaaatcataaagcggtcagagtttgtaattggacaggaggtggcctataacttacttgtcaacaactgtgaacattttgtgacattgcttcgctatggagaaggagtttcagagcaggccaaccgagcgataagtaccgttgagtttgtgacagctgctgttggtgtcttctcattccctgggcttgtttccaaaaggacaaagagcaaaatactattaacaatttaccaaagagatattgatattgaaggaatttgggaggaggaaaagaaacctggggtgaatacttattttcagtgcatcattactgttccagattcctatgatggatggcagactctttaataaattgcttactgatattatctt

SEQ ID NO: 362309 - DNA, 349 bp, Homo Sapiens
aatgttatcttgctattaagtggtaatgaatgttcccaggatgaggatgttacccaaagcaaaaatcaagagtagccaaagaatcaacatgaaatatattaactacttcctctgaccatactaaagaattcagaatacacagtgaccaatgtgcctcaatatcttattgttcaacttgacattttctaggactgtacttgatgaaaatgccaacacactagaccactctttggattcaagagcactgtgtatgactgaaatttctggaataactgtaaatggttatgttaatggaataaaacacaaatgttgaaaaatgtaaaatatatatacatagattcaaatcctt

SEQ ID NO: 362310 - DNA, 820 bp, Homo Sapiens
  misc_feature (17)..(17): n is a, c, g, or t
cttttgtttgttaatantacaaaagtgcagtaagctttgggagataccagcaacataaccttctgcccggtgccaaacttggacttctttccggctcccaccccgggcaagccagaaggggtttggtaggtttttgattataccccctccagtattatgtgactctaccccagttcacccttccagaatgtaccaacctttaaaaagcaggagctctgtgagctccaccgtcagcaccattcagctgcatcccttgtgcacagaaatgtttccaagcgttaggtgggacacccgtggcggctgctccctcagacctcccttctgtggactgacctctcacctccgcctgttgttcctgcaccacatcagataagcatgtgaaggagggccaactggcagctgcgggacccttggcttgtcccccaccgacaagtcccacctgctgggtgaggacgagactgtttccatctcaggcatgtatcccaccaagtgcctccctcacagccatgcccagaagcctcacacctcgtcaccaccaccaccccccaccccatcctgaggcactgcctggcagataaccctggttggccacagaagctattaatacacgacagcatgtggggaaggacttatggtgggccaggtggacctcatcctgcttcttcctccctctggtttaaagagatatataaactaatttcacataatttgtgtgtgcaggtgattggtttttacataagtcctatttataccttttatatgttacagaaataaaagttaatttatataaccacccccccacccaccataaacaaagggg

SEQ ID NO: 362311 - DNA, 896 bp, Homo Sapiens
ggggagatagcaccaaagtggataaactagtacgagatatttatggaggggactatgagaggtttggactgccaggctgggctgtggcttcaagctttggaaacatgatgagcaaggagaagcgagaggctgtcagtaaagaggacctggccagagcgactttgatcaccatcaccaacaacattggctcaatagcaagaatgtgtgcccttaatgaaaacattaaccaggtggtatttgttggaaatttcttgagaattaatacgatcgccatgcggcttttggcatatgctttggattattggtccaaggggcagttgaaagcacttttttcggaacacgagggttattttggagctgttggagcactccttgagctgttgaagatcccgtgatcattacctggggaggggttcctgaaaccttccacaatgggatctgtggactttcatttttttaagagacttactcaatttcatgactgtactacctgaaacaaagtgagaaaggacaggtgtatttttctaagtcatcaagataaatccttaagaattcagtctaaattagcaaccaggaaggaaaaatatattaaaaacaacaaaaaagtggcacatgtccaggcagtgtgaggatttgctgtatataagttgcctgctttgtatttttgaaatctctgcatcactcattggaagtgcttctgaagagagctgctctgtgttcagttgactggttttgtgtcctgtttgaacttgctgaatgtaaggcaggctactatgcgttataatctaatcacaatttgtcaatatggtcttggcaatcatctgtgcattactctggtttgcattaagcctgtgtgtgaacttactgtaaaacatgtttatttcaaggttctgcaa

SEQ ID NO: 362312 - DNA, 438 bp, Homo Sapiens
  misc_feature (48)..(60): n is a, c, g, or t
  misc_feature (139)..(172): n is a, c, g, or t
  misc_feature (321)..(329): n is a, c, g, or t
ctgtgaaacaaagctttgactagttttttgtttgtttactttcttcannnnnnnnnnnnncaagtttgggtaggaaagaaagcataaatgaacgtgcccctgaggtgaagaggtatatgaccagcctttgcaatgtacnnnnnnnnnnnnnnnnnnnnnnnnnnnnnnnnnntagagcaagtgaaaccaaaaatgatgttcttggtgtttttctataaagtagtcttgttagcttttttgttactgtaacaatgctgatctcgaactggaccaaaatacatggagactaacaaacagaaccccatggaactttcaaactgnnnnnnnnntttgtcccaaaaactttgttgtcatagttaagttgattgtagatggtaattgaatatactcctttgaaaatatttcatcaagtatgtttcctgctcattgtgatacatt

SEQ ID NO: 362313 - DNA, 469 bp, Homo Sapiens
  misc_feature (254)..(328): n is a, c, g, or t
cagtaaatctgagtctctcttcaaagggtttagcctgctaacttccttatccttgttctcaaattcaactttcttgttcttccttacccctagttactgtaaacagcctaccccattctcgtcagctttaatcaataattcacatctgttcccttggttacctgtacccattgttcccccgaaactgcacgcctcacactccacctctgtaactcatgtccccctccccttctatagttaggaaaatatgtacnnnnnnnnnnnnnnnnnnnnnnnnnnnnnnnnnnnnnnnnnnnnnnnnnnnnnnnnnnnnnnnnnnnnnnnnnnntgtgttaaggattaaaatcccctggtttcctttgttttctgtgctcttgtgattttgattgacacaagtggccccgttccgcaaaagtaaattaccttgctgaaagaaattaaacttttgcctgagtgctggttttacttc

SEQ ID NO: 362314 - DNA, 329 bp, Homo Sapiens
atgtctaagtagtagattatttgcatatttgtaaaaactgttaggtctttatattttaaagtgtaataccagttttgttattttagtaacacaaatgggatgattgttaaagttccccaaaaatgttggcatgaaattaatttttccctccttatagtcaaggaccgtagaggaagaaaaacttttttttcatatcatgcactatgtaaacagacacattttgctatctgtgtcatcaggatagtgtaagtggtagggtagagactaccctagacatctgcatctttgtaagttagccagacaataaagaaaagcagaatgaaaaaaaa

SEQ ID NO: 362315 - DNA, 516 bp, Homo Sapiens
  misc_feature (13)..(13): n is a, c, g, or t
aatggcatcaganctggcaatgagcaactccaacctgcccaccagtcccctggccatggaatatgttaatgacttcgatctgatgaagtttgaagtgaaaaaggaaccggtggagaccgaccgcatcatcagccagtgcggccgtctcatcgccgggggctcgctgtcctccacccccatgagcacgccgtgcagctcggtgcccccttcccccagcttctcggcgcccagcccgggctcgggcagcgagcagaaggcgcacctggaagactactactggatgaccggctacccgcagcagctgaaccccgaggcgctgggcttcagccccgaggacgcggtcgaggcgctcatcagcaacagccaccagctccagggcggcttcgatggctacgcgcgcggggcgcagcagctggccgcggcggccggggccggtgccggcgcctccttgggcggcagcggcgaggagatgggccccgccgccgccgtggtgtccgccgtgatcgccgcggccgc

SEQ ID NO: 362316 - DNA, 574 bp, Homo Sapiens
gcagctccaacctcacccagcaccagctcctgcacacgggcgagcggcccttccgctgcgtggactgtggcaagggtttcgccaagggcgccgtgctgctcagccaccggcgcattcacacgggcgagaagcccttcgtgtgcacgcagtgtggccgcgccttccgtgagcgccctgccctcttgcaccaccagaggatccacaccacagagaagaccaatgccgcagcaccagactgcaccccggggccaggtttccttcagggacatcatcggaaggtgcgccggggagggaagccaagcccagtcctgaagccagcgaaggtctgaggtcacaggtcgcagcccaaccctttcttggccttctgtgaatcccttccacagctaaagggtccgagtgctcttcagatccacgatggggaaaagctctgtgcctgagagtcagggacgagggagaccctttggctgtggttccatttgcaggtggggacaggatttgccagtttagtcatagctcacacctccatcctcaaagaggtaacactgcagaaacatcagagggaggacatgtcagc

SEQ ID NO: 362317 - DNA, 459 bp, Homo Sapiens
gacataaagaactatttcctgttgttaagcaggagggacaagttgccaagaaagtttgtgaaatcctcttctcaaaggacttgaaaaggagaaaagttttcccagtggtctgaggttttagatgccatgttcactaaaaggagtgggttttctcctctccaaaccaattaattcctgagatatcctggtctgcctgcagcaaacagagggttaacagcatcactacatcatttgctattggcaaaattttcgaagatggtgtgcctctattgcccgcctcagtttattttaggtctataatttcttttcatttggagtaagtagtcggcaattgaaaaaggtgattccttctcataatgtgtgcattgagttgtgtgggccggtggctgttgagtatgctttctccatgttgttgctggtgttgtttttcaataaaatttatattcctttttatccaaa

SEQ ID NO: 362318 - DNA, 420 bp, Homo Sapiens
aggagaaattcctgggctttggggtttgatctggtgtttgttttgagaaggcgaaggaagcgccacccatcctaaacctgcatgggcacagagccttaccctacagagataccacacaatggtctacctctaaaagcgtagagtgccctctctgacaacgcatgtgatccagtaggcagtgtctgtttttctcgtaagtgttttcatcactataaaaagtgatttaaaatggaaagggatattggaggcaatcctctggtttcacacttccttttcaggcaaacagggccctccttagagttatctgttcaccagaacaacccaaaagcacatgttccttttttcctgtcatgttgtagctcatttgggggaaaagaaggccaacttaaaacagtcccaggggaggactgcttgagccca

SEQ ID NO: 362319 - DNA, 694 bp, Homo Sapiens
aagaaaggcaaatagagctggaagcatttttcccttagcaaaccataacagaaaaaaataagacccaatattggcaaagagactactgaaaaaacattcccatacattgcgtgtgggagtatacatcggtgcaggcttcctggatgacagttgggtgatatgtgtcatgtggcctaaaagcctccatgtcatttgacctacgaattctatctttgggaatttatcctaagaaaatacttaaggatttagttagtgataagatgttcatcccagcattgcaatggagaaaaatgggaagcaatggtttggttgggaatttattccttttctgctgtaacgaaagtttgcaataggggattgcttaagtaaattattgtatctccatccagatggtggagtaccgcgcagacattaaaagtcatgtaaaagaacatctgactgaaagaaaaatgctccttgaatattaaaaggttgtaaaaatagtgcatgttatgtgatttcaattttgttttttaaaatatgggtgtatgcttgtatacgtagagcagataaaaaagacggaaggcatactaaaaaatgttgagtggttatctttgtatggtggaacaaagtcactgtaattttcatctttggtttttctgtaatttccaaattttccacattttgtatttcatataataaatataatttaaga

SEQ ID NO: 362320 - DNA, 439 bp, Homo Sapiens
cggcacgaggccggaagtccaggtgggagacgccgcgccccgcaccgaggtatgagagctgcagcagcgacaaccaggcggcctgaagtgcagacgcaaaacggatcccggggctaggacacgggggttccgaaagcaggatgacgcgcccggaggggacgagacggtccagagcacgcccgggagagagggcggcccagacggcaccggcctgcgctccagccctccctccctcacacacgcggaatctcaaaacatgcggacatgccagcccctcccgcacacctcgggctgcaccacctgctcccggcgcctccccgcccccggctcgcccgcgccggttctcacgcgcggccagcgcccttccccgccgctcccgcccctttcacttccgcacagcttaggagtcggggccagcgcctccgctcccaccttccca

SEQ ID NO: 362321 - DNA, 2082 bp, Homo Sapiens
ttgtttcccaagacattgaaatggctgacatcttttcagtaataatcagaacaatatttatttttatatttaaaattcatagaaaagtgccttacatttaataaaagtttgtttctcaaagtgatcagaggaattagatatagtcttgaacaccaatattaatttgaggaaaatacaccaaaatacattaagtaaattatttaagatcatagagcttgtaagtgaaaagataaaatttgacctcagaaactctgagcattaaaaatccactattagcaaataaattactatggacttcttgctttaattttgtgatgaatatggggtgtcactggtaaaccaacacattctgaaggatacattacttagtgatagattcttatgtactttgctagataacgtggatatgagttgacaagtttctctttcttcaatcttttaaggggcagaggaaatgaggaagaaaagaaaaggaattacagcaatactgttctttctataggaaggattagatatgtttcctttgcaaatataaaaaaaataataatgtttactactagtgaaaccaaggtattaggaaaataatgtacaagcatctcttgcaagaaagggtaagattgttatgagtgaaatcgtgccttcctcaaatttatatgttggagtttttattcccaatacctccaaatattatcttatttggaaataaggtctttgtagagaatataatgttaaaatgatttcattaaggcattagcggtgggccctgagccagtatgactggtgtcttaataaaaagggaaaacttgggcacagagatgtacataaagacaatgtgaagagtcatagggacaagatgccttctacaagccaaggagagaggcatggaacagagcccttccttgcagacctcagaaagaaccaactctgctggaatctagatttgggatttccagcccacagtacggcaatacaattacagtttaaatcagcaatctatgatgctttgctatggaagccctagcaaatgaatacaaagacattctaagtaaaagaaggggaaagaaaggaagagatggtctcagtagagatgaactcaggtgcagaatctgagtctcagcacaagggctactatgcagaagtgggtaaaggaatgagaacactcaggagctcggtgggcacacagtcatggggactaggcagttccaaggattgaaatacggataagcaggtcgagaaaagcgacatccagagaacttgtagatgagtgctccgtggtttgtgacattgaaaaatgagacaatgcctgcctcatagtctaggaaaaccccaatacgacagggaggcacagccataaagagagtcaaaaccttgggatcagaagaggaggagtcctcaaaagcattatattcacatgtattctgtaatcctataacccagtagccatattgaggtctatatctggagtaaacttttgaataatttacacttggatcaaaagcaaacccagagctcttccttttattcagactacttattttactgtgtacgcccaggatccaggcaatctttccagacacatctacttcccagtaatatttccccgaagagaaatattggcagccgaagacaccaaaagcagaaaaatcacatggatttgaattcttaaatgtgcaggtgcgtacagttttcacttgtctctgatccacagaaatagcaacattcgaagtggcactgcctggattcagcatcacgtccacccagtagtactggacatctgtcagctctttaagaacttgcagcatcccactcagatctggtactcggaatacactctttagtttcttggaaacagattttggcttcttcaatgtccagctttcactccttttcatgacgtcaatcacatcctgcagcatctctactgacgatcccctcaacctccgctggagatctgagatgagcgtgctgacatcctgctctctgctggaccagctggtctgtagctgctgccaggttatccagcacattcacctcaccttccctaccagcgttattgcagctctcttgcctctatctttcgct

SEQ ID NO: 362322 - DNA, 482 bp, Homo Sapiens
  misc_feature (448)..(448): n is a, c, g, or t
ggacctgatactgtcccactgggaacaggaacttccatattatctaaacaggttcaaaataaaccaaaaactggtcgaagtttattaggaggaccagcagctcttagtccattaaccccaagttttgggattttgccattagaaaccccaagtcctggagatggatcctatttacaaaactacactaatacacctcctgtaattgatgtgccatccaccggagccccttcaaaaaagtctgttgccagaatcggccaaactggaacaaagtctgtcttctcacagagtggaaatagccgagaggtaactccaattcttgcacaaacacaaagttctggtccacaaacaagtacaacacctcaggtattgagccccactattacatctcccccaaacgcactgcctcgaagaagttcacgactctttactagtgacagctccacaaccnggaaacgccacgagcacaaaacaaagtaacatgt

SEQ ID NO: 362323 - DNA, 1746 bp, Homo Sapiens
  misc_feature (1236)..(1475): n is a, c, g, or t
gggcttgttgctttgaaatcttagaagagagcccactaattcaaggactcttactgtaggagcaactgctggttctatcacaatgaaacggctggtttgtgtgctcttggtgtgctcctctgcagtggcacagttgcataaagatcctaccctggatcaccactggcatctctggaagaaaacctatggcaaacaatacaaggaaaagaatgaagaagcagtacgacgtctcatctgggaaaagaatctaaagtttgtgatgcttcacaacctggagcattcaatgggaatgcactcatacgatctgggcatgaaccacctgggagacatgaccagtgaagaagtgatgtctttgatgagttccctgagagttcccagccagtggcagagaaatatcacatataagtcaaaccctaatcggatattgcctgattctgtggactggagagagaaagggtgtgttactgaagtgaaatatcaaggttcttgtggtgcttgctgggctttcagtgctgtgggggccctggaagcacagctgaagctgaaaacaggaaagctggtgtctctcagtgcccagaacctggtggattgctcaactgaaaaatatggaaacaaaggctgcaatggtggcttcatgacaacggctttccagtacatcattgataacaaagggcatcgactcagacgcttcctatccctacaaagccatggatcagaaatgtcaatatgactcaaaatatcgtgctgccacatgttcaaagtacactgaacttccttatggcagagaagatgtcctgaaagaagctgtggccaataaaggcccagtgtctgttggtgtagatgcgcgtcatccttctttcttcctctacagaagtggtgtctactatgaaccatcctgtactcagaatgtgaatcatggtgtacttgtggttggctatggtgatcttaatgggaaagaatactggcttgtgaaaaacagctggggccacaactttggtgaagaaggatatattcggatggcaagaaataaaggaaatcattgtgggattgctagctttccctcttacccagaaatctagaggatctctcctttttataacaaatcaagaaatatgaagcactttctcttaacttaatttttcctgctgtatccagaagaaataattgtgtcatgattaatgtgtatttactgtactaattagaaaatatagtttgaggccgggcacggtggctcannnnnnnnnnnnnnnnnnnnnnnnnnnnnnnnnnnnnnnnnnnnnnnnnnnnnnnnnnnnnnnnnnnnnnnnnnnnnnnnnnnnnnnnnnnnnnnnnnnnnnnnnnnnnnnnnnnnnnnnnnnnnnnnnnnnnnnnnnnnnnnnnnnnnnnnnnnnnnnnnnnnnnnnnnnnnnnnnnnnnnnnnnnnnnnnnnnnnnnnnnnnnnnnnnnnnnnnnnnnnnnnnnnnnnnnnnnnnnnnatgacagagtggagactctgtttcaaaaaaacagaaaagaaaatatagtttgattcttcatttttttaaatttgcaaatctcaggataaagtttgctaagtaaattagtaatgtactatagatataactgtacaaaaattgttcaacctaaaacaatctgtaattgcttattgttttattgtatactctttgtctttttaagacccctaatagccttttgtaacttgatggcttaaaaatacttaataaatctgccatttcaaatttcaaa

SEQ ID NO: 362324 - DNA, 596 bp, Homo Sapiens
gcggccgcggccaggaccggatccgaagccagggtctccaaggccgctttggctaccaagctgctgtccttgagcggcgtgttcgccgtgcacaagcccaaagggcccacttcagccgagctgctgaatcggttgaaggagaagctgctggcagaagctggaatgccttctccagaatggaccaagaggaaaaagcagactttgaaaattgggcatggagggactctagacagcgcagcccgaggagttctggttgttggaattggaagcggaacaaaaatgttgaccagtatgttgtcagggtccaagagatatactgccattggagaactggggaaagctactgatacactagattctacggggaaggtaacagaagaaaaaccttacggtatgaagctcatctaatgtaggcctcttttctaacatttaggaaaagtttctgtgcaggtagcattttaaaacaaatctctgatattatcagccattttaattctcagtgtgtttctttgggctaagaagattggaaattgtttatcgcattgttgcttacttgataggagtttttgaataaagatttattgtgattgcctctt

SEQ ID NO: 362325 - DNA, 1857 bp, Homo Sapiens
  misc_feature (873)..(883): n is a, c, g, or t
  misc_feature (1299)..(1314): n is a, c, g, or t
  misc_feature (1327)..(1383): n is a, c, g, or t
  misc_feature (1391)..(1472): n is a, c, g, or t
ctcagtagagtgaagctggaatgccttctccagaatggaccaagaggaaaaagcagactttgaaaattgggcatggagggactctagacagcgcagcccgaggagttctggttgttggaattggaagcggaacaaaaatgttgaccagtatgttgtcagggtccaagagatatactgccattggagaactggggaaagctactgatacactagattctacggggagggtaacagaagaaaaaccttacgataaaataacacaagaagatattgaaggcattctacagaaatttactggaaatataatgcaagtgccccccctctattctgcattaaagaaagatggacaaagactttcgactttgatgaagagaggtgaagtcgtagaagcaaaacctgccaggccagtgactgtatacagtatctcccttcaaaaattccagccaccatttttcacattagatgttgaatgtggaggaggtttttatatcagaagcttggtcagtgacattggaaaagaactatcttcctgtgccaatgtgctagagctgacccgaaccaaacagggaccatttacgctagaagaacatgcccttcctgaagacaaatggacaattgatgacattgcacagtctcttgagcattgctcatctcttttcccagcagagttggcacttaaaaaatcaaaacctgagtctaatgaacaggttttgagctgtgaatatataactctaaatgagccaaagagagaagatgatgtaattaagacgtgtcgagattggcctgggaatatcatcattttctagttgacatttgaatcctgtgtgcagatgcagaatgacaagctgcattcaaaagacaaacaatatgtcnnnnnnnnnnngcatgaagaaaaatgtctatcatttacagtttcaatagcacataatttattttctatgcattataaatggccttgcagttggctcagttgtttgctgtgttgtgaaatgttttaggattttttgtattgtgaaaatatgaatatgattggattcagaaaaattaactttctgaatttgatctgtcttcagtcttgtgaaaaagttgaacaaatttcctaatcaaagaaaaaagtatgagctccatgtttctttagtttcacaaaaatgaccataatttagtgttatttttactttatttacgcttcctggtggcttcattttattgaaattctttaaatctgcttacaccgcacccccttcgcatacattcctctgctatcgcgccctaacccattcgagattcccctcccgcaannnnnnnnnnnnnnnnaatccaacctcgnnnnnnnnnnnnnnnnnnnnnnnnnnnnnnnnnnnnnnnnnnnnnnnnnnnnnnnnnacgcatannnnnnnnnnnnnnnnnnnnnnnnnnnnnnnnnnnnnnnnnnnnnnnnnnnnnnnnnnnnnnnnnnnnnnnnnnnnnnnnnngctcgcattacctcaacagcccactcacccactccctcatgagccgtttcccatcatgtggcaccaactgcgaatataccctataccgcaccgccgcccctacaaccctaatacctgcatctgacgcctctccggctacaacaaaccgccctacgcagacccccactcttctcaatctatcgctacccacttagcaccgcaccttcccagcgtgcgcctaatactaaacccctaattctctactaataccctgccctccaatcgagaaagtcacgctacatcgccacactcgcgcagtagtcaacgagtccgccgagactacataccaccaaaaacaccgcgcaccgcaaaataaataccccacccgcgcgccgctcattgaaag

SEQ ID NO: 362326 - DNA, 1847 bp, Homo Sapiens
ctccttttacttcaggcgaacctgaactttaatgcaattttgaagcatgccctgaatagattcagtcattatcaagtcaaactaaaaacggtgaaaggttgcgactattaccaaataggaaaaacctgaagacataagaactacacatgaggaatatgtcatttagcactttcactttttgatctccacagaagacaatgagaagtcataccataacaatgacgacaacttcagtcagcagctggccttactcctcccacagaatgcgctttataaccaatcatagcgaccaaccgccacaaaacttctcagcaacaccaaatgttactacctgtcccatggatgaaaaattgctatctactgtgttaaccacatcctactctgttattttcatcgtgggactggttgggaacataatcgccctctatgtatttctgggtattcaccgtaaaagaaattccattcaaatttatctacttaacgtagccattgcagacctcctactcatcttctgcctccctttccgaataatgtatcatattaaccaaaacaagtggacactaggtgtgattctgtgcaaggttgtgggaacactgttttatatgaacatgtacattagcattattttgcttggattcatcagtttggatcgctatataaaaattaatcggtctatacagcaacggaaggcaataacaaccaaacaaagtatttatgtctgtcgtatagtatggatgcttgctcctggtggattcctaactatgattattttaacacttaagaaacggagggcataattccacaatgtgtttccattacagagataagcataacgcaaaaggagaagccatttttaacttcattcttgtggtaatgttctggctaattttcttactaataatcctttcatatattaagattgggaagaatctattgaggatttctaaaaggaggtcaaaatttcctaaattctggtaaatatgccactacagctcgtaactccctttattgtacttatcatttttactatatgttttgttcccctatcatgccctttcgattcatcctacatttcttcacaagctaaatgtatcatcttgctactggaaagaaattgttcacaaaaccaatgagatcatgctggttctctcatctttcaatagttgcttagatccagtcatgtatttcctgatgtccagtaacattcgcaaaataatgtgccaacttctttttagacgatttcaaggtgaaccaagtaggagtgaaagcacttcagaatttaaaccaggatactccctgcatgatacatctgtggcagtgaaaaatacagtctagttctaaaagtacttgaggtaaacatactaaaatgaattatataatgcagcctcttaattctttgaagaactaaaaaattaggaaacaaagttctagcatttacaaaactcagatctcaaagctctgcttgtatttgtgatatttcatttgcttaactgtaaaccatttcaaggtactatcttttaaatctgtatgtaaaatcttttcaaaatacatttttaagctaatactcttaacatagattatgaagttaagtgaaatttatggctctaacagcaaaataattaaagtgccatagtttctcaagtgactaaagtagttattaaaatcaagcacttgatactaatttgaagtgtgtttaaaagtaaatgatttgggaactgacaatgtgtcagaaaatatatgttcatttatcattttaaaatcttgtataatttgccactgtattcatttatgcctaaatctctataacagatgaaaagataattaataaaatcctaattaaaaaatgg

SEQ ID NO: 362327 - DNA, 377 bp, Homo Sapiens
ctaggaccataggcgtgtgctgggaagcccagcctattatttacacttttagttaaagtaactgttattaaaatagcaaatgactcaatgttgggcattccgttgtaggaaaaacctgaagacataagaactacacatgaggaatatgtcatttagcactttcactttttgatctccacagaagacaatgagaagtcataccataacaatgacgacaacttcagtcagcagctggccttactcctcccacagaatgcgctttataaccaatcatagcgaccaaccgccacaaaacttctcagcaacaccaaatgttactacctgtcccatggatgaaaaattgctatctactgtgttaaccacatcctactctggaa

SEQ ID NO: 362328 - DNA, 549 bp, Homo Sapiens
gagtgagaccctgtctcggaaatggattgataaataaataaatgaataaagagaatgctaatcatttctgggttcactgcgactcactgtagtgctggggatcccccttgtaacactggaactgaaagacagtgatgaaagctatgtcaagcattcattattctgaagaggaggagaaatgccacatacctttcccatgggacctgtggtggaatgaatccatacttctgcctcacttcgagcagacttttgttctcggcgctcctcacgatggagtttcatgcttcattttcacatctctctgcacaattagattgggagctccttgagggcagagtacgtgccttaatctttatctttgtaatgccacaatgaacagagtgcctcctggtacactgtaggagcttaagaaatactcactgaatgcatgaatgaatgaatgaacaaatgaaggaatgactaaggatgtttgtagtgctataatatagaatgggatttactctgctttaccagttagtttcataataaacaaatagtctgtaaaaaaaa

SEQ ID NO: 362329 - DNA, 1700 bp, Homo Sapiens
  misc_feature (1046)..(1046): n is a, c, g, or t
ggagggaggaggaggtatacccctagaaacacttaaagaagaaagtcagtcaagacatgttctacctgcaagttttgaagtcaacagtttgcagaaaagcaactgggggttcttacttactgggcttgtgggtggcaccctggtggctgtgtacgctgtagccacgccgtttgtaacgccagcccttcgaaaagtctgtttgccgtttgtacctgcaactacgaagcagattgaaaatgttgtgaaaatgttgcgatgccgaagaggatcccttgtggacatcggtagtggggacggacgcattgtcatagcggctgcgaagaaagggttcacagcagttggttatgaattaaacccatggctagtttggtattccagataccgcgcttggcgagaaggtgtgcatggatctgccaaattttatatttcagatttgtggaaggttactttttcgcagtactcgaacgttgttattttcggtgtgcctcagatgatgctgcagttggagaagaaacttgaacgtgaacttgaggatgatgcacgagttattgcttgccggttccctttcccacattggactccagaccacgtcacgggggaggggatagacacagtgtgggcatatgatgcaagcacttttagaggccgtgaaaagaggccctgtacatcgatgcatttccagctgcccattcaagcataaactttactgggagtgtttttctgaaatattgtagtcttccctgatcttgtagagacttacagctgtgtccttagcaaaggagcataattgtctttggtttggaatgagaaattactattactttccttaactgttggagaaaacaaacgaagaaaaacaggtagatttaaaatctgcttttgatgctattttcttaaaaattgtacttactgcctttccatgcacctggatgcatgaaaagatgaataagtgatggtcatggttatgggtaggaaaataagatgccaatagctccttcacattataaacaatatggcttaatggcctcgataaaggagaaatgatnttttaaagacagtatatattaccaactgtttgtagtatcctataactttgttcatacttaagttgtatctctttcctttttgtacttcatggcaaaattaattttctaaaggattcagagaggcgtttatattttataacatttattagaaataatttgttccaccactagattactgtattttatggaatctaagctgtatatgtgtacatttgtatacatgtatgtgtaaatgtaagcctgacgtgggttcagattccagttttgtcatcagcaagaggcctcggacccatgacttactgcctctgagccttggctttctgtgtatctctgccactgggataatggtacacataacagtggagtggggaccaatttctaaaactcatggcacctagtctttggtccataaatggtgtttgttattttagacactgagaaaaatcttattcacagaagttgcagattatttctgctagtcacttttttatttcttgagagctgccactcatttaatatttctcatttatgagaagagacttgactgatttagataaaagacgaattaaggaaaacctttgaacgtgagtagacaagcttcatatatctgtaaagtgaatattgaatggtagcttgagtcattcgtacttatca

SEQ ID NO: 362330 - DNA, 432 bp, Homo Sapiens
  misc_feature (322)..(322): n is a, c, g, or t
  misc_feature (363)..(363): n is a, c, g, or t
gaggtataccccgagcaaacacttaaagaagaaagtcagtcaagacatgttctacctgcaagttttgaagtcaacagtttgcagaaaagcaactgggggttcttacttactgggcttgtgggtggcaccctggtggctgtgtacgctgtagccacgccgtttgtaacgccagcccttcgaaaagtctgtttgccgtttgtacctgcaactacgaaggcagattgaaaatgttgtgaaaatgttgcgatgccgaaggagggatcccttgtgggacatcggtagtgggggacgggacggcattgttcataggcggctgcgaagnaaagggtttcacagcagttgggtttatggaatttaaacccntgggctagttttgggtatttcccagattacccgcgctttgggcaggaaagggtgttggcatgggatctt

SEQ ID NO: 362331 - DNA, 436 bp, Homo Sapiens
  misc_feature (23)..(23): n is a, c, g, or t
  misc_feature (43)..(43): n is a, c, g, or t
ccaccataacagtggagtggggnccccaattcccaaaaccccnggcaccccagcccttggcccccaaaagggtgtttgttaattttagaacaccgagaaaaaccctattccacagaagttgccagattatttccggcctagtccacctttttatttccttgagagctgcccactcatttaatatttcctcatttatgagaagagacttgacctgatttagataaaagacgaattaaggaaaacctttgaacgtgagtagacaagcttcatatatctgtaaagtgaatattgaatggtagcttgagtcattcgtacttatcacagaaaagaattgaactcccagtcatacacctgtaactgaaataccaaactgtcttaatggagatgtaatgaagtaagatggtcacatctttaactaaacttataaaaattggtc

SEQ ID NO: 362332 - DNA, 1204 bp, Homo Sapiens
  misc_feature (227)..(267): n is a, c, g, or t
tggcggccgcactaccttcgccactagcactacacttatacgacagcttactggatcaggccaaatcggccgagctcgaattcgtcgagagcggccggccttcgcccgcccgctagcacgcagtcccttggtctcttcggtctcctgccgcccccgggaagcgcgctgcgctgccgaggcgagctaagcgcccgctcgccatggggagccacgcacatcggcccgcnnnnnnnnnnnnnnnnnnnnnnnnnnnnnnnnnnnnnnnnngcgtcccgcccagccgcagcttcccaggatcgggagactcaccactagaagacgatgaagtcgggtattcacaccctagatataaagataccccgtggtgctcccccatcaaggtgaagtatggggatgtgtactgcagggcccctcaaggaggatactacaaaacagccctgggaaccaggtgcgacattcgctgccagaagggctacgagctgcatggctcttccctactgatctgccagtcaaacaaacgatggtctgacaaggtcatctgcaaacaaaagcgatgtcctacccttgccatgccagcaaatggagggtttaagtgtgtagatggtgcctactttaactcccggtgtgagtattattgttcaccaggatacacgttgaaaggggagcggaccgtcacatgtatggacaacaaggcctggagcggccggccagcctcctgtgtggatatggaacctcctagaatcaagtgcccaagtgtgaaggaacgcattgcagaacccaacaaactgacagtccgggtgtcctgggagacacccgaaggaagagacacagcagatggaattcttactgatgtcattctaaaaggcctccccccaggctccaactttccagaaggagaccaccaagatccagtacacagcctatgacagagctgagaataagggcacttgcaaatttcgagttaaagtaagagtcaaacgctgtggcaaactcaatgccccagagaatggttacatgaagtgctccagcgacggtgataattatggagccacctgtgagttctcctgcatcggcggctatgagctccagggtagccctgcccgagtatgtcaatccaacctggcttggtctggcacggagcccacctgtgcagccatgaacgtcaatgtgggtgtcagaacggcagctgcacttctggatcagt

SEQ ID NO: 362333 - DNA, 642 bp, Homo Sapiens
gaccagtgtgtacctgacatgtatcagacttctgagctcttcaagctgcctcaaagaatgaatctttttagtctagaaaatgtgtttatttgataaatatactattgtgtatgagtgtgaaacaatgcagactttggagtatctcattagaaggactgtatgaatttatagaaaattgaatctaatttcagaagagcgcactgtcttctcagtcaacaaggttgcccagccacagagggtcagagaaaatgtcctttcccctccccactccttttcatagaatcctctctcaggcctaactgagctgtcatatccaattcagactgacacagagtgaggggcgctgagagtctctatgtatataaagatataggaagaaaataaggatcatcacaggaatctgttgggcttctccccatgactgtgatcttacccatgtttgaatcacaaactttaaatttataataattatgattcttgcagttttcaagtaatttgttaaatgcctattcaacacagacagatttttattttcagctgtggcttgtaaatgcctacaaactgattcatgttggtggtcgttatgacactttctgtgaattggtgaataaatatgattttagaatttcacagtaaaaaaaa

SEQ ID NO: 362334 - DNA, 964 bp, Homo Sapiens
ctggaccggtccggaattcttgggatggctttatacgtctaaagaaaatattcagtagctgactccgcccagggatagcctgtgggcaccagcagctcgggctgccatgggatacagcacccatctacaaagacctctattacataaacactgcttcttacaggaaacaaacctcttctgggatctccttttgtgaaaaccagtttgatgtgctaaaagtaaaaagtctattttccagtgtggtcttgttcagaagcagccagatttccaatgttgtttttcccctccactcagaaaccccctgccctttcccttcagaaaacgatggcaggcattcctctgagcttacaagcagagactcactccaacccaaactagctgggagttcagaaccatggtggaataaagaaatgtgcatctggtctcttctgttgtttttatttcatatcagattaaatttctttaccatgttggctaagtctaaatattagagatgaggctgtgcctactccctggccagctctgctgatagcctatgatgggttccaatgggaaatgactctttactattaaaagacaaggaaagctctgacttcgtacttctctgatgaatggcaatgtaaatgaacaaggctccatgtgactggagcatggaagtgaatgctactttcttaatttaatctgccctgtcctacctgctcctctgattgttagccatcacataacttattgaatgcttgccatgtgccaggcactgtgctgagtgccatacatacatttcatttaattatccaataatcctacttactattgtttattctcaatttacaggtgaggaaactgagacatagaaagcttaaataatttgctctaggtccctatactaattgagatgttttcagcagacaaaaataagtcactcttacgcatgtaaaaatattctttcactcataataaaagaaat

SEQ ID NO: 362335 - DNA, 1133 bp, Homo Sapiens
cggtccggaattcccgggatgaggggatgatcagcgaaatccggaccgcatttgaggaggccctgggacagctggtttggatggatgagaagacccgccaggcagccaaggagaaagcagatgccatctatgatatgattggtttcccagactttatcctggagcccaaagagctggatgatgtttatgacgggtacgaaatttctgaagattctttcttccaaaacatgttgaatttgtacaacttctctgccaaggttatggctgaccagctccgcaagcctcccagccgagaccagtggagcatgaccccccagacagtgaatgcctactaccttccaactaagaatgagatcgtcttccccgctggcatcctgcaggcccccttctatgcccgcaaccaccccaaggccctgaacttcggtggcatcggtgtggtcatgggccatgagttgacgcatgcctttgatgaccaagggcgcgagtatgacaaagaagggaacctgcggccctggtggcagaatgagtccctggcagccttccggaaccacacggcctgcatggaggaacagtacaatcaataccaggtcaatggggagaggctcaacggccgccagacgctgggggagaacattgctgacaacggggggctgaaggctgcctacaatgcttacaaagcatggctgagaaagcatggggaggagcagcaactgccagccgtggggctcaccaaccaccagctcttcttcgtgggatttgccccaggtgtgggggctcggccccgacacccgaaaagcctccccccaaggggcttgctgacctaacccccacggcccccgccccctttccgcgtggctggagccatccccctccaaccttccccccgaattttcctggcccccacctttcggtttggcccgccccggctttcccccagtaacacccagggcatttttcaggcgagggtgtgcggtaaaccctgggtattagggggtaaacacggtccccgccctgggacaccaagaatagcagcggcgactctccccatattcacagaccccaattgtctctactcggattcggccccccagcctcattggcacgcattggatgtctcggatacttattctact

SEQ ID NO: 362336 - DNA, 588 bp, Homo Sapiens
acaggatgcttcagagaaggacagtgtcccaatgggctctcctgccttccttctctctctctttacagcaaaatattgcacaagaggaaggagctgggctgcagggagagagcagcagtatggaaagaagccttctaattgtcctgatctcatggtaaaacctactgtcaggaggtgctagggaactagtgccagggtcagtctgcaggaaaggcctttcttatagggaccaacagttggacaggatggaggaaccaaggggacgccgactgtgccattgaagcagatatgaagatgaatacaagttgaagcctcagagttaccctctgtgacgccgaacctaaaataaaagtaaacaagatagagcttgggcttgcgggcccagttccagaggtggaagttacagaagaggaggtacctgggccacacgacatgagctggaaaatctctcttagagagttggagtagcacaattgcctgttctagggcagaaaccatgggctatgttaatgtcctaatgtgtagctagcagattcgtagctagtttgtattgtcttgtcaattgtacagactttttaaaaaaaacaa

SEQ ID NO: 362337 - DNA, 589 bp, Homo Sapiens
aatagctcagaccatgatgtctatcacatgcaagtggagatgcagcgagatgtctggaacagatccagcaattcttggccacgcagttgattatgcaaacatccgagtctgggatcagtgctaaaagtcttcgagggagagattctacccgcaaacaggatgcttcagagaaggacagtgtcccaatgggctctcctgccttccttctctctctctttgatggaggaaccaggggacgccgctgtgccattgaagcagatatgaagatgaaaaagtgaagcctcagagttaccctctttgagccgaacctaaaataaaagtaaacaagatagagcttgggcttgcgggcccagttccagaggtggaagttacagaagaggaggtacctgggccacacgacatgagctggaaaatctctcttagagagttggagtagcacaattgcctgttttagggcagaaaccatgggctatgttaatgtcctaatgtgtagctagcagatcgtagctagtttgtattgtcttgtcaattgtacagactttttaaaaaaaacaaccaccagtgaaatgtgtgtgtattcctataaagg

SEQ ID NO: 362338 - DNA, 859 bp, Homo Sapiens
gcttatggtgatggaaagagagatgtcaataattccacattttctggcttgcattgtttgatgaaaggtgaccccattccctgagttaaagaatgctgaaagaagaccaggcttgaggaggaaggatcatgcatttgcttttggacctgtagagtttgagggcagagctgaagaagcagtgcaagtccatttgaagacctctggaaggaaacccccagcggctcttttttcactgaacaagcattgtgggaatttggggctcggctgtgtaatttgtcctcttctcattcattcaggacatgttcagcaccaggaggaatttgcatccaagtccgtctccctgctaagtggtattttgagaattccgaagcttagtctcagagaagagctgacctgaacttgccgaggctcccactgcattgtagcttttctctggagaacaaaaactgccattgtccagcagctcattagcatgactgtacagcctccggagttagcaaggtgatgcaaaaataatatgacaagatccatgtcttcaatgagctacaatcctactgggacatgagactgtgcttataatatgatgaaagaataagaaaattttaaagctataacaggcagagcacaagaacaagcagagctataacaagcagagcacaagaaggaagagtgcagatccaggactgggacacttaaccaataataatacaaataatgaaaacacagcagcaacaggtgccattttggaagcaagaagcagagaacaagctctcactgggcattaaatctgccggcatcttgatcttgaacttctcaacctccagaactctgagaaataaatttctattatttacaaatt

SEQ ID NO: 362339 - DNA, 604 bp, Homo Sapiens
gcaccggcgcacacatcagccgccgcgcttccgggaagccacccatcagccggaggaggcccgcgggtgctgagggctctgccgccgctagcggggtggactccgcagggccagcgccgcagtctccgccccacgtcccgcgtgcccccgggcaccggcaccgggcgccgggcacctaccgtcctcctggtccaacaccatggtcccgacggctccagccggactagcgccgaggatacggaggggcgcgtggctccgactcccgccgccggccgcctgcgctgctcccgccggccccgcgcgggcgccgagtccggagagccgcgaccgccgacgggggcagacggaccggagtccggagcgcagccccgcgggcagggagcgcaggaggagggactggggggaaggcgcgggggcgagacggccaggccgggatcgcgggagcctcgcgagcagcagctgcccgggccgggccgcagccggagcctgagccgcgcgcgcgtccttcctccgcgccggccgtactcgcctcagcagagtgaaggctgcatttcccagggcccctcagattccccctgttaattaaatcaattcattatgctca

SEQ ID NO: 362340 - DNA, 628 bp, Homo Sapiens
ggcacgaggggatgggtcaagggactagctgggccagagaggaaggccaggcagccagaccctttccctgcagcccagaagttgcctctcaaccccaaaccttccagcctcctgccccagcacttcgtccttcaggcactaagggattgtcccagcctcggcggatggtctctgggtcagccagagctgtgagttcttccaagagactggcagtggaaagggtaggagttggacccagggatggatggaaattttgtgaggtccaaagcttactgtagtttgggcgtggggctctttaagaaaaggactacaagactactaataccaaattaccaccaaggacctggcagctgaaggaacctgaaggaccctaaacttcattaccttcaaggtaaaaccgcctctagttgaacctgatattttggactagatggcccacccacctaccccagccagcgtggcacctcccaacatgccaggctgggtgaactgatggcagttccctccctagccctgccaggggcggagacaattgtcagccatcccgcagctacggagtgccagaccgcagagacagtgctggtttgacggcaccctcacccctgcacctgcaggatctgtgggcacc

SEQ ID NO: 362341 - DNA, 744 bp, Homo Sapiens
tggtgaagagagagctggcggccacactgaggcctgtctcgttgcgtttgtagtgctccccgaaggacaccagcccaatggagatggtctgcaggaatggccggatggcaggcgtgaactggaagcccaggcagcggcacatagaagcatcccttatgcagcgtgacatactcccggaggaagtcggcggtgagcccctcgtcgccctcaaagaagagtacccccggccgattggtaaccagcaggcgctgggcgtagtagaccagagcgcggagctgggtgagggcagccaggtaggcctccagctcggccaggttgtggctggtgcggaagaagatgctgcggcggttggaggccacatagcgggatttgtgcaggaggtgcgccaggcagcagcgggctgtgtgcactaggctgcggtacccgttggccggtgtctctgggtccaggtcaaagaggtgcgccacacccagcaggcggcccagggccggctccagccccagcgcctgctcccgtacaccggcaaaaacgcctgacagccgctgggccgtttccccaggaccctggctcgagaagaaggctatgttgtcctccgccagagtcaccagcgactgtgtcattgtgcgcaggtccatgttgtggatgagccttgaggccctcctaggcatcttccgagcttccctgggctgggactgctggtctgtggcttgtgccagtagcagcctggggcaataaccccccgct

SEQ ID NO: 362342 - DNA, 789 bp, Homo Sapiens
atactctagacggccgctggtgaagagagagctggcggccacactgaggcctgtctcgttgcgtttgtagtgctccccgaaggacaccagcccaatggagatggtctgcaggaatggccggatggcaggcgtgaactggaagcccaggcagcggccatagaagcatcccttatgcagcgtgacatactcccggaggaagtcggcggtgagcccctcgtcgccctcaaagaagagtacccccggccgattggtaaccagcaggcgctgggcgtagtagaccagagcgcggagctgggtgagggcagccaggtaggcctccagctcggccaggttgtggctggtgcggaagaagatgctgcggcggttggaggccacatagcgggatttgtgcaggaggtgcgccaggcagcagcgggctgtgtgcactaggctgcggtacccgttggccggtgtctctgggtccaggtcaaagaggtgcgccacacccagcaggcggcccagggccggctccagccccagcgcctgctcccgtacaccggcaaaaacgcctgacagccgctgggccgtttccccaggaccctggctcgagaagaaggctatgttgtcctccgccagagtcaccagcgactgtgtcattgtgcgcaggtccatgttgtggatgagccttgaggctgtatcctggtagtgtctgtgattccgagcactggttttctcatgtggcgacgtcccactgtatcctgacatcactttataaccagattttcctttgaagcctagcttcactccctg

SEQ ID NO: 362343 - DNA, 1547 bp, Homo Sapiens
tattacggcctcccccctatttgggggggccccccttttggtcccaaaggaaaaagctggggttaccggggtaaaaccttggggccccccttgggaagggaatacctttaaggagccgggcccctctggtgaaggagaagaagctgggcgggcccaccattggagggccctgttctcggttgcgtttggtaggtgctcccccgaaagggaccaccagcccaaatggaggatgggtctgcaggaaatggccgggatgggcaggcgtgaactggaaagccccagggcagcggccatagaaagcatcctttatgcagcgtgacatactcccggaggaagtcggccggtgagccccctcgtcgccctcaaagaagagtacccccggccgattggtaaccagcaggcgctgggcgtagtagaccagagcgcggagctgggtgagggcagccaggtaggcctccagctcggccaggttgtggctggtgcggaagaagatgctgcggcggttggaggccacatagcgggatttgtgcaggaggtgcgccaggcagcagcgggctgtgtgcactaggctgcggtacccgttggccggtgtctctgggtccaggtcaaagaggtgcgccacacccagcaggcggcccagggccggctccagccccagcgcctgctcccgtacaccggcaaaaacgcctgacagccgctgggccgtttccccaggaccctggctcgagaagaaggctatgttgtcctccgccagagtcaccagcgactgtgtcattgtgcgcaggtccatgttgtggatgagccttgaggcgctagacttcctctttgagtaacacctgctaacctccttcccccttatcctctcaagagcgctggagccctgaacatcggcgcttgaagcattccccaggtgggaaacactgagggcatccgttgcccttggtcacacagcgaatacggaatccgagcgggaaccctggtccacgaagcccgcataccggactctgctcccaagccgatccgggcgtcagctagtcccaggcacagggtgggcctctcggctgtcacatcacccccttctcacaatggatcatcccgttgtccccgcaagcggcaatgggccagtccgcggacccccccaactcccctgtggcagtgggccagtccacgctgtccccactgccccgtaggatgtacgaggttccttccgggctgctgccggtctccgcgcgctcacggggccttgtacgaattggaactcccctctgaggtgtgaggggaaccacatcacacttgtggaacccctttccaagtgcttctttcccatcgcgtcatcgcaaacccttaaaaagtggggggacagctattcctcctgttttagagatgggaacaaccaaaatggatgacgtggctcacatgagcacatgcttgtgagtggcagagtctgggacaggagccaaaccattctgtctcctacccagctccctttttggtccgtcctctgcctggacaggccttcgggagtccagggctggagtgacattgct

SEQ ID NO: 362344 - DNA, 579 bp, Homo Sapiens
ggcacgaggcagcttctcctggggatctctagatgtctgcttgtgatttttggcaagtatatgcaaatgagcctcctctcctgccctgagacaagtatctgcagtgtgaacctggcagcctcagacccaaggggctcagaggaaacttctctggtttctagagctctgtgctccttcagagaagtcttccttccttccagtcagtgtccctgtgaagctgggatactcatttcctggtgtaccgggcaaacaccggattgctgattttgagaaatgcctctcgatggacctgtaacctgctggagtctgggatggtagctgtgggctggacttggctgatgggatgacccggtggctagtgcagcatcacacaagcctggttcaagtcttggctgtgtcatttcctgctgagggaccaggcactgaatttcctacctcttagggtcattacctatgaggttaaagctacctcatgggattgttatacgccactaatgttgaggcagacacctcttggcagggtgactgctcatcttagaccctccccttttctgcgaatttgggccccttgatcctctg

SEQ ID NO: 362345 - DNA, 687 bp, Homo Sapiens
gggtgttccggaatcttagttgagggacaaacattccttccagtgagagattcaagaattgatgtgaattgaatatatttttcaaggtattataaattgtgttgtgttttcagtataagaaaatgttgacaggaaacaattttatagcatttataaaaaaccaacacttgtgcaatgctaaattggcgaagcttctcgcacctgaattagagcacaataaatatgctgtttataaaccaaatcactgctattccttctctgaaatcatctctcctctttttaaacctttacttatagctagaataaatcactatttaattgcctctaatactttaaaactactggatggttaggcctggtttaactatttatggagagctatttgcaaacttaagttgtgtaaatgtaatttctacttgtgaatctgagctgtagcagcccagagggagctaggcaaactattccagaacaccaactgataagtgatcagatgctttgtaatgtaggattttttaacctgttgattatgggtttggcgaccttaaatgtaataatgttcacctcgattttcctggagtaacaaccagcgttggtagtagcccacctgcatgaggacggccagtgttaacaatatttttgttctgatcttcttccccatttttgtttcctcaaacatttttactagag

SEQ ID NO: 362346 - DNA, 573 bp, Homo Sapiens
  misc_feature (56)..(56): n is a, c, g, or t
  misc_feature (493)..(493): n is a, c, g, or t
  misc_feature (495)..(495): n is a, c, g, or t
  misc_feature (501)..(501): n is a, c, g, or t
agtccttggaatgtgggattttaaccctgtggataaggggttggtggatataaaangtaataatgtccaccctcgatttccctggagtaaccaacccagcgttggtagtagcccacctgcatgaggacggcccagtgttaacaatatttttgttctgatcttcttccccatttttgtttcctccaaacaggtttttaggagagtggagatttaaagtcaggatgtggcctttttattttaattatatacttaattcttagaacaagtagaatgggaaaggagtgactgataaatctaagattcaaaatagtcccgtcgaaacttaaaggccagattattgctttggagctttctataggtactagccatcccgtcgttaaatgttttcatggatatttgaaaagaagaccatgtacctttaataactgttcttttctcgagtttctgcctcgtgctttgacctggattgcattattattgtttatgcgaagtnanaaaaanaaaggaaagcacaagcttttcctgtatattatatttccatttccattttaaaataaaaacaattttcccaac

SEQ ID NO: 362347 - DNA, 531 bp, Homo Sapiens
ggcacgaggcagagatttgtttaacacaaaacaagaaaagctgagaggcaaaacaggggagtgaggggcaacccagccacccgctccctttctggggccatggtgtccctgctgtgtgtcagtggcatgtcactgtggttcagtgagcacatgggtggacgtgcagagactgtctgcgcagcccccagcagacatgcccctggggtgaggacacaggctctgcaggccatctccccctctggctcagtcatcgcctgcccacccttcacttcttaaaggtgcgcaagagaggagggccgactggagggtgtcgccggaaggtttcagcctgcccttcacaattccccttgtgcacagcccagtttccatctctcagggcccacccagagcacgcacctgtgctcatgagtgtttccgcaggataattcgttctgagcatgataccacagtgtggattgtctgtctgtaaggagatgccatctactaaccaatttgtattgtgtttccaataaattcctggaaattttgaaa

SEQ ID NO: 362348 - DNA, 474 bp, Homo Sapiens
ctgtgcgtggcctcagtgcactcggtgtcatgtctgagcctggtgtttatgccccactgctgtcctaagtccctggcgaggggaggtggaggagctgccccgtgggtgtttggagattctgttttactctgcctagagaggaaacggctttggggagggagggggaagcctttattctttactgttgtccctgttttcctttgggggaatttactcagttagcagcccctcctcaccattccccccaggaaggccatgtcccagttttctgtccacccctcctgttcctctgcactatgtctctgattttccctgccagggaagctaacccagagcacgcacctgtgctcatgagtgtttccgcaggataattcgttctgagcatgataccacagtgtggattgtctgtctgtaaggagatgccatctactaaccaatttgtattgtgtttccaataaattcctggaaatttta

SEQ ID NO: 362349 - DNA, 612 bp, Homo Sapiens
  misc_feature (119)..(119): n is a, c, g, or t
gccctctcacccaggcccaagagatttggagacaggagtcaggccaggtctgaagcaggagaagggaggcccctcctatctacccagttgacatttggctttgggaaaagcgcattgtntcgagccacgtgtgccaagcaggcttttccttcctcttgtaagtaaagctcgtggttctgtagtccagtcatcctaggagggtgatgttgactgagacttcacgctctccctttgtctctggaaactgccccctcgttctgacagaatcccccaggcaatggaggaagggtgccgaggcgcctctagtctgtgccctttgccgttggaagcatttggtgctgagagggtttcccagccacccgctccctttctggggccatggtgtccctgctgtgtgtcagtggcatgtcactgtggttcagtgagcacatgggtggacgtgcagagactgtctgcgcagcccccagcagacatgcccctggggtgaggacacaggctctgcaggccatctccccctctggctcagtcatcgcctgcccacccttcacttcttaaaggtgcgcaagagaggagggccgactggagggtgtcgccggaaggtttcagcctgcc

SEQ ID NO: 362350 - DNA, 532 bp, Homo Sapiens
tcaggattgtgttacattttaataggaatggggatatttgtgatatactgacaaaccaagacaggtgactataaaacggcaatgtaaagtgtcagcttctcctcacacctttagagtagacatgtgagaacctcactcctgtcagcatattcttggggttaaatctcaagtgatccatagaatcttagataaagcagatgaaaataggcttttctgtcttcctaagtaaacagcaatgaagttgagagaaagaagatattgctggaagtcatgataaagtctatcttctgtgaccatatgtttccttagagagttttagacattgaccctcatctaaaaaattgtgaaaaaggactctcaccagtctgttaatatgtatgtatatgaaagaaattactggtaaacttctaaggcaggcattggtgttacttttttttatctttattgtgtctgtgaaatgattgtgtgtattttttctttgattagacaatgagattcccaaataaattttattaaagccaaaaaaacctta

SEQ ID NO: 362351 - DNA, 1124 bp, Homo Sapiens
ggcctgggtggcgaattcggcacgagggcccagctgcgcgcgccttgggattgactgtccacgctcgcccggctcgtccgacgcgccctccgccagccgacagacacagccgcacgcactgccgtgttctccctgcggctcggacacatagtatgaccattaggtgtttcgtctcccacccattttctatggaaaaccaaggggatcgggccatgatagccactggcagctttgaagaacgggacacctttagagaagcttgatcttggaggcctcaccgtgagaccttacaaagccggattccggcagagttcctctatctcgtcttgttgctgattaaaggtgcccctgtctccagtttttctccatctcctgggacgtagcaggaaatcagcatcatggttgggttcaaggccacagatgtgccccctactgccactgtgaagtttcttggggctggcacagctgcctgcatcgcagatctcatcacctttcctctggatactgctaaagtccggttacagatccaaggagaaagtcaggggccagtgcgcgctacagccagcgcccagtaccgcggtgtgatgggcaccattctgaccatggtgcgtactgagggcccccgaagcctctacaatgggctggttgccggcctgcagcgccaaatgagctttgcctctgtccgcatcggcctgtatgattctgtcaaacagttctacaccaagggctctgagcatgccagcattgggagccgcctcctagcaggcagcaccacaggtgccctggctgtggctgtggcccagcccacggatgtggtaaaggtccgattccaagctcaggcccgggctggaggtggtcggagataccaaagcaccgtcaatgcctacaagaccattgcccgagaggaagggttccggggcctctggaaagggacctctcccaatgttgctcgtaatgccattgtctcagtgctggtggagttgacatttgacagtgtgggaggcctcgtaccagccaggatcccaagcgtcccgtcccttggaaagttcagccagaatcttcgtcctgcccccgacagcccagcctagcccacttgtcatccataaagcaagctcaaccttgga

SEQ ID NO: 362352 - DNA, 1189 bp, Homo Sapiens
  misc_feature (908)..(1003): n is a, c, g, or t
ggggggcaacatgcttatccctgtagctaccctgtcttggccttgcagatccaaggagaaagtcaggggccagtgcgcgctacagtcagcgcccagtaccgcggtgtgatgggcaccattctgaccatggtgcgtactgagggcccccgaagcctctacaatgggctggttgccggcctgcagcgccaaatgagctttgcctctgtccgcatcggcctgtatgattctgtcaaacagttctacaccaagggctctgagcatgccagcattgggagccgcctcctagcaggcagcaccacaggtgccctggctgtggctgtggcccagcccacggatgtggtaaaggtccgattccaagctcaggcccgggctggaggtggtcggagataccaaagcaccgtcaatgcctacaagaccattgcccgagaggaagggttccggggcctctggaaagggacctctcccaatgttgctcgtaatgccattgtcaactgtgctgagctggtgacctatgacctcatcaaggatgccctcctgaaagccaacctcatgacagatgacctcccttgccacttcacttctgcctttggggcaggcttctgcaccactgtcatcgcctcccctgtagacgtggtcaagacgagatacatgaactctgccctgggccagtacagtagcgctggccactgtgcccttaccatgctccagaaggaggggccccgagccttctacaaagggttcatgccctcctttctccgcttgggttcctggaacgtggtgatgttcgtcacctatgagcagctgaaacgagccctcatggctgcctgcacttcccgagaggctcccttctgagcctctcctgctgctgacctgatcacctctggctttgtctctagccgggccatgcnnnnnnnnnnnnnnnnnnnnnnnnnnnnnnnnnnnnnnnnnnnnnnnnnnnnnnnnnnnnnnnnnnnnnnnnnnnnnnnnnnnnnnnnnnnnnnnntttctacattctcatctactcattgtctcagtgctggtggagttgacatttgacagtgtgggaggcctcgtaccagccaggatcccaagcgtcccgtcccttggaaagttcagccagaatcttcgtcctgcccccgacagcccagcctagcccacttgtcatccataaagcaagctcaaccttgat

SEQ ID NO: 362353 - DNA, 487 bp, Homo Sapiens
  misc_feature (193)..(256): n is a, c, g, or t
cccgagccttctacaaagggttcatgccctcctttctccgcttgggttcctggaacgtggtgatgttcgtcacctatgagcagctgaaacgagccctcatggctgcctgcacttcccgagaggctcccttctgagcctctcctgctgctgacctgatcacctctggcttgtctctagccgggccatgctttcnnnnnnnnnnnnnnnnnnnnnnnnnnnnnnnnnnnnnnnnnnnnnnnnnnnnnnnnnnnnnnnntccgctcctttacctaccaccttccctctttctacattctcatctactcattgtctcagtgctggtggagttgacatttgacagtgtgggaggcctcgtaccagccaggatcccaagcgtcccgtcccttggaaagttcagccagaatcttcgtcctgcccccgacagcccagcctagcccacttgtcatccataaagcaagctcaaccttgaaaacacaaaacacacaac

SEQ ID NO: 362354 - DNA, 341 bp, Homo Sapiens
gcgacggagagaccggaaggatttgaacgagacagacggaagaaaaggatagcatggcccggctagagacaaagccagagcttggaatcggacctttaccacatccgtgggctgggccacagccacagccagggcacctgtggtgctgcctgctaggaggcggctcccaatgctggcatgctcagagcccttggtgtagaactgtttgacagaatcatacaggccgatgcggacagaggcaaagctcatttggcgctgcaggccggcaaccagcccattgtagaggcttcgggggccctcagtacgcaccatggtcagaatggtgcccaccactgcctcgt

SEQ ID NO: 362355 - DNA, 653 bp, Homo Sapiens
atattctggatgaccacaaaatccaacacctaaggttgcaggggcaaatgccagccttgatgagggtaggaatcttccagtccttccagaagagctcccgagacatacttctctgcacagacatagcctctcggggcctggacagcactggtgtggagctggttgtcaattatgatttccccccaacgctgcaagattacatccacagagcagggagagtgggccgtgtggggagcgaagtgccaggcaccgtcatcagttttgtgacccatccctgggatgtgagcctggttcagaagattgagctggcggctcgccgaaggagaagtcttccaggactagcatcctcggtgaaagagcctttgccccaagcaacctgattttgacaaatctgattaaaatgtgatgctagaacagggatctttcccagtatcttgagtgggtgaccacacttgtcagtgggaggctctgggctgcctgtcggctccttgagggcgggatgaactgctttgtgacttggaaaggtacgctgctggccagcattggagaagaagctgctgagcatggctttctgtagtctttagcaagacacaagtggattttgactttgtatcatgtcatgatttctaacaataaatgatgtttttatgtga

SEQ ID NO: 362356 - DNA, 563 bp, Homo Sapiens
tacagagacaggaatctgaagaactaacatttgaactgtgcatttagaaatttgtaggtggaagaggttggagtgtacacggggtactaagagcaaaggcaagggggtggaaagggcatgccaggtctgaggaggaagaagcatagctaattgtaaactggtagcacacagattgttctttctggcctgtacagtgttctgtaaaaatttggaatttgttgctaacattttaaaaccaggaaacttcacatagaaaatctgaatctttagcttctcttgtcaatatggattatctagcagtactgagctggatttgcaaggcattctgcagactcaagctgagatgccactttagaaagggcaagtcatccttctcaccattccttagtgccttcttgatactgtcgcaagtgtcagctgccatttaccatcacacatggcctgttgctcttcttctactggagaagagaaatagttctcaatatttacatcttatcaaaagtggaaaagtgagtgagtgatggactaaaccttgtgttccaaaagaaaaaaaccctcgtgcc

SEQ ID NO: 362357 - DNA, 621 bp, Homo Sapiens
tgacgttgccctgatcaagctcaagaataagctgaaatatggccagactatcaggcccatttgtctcccctgcaccgagggaacaactcgagctttgaggcttcctccaactaccacttgccagcaacaaaaggaagagctgctccctgcacaggatatcaaagctctgtttgtgtctgaggaggagaaaaagctgactcggaaggaggtctacatcaagaatggggataagaaaggcagctgtgagagagatgctcaatatgccccaggctatgacaaagtcaaggacatctcagaggtggtcacccctcggttcctttgtactggaggagtgagtccctatgctgaccccaatacttgcagaggtgattctggcggccccttgatagttcacaagagaagtcgtttcattcaagttggtgtaatcagctggggagtagtggatgtctgcaaaaaccagaagcggcaaaagcaggtacctgctcacgcccgagactttcacatcaacctctttcaagtgctgccctggctgaaggagaaactccaagatgaggatttgggttttctataaggggtttcctgctggacaggggcgtgggattgaattaaaacagctgcgac

SEQ ID NO: 362358 - DNA, 2157 bp, Homo Sapiens
  misc_feature (1712)..(1725): n is a, c, g, or t
agcgggcggaagggccctggccttgtgggtggaggtgaagagttaatggctccgcgcgcaggcactgccctctgaactggaacaaaatgcaacttccggttggagtcactcggccaggcgccggcgaactgaggggagagggaacgcagctgaaagcgtgaaactgtacctgtcatttactcccatcctttatagtgatgctacaggacgaagaggaatggataaaaacattggcgagcaactcaataaagcgtatgaaacccttccggcaagcatgcatggatagagattctgcagtaaaagaattacagcaaaagactgagaactatgagcagagaatacgtgaacaacaggaacagctgtcacttcaacagactattattgacaagctaaaatctcagttacttcttgtgaattccactcaagataacaattatggctgtgttcctctgcttgaagacagtgaaacaagaaagaataatttgactcttgatcagccacaagataaagtgatttcaggaatagcaagagaaaaactaccaaaggtaagaagacaagaggtttcttctcctagaaaagaaacttcagcaaggagtcttggcagtcctttgctccatgaaaggggtaatatagagaagactttctgggatctgaaagaagaatttcataaaatatgcatgctagcaaaagcacagaaagaccacttaagcaaacttaatataccagacactgcaactgaaacacagtgtctctgtgcctatacagctgtacggataaaacagataaaccaagaagcggctgtttaagcctcaggctaaagatgatataaatagaggtgcaccatccatcacatctgtcacaccaagaggactgtgcagagatgaggaagacacctcttttgaatcactttctaaattcaatgtcaagtttccacctatggacaatgactcaactttcttacatagcactccagagagacccggcatccttagtcctgccacgtctgaggcagtgtgccaagagaaatttaatatggagttcagagacaacccagggaactttgttaaaacagaagaaactttatttgaaattcagggaattgaccccatagcttcagctatacaaaaccttaaaacaactgacaaaacaaagccctcaaatctcgtaaacacttgtatcaggacaactctggatagagctgcgtgtttgccacctggagaccataatgcattatatgtaaatagcttcccactctctggacccatctgatgcaccttttccctcactcgattccccgggaaaagcaatccgaggaccacagcagcccagttggaagccctttcctaatcaagacagtgactcggtggcactaagtggcacagactcagaactgcatatacctccagtatgtgaattctgtcaagcagttttcccaccatccattacatccaggggggaattccttcggcatcttaattcacacttcaatggagagacttaagacacatttgaaaacagacatatcaagttctatgtgatgattttgggtttttaatactataaatacttgattgtaaactaaattcaagatcatttataggaaaaatctagtttcacagctatttgaattttttttctggatttactatataacctcttattttttaaaagatcattctgttctttcaaggagaaataagcctaaaagaagnnnnnnnnnnnnnnttctgtataaaactgtaatcctttgtattcatgtttacagtgctattactataattcaaaattatgtatgtgacttagagttatataatcataatttatgtttatttcaaatatctaagtttattgcttggatttctagtgagagctgttgaatttggtgatgtcaaatgtttctagggtttttttagtttgtttttattgaaaaatttaattatttatgctataggtgatattctctttgaataaacctataatagaaaatagcagacaacataaacatctttgtaaatatcaaacctaatacatttcttgtccagtgataaaacaactggtagaattatttaaacactttagatttttaaataatatacatggctttaatttttactgtgtgtatagctacatgatgaaattaattaaatattaagaggt

SEQ ID NO: 362359 - DNA, 1133 bp, Homo Sapiens
ggcctgggtggcgaattcggcacgaggagcgcctcagcctctcttcctgtgtggaagcggggcaggcagggctgtggcagacaggcctggcatagcccaggttccaggtgtcctgggcagcctgaccggtttcctgagtagcctcaatgaaaacacctgagaaaaagaaaatgtaaactaaggaagggttttcccacttaatccaacccagatttctattcaacttaaaggatttaattggcatttgtgagaaataatagtacctgtgtcactgagttgattgatttgggacatagacggttgactttcccagacagcagcttagcggaaagcagcatcccgaagacggtgtcgcatgtcctgagcctgcttgtcacctgggcctcacggtttctcgtcagccccgtcactgatgggaagcagcactgaagtgtgagggcagaaaggacaccgctggagtcaggcgctcccctgcctgtgacccttttccaacaagctgatgctgagccagcggcctgctttgtccctcatactcctcccaacagtccaaacccctaccagacagaagccacgtcgcttctgcacacgtgtctgagagcgtctgccatagacgtctgtgcgtttccgtgaagcactgcgccctaaggacccaactctgactagcagctgcctcccactcccaaacactaaccccgctcaggagactcgcactgggtgtagactgcgtctttgcagagggagatgatagaggcttctgatgacgccagagctgtaagtgtcgtgacgagctgggcgcccagcccttcttaagctgttctgtttctgtggctttaactgacatatttctgtagcatctgccttcatctcatctcagcgtaatgaaatattaatgaaatcgctgaaaagctttgccttcgagaggccagaagcctcgcggaatgtctgcaagtccaaaaacgcgtgtgggttgtgccctgaagtgccgtccagcaggcgcgtgcggccgggccggcctgtgcgtgtggcctttgccttcttccctttcttcctgttttctgtttttttaatttggggattgagaaagctgtacgattttgttaaagaaaaaaataaaccattttttaaagttgtaa

SEQ ID NO: 362360 - DNA, 1018 bp, Homo Sapiens
gcggccgcggcggccttggggcacccgcagcaccacgcacctgtctgcaccgccaccacctacaacgtggcggacccgcggagattccactgcctcaccatgggaggctctgacgccagccaggtacccaatggcaagaggatgaggacggcgttcactagcacgcaactcctggagctggagagagaattctcttccaacatgtacctgtctcgactccggaggattgaaatcgccacttacctgaacctgtcggagaagcaggtgaaaatctggtttcagaaccgccgagtgaagcacaagaaggaggggaagggcacgcagaggaacagtcacgcgggctgcaagtgcgtcgggagccaggtgcactacgcgcgctccgaggatgaggactccctgtcgccggcctcagccaacgatgacaaggagatttcccccttatgagggagggcctcctccctcacatcccccgctcctggcagaccaggcaacgccaaggcgtggggcacccaggggccagaatccttgctcattgcagtggtcccatctggagaagaaacgaacctggaagttctggaatggacaagccgggacctgacccttcgcgtctccttcttgacctgtttatctaggactccaacttgaagttacagatttttttaaaaaatgtaaataacctataattcaactcattcttgtcgtataacagaggaaaaacagggttggtttaagtttaacactgtatggggtttttgaaagcacatgtcagttccccatccctactctctttcagaactcgataagaacacaggatttattgattattttctgttgtcgttttcaaacaaaaacacccaagttgaaaataatttagaaaattagaccttgtaggtcttgctttctgaaatttcgcctggggagaatttaaaatctaagtcgctggaagtccctttgtatgtgaataggtttatataaaatttatatttatatttatttaaataaatgaaacaaaaaccag

SEQ ID NO: 362361 - DNA, 528 bp, Homo Sapiens
cgtgagccactgtgcctggccgacaatttacttgtcttagtattatatgtagatatgtgattttttgagactgtatttttagagcttgaatttttgactaaagacttaactttataataatgaagatacatttagagaattttagttacatattgactttatctttaggcctttgtatgtttcagatgcaaacatattaaagtttcatatatttacttggaaaaaaccgcgcggcgcggaaagaaagataaacatggtcggccgccttcggcccctcgaaaaagcttttcctaaaccattccttttgggcccccggggcccccattaagggtaagggaaccctggggcccataaacttgttttcccctaaggaaaattcccgggatcctggaactaaagggactttggggaattctctcccccacattaaaataaaccgcgccgcggggcgggcaacccggaagggggtttttcgtatacaagaatctcccacgaataggggaacttctcatgtgatgcgggctcact

SEQ ID NO: 362362 - DNA, 697 bp, Homo Sapiens
atgccagaaaataatggcctgcatgcaaggtgggattatagtgcaacagaagaaggtatgaaagaagtattggaaaaattgaatcatgatctcaaggttccatgtaactttagtgtaacagctgcttgttatgatcctagcaagccacagacacaaatgcagctgattcataggatcaatcctcagacaactgaattttgtgcccaacttggcatcatagacatcaatgttaggcttcagaagtccaaggaagaacatcatgtgtgtggtgaatatgaagaacaggatgatgtggagagtaaagactctggagaagaccagagtgaatataatacagacacatctgctctgtcttctatttaatccagatgaaataatgttagatgaagaagaagatgaagatagtattgtaagtgcacatagtggcatgaatacaccatcggtagaaccttctgatcaagcttctgagttttctgcaagtttctctgatgtcaggatcctgccaggctctatgattgtatcttctgatgatacggtggattccacaattgatagagaggggaaacctggtgggactgtggagtcagggaatggagaggacttaaccaaggtgccattgaagaggctgagtgatgaacatgaacctgaacaaagaaagaaaattaagaggaggaatcaagccatttacgctgcagtg

SEQ ID NO: 362363 - DNA, 1340 bp, Homo Sapiens
ctgaccaatgaagccagcagagaggcctgtgcagggcgtctggaagttttttacaatggagcttggggcactgttggcaagagtagcatgtctgaaaccactgtgggtgtggtgtgcaggcagctgggctgtgcagacaaagggaaaatcaaccctgcatctttagacaaggccatgtccattcccatgtgggtggacaatgttcagtgtccaaaaggacctgacacgctgtggcagtgcccatcatctccatgggagaagagactggccagcccctcggaggagacctggatcacatgtgacaacaagataagacttcaggaaggacccacttcctgttctggacgtgtggagatctggcatggaggttcctgggggacagtgtgtgatgactcttgggacttggacgatgctcaggtggtgtgtcaacaacttggctgtggtccagctttgaaagcattcaaagaagcagagtttggtcaggggactggaccgatatggctcaatgaagtgaagtgcaaagggaatgagtcttccttgtgggattgtcctgccagacgctggggccatagtgagtgtgggcacaaggaagacgctgcagtgaattgcacagatatttcagtgcagaaaaccccacaaaaagccacaacaggtcgctcatcccgtcagtcatcctttattgcagtcgggatccttggggttgttctgttggccattttcgtcgcattattcttcttgactaaaaagcgaagacagagacagcggcttgcagtttcctcaagaggagagaacttagtccaccaaattcaataccgggagatgaattcttgcctgaatgcagatgatctggacctaatgaattcctcaggaggccattctgagccacactgaaaaggaaaatgggaatttataacccagtgagttcagcctttaagataccttgatgaagacctggactattgaatggagcagaaattcacctctctcactgactattacagttgcatttttatggagttcttcttctcctaggattcctaagactgctgctgaatttataaaaattaagtttgtgaatgtgactacttagtggtgtatatgagactttcaagggaattaaataaataaataagaatgttattgatttgagtttgctttaattacttgtccttaattctattaatttctaaatgggcttcctaattttttgtagagtttcctagatgtattataatgtgttttatttgacagtgtttcaatttgcatatacagtactgtatattttttcttatttggtttgaataattttcctattaccaaataaaaataaatttattttt

SEQ ID NO: 362364 - DNA, 557 bp, Homo Sapiens
gctatctgtgttacagctgaagctgatggagctgattattgattttcatttaaaaacttacctctcagagtcccttccttatcttctgaaatgggcataatcacctcgatcacagcctattgtgaggatttaaggagatgatgagtaccaagcccttggcacagtgtctgctgcagaaacaagcacaggagtgttcctcggtagcagtggacaaatgccaatgagaaggactccaggtaggggaccagcgtctgaatcccactacacctgcactgtctcaagaagacccagtgggttttagctttgcatgacattgcacctggagccactctctgtggatgctggtcttggctaaacggttcatccgggttttccttattgacttaaagcagcggtctccaacccttttggcatcagagactggtttcatggaagacaatttttccacagatggagtagcgggggtggattcgggatgattattgtgtactttatttatattattattacattgaaatgcgtattgaaataattacacaactcaccatcatgtaaaa

SEQ ID NO: 362365 - DNA, 535 bp, Homo Sapiens
attcagagctaaatattcaccataatccaggagggtctccttccccactgcagaggcagaacgtccaagaatggagtaagattagtcatagtaaagtctcagtctgaatatttagcaagagaaacaggcagcagaggaacccaaaggcagtaaatcaaatattctaaaacccaaagttcattattttcatccaaaagactttcacagaaacacattactcacagccatgtatatcttggacagagtttcagatggaatgacttgtctgaaatttgtaaagcttaatataggttttgggggaattattttaatattcaaagaatgttttattatagtcctttgtgttaaaatttagccttactaattataacaataactcataaagttctaaattcagaaggaatgtctgttctttatcaagtgtatgtaactattttttagaaatgccatctactttctagaaacactaaagttattgttttctaagttaaataactataatttatatatctattaaaaaggtacttctcttccc

SEQ ID NO: 362366 - DNA, 756 bp, Homo Sapiens
ccgaatggtaatttctgcatgatacacttctgtacgttgtcttctgactgttacagactttctactacctctcccgatctgctgtttccttgtttcttaacaggattttttacagtgttgcgtctaatgtaacttagacaataaagggtttggttgtctacactgcagcttctcggtgtctctcccctgctttccgctcgctgcttcccgctctgcccctgctggggcctggctgcaccctggcctgccttcctatactctcctgtttcctgctcatatctcttcctcatttttgcgttcaaataacacacagctaatgagcttctaaaaatcttttcaggttgttcacttgtattccttaatttgaagaatgaatatttaaattctctcaaaagtcagatattgaggatcttctctgggaaattggccactgtacctgcccacctttctgcctggttccctggaaggtcttattgtcatcttagacggacagatttcattctcagcaccatacagatttggcttcaaagccaggtgaattttgcctttgaggctctgaaaagtattaagtgttttaagaggtcccccaatatttacttatttattttttaaaccaagaaagacactggttccctgaaaagcaggtgcttcaggaagtagcaattgggagctgcatacagttacttcgtcagagaaaggagcgcccaggatgacaggcccccacccctgatccggccactgtgcacaggtcgctga

SEQ ID NO: 362367 - DNA, 532 bp, Homo Sapiens
aaggaaggaaggaaggacggcattcacatagctttactttccgcttcaaaatgtcttaagtagcatatgttgttttactgcttttaactttggtgagttctaatttcagaacgttttgttcactgagcaaaaaaacagatgaaacaaccacaggccaggacttcaagtgaggaggacgcctttgtttgccgtggttggtgggagcacacgccggagcccggtaacgtgcctgtgggagtgaccaagggccacccgcccaagggaaaatgttcattcttcatcagctttgctaattctgctttgaggcagtaaaatgcaaaagaccatagaatttgtatttctttttttaaaatacaatttataacattatattttgtactctttatattagaatttgtaactagattgatgtatttaactatttctgaaaaagtaattcaatgttttagttgtgtgataaaaatatttagataaaacatattcattctattggaatttgaaataaataaaaacatcttggagttcagaaaaa

SEQ ID NO: 362368 - DNA, 1308 bp, Homo Sapiens
cggcattgcccttgcacctaggggtggattttgtgtcatcagaaaattccagccagttccaggctggaagctattcagacacagaacagggtcttaaggacagtcctttttgttctgtccgatgctggagaatggcaccagttgggccacctatctgctcccttcagtctcagaaatgtctgtttcacatgaggcatgatacagtggagcttggagctggtgatggtggtgacagcatctgggctggcgactttattcagcaactggcctacaccttcgggaaatgtggctcctaccagcactaactgagctttgggattgaaggggtcttccaagtcagctgggccttctgctatgtggctcttctctaagatgtagtccaccagttccaggaagctttcatccagcagtgtgtctgcctcatccaacaccaagaaggagagttgctccagactgatcagtcgacttttcagggccttccacagagcccctggagtggccacaagcacatctgctgaaggctgtctggacagctgcagcctgatcctacgcatgccgtggcctccctccaggtcccgcaccagcaggcccaaggagcggcccaagggttgggccacagcccgcacctgttgggccaattctcgggaaggaacaaggaccaggcctcggggcgcggggataggaagggagtccaggcttggctggcccaagagccgttgaagcagcggcaggaggtagctgagagtcttgccactgccggtttctgcggcgcaaacgacatggcggccgcgaagtagtgaggggatggtgctagactgcacggttgtgggctgaacgacttcaggcgcagcctcctgtagtgcgtgcagcacacggggctccaggcccaggtcagcaaagctgcccttagacgagagctttcgcaccgctggcgcctcctgttgcgcgcgctcgatggagaagtggtcccgacgcgcgcgtcgactcttccagccttgagaggctagcggcgcgcgctcccaacggcccagtgtgaggcgcgccggctggttcaactccggccgccgcgccgaaaccagcagcggtccgggtcgaaccagcaccggcctcgggaggttccgccgcctgctctgccgctgttccaactgccgctgtagagccactgggatgcgcaccaccggcaggggttcgtcgggactgcggaccgtgaggccccgtcgcggcgccaggagcaaccgagtcacgagggaaaagagccgcaccggccgcgttagagccatgcctcgtgccgaattcgccacccaggcc

SEQ ID NO: 362369 - DNA, 895 bp, Homo Sapiens
  misc_feature (388)..(422): n is a, c, g, or t
  misc_feature (703)..(713): n is a, c, g, or t
ccacctgccaaggccccacagagcccaaaacagaagggggctgccccagcccagcagagcgggagagtttctggagctcccatccacagatgcaggagggggtactgatggtaacccccatgtggatttgagggcagcagtccctggcctcaccctagccagcctgggtggctccctagccccaagaggccaggaagggctggaaggcagggcctgcaggtgctccccgccctgagacccaggccccaaatcagcaataatgaacaaacccttggcccagcctgggctggtgacctgggcaccagagaccttgcatccctcctcatcctaggaggcccctaggggtgccccatctcagtgtcccctgaactctttatttgcctaattnnnnnnnnnnnnnnnnnnnnnnnnnnnnnnnnnnnaaatagctattttgcttaaatttctacagtatgtaaaagtgaaaaaatgatgaagacgggtgcacctgtctgagtttggccctcatgtgagctgtgcccttccctctcctcatgcccccttccagcggcttctgccaaccatggggggctggaccaccatggccactgacccagcccctcagaatcccacactccaatcctttccatttcagtttagtcctaaaagttcatcacagggtctttctttctactccaggactggttttgtttttatatatatnnnnnnnnnnngtgaaaacaccaatgtgtgaaatgccttacaatgcccactggagaggcggggcggggtggggcaggatggccccactggggctcctacagagctgtggaatgtacctctccccaacactgttttgttagcgagcaccttttgaccagtaataaaaaaccttggctttggagttttccactaa

SEQ ID NO: 362370 - DNA, 704 bp, Homo Sapiens
aattagccttaaaatgaatcaggagcagggggtcttgggagagcaggatgtgacactgtgttaacaagaaatgttgagagagccctctggatgtatgtcttgcctctttcccacctattctagtttaaagacctgcctaaatttggaaactccttagctctaatcctaatttactaattagagctctttagcaccatcctaatttgcaattcttttgtagtttccagcccatttcattttcagttgataaggaggagattgctcccaaattttcagaaatggactgtgtaggagtgtgactagggtctcagatgcagccatttcttggctgggtctggggaaaagccaagggatgtgtgctaaaggtagatggacagagggtgggaagtcccttattatttccacttttttctccatctctgactctgccatctctttctgcctctgtactttctgggagctggttctgctgatacttctgctgaatctaaatgctgacctaacttggcaattcttttatgttaggagtcttagctgtgacagttcatccgcttcttcgcccttacatttcacttcttttctccttctctgactgggagaggaggagcctccactcagtatttagaacagagtaaataccttctcctgatcactcctccttccaacctccagaattttttgaaattaaaattcacattctggga

SEQ ID NO: 362371 - DNA, 329 bp, Homo Sapiens
ggcacgaggaaagacaatatcaatagcatgcatggcaaagttagtggctaaaagaatcaagagcaggaatgaggttgagtggagtaactcagcactttgggaggctgaggtgggaggatcgcttaagcccaggagtttaaaactagcctgggcaacatagggagacaccatctctacaaaaaatttaatttgccagccatggtggtatgtgctataatatcagctacttggggggctgaggtgggaggatcactggaccccgggaagtcaaggctgcattgagctgtgatcaagtatgtactccagcctgtgcaacagaatgagacctt

SEQ ID NO: 362372 - DNA, 900 bp, Homo Sapiens
  misc_feature (44)..(80): n is a, c, g, or t
gaatgttcatcatatggggaccgcgcttatcgcggtggcggcgnnnnnnnnnnnnnnnnnnnnnnnnnnnnnnnnnnnnnatcaggccaaatcggccgagctcgaattcgtcgagagcggagttttgctccgaaagacttaccgaggagggagcttgcggtgcgttctgggaaagttgctgggccagctcctttgtttccagtctgagcgttgcgttcggtttcccgagggtcttctgaggcaccgcggctgcgggcttctgagttcccggctctccgcagggaagcctcctcttcgtacctcgttttttggctcgtggggggtcctcccaccgctggccgacgcagccagcatgtccggggtgcgcgcagtgcggatcagcatcgaatcggcctgcgagaagcaggtccatgaggtgggcctggatggcaccgagacgtacctgcccccgctgtccatgtcgcagaatctggcgcgtctggcccagcggatagacttcagccagggttcgggctccgaggaggaggaggcggcggggaccgagggggacgcgcaggactggccgggcgccgggtccagcgcagaccaggacgacgaggaaggagtggtaaaatttcagccttccctttggccttgggactcagtgaggaacaatttgagaagtgccctgacagagatgtgtgttctctatgatgttctcagtattgttagggataaaaaatttatgactcttgatcctgtctctcaggatgcacttcctccaaaacagaatcctcagacgttgcaattgatatctaaaaagaagtcacttgctggagcagcacaaatcttattgaagggggcaagaaagactgactaaatcagttaccgaaaaaccaagaaaacaagttacaaagagac

SEQ ID NO: 362373 - DNA, 538 bp, Homo Sapiens
  misc_feature (222)..(239): n is a, c, g, or t
gccaggtatgtacacacctgctcaacaatcctcagggtcttccaaattcagcaccagagttttgtacttcagttcacaaacagctcggcatctcagaggatatagcccactgaatacttgaagatctttggcctctggggatcttaatgtatagtaggcaattcctcttttggtcacctgaaaatgaaggcttacccatgtacatacagcccacagtcagannnnnnnnnnnnnnnnnnaaatgtgagtgggcaaccaaggatgaacagacatttaaaaagaacctaaaatatggaagggatatgcaaagatgaacaaagaaaataataatcccagaataaaaaaagctatggctcagaacagaactcatcggaagctcttacttctattttcataaagattcaagaagatactgcatcaataaagtaacaataagatgccttccagttttaaaataggggcataaaggcaggctggctttactccctctcacagaaaaccaaaaccaaacatacagccccaatatttccaatcaccc

SEQ ID NO: 362374 - DNA, 439 bp, Homo Sapiens
  misc_feature (54)..(104): n is a, c, g, or t
cagaaatgattactaaggaagattactcagtaatttgtttaataagtaataaannnnnnnnnnnnnnnnnnnnnnnnnnnnnnnnnnnnnnnnnnnnnnnnnnntattacactctgtaattgaatattattcctcaaaaaattgcacatagtagaacgctatctgggaagctatttttttcagttttgatatttctagcttatctacttccaaactaatttttatttttgctgagactaatcttattcattttctctaatatggcaaccattataaccttaatttattattaacatacctaagaagtacattgttacctctatataccaaagcacattttaaaagtgccattaacaaatgtatcactagccctcctttttccaacaagaagggactgagagatgcagaaatatttgtgacaaaaaattaaagcatttag

SEQ ID NO: 362375 - DNA, 747 bp, Homo Sapiens
ggcacgaggaggaggaataactaggtaaagtaatgaatggtgtttctgcggacaatttatactcaaatatagttactaaaatgagacatgtcatgagactggctattagcaaatcaaagtgtcttttcctaatcttggaaaagatttataatccccacttaaagatttgctgatgaaccaagggaggaaaggttatctaatgtgatggatgacagaaatgggatcccaaaagatcttggcaattccagagatgggttcaaagtaacaagacgaaatttaataaaataaggtttaagctctaacaagagttacaacaaatagctcctccattacaaaatcagagacctggaaatctcagtttacctgggccaacagtgtgacatgagtgctactgtggtcccagccccatcaatagaaatacagtgtccaaaaaataggaggtcacactattctggaaggtgaccagtatgaggaacaatctgggaaccaggtaactttagaaatgactagagcaactgcagatgttgagcttgaacagatggctggtggaggggcactccttagaacattgcaggaacaggcttcagttcaccctctaaagggcgattgggccttttctgccaaattccacagggtgcacctaggactaatggttaaagtcaaagcagagtgaatttggttccatgttcagaagaattttaccatcctcagaaccaatttaaaataaattgcattgctttgtacatt

SEQ ID NO: 362376 - DNA, 577 bp, Homo Sapiens
agtgagaaccactgaggtccaatgatgagacttggaggtctggatccagtctctctttgttttaatgtgacttaggtgctgtcaacattagcaagataatggaaatcacgacgccagtgggtgcttacctccctgctaggcatgcaggggctggcggttggcaggggaaggaggcccagtgagccgggtcccttaggggagggagagtttgtcctctttgccccacagtctacccttcagggccttgtggcagtgccagtgttcggggggtgtctgggccactgagtacccactcggtcgtggttgtgctggcctcttgggtgagtgaacctgtgaagcccaggaggtggtgttggctgcagggtacacaaatactgagtggtggtcttttgttacaggcttagcaacaaagctgtgccctgggcatggggggctgtagtgtagctacagttgtgcgtttgtgaaatggcttagctttccatgttgctgagaggaacctggacatggtcccgggcatctgaatgatctgtaggggagggagttcaaataaagctttattttgttcattttaaaaaaa

SEQ ID NO: 362377 - DNA, 1341 bp, Homo Sapiens
gggagttggggaagctgggttggctgggttggtagctcctacctactgtgtggcaagaaggtatgggtcatgaacagaaccaaggagctgcgctgctacagatgttaccacttctgtggctgctaccccactcctgggccgtccctgaagctcctactccaatgtggccagatgacctgcaaaaccacacattcctgcacacagtgtactgccaggatgggagtcccagtgtgggactctctgaggcctacgacgaggaccagcttttcttcttcgacttttcccagaacactcgggtgcctcgcctgcccgaatttgctgactgggctcaggaacagggagatgctcctgccattttatttgacaaagagttctgcgagtggatgatccagcaaatagggccaaaacttgatgggaaaatcccggtgtccagaggtcaggagttttctggggagtgaagggaggagggctgcattaacctcattgatctgtacactgaataattccccttgataccagctccccatctcaaatactttctggttctcttcatcaccttaatttttccaccagccttggtctgcaccctgtgttcttttggtgggccgaagtacctagcatgtagtaggcattcagaactatgtattgaatgtgatgaattcaacaggtaccaactgatacctactgaatattaacacttgtgctactatgcccagcaagatggatgggaagagtggaaatatctgatgacgtgactatgtcttagtgagaagacagtgcatggttagacatcaatgtgagctctagacaggaagtgctgaaggaagtcatggtggaggggtccagagtagcctggatctggctctgcttctatgtctagctgcagtccttgcctggaagaagacctcccttcagagcccagctcctcgctcatctctgtctcccaaagcctgacccactgtgttcttctctgccctcccctccatatgccatggcccctcccaacacagagataccatctaaactagtctcttttttcccctacactttcatccccccacccagggtttcctatcccttgaagggttcaccctgaaagcccctgggagtttggcaaagcccaacacttttggcccggttttggccaataatcctctttcccacccattgcctgaaaattgtacacgggcaaaaatcatttcccgcccccctgtggaaaaggaatttggggcccttatttttggtccccaacctggccggatggaactcccccgtctccgggccctttttcttaactttaaaacccctccccccaagaaaaacctttttgaaccctttttt

SEQ ID NO: 362378 - DNA, 1296 bp, Homo Sapiens
  misc_feature (1110)..(1110): n is a, c, g, or t
gggctctcggggagggagttggggaagctgggttggctgggttggtagctcctacctactgtgtggcaagaaggtatgggtcatgaacagaaccaaggagctgcgctgctacagatgttaccacttctgtggctgctaccccactcctgggccgtccctgaagctcctactccaatgtggccagatgacctgcaaaaccacacattcctgcacacagtgtactgccaggatgggagtcccagtgtgggactctctgaggcctacgacgaggaccagcttttcttcttcgacttttcccagaacactcgggtgcctcgcctgcccgaatttgctgactgggctcaggaacagggagatgctcctgccattttatttgacaaagagttctgcgagtggatgatccagcaaatagggccaaaacttgatgggaaaatcccggtgtccagagggtttcctatcgctgaagtgttcacgctgaagcccctggagtttggcaagcccaacactttggtctgttttgtcagtaatctcttcccacccatgctgacagtgaactggcagcatcattccgtccctgtggaaggatttgggcctacttttgtctcagctgtcgatggactcagcttccaggccttttcttacttaaacttcacaccagaaccttctgacattttctcctgcattgtgactcacgaaattgaccgctacacagcaattgcctattgggtaccccggaacgcactgccctcagatctgctggagaatgtgctgtgtggcgtggcctttggcctgggtgtgctgggcatcatcgtgggcattgttctcatcatctacttccggaagccttgctcaggtgactgattcttccagaccagagtttgatgccagcagcttcggccatccaaacagaggatgctcagatttctcacatcctgcccaggatctcctcttagggtagaagaagtctctgggacatccctggggtgtgtgtgtagatttcccacctggggactctgctgtccctgggcttgcatcccagggatcccagagtggcctgcctatcacaaccacatcccttccccccacaaggcaataaatctcatttcttanaaaaaaattattttatcccttttttcccccctgttggcccgcctcggccccccgaaaaacctttccaaaccattccgtttgggcgccgcggggccccagtaaggtaagtggaacatgggtcatcaactggttttccaaggaagaaaccctgggcccatgaacaagtggccttgaaattctccccca

SEQ ID NO: 362379 - DNA, 889 bp, Homo Sapiens
gggctctcggggagggagttggggaagctgggttggctgggttggtagctcctacctactgtgtggcaagaaggtatgggtcatgaacagaaccaaggagctgcgctgctacagatgttaccacttctgtggctgctaccccactcctgggccgtccctgaagctcctactccaatgtggccagatgacctgcaaaaccacacattcctgcacacagtgtactgccaggatgggagtcccagtgtgggactctctgaggcctacgacgaggaccagcttttcttcttcgacttttcccagaacactcgggtgcctcgcctgcccgaatttgctgactgggctcaggaacagggagatgctcctgccattttatttgacaaagagttctgcgagtggatgatccagcaaatagggccaaaacttgatgggaaaatcccggtgtccagagggtttcctatcgctgaagtgttcacgctgaagcccctggagtttggcaagcccaacactttggtctgttttgtcagtaatctcttcccacccatgctgacagtgaactggcagcatcattccgtccctgtggaaagatttgggcctacttttgtctcagctgtcgatggactcagcttccaggcctttttcttacttaaacctcacacccagaacccttctgacatttttctccctgcaattgtgactccacgaaatttgaccgcctacacagcaaattgccctatttggggtacccccgggaacgcactggccctccagatctggctggaaaaatgtggcctgtgttggcggtggcccttttgggccctgggtggtgctggggccatccatccgtggggccattggttcctcaactaatcttaactttccggggaaggcc

SEQ ID NO: 362380 - DNA, 1206 bp, Homo Sapiens
  misc_feature (498)..(521): n is a, c, g, or t
ggcacgaggagactgtccaagttcaaggagaaggggtttggttccctgtctgccagggacagaaagttctttccacatgtgtctcctggtcccgagagctttcaaaaggggatgtattcctctccaagaaagaatcacctcccagtaaagtagccatgaagggctcctgtataaaatatgcacacttcccctgccctgagtttgtggagggaaaggctgtcggaagtagggactcttaggagagcccgtgtgccctgtttggttcagctgtcaggcgtgtgccacacacatcccacctcatcttctggtcccataattctccatggatgggctgcttttagctccagttttccagtagaatgcttgagttttccttttttccgtacctcctggaggatgaaactcataacctgtcatcatcaggactcactgtgttttccactttgacttgaagtcaaatgaagttaccaaagttaaacatggacttctcaaattagnnnnnnnnnnnnnnnnnnnnnnnnggttaagtgttttgttatgaaaattatgaaaatgttcttattattatggaaaatttcaaatagatatagagagaataatgttacaaacccccacatactcaacatttagcttcaaaaattatcaactcatggcgggttttgtttcatctgtacaaactagtcggcacactatgatggcctgtggacaaaatccggccctctgactgtttttgtaaataaggttttattggaacacagccacacatatttgttgacttattgtttttggctgtttttgtacttcattggcagagttgagtaattgcagcagactctatggcttgcaaaacctaaaataattactttgtgtagcgctttatagaaaaaatttgctaactcccgatctgtaacccccaacctatccgccgcaccctgatctaggtaattttgaagcaaatcccaaatgtcacatcatctatccatatttcactatgtatttctaaaacatattcttttattcaaaataaaactctaatatcattaacagtattttgtttatattatcaaatacccagtcaatatttgactttctataattgtgtcacaaattaaacattgactttaacagtatgtattacacacttgtactttgtgtactttataacatgtgcactttaaaacagcaggagctctgtctcaaaaaaaa

SEQ ID NO: 362381 - DNA, 762 bp, Homo Sapiens
ggcacgaggcggtgcagtcacccaagctgaagatgcacgagagcgggtcgcgtagaagaactgcggcaatgggacccccagcgcagccccaggcgccctgttttcgaggctgacatcccaagatcctgtcctggttaggcacagcaccgcgcccgttggagtacttctctgtgactctcccctgtccactgcactgtgtccaccctcctggtgaaggaggagacggctgttggacatgccagtcccaacctggccactttggccattttcagagtgcgtgtgttggggtggggttgagggagaaggatgaaggatgacccccaaccccaacaggagaattcaaaaatcagagagcgatgaaggtgaacgcgctcccctcccccgctgtcgctgggaagccccactctgcccaggtctggttcctggagcatcagcgccccctttccctcgccggcaggatcgtttcctcccgacactggcctctcgccttgggcgcagggtttggggctcagctgtcaattccaaggaattcgtagggttcgacccacgcggcgggagggaacggagggagaatcaaaaggcatcctcccccacgacgcggaggcggtggtacgattcctcaaacgcccaagcttgagctttttttgtatgcgagatagaagccagggcaacctcgcccagataaccccgaaaacaaaggcacgaccagataagtgacttcaagggagtaaaggtcgttctatcggagaacgttccaaacct

SEQ ID NO: 362382 - DNA, 1615 bp, Homo Sapiens
tttccgtcggctgaattgcggccgtatgcgcggctctgtggagtgcacctggggttgggggcactgtgcccccagccccctgctcctttggactctacttctgtttgcagccccatttggcctgctgggggagaagacccgccaggtgtctctggaggtcatccctaactggctgggccccctgcagaacctgcttcatatacgggcagtgggcaccaattccacactgcactatgtgtggagcagcctggggcctctggcagtggtaatggtggccaccaacacccccacagcaccctgagcgtcaactggagcctcctgctatcccctgagcccgatgggggcctgatggtgctccctaaggacagcattcagttttcttctgcccttgtttttaccaggctgcttgagtttgacagcaccaacgtgtccgatacggcagcaaagcctttgggaagaccatatcctccatactccttggccgatttctcttggaacaacatcactgattcattggatcctgccaccctgagtgccacatttcaaggccaccccatgaacgacctaccaggacttttgccaatggcagcctggccttcagggtccaggccttttccaggtccagccgaccagcccaaccccctcgcctcctgcacacagcagacacctgtcagctagaggtggccctgattggagcctctccccggggaaaccgttccctgtttggggctggaggtagccacattggggccagggccctgactgcccctcaatgcaggagcagcaactccatcgacgatgaatatgcaccggccgtcttccagttggaccagctactgtggggctccctcccatcaggctttgcacagtggcgaccagtggcttactcccagaagccgtgggggccgagaatcagccctgccctgccaagcttcccctcgttcatgcctgccttgagcatactgctcttcgcccagtcacccattgtccgagccttctttgggtcccagaataacgttctgtgccttcaaatctgaacgttcggggcttccacaggccctggctattgggaccaacactacctcagctggtcgatgctcctgggtgtgggcttccctccagtggacggcttgtccccactagtcctgggcatcatggcagtggccctgggtgccccagggctcatgactgctagggggcggcttggttctgctgctgcaccacaagaagtactcagagtaccagtccataaattaaggcccgctctctggagggaaggacattactgaacctgtcttgctgtgcctcgaaactctggaggttggagcatcaagttccagccggccccttcactcccccatcttgcttttctgtggaacctcagaggccagcctcgacttcctggagacccccaggtggggcttccttcatactttgtggggggactttggaggcgggcaggggacagggctattgataaggtccccttggtgttgccttcttgcatctccacacatttcccttggatgggacttgcaggcctaaatgagaggcattctgactggttggctgccctggaaggcaagaaaatagatttattttttttcacagtgaa

SEQ ID NO: 362383 - DNA, 784 bp, Homo Sapiens
tctggaggttggagcatcaagtgccagccggcccctgtcactccccccatcttgctattctgtggaacctcagaggccagcctcgacttctctggagaccctccagtgggggcttcctgtcatactttgttgggggactttggagtcggtcaggggacagggctattgataaggtccccttggtgttgccttcttgcatctccacacatttgcccttggatgggacttgcaggcctaaatgagaggcattctgactggttggctgcccggggtcctaggcctgggggcgaagtccaggcctggccacaaggttcaaagatgtgtcagacccaagccgctaccccctactccgagggcgagggtcggagaggctcagccccaggggcggggcctgtagtcggaggccgagcgggcgtggtccgggtagtccaggcggctctcggtggcagtgagcatgcgctccggctccaccacgaacatgtagtagaggttccacatcagcatcgacagcagtggcagaaacgtcaggccgtagccgaagcctcggaaggagcggcccacggcaaaggtcagccagtagatcagccgggagacggcaaagagaccagtgagcagagggagcagtttgagggtatcctggggcaggtaagtggaaagcacggccaggttgaagaagtagagaataaagagctggaccgactgggccacatatcgccggtggatctccacctcccgccgtggctccccaaagggccgaagggcagaaaagcataacaggctcagc

SEQ ID NO: 362384 - DNA, 807 bp, Homo Sapiens
atcccagccacacgtgtgggcaaaagacacacacacccctcttggtaggcatatttccctgtctgctcccctcttcctgtgggagaaggcatgccttctgggcagtttaaaggtgggaagtcacaggcgcctaaaaaggtaaaagagcagcagctctgcactggccagctgtaaacagtaaataggccagtcatggagggtcctgaatccagatcctcaggaaggttttcaccaaacaccacagtcccatttgatgtgatgcccagcctctatccttaaggcatttccagcgtccctgaggcgctctgcttagacaactggacacagaagtggtcagggccttagcgtgtggctctgcctcctgcctcacgggtaagccggagagtggagcagagaccagcacttagggagccttgtagcagtggtgagaggctgctcacgaaggaactgtgcctctcccctggtcctggccccatgccctcagcatccttaagaaacacggctgtccaccattttcccctgcaagaaaactaagtccatcccttatgactgcatcgggccccaaaggtgaagggcacgctccggcaaggggagaactccgattgattggagtacctgttggggcagtagcagggttccacccaccgcggtcctaggcactgggggcgaagtccaggcctggccacaaggttcaaagatgtgtcagacccaagccgctaccccctactccgagggcgagggcggagaggctcagccccaggggcggggcctgtagtcgagccgagcgggcgtggggtggtgagaaca

SEQ ID NO: 362385 - DNA, 1475 bp, Homo Sapiens
gcccagccacggcacatctgctttgttcaccactgggactctccttccatcttgtggccacctcccgggcttgtccgagggaccccagtgatacctcacactcggagctcgcctgccctgcttggctctgaggacctgcccagcgctcaatagggaacggaagccttcccctcccgcccccgatcttgtcctctttcccccttctgcgtcctagcgttcctcttcccctcatagtttcctggagccccaacacattcctggcagggacagcagggtggcaaggactcaggtctaggtcccttcccagaagcccccgagcctcatttgactgtgtggctctttggcccccaccctgtggggtgggtccatgggtcaggcctctgccctaccaacctgtgcctttcagtgggcgtggaggactggccttggccccccagggggctgctggactttgggagagacatgcccacacctgtgggaccgcgggtcttagtcacggcggcaggggctttctggccccctcccactcccgtttccaggccatgaccactctgccctgtcctggccatacggactcggcctgcctttgccctcggcctacttgccctagcatgaggctctgagagccacctgcccaccaatctggtgaggataatggtggctccagcgacaggaggccaaccctggagaccaagaacagggcgcctggctgccatcttttcctccagaggtggggctgcaccagactcagcactagcactccatcagcactagcacctcactccatcagcactagcacctcactccatcggccccggcaccctgctccatcggcactggcgccctgctccatcggcactaatgctccactcggcgccccactccatcggccccgctccatcggcactaatgccccactcggcgccccactccatcagcactaatgctccactccattggcactaacgccccaactccagcggcactaatgacccgctcctttgacattggtgccccactccatcagcactaacgccctgctccatcggcactggtgtcccactccattgtcactaacgtccggctccatcggcactaccaccccgctccatcatcactatgtccagctccgtcggcactaccaccccgctccatcatcactatgtccagctccgtcggcactaccaccctgctccatcatcactacgtccagctccaacggcactggtgccccattccatcggcactaacgccccgctccaccggcaccagtgcctcgctccattggcaccaacgcccagctccaccggtactggctccccgctccatcggcactaacgccccgcttcattggcactttgctgctgcctcctgagcactgccttccatgaacagggacagaccagaggccgtgcaaggactccccctcagacctccaaagggcaacagaagagtattaataaacgtgaaaactt

SEQ ID NO: 362386 - DNA, 647 bp, Homo Sapiens
atcacccaaaattttgccagcagcaccaacttccctgtggtatggcacaagacggtaagagggagaccaaagttatcaaggaaatggtataggattttgaagcaagagcaccccgagttggcagtcctcgcagactcggttgaccttcaggagtccacagggatagcttccgacagctccagcgactcttccagctcctccagctccagttcgtcagactccgactcagagtgcgagtctggatccgagggcgatgggacagtgcaccgcaggaagaagaggaggacgtgcagcatggtgggaaacggggacaccacctccccaggacgactgtgtcagcaaagagcgcagctcctccaggtgacccagcaaggctgttgtctgtatggaaggacacgctcgcggcaagggcagggcctggggagggtggcctgtccagtcctgcagacaaggggaggcctgacagagcccaagaatgaggacaccctcggcacgggaacccattcacttagcgtttgctccagtagctttccctctgctaccaatgcagataaacgcggcttgttttactcaggcaagagaatgtgaatagtgccaagaaaatcctttacattatttaataaaaattgaatccattttttatcttg

SEQ ID NO: 362387 - DNA, 1025 bp, Homo Sapiens
gatttgtgtaagggaatcttatatgactccaaaatttgcttaaagcgtgtacaatggattcttattcagcagtttccactcgttagagaacagtggaggatctgcctttgagcgactttgatattcttagggacccgggacatccaaggaggtggctatgagcgtcattgtggacctgtcagaatggactgctttgcatgtgggagaaaagtgacccaatatctgggctgtctcccgaggtcagaggtttgtttaatgaagaagtgggctgcatccaagggttgactgccttgtttgtcctgtcctgcctggtgtccagtgcgagtctggatccgagggcgatgggacagtgcaccacaggaagtaagaggaggacgtgctagcatggtgggataacgggggacaccacctcccaggacgactgtgtcagcaaaagagcgcagctcctccaggtgacccagcaaggctgttgtctgtatggaaggacacgctcgcggcaagggcagggcctggggagggtggcctgtccagtcctgcagacaaggggaggcctgacagagcccaagaatgaggacaccctcggcacgggaacccattcacttagcgtttgctccagtagctttccctctgctaccaatgcagataaacgcggcttgttttactcaggcaagagaatgtgaatagtgccaagaaaatcctttacattatttaataaaaattgaatccattttctatcttggaaatgttttcctttgagaataccagaacattcccttattgctcttctcctcatggtggtcttgggggaaagcagtgactcctgctgtgcatccttgaccacagagtcgtcgtcccagcagcgtagggagagccattggaaaagtcacccggcatcttctgcagaacctgaggcgtggcctcttgctttttctcccagtttgccgttgctgcttgagtgctcagccaaatcagacagcagcagaaaactctgcctcgtgccgaattcgccacccaggcctcgctac

SEQ ID NO: 362388 - DNA, 761 bp, Homo Sapiens
  misc_feature (111)..(111): n is a, c, g, or t
tgtcaggaagcgggctgccgagagtcgtagcggaaccagctggcgaccccgcagaatgaaccacaagagcaagaagcgcatccgcgaggccaagcggagtgcgcggccggnagctcaaggactcgctggattggacccggcacaactactacgagagcttctcgctgagcccggcggccgtggcggataacgtggaaagggcagatgctttacagctgtctgtggaagaatttgtggagcggtatgaaagaccttacaagcccgtggttttgttgaatgcgcaagagggctggtctgcgcaggagaaatggactctggagcgcctaaaaaggaaatatcggaaccagaagttcaagtgtggtgaggataacgatggctactcagtgaagatgaagatgaaatactacatcgagtacatggagagcactcgagatgatagtcccctttacatctttgacagcagctatggtgaacaccctaaaagaaggaaacttttggaagactacaaggtgccaaagtttttcactgatgaccttttccagtatgctggggagaagcgcaggcccccttacaggtggtttgtgatggggccaccacgctccggaactgggattcacatcgaccctctgggaaccagtgcctggaatgccttagttcagggccacaagcgctggtgcctgtttcctaccagcactcccagggaactcatcaaagtgacccgagacgaaggagggaaccagcaagacgaagctattacctgg

SEQ ID NO: 362389 - DNA, 489 bp, Homo Sapiens
  misc_feature (49)..(122): n is a, c, g, or t
cgtacccaggatcctgtccccccagaaacaccatctgattcagatcacnnnnnnnnnnnnnnnnnnnnnnnnnnnnnnnnnnnnnnnnnnnnnnnnnnnnnnnnnnnnnnnnnnnnnnnnnntcgacatagtccagacccacccaggtatgggcagctcccaggcccagcagcagcagccagcctacgctaataggaccactggactctttgccaggatggcttttcctgctgtactgaacctgctgataaaagcctccttccaggctcttggacactgccttgggagcatcctgcagctgggacagaggccagctcctgttgggctcagttgagactaagtaaattaggagagagagggacatgcttttgtaggctcatcccagttggttttctcatggacatctcttcctctcccaggaagcttacaattttcttctctctcttttgtgcaatttgtctgatttaggacttgttctgtgttttcttt

SEQ ID NO: 362390 - DNA, 935 bp, Homo Sapiens
gcctgggtggcgaattcggcacgaggcggagacagcgccggggcggagggtacgatggagaatttcacggcactgtttggggctcaggctgacccaccaccgcccccaaccgcactcggcttcggaccaggaaagcctccacccccgccaccgcctcctgcgggcgggggacccggcacggccccgcctcccaccgcggccacggctcctcctggcgcggacaagtcaggagctggctgtggccctttttacctcatgagggaactgccaggtagcacagagctgacaggcagcacgaatctgatcacacactacaacttggaacaagcctataataaattctgtgggaagaaggtgaaggagaagctaagtaacttcctgcctgacctgccagggatgattgatctgcctggttcccatgataacagcagcctccgctctctcattgagaagccccctattctcagtagctctttcaatcctatcacagggaccatgctggccggcttccgcctccacactggcccgttgccggagcagtgtcgtctgatgcatattcagcctcccaagaagaagaataagcacaagcacaaacagagccgtacccaggatcctgtccccccagaaacaccatctgattcagatcacaagaagaagaaccaagacaccgagaacgaggatcctgaacggcacacggacagaagaaagagaagaagaacgcagaagaatcgacatagtccagatcacccaggtatgggcagctcccaggccagcagcagcagcaggctacgcttattgggaccactggacctcttgcccggatgcgctttccctgctgtcttgcacctggctgataacagctggcttccaggctcttggcactgccttggaagctctgcagctgccgcgtcgcccgctcctgtgggtcggtgcca

SEQ ID NO: 362391 - DNA, 857 bp, Homo Sapiens
tatatatttgtcattttgtataaaatattgtgaaaattgaaggaggacactcagtaaacatcctgggactatttgtaagttatggcaaaaccagatgagagaaaagggacagtcccctctgtatcctcgttgtctcttagtaacatcaaattgtagttaaaaaaattttaaactatgtacaagctacaaaatagcatctctttcatggtatgtttgagtgtgtaattttagtttcttttccggttgtatttgtggtagtcagatgtgttggattgattccaactggacagagtaaggaattccagcatcctcttcctgcttgctcgtgttaccccacagatcaaaccctcaattctagttggggatgctgtctagccccacaccatgactgaagccttaagcactgttgcgcctccatgtgctttggatcagcaaccccagtggtattctaccagagcattgtgggaaagcagatgtatagtcaggtcccaacagcaaattgttgggtgtgagagttctaaagtataggggtgagggaagagaaggatatgaactcctctgaccttaagccagcattcatttaacttttatgtctacttaacaagagaacctggagaaaactaccgtattcaagagattaatcaaaatcagtgttttagccaggcgatgacagagaagcaccattcctcaccctccattcttgtaatgtctgtaataaatttcagtgcgtcaggatggatgaacccaagatccagtgaatgattcagctgttccaagccttacatttttccatcattcatcatgcattctcattcagtgtaacctctcgcactattgtggttaattttatgtaaaac

SEQ ID NO: 362392 - DNA, 483 bp, Homo Sapiens
ggcacgaggctttccatcggaataaggtattaactgggaatgtgattatgccctgacagcttccccctattaatgtaaggaatagaaaactggggaacttcacacttaattagataaattgggatatgcaatataaggcttttctttatctgtgggattttacaaaaactcgactttgcagtcagttgtatattgtttgctttagttgattatatttgaaatgggtgattggaatgcgtctcgtgcctaggataataatgtgctatgatccgaagtattacatccttaagaaaaaaccaaaacaactctatttggcagatgcagaattgtagaccatgtgaatacctagcacatgcccagagacagaagcgttgcaataaccttgccacagaacaaaaaggtcattttatctttactctgatgtagtctgatgctgtagaagcatggagtgaaatacttatttttatattaagtcagacttca

SEQ ID NO: 362393 - DNA, 856 bp, Homo Sapiens
  misc_feature (128)..(142): n is a, c, g, or t
ttaattcctccaaattcaaaggctctttttggcttgtgcaagatttgttccttattaaaacagttttaaactacccttttataatctgggagagaatactttttaaaggtttttgaactatctttttnnnnnnnnnnnnnnngccccacatcttatactccaatgagtgtgtttgtgagtttttatcctgtttgaattttgatgtcgtccaggcgtcctgggatcagggtagacacgtggagtgctggtgctgagctgtttgagaagctctgtgtgggtgtttctgtggtcaggtaggctgggctgtgaacagcactgctccacatggtgtcggctcacagagccaccgcaactctgcccagcgggagtgacaccactgatgccacagaagcctttatcgttaggggcaaaagcagacatctctggtagcaggagctcagtgtggtgctcttcagccacgcagaaagctcacgtgcctgcagggccaggaaagggaaatgatcgtttcttttgtattaggaaaaacaagacttagacttcccgagttgtgcagagtgacgtctgtactttttatacttagaacatttggtcaagttttgtaaccaaaccttagggaattgagagggaaactttatggtacgtttaccttttttcctttttatatgaattattttgtacaaagttcagagagcggtacctttcctactgtcttttctttgactccatggaggaatttgtaacgatcggtgtgacctgaaagggtttgtgatacagcggtcactattttctcttaacacataggaaaaaagttcagacatcgctacaataaatgtgctttatttgatccaccaaaaaa

SEQ ID NO: 362394 - DNA, 454 bp, Homo Sapiens
  misc_feature (193)..(246): n is a, c, g, or t
aaatttttttaaaccaagaatgatttctcctgcttccttctcctcaccatcttcccagacggagttcaaaggccacttctcaagcagcttttggcaccttcagcctcagagtggaatcttttaaagacaggacccctatgtccaggaaaggggaaaaggaactttgccaatgatagtgaccacagcaaaagcnnnnnnnnnnnnnnnnnnnnnnnnnnnnnnnnnnnnnnnnnnnnnnnnnnnnnnccaatagcacagcccttgttgaggtcagcagggaggaggggctgcccggagttgggtccttgcctggattttgacacagcaacttcctgtagtgagcactttgtatgaatcgtggacttcctgttctcaaggcgcaggtatttattctgtatctgtttagagcacacaccaaaatccacccttttaataaacatgatggcgcagtccc

SEQ ID NO: 362395 - DNA, 1610 bp, Homo Sapiens
atgacaaccccatctcccgttactatgaccggctggctacggtgcaggcgcggggaacccaagccagccaccaggtcctccgcgacatcctcaaggaggttcagagtaacatggtgccgcgcagcatgctcaaggagtgggcgctgcacaccttccccaatgccacggactactggacgttccggaagatgttcaccatccagctggctctgataggcttcgcggaattcgtcctgcatttaaatagactcaaccccgagatgttacagatcgctcaggacactggcaaactgaatgttgcctactttcgatttgacataaacgacgcgactggagacctggatgccaaccgtcctgtcccatttcgactcacgcccaacatttctgagtttctgaccaccatcggggtctccggcccgttgacagcgtccatgattgcggtcgcccggtgcttcgcccagccaaactttaaggtggatggcattctgaaaacggttctccgggacgagatcattgcttggcacaaaaaaacacaagaggacacgtcctctcctctctcggccgccgggcagccagagaacatggacagccagcaactggtgtccctggttcagaaagccgtcaccgccatcatgacccgcctgcacaacctcgcccagttcgaaggcggggaaagcaaggtgaacaccctggtggccgcggcaaacagcctggacaatctgtgccgcatggaccccgcctggcacccctggctgtgactgtggccgccacggccacccggaatgtgaagggcgctccgggctctgagcccgcagcttttacgacttctccctgcctcgttccttatattcacagaagccccatagtttcactgggttgcggttattttcctggtagtttgcgtgtaagaaagggagaatatagttttagaggaagctgaactatgacgatgctgggcgaagcggttggaaatggcagagctgaaacttattccaagctttcaaaataatcttttaagaagccaggattctccggtctggaatttctgagtgagtcccttttttatggtgtcctccctctgtgaatgtacaggcggaactgtacgaacagctcccttccatccatttttaactctttcggaaataacacctcacagcagcttcgtgcttttgtacagacctttgtaacaagtgtacagaaaactcattttgtttgagaaacaggagttgatgaacccatcatgctggtttttctctgagcacaaagttttaggctgtacacagccagccttgggaatctcgttgagcgttcggcgtggatccacggggccaggccaccctgcgggagcgccacacgcatccacttcggattcagtgggtgaagacagaactctgagagtctgcaggcggctcctgtgctttttatttctggctcttcggatgtcttctagacatttactatcactgcacctgaagaaaaaatcacttttaccttcctaatttaaaaagacaaaacagaaatgtacgttccttcgctagctttagtctttctgttcccatttttataaatctgagcattgataatgttctatctaaatttgtacagtgtga

SEQ ID NO: 362396 - DNA, 1093 bp, Homo Sapiens
aattcccgggatctgatgtctgccagactataaaatggggggtcggactctagtcacccatagcacctgcccgcctgcctgtcctccagcaggaagtagcaagtccccagacttttgcaggcgggaaccatgtctcaggctgcaaaggcctcggcctcggccacagtggcggtgaacccagggcctgacaccaaggggaagggggccccacctgcaggaacatcccctagtcccggcactaccctggccccaacaaccgtgcctattaccagcgccaaggcggcggaactgcctcctgggaactacaggctggtggtcttcgaactggaaaacttccagggccgtcgagcagaattctcgggggagtgctcaaatctggcagaccgtggcttcgaccgtgtgcgcagcatcattgtctccgcgggaccctgggtcgcctttgagcagtccaacttccgcggggagatgttcatcctggagaagggcgagtaccctcgctggaacacatggtcgagcagctaccgcagtgatcggctcatgtccttccggcccatcaaaatggatgcccaggagcacaaaatctccctgtttgaaggggccaacttcaagggcaacaccatagagatccagggggacgacgcacccagtctctgggtctacggcttcagtgaccgcgtgggcagcgtgaaggtctccagtggaacatggggtggctatcagtatcctggctaccgcggggaccagtacctcctaaagcctggtgacttccggccctggaatgagtggggagccttccagccccaaaagcagtccctgggttgcctgggtgacaaacagtggcccctcgaggggtccttccctgttctggccacaaagccccccaagtgagtccacccctccctttggtaccttgccccaacccttttttatgttcaattatttcccccatttttcccaggcaaataaaattccctaaaaccaaaattttttctggatttgtaaacaaaagtgtgccttgaggtcccccaaagttaatgggatgtgacttcctcgcttttaataattacaacgaaaataaaaacagcaaaccctg

SEQ ID NO: 362397 - DNA, 396 bp, Homo Sapiens
ggcacgaggcactgtctctgactcacagcaatcatcagcacctctctttgcctcctacttgctcagtctctgtcacaagaactggatctccatccccttgatgctctgagcatcttcacccatttggtcgttgagacatatctgtccatgtctgtctaaaaggggaggagatgagggagaaaaaagggaatctactcagagcctgtgtgtgctgcccagtctaccaaataatttatatacatctcagtcctcacacaaccatccctgttttatagaggaggaagtggcttagagaatgtaactgaccaaagtcacactgccaggaactggaagcactaggatttgacagcatatccaaatatgtcagcaatttcaataaacatgactgtactcaac

SEQ ID NO: 362398 - DNA, 1712 bp, Homo Sapiens
  misc_feature (282)..(300): n is a, c, g, or t
  misc_feature (1059)..(1075): n is a, c, g, or t
ggcacgaggctgactcactgaaatgcgtgttgggttgaagatgtcttttttcttttctgcctcacccctttgtctccaacctccatttctgttcactttgtggagagggcattacttgttcgttatagacatggacgttaagagatattcaaaactcagaagcatcagcaatgtttctcttttcttagttcattctgcagaatggaaacccatgcctattagaaatgacagtacttattaattgagtccctaaggaatattcagcccactacatagatagcnnnnnnnnnnnnnnnnnnnaataaggacacctctttccaaacagtgccatcaaatatgttcttatctcagacttacgttgttttaaaagtttggaaagatacacatctttcataccccccttaggcaggttggctttcatatcacctcagccaactgtggctcttaatttattgcataatgatattcacatcccctcagttgcagtgaattgtgagcaaaagatcttgaaagcaaaaagcactaattagtttaaaatgtcacttttttggtttttattatacaaaaaccatgaagtactttttttatttgctaaatcagattgttcctttttagtgactcatgtttatgaagagagttgagtttaacaatcctagcttttaaaagaaactatttaatgtaaaatattctacatgtcattcagatattatgtatatcttctagcctttattctgtacttttaatgtacatatttctgtcttgcgtgatttgtatatttcactggtttaaaaaacaaacatcgaaaggcttatgccaaatggaagatagaatataaaataaaacgttacttgtatattggtaagtggtttcaattgtccttcagataattcatgtggagatttttggagaaaccatgacggatagtttaggatgactacatgtcaaagtaataaaagagtggtgaattttaccaaaaccaagctatttggaagcttcaaaaggtttctatatgtaatggaacaaaaggggaattctcttttcctatatatgttccttacnnnnnnnnnnnnnnnnngaaatcaagcagatggcttaaagcgggttataggatggctcacattctttagccattatgcttgttaacttaatggtttagaagcgtgttggctgttggtaacatcccagagaagattgaaaagggcacatgcttttatccgtgaccagatttttagtcccaaaaaaatgtatttttttggtgtgtttaccactgcaactattggcccctctctattggaatttactggtggaccatgtgtggtgtctctatgcccttggaaagcagtttttataacaaagaaagcccgggtctgcagagattgaaaccgggtgggaaacctaagggtccattgtgtcacgtgcaattaatacaagttatggtgcttttcaaaattgtacacgggaaatctgggacagtgctccacagatggatacattagccttggcttacatcttccggataaccttgtaccattttgaaacctttaaggatgccaagaatgcctttattccacaaaaaaacagagaccacttatagaggtgtttcaaaatagcatgtctggggcaattcaacctctgtgggtcctaggactcacattcggttcagttttcctcagtggtatttgaccagtgtcctaaatggcaaacacctatac

SEQ ID NO: 362399 - DNA, 946 bp, Homo Sapiens
  misc_feature (122)..(165): n is a, c, g, or t
  misc_feature (510)..(510): n is a, c, g, or t
  misc_feature (863)..(863): n is a, c, g, or t
gctcaagactcaaaaaacttttggaataatcccaactggactgcagtgaaggacaacaatgctctagacagagaaataaccccagagtaaactgtaaatctaaatcactggctgcaatgagnnnnnnnnnnnnnnnnnnnnnnnnnnnnnnnnnnnnnnnnnnnngttatgtacaaaagactttgagatatcaggcaccattaaaccacatttccccccttataaatgcaactgttcaagtacactgggaacagttttaaggtacacctgcagtacaataggagaagcatgagtggataatctaaacacaggatcataacagtgatacgctgcaacacctctgtgaattccattagccaagttctgtcattaaaacatagaaaactactgctcctcaaaataaaagttttaggaaacaaaaatcccctaagtagtgaactgttttcccaagcagagctccctaatgtttcatttcctgtcctacaacaaaaggggacccagtggagctgnccgtttggaaacgtggccagcatcacatcacaacacggaggaatcagagagggctcagtgtgaagaggaaggtggatttcactgtttttcctcaaataggttgtctgctctggtgcagtgctgaatggcacgcaattaccttgttgcttgggctgagaacctgtgaatgggattcatgtattatttttactattataatttactaaccaagtatccctaagaaaataacaggatattttcatttatgttcaagccaacctccccaaacaaaaaaatctagtgtccagaatcatttggggatctttttacaatctggaatcctaattcttataacagcttcaaatcaacatctngacataagagttttaaattttttaatttctggggactttcctccctgctgcccaaatttcaggagctagaaaaggcaaaggag

SEQ ID NO: 362400 - DNA, 557 bp, Homo Sapiens
  misc_feature (52)..(52): n is a, c, g, or t
ctctctatccaaaataaaggatcacagagcagcaagttcatacaacatgcangttctcctctatcttagaggggtattcttcttgaaaataaaaaatattgaaatgctgtatttttacagctactttaacctatgataattatttacaaaattttaacactaaccaaacaatgcagatcttagggatgattaaaggcagcatttgatgatagcagacattgttacaaggacatggtgagtctatttttaatgcaccaatcttgtttatagcaaaaatgttttccaatattttaataaagtagttattttataggggatacttgaaaccagtatttaagctttaaatgacagtaatattggcatagaaaaaagtagcaaatgtttactgtatcaatttctaatgtttactatatagaatttcctgtaatatatttatatactttttcatgaaaatggagttatcagttatctgtttgttactgcatcatctgtttgtaatcattatctcactttgtaaataaaaacacaccttaaaacatgaacaaggccaaaaaaaa

SEQ ID NO: 362401 - DNA, 900 bp, Homo Sapiens
atgcacgggcacccatacacacatgccttgccattttatggcaaaaggagtgtgttaatgggatcataaacatgaaatccacttgtattaccatgttctataacccaaaagtagttggcctattctaccaattgaataggggaatggcatattgaagggtcaactaaaatgtcaactcagggacaaaactttaaggagctggaccaccctgtcaaaatgtggtcactgttgtgaaccaaaaggctggtatatgggcatgtgtctccaatagttgaaataccaaaactttgtcaccaaggctaaaagcaggattggaacctctcaccatcactcttaaaaactcacttgcaaaatttattcttccaatccattcatccttagcatcttctaaattacagactctgacacttaggataaaaatcattgaggggacacaataaaagcttcgctgaactgaacatttgactaccacctggccatgttggattcacattccagtgttcccacaagaaaacaatagaatgactagactatgtaactagagtgatgagaataaatgaccttgttagcatggaactgctatagggagaagtgtgtctagaataatgagggctcaattggcatcacttcctgtttccacgcctagtaataactgtgattggataaccaaagtaaccataacctgataaggacaaggcacttatgggcccaaagacttaaatataggttcagtccgtcttaccagacagcctgaagtacaggtcaactgtgaataaaaacaagttccaagaccagatgcagcagtggggattgcatctctgtttatttgctaactaacttctttaaagtcttttttaggtcatttaaatggctgccattctgaagaattggcctcgtgcc

SEQ ID NO: 362402 - DNA, 610 bp, Homo Sapiens
tcggctgacgctgtctgaagcccacgcggcgtgccggcgacgcggcgccgtggtggccaaggttgggcacctctacgccgcctggaagttttcggggctagaccagtgcgacggcggctggctggctgacggcagtgtgcgcttcccaatcaccacgccgaggccgcgctgcggggggctcccggatcccggagtgcgcagtttcggcttccccaggccccaacaggcagcctatgggacctactgctacgccgagaattaggcgcccaccgtgtcccctccagcgcgcgcgaagaagcttgggagtcgtggcgggggtctctcgccacccctttccggagagcctcccctccctccagacccggagcggcctctccagacctgccttcccagccgggggctgcgggcctcggaccccggctggcccggcggcggggaggggaggcgggggcgcctccggcggcgagatgcagaggtgaccctcggacccgctgccgttcgcgaaccctagcagaggactcagccaccgccgaggggagggtgaggcggccgggggcattaactgacctctgagtacagcaataaaataacctggggattttttaaaaaa

SEQ ID NO: 362403 - DNA, 1001 bp, Homo Sapiens
tgtaccagctgtagcccctctcggcccccaggaagaaggcccctggcaagtgcctgacaccgccctccccctggcgcagctcgatctcgcatttgtactccccggtccagatcccaaacctgtcggtcactttcaccggcacggccagcacgtcgcagtggcgcttgagccaagtcacaatgtcctccacgtccaccgtctcgttccggaagaggatgaagagcgtcttcaagctggacttgctccgccccagcaccacaaagttctcccagcagtcctcctgctcccgcttctcctcgtagacgcgtaggaacagggccagcttctccgctgagcggaagctcacgtcgaattcgcggctgcccgggatctggatgaccgcgtagatgtcgctcgggtccatgccgatggagcgcaggataagcgctcctaccacgaagtcccgggtcgggcaggcgccctcgtctccctggaaacagatgcggacgaggaagcgacccttgcccgggcctgccgccgccgccggctcatcctggaggggccgctcggccgcgtcctcggcctcgccgggcctggccggggtcgccatggcggccgccgccgcctcggccttcttcctcctgcccgcctccgcagcgcccttctttttgcgggggtccaccgcctcgccggccggatctctccgacggcccttcggatccccgcggccagccggtgggaagtcgccgaggtccggcgccgccaggcccgcggggccgccgagcccggcgctccctccaccgccgccgctttcctcctcccgccgcggcggccgcggctcgcggaattcgcccttcttctcggctagattcttcaccacctgggcccagcccatcttctcgcggccgccgtcggcctcctcgccccgggccgcggccgcgcggggggcagaagctgcggccgcccccgtttcctctcttcctccgcgccgccgccggtggccattttacctcccccccgct

SEQ ID NO: 362404 - DNA, 603 bp, Homo Sapiens
aaatgaaaatgtgggcttcttttaaggaaaaattccctttgaacattgacagaagtgggcgtagggaaggggaagattttgcctggattctccacttaactcttgtcaccactggagcatcctgactccctagacacaagtgatggaagttattttgtttccactctaaacactgtctcagggggacattgatgggatggtggagggtgtgtttcattgtgacaacagcatctttggtggggaatttgctgttggtgaaaacccagtgctttctctgagcatgggtgattgataagggcctgacatgctccttcatttggaaaatggtattaatagaattggtttcccagtgaatagtgccttttacccaagactcataaccaaatattttcacaaagatgttatatccccatgcatgagcattcattttgagatgttcattataatagagtttaagtatgaatgtgttttaaaaatgattttaaaatcatctgcaaaaaaatgttgtgtttcaaatggacagtgtctgggttttgtatagtcatcataaaaatgtctataattgtactgtttgctaataaacctacctgctttcagaaaatc

SEQ ID NO: 362405 - DNA, 542 bp, Homo Sapiens
ggcacgaggccagcccaaacagatctgcaccttctgcctcagcaaccagagaaagttgacagcacgcgcgagctcctggggcctgaacatctgggaaattaattttacaatttcggctgtgcagcagtatgctcccctccccaaaacgcttgagggaagctggggagagccgggaaggaggtgccttggcgctggccacctgagatggcacccagcagggaggccagagaggcgcagactggcgctgggctctgccggggcctgacactcctccctcccctctgcagagcaaggaccgcgacagaaagacagcgattcgcagttaggaggtggccggcagcagccaggaggcagacgctgctgggggaggtggacgcccggggtgactgcagacaggcgccggcagcgggactctgcgctggccccagcacctgcccgggcccactggaactttctgcgctggcttttcttccggccactgtgtgatggcatcttgtgtttttgatatgataatataaagtctgaaaattttgtataattaa

SEQ ID NO: 362406 - DNA, 802 bp, Homo Sapiens
  misc_feature (180)..(188): n is a, c, g, or t
ggcacgagggttttcagtgcaacatttcaaaaaatatatatgctgcaatctaataattaaaaggaattttacctattatgaaacttattacattttttaagttagataatcagtttcaaaaggagtattcaggttatttaactttgtttttaaatggctgcatcagaaaaaaatgtctannnnnnnnnattaaaatatttcatcacttgttaaaacatatttttgatctgagtttggtaaagtattattttacctgctgttgtactaccacagactgttgacttttagtttcttaaagagaaaaattgcctttttactagaaagcctttgtatattgcaatttttctgtttgggaaaatctaaggatttactgtggttagtcttacaaaaaaaatgtggatttgataaactagtgcctatgattgtaacttatgtttgatatatagtagtaagggttttatgaatgttgattattttgtgccaacagcccaaaagtgtcacttatatgtaagcagaaaacaatgagctctgcttccaaagttatttaattttctcagtgtttgaatgttattttttgtaagtgtgttaataaaagtgtaaagaattggaaaaaatataaatattcttaactcaagcatttgctggatcatttttctacaaaacttgtttgtacaatataaaacactctctgaagagttgactttttttcagtttcgtatcctggaaatcacattttgtaaaactggggaccattcataattgtcagatactttttaaaattatctcaatacatcacttttat

SEQ ID NO: 362407 - DNA, 1098 bp, Homo Sapiens
  misc_feature (679)..(679): n is a, c, g, or t
  misc_feature (714)..(714): n is a, c, g, or t
agcggctccatgagcagagagggaccctgtacccagagcagagcggagtgctcggggagaaaccacggggctcagaggagggcccaggctcccactcctgagaagtggcttcccaggccctggggtggggcacttgtgccatgggctggggtgcccctctgggtggctcacagccttgctgtccgtgctggccaggctccctgaggaggtccccagcttccagccacgactgtttgagggctccagccacatggcctgcctggtcctcgcagaagtggggttcttcagccagggaggacctggacgaagtatgacatcatgttactggacacctggcagaagatcgtcctgtggcttgaggaagctgcaagtgagtggaaggagacggtggcctggggccagaagtacatgaagactcacccagcagggaggagccagaccacacccatcgtgctggtcaagcagggccatgagcctcacacccttcattggatggttcttcacttgggacccctacaagtggactagccacccgtcccacaagaaagtggtggatggcagcccggcagcagcatcaaccatctctgagataacagcagaagtcaacaacttgcggctatccagatggccgggcaatggcagggcaggtgccgtggccctgcaggccctcaagggctcncaggacagctcagagaatgatgtggtgcgaagccncaagtcggctggcagcagaaccagcagctccgtcagcagcaccagcgccacgatcaacgggggcctgcgccgggaacaactgatgcaccaggctgttgaggacctgccagagggcgtggaccctgcccgcagggagttctatctctcagactctgacttccaagatatctttgggaaatccaaggaggaattctacagcatggccacgtggaggcagcggcaggagaaaaagcagctgggcttcttctgaacccaagccctctcgactgcccctatcccctggaccccaacatacctacaatgctggggaggccctgcttccactcccctcagaggcttttggtcatcctctgcgtgtcagtaaaagcaggcagcccatacgaa

SEQ ID NO: 362408 - DNA, 397 bp, Homo Sapiens
ttttccattcctatgaactgtctaatatctttctattacagaaggggaaactgaggctgggaaaggctaaatgacttatcctccatcagttataacagcccctggtcttcttaaatttaaacacgggacttcccgaactaatttttttaaggatactgaaaaataaaagagagtggtcgaatgcctgaaattttgcttaacttactgtacttaaaatcaattataacttctttttgttactcagggccccactttttgttgctttctagacttgtgtgtagaaaaaagattaatgatcacttaaagtagtttccttctttattctgaaaaaatgaggaaaaaataacaacagtggcaaataaaatcatatttggtactaaaatgtttgtagtttgaa

SEQ ID NO: 362409 - DNA, 667 bp, Homo Sapiens
tgggccacagtgaaccaaccaaaccaaccccgaatcatcgctctcgccatgtgcgtttctcttgttttttttgccagcccaatggtagtttctgaacctattgacattgttcaaaatggatcatgtgccatattttgttagttgacatctgagttttcagtaaaatgattatggaattaatcagcaaatgtagaagaatatattcaaagttaaaattcagtggcagcacagattatttttatcagagctgtaaagaaaacaactgtccttttctccccaccacccctcctgccccactttggcccagaaaccaaatgtgaacttcctgtctcccacctcagcactagtccatgccaggacaccagctgacaatttcttggttttactgtcaataattgtaccatgtgatcaattactgtcctcacttagaacaaagcctgagtccgagaatatttatattttaccaatatatgcctgttacaagagaaggaaatatgagttatttaagtttaacttttttatgtgaattcagagtttatttatcgagggaaatatgtacaaagaagcttcaaatggaatatttaccgacattccttatacatgacagacacttggctacatgggaagatgatgttaataataaaatgatttttaaatggaaaaaaaa

SEQ ID NO: 362410 - DNA, 1014 bp, Homo Sapiens
  misc_feature (47)..(83): n is a, c, g, or t
gatgatagatcatataggggaactggagcttacgcggtggcggccgnnnnnnnnnnnnnnnnnnnnnnnnnnnnnnnnnnnnnatcaggccaaatcggccgagctcgaattcgtcgagagcgggtgctgttgcggatggggcgtaggtgggcggtgcgcccacagctgcctgggtaaggcccaagatggctgtcttcgccttagtactcgtgtgaagttggcggggacggttcctgtcatcttcttgggcttatttggtgtgctgttgaaggggggagactagagaaatggcagggaacctcttatccggggcaggtaggcgcctgtgggactgggtgcctctggcgtgcagaagcttctctcttggtgtgcctagattgatcggtataaggctcactctcccgccccccaaagtggttgatcgttggaacgagaaaagggccatgttcggagtgtatgacaacatcgggatcctgggaaactttgaaaagcaccccaaagaactgatcagggggcccatatggcttcgaggttggaaagggaatgaattgcaacgttgtatccgaaagaggaaaatggttggaagtagaatgttcgctgatgacctgcacaaccttaataaacgcatccgctatctctacaaacactttaaccgacatgggaagtttcgatagaagagaaagctgagaacttcggaaaaggctcatctgtcaccctggagaagggaaactgtacttttccctgtgaggaaacggctttgtattttctctgtaataaaatggggcttctttggaatcttgatagccacataccttttgtttttcctcaagatgctgccgctactcatgtagactatgaagtcttgactcatcctagatcttaggatgttaggtttgggcttcacacaacttgccttttacagtctagctatacctaattcctttaaaaagaaaagttggtgagaatgttattggcgctttttgacataatttaactaccgtgatagtgtcttca

SEQ ID NO: 362411 - DNA, 733 bp, Homo Sapiens; identical to SEQ ID NO: 176200

SEQ ID NO: 362412 - DNA, 887 bp, Homo Sapiens
  misc_feature (321)..(398): n is a, c, g, or t
tcattaccagtaaaggctcttggtatctttctgttggaatgatttctatgaacttgtcttattttaatggtgggtttttttctggtaagatttagacctaaatcgcatcatgccaacttgtgactttgagactattcatcaagaatgaggatatagtagccatgacatagcttgagctatagcctttaattccttactttggctatgggtggagggtgagtttgaagaggttctgattttcttgtaacctgggaaagccatgaccttgtgcccgattctttcagattgctttgggtaataaatattggtggtggtatctgnnnnnnnnnnnnnnnnnnnnnnnnnnnnnnnnnnnnnnnnnnnnnnnnnnnnnnnnnnnnnnnnnnnnnnnnnnnnnntgtcggccgcctcgaccctaaaaaaatttttctggccccttcgccttggcgaaaaggtttcaaaaacatttgctttgcggggcgcggccccgttccggaaagaaaacctgggccatgactttttccttgagattcccccggataaaaaacgccggggggttccccaccgataaaaaacccctcgggaggagcgttctgaggttaatcaatgcatattggaactggaaggccaatcaagcgtctttatcaaattagggccccagccctagccactaattaaaattacggcccggaccttgccttattccatttctgcacgagttggaaattccatttacaaatttgccctccataaaagcaagaactccccccaaacgggcatcaggaaaaaatttgtaaactcttgccggtaggaaatattttgccccctgtggccgccaatacgggagacaaaaattatactccctcccataataaaccccggcgccc

SEQ ID NO: 362413 - DNA, 2317 bp, Homo Sapiens
  misc_feature (1075)..(1075): n is a, c, g, or t
  misc_feature (1497)..(1528): n is a, c, g, or t
cagccctaccccttcgagcgcatgatcttcggcgcctgcgctggcctcatcgggcagtcggcctcgtacccgctggatgtggtgcggcggcgcatgcagacggccggcgtcacgggctacccgcgcgcctccatcgcccgcacgctgcgcaccatcgtgcgggaggggggcgccgtgcgcggcctctacaaaggcttgagcatgaactgggtcaagggtcccatcgccgtgggcatcagcttcaccacgttcgacctcatgcagatcctgctgcggcacctgcagagctaggggaccctgagctgctctcaggacggtggaccagtgacccctttgtattctgggcccatggaacggtgggggggtgcgcttgattctacttcaggaggcacatggggcgctttatggaacgagcaggtgggcctgaggggcctgggctcagagtccacgtccaaacgcaaagctggcagccctggaagtgcagtgttggggcgatggtgtggggggtcccgcagctcccctcttccttcctctgcagacgctggcgctgtctgccggaggtgttgcccaaaaggccctagtggggcgtggtcagctccacctcctgatcctgtgtgtcctccgacatgctgctgattctagtgacccctgtccccaccaggctcagagccagactgcgcctggaccttcttgttctgactccacgtgcctgcccggcctccagggtgcgggggcgcctttcttgcaggcggacctgcccaggatggggccagcctcgtgctcagctttggccacaaatgcagcccctgggccacccaccatgccggccctgccttctccagtatttcccacatggacacgactcctcagtcactagagcctcctgctgggaaacagggtcccccagagcctcatgtctatcctagaaccctgcaagcagctgggtccccaaagagtgcatctccccctagagttgcctgcccatgcccacctgctttgtaaccttcccaggagattcatgcttgctctgcacagcagggctcgaggcccaggccatgacacggaactgcctcangtttgggtcagaccctgcatcctggggcatctgctgaaatgtgagcacacaaaccacctcctttggcccagaagccccccaggcctagcatctcagtgccccaaccctctgcccagctgtggtatccagcaggtccttgggtccccacttgagcaggcacttggctgggatatggagcaatttaaagcccacaggggttgttcagtttctatgaaatggagcatggggtgcctgctagcctcaatcccccgaagtgggagcctcatgatagagtatagcttgggggtgggaggtgaggaaaatctgaggtacccaggggaacccccagctaactggtctctcagaggagtcccccagggcccgccagctatcacagggactcagaaacacccatttcctaatgacatggtgagtttcttgannnnnnnnnnnnnnnnnnnnnnnnnnnnnnnncaacttggctgaccccgggtctatgatctattcacatcgaacccctgactggtctgcctggtgccagggtgagcgtgaccgtgagtgttgctttcgacagctggctcagcacacgctgtgtgaagggatctgagcttgttcatctccagtcgtgacttcatttcccttccttctgtcctcctcctgttcttgccttggacctgcaggtgtgcagaccgctctctctgccttccttgcatgtggccaccaaccatccctgatcttgtccccagaggcccaggcagcctgtgatggctgtgaggggctgtcccactgtgtgggtatcccttacccagcacttaaacttggcaggagaggcagggcaaccctcacagggagatgggagggcacccaactcccacaagcatgcaacagcagtaggaattgggggtctgccccaggtgggtgagaccaaatgagtggatttggggccacaggctaggcaggagagacaaggggtaggtgggagggtcccccagtccctgctgaccccagtgtgtctccccggagatggctcctagctgagtgggacccggcaggagttggggacagtgctgtcccccacccctgcacacagccaggccctcaggctctgcggtcactcgcctccctgctggtcactggtcttggtctggagttatattttgatgccatgaagacactgtttatatctaatgtttatatattttaaagatttgtgccaagagagtatatttaataaaaacttaaatgacttcttctcctaaaaaa

SEQ ID NO: 362414 - DNA, 643 bp, Homo Sapiens
ggcacgaggatagcccattcctccctcattcattcattcggggggtatgtactgaacaccaactgtgtggcatacactggcttgggagattgcaaggaccagtctctaagcttttggaggccagcccagtgtggaagagaggtacctcaggtgtgagggtgccatggctgagggatatttgtacatgtatgggatgctatgggagctccttgcagcctaagaagccagtcctgtgagccaggtcctgagggttgaagaggagttttccgggcagggaaagggtaggaaaggcactctgggcagagggtacagcatgtgtaaacacgtggagatgagaatgagcatagcactgttggggctcccatggcagggagaatagaagacaaggctaggaaggtacactgaggctactgcagggtccacagaggaatcagaatttcattctgaggatgaatgaaatcatcctcagaggatgaagccaccaggaatttcaggcagagagtgaagtgatcagagttgttttttggatagatggttatctggatgtggtgttggagctgggagatttggctctgaggtgtgtcatttaaaataatagcttctcggcagtggctcacacctataatcccagccaagattcctc

SEQ ID NO: 362415 - DNA, 841 bp, Homo Sapiens
ggcacgaggcgactcccaagactatatttgaagaatgcattgagttcaagaaggacatttaaaagcaaattctgactttttcaagaccaacacacttgtttaggcctattaaattgtactatcacttgttacatgccctctgaattgggagaaagtgggcttgcacactttgaggtaactaactgtaatttacttgtgttctctctttcttgctctccttctcaacatgaacacaaacctctatggaaaagtagcctcttgttaatctgatctagtttgtatggaaaaagcccatggagaaccttatctttaacaagctcccagagggtgcccagatttggaaattctatagagcagtggtgaccttttagcaaagcttctgtaacagttcgaatgagttgcagaacattccactccatcaaatgacactgtaaacaaatcacttcaagagaggcttggttttgtgtggcacagatggacccaagctttcatgctgtgcactgagatagaaactccacccgcagcgcctgcgatggatggagcagtgtgccctgatgctcaaagcgtattaaaggaaaaaaagtgatcagcatggaaagtttttatggggaaattataactccaagtgggtgcattggtttaaaaatggatcacaatgatagagttcttcatgaatgtttacaagttgtaaggaataccgttagtgaaagaggaaaagaagtgggttctgaaaatgcagtttcccatccaatgattttgataacaaaattccaacttttctcaatgaaactgatgcagtattatttgtgcaaataaaatgtgtcataaatatgcaaaaaaa

SEQ ID NO: 362416 - DNA, 776 bp, Homo Sapiens
ggcacgagggaaaccagtgccccaggcggcgaggagagcggtgccttgcagggatgctgcgggcgggagcaccaaccggggacttaccccgggcgggagaagtccacaccgggaccaccatcatggcagtggagtttgacgggggcgttgtgatgggttctgattcccgagtgtctgcaggcgaggcggtggtgaaccgagtgtttgacaagctgtccccgctgcacgagcgcatctactgtgcactctctggttcagctgctgatgcccaagccgtggccgacatggccgcctaccagctggagctccatgggatagaactggaggaacctccacttgttttggctgctgcaaatgtggtgagaaatatcagctataaatatcgagaggacttgtctgcacatctcatggtagctggctgggaccaacgtgaaggaggtcaggtatatggaaccctgggaggaatgctgactcgacagccttttgccattggtggctccggcagcacctttatctatggttatgtggatgcagcatataagccaggcatgtctcccgaggagtgcaggcgcttcaccacagacgctattgctctggccatgagccgggatggctcaagcgggggtgtcatctacctggtcactattacagctgccggtgtggaccatcgagtcatcttgggcaatgaactgccaaaattctatgatgagtgaaccttccccagacttctctttcttattttgtaataaactctctagggccaaaaaaacgaaacc

SEQ ID NO: 362417 - DNA, 1414 bp, Homo Sapiens
  misc_feature (253)..(253): n is a, c, g, or t
  misc_feature (304)..(305): n is a, c, g, or t
  misc_feature (389)..(389): n is a, c, g, or t
  misc_feature (400)..(400): n is a, c, g, or t
  misc_feature (403)..(403): n is a, c, g, or t
  misc_feature (434)..(434): n is a, c, g, or t
ccgcgggccccgcacagaggaagcacgaagtggatgtaaaattatggcctggattatacttaaggctgggtggtgcaaccgggtggcccccgacctatcctcatacggcgttgtgaaggcctttcagtcacgcccgggtgatagctctggttagcgatcctccaaccagggacacagaggagatgacagtgcagtgaccccgtacccaaataccctaccacttttcttcgctggccgggaacggacaacgacngtttggcaaaactttttaaggaagaggtgcggcggtcttgtctcttacatnnccggggctgaaaaggttctttaagcatcggtgagtaaaggttcctaacactcggaacgcttacgctacgcgctcgaccacgganaagcatttagnatnttaccatgatagttgggacccaagcggttgntagtgaggaccccaccgccctttggggttggttggttgacaaacgccgtcctaggtccttgggttcaatgattttggcaggcccggacggcgcggggtcccccctagaggatatggcgaacccccccttggaatccacgtcgtgcggaggggggcccccctaaggggggaggctttttattttgcccaaaaatttgggggaaaaggaagaaaattctggggggaaggggttccactccattcataggaatttttggcaagttccaatggcccaaggatgacttcgatgggcccacaccgggcaagctgtaatagtgaccaggtaagatgacacccccgcttgagccatcccgggctcatggccagagcaatagcgtctgtggtgaagcggcctgcactcctcgggagacatgcctggcttatatgctggcatccacataaccatagataaaggtgctgccggagccaccaatggcaaaaggctgtcgagtcagcattcctcccaggggttccatatacctgacgctccttcacgttggtcccagccagctaccatgagatgtgcagacaagtcctctcgatatttatagctgatatgttctcaccacatttgcagcagccaaaacaagtggaggttcctccagttctatcccatggagctccagctggtaggcggccatgtcggccacggcttgggcatcagcagctgaaccagagagtgcacagtagatgtgctcgtgcagcggggacagcttgtcaaacactcggttcaccaccgcctcgcctgcagacactcgggaatcagaacccatcacaacgcccccgtcaaactccactgccatgatggtggtcccgaagtggacttctcccgcccggggtaagtccccggttggtgctcccgcccgcagcaaacctgcaaggcaccgctctcctcgccgcctggggcactggtttccaacctgggacagcgcacaacccgct

SEQ ID NO: 362418 - DNA, 1179 bp, Homo Sapiens
  misc_feature (201)..(215): n is a, c, g, or t
cttgcggccgcggtgcggtcggtgcagcgtggccaatgcgcggcgcgcgcgggggacagagcaggaggcggtctgtcacctcggccactgctgacctgggctggcctcccccagccctcccgtggcggagccggcagcgatgctacaggcctaagttattgtttgcataaaaagaatcatgttccctgtgtacatttaagnnnnnnnnnnnnnnncggaaatgtcagaattgtatggaaataaaacttgtttgaaaatttggaatagtgctgctgccagcttatttttctggtacttgtattttcacatgttaaatgatctttatatatgttgaattaacaaatattttgagtttctgagaaaaaacaaaacatattaatggtattgaaatgtgttagtagtctggctgtgtgcccaaaattctgtttcgcagcaaaagtgaagacctgtatgtaaagaaagtataacaattatttctttgtattttaggggctttaaccggaacatcgtctagctggtgttaggaatgtttgcttaatttccagacttttttttaaaaacacatcgtgggttttttgaggctccaacctgattagtgcatggtcagccctcaatgaaggctgaggcatctctgactgaggtgtttttgtttggttttgctttttaaaatcatgtatttgctacaaagcattgtacttgtctcaatgggaatggtgtaaaaaaaaaaaggccttatgtgatctgtatcctagtttaatacacgaatcctggaaaaacacccctcttttcccccactataatttaaccttgtccggcccccccttgggccccttcgaaaaaattcttctccctaaaaacccatctccttttttgcccccccacccgggtccccaaattacgggctaatgtcggaccccctggtttcccccaacctttcgctctcccctttaagggaaaaatttccttgggcctccattaaaacaaaggggcgccttggggaatttttccccccccaaattaaaaacaaaacaccgccccgggggcgggcaacacccccgcaaaccccttttcttgtaaaacccaaattcccccaaaacggggaaattttttggagaaggggccaatttacacggggggacctcttatccccacacggggaattttccaacccccctgcga

SEQ ID NO: 362419 - DNA, 475 bp, Homo Sapiens
aaaaaagaaattcatttgtttaatattttcggtcttggggaacccgcgtatatggagggcctgctacatagagaagactgagggatattctgtgcatccgtttctacggatcctctaaatcggcctttgttttcagccaggatttagtgcccagctgtgtcctttggaggccccacatggagctagcaaagtttgctaaatcgggttttgcaagaggactgtctgctccatactgggagtagttaccgcaaactgccctatgaaattggttggggttcttactgttagcatgtttattactttatcagggctctctgtaggagagtctatgagaaaatcttctggtttctgctgaaagaatcgtgttttgttggggtttttttcccgaaaaatattatttttaaaaactcttctgtgccctgtttaatctctcccttggatccaccttctgtgtgctcataaatcgtaaatctgt

SEQ ID NO: 362420 - DNA, 2391 bp, Homo Sapiens
  misc_feature (1681)..(1681): n is a, c, g, or t
  misc_feature (1707)..(1707): n is a, c, g, or t
  misc_feature (1812)..(1812): n is a, c, g, or t
  misc_feature (1916)..(1916): n is a, c, g, or t
  misc_feature (1994)..(1994): n is a, c, g, or t
  misc_feature (2138)..(2138): n is a, c, g, or t
  misc_feature (2143)..(2143): n is a, c, g, or t
  misc_feature (2163)..(2163): n is a, c, g, or t
  misc_feature (2190)..(2191): n is a, c, g, or t
  misc_feature (2204)..(2204): n is a, c, g, or t
ggcacgaggatttttaatcgctttgataatacttccaaattttatgatttttctgaaggaaataatgcaaacattttaaatatgtttctccccctttccaaaaactgttaaactaatgagcaagtaacactaactttgaatgtctctacaatacccgttgataactcagtggagccaggctttggggtagcggccctgagcttgcagggtttctcgccactggggctgaccacgcccccagctgtgaccgtgggtgtggctggctctcggccctgcccagctttgttctgaggacgtggtgacttcctgaacatcagcttcaatcctccatcattaatgtgaagcaaaacacaaaaaccgccccaatccctcaggattccttggcatccgaaaccagcatctgcacctaaacccatacccacccgtgtgcgcccacagggggatgtgtccgaatgggcagcttaaaatgtggtcacctgtgggggaaactcttcaggcacctgaagtgagaacccagctgtccgtcctcaggccggcctttcttccggcgacacccgtccatggctggctgggtccccttcgcagtgtttgtctgtcttgacatctaaaccccggcgtgtgcagtgcccatcttccaggactaccttattttccagaattaaacctgttttataattcaagttaatgcaaatgactgtcagttgccaaatatcttgatcctatgagtgtagttgatgactgtttgttagtcagtagagtaaaatgctgtgtccacggggtgtcacagcctcaccataccctgttgaggtgtgaaatgccccgtcagaaattaaatacaaacttaaatgtgcctattggtgtctaaacttcatacaatgtaaggtcagattccttttaggaatactgggtgctgtcaccaggtttgatagttagacttaaaaacttgaaattcactttttggggggagggatatactgaaatagagagttgagacttgccagttgggggaaaatagcatttaaaatggaaagctgtgtttggaaaattgtgtatgagtatttttgtattaaaaacattttaaaggcttttttcttaacttaaaccgaaccacgctgcagcccgcgcttactcccccccgtgccggtgtctctcctactccgcattaccaccctcctccttccttttacctcggtatcccccgctcctccgccgccccattgcttactctagggttcgggccgccccccggcccttctaaaaaagcttttctctaaaacaccttcttgttttgggggcccggggcgcccctcaccctgaggtccacccgaaccctgtgcccccactatcctctgtttcccctccatgaagatactcctcgcgcgcacatcagaacaaagcccgggctgtggtatttctctccacaccaaatacaacagacactgggccgccgcgggaggcgagaaactcacaacgcgcgctttcttcgcaccacacacttcctcacagaaatgggtggaggctcctcttcgaggagggtggttatctgtctgcggcgtgtgtctttctatcttacaccacgcggaggcattctctccacagcgcccggcgtcgcgcttctcacgtttatcatctcttatattgtatatgacgcgctcccctccgcgcgcgtcgtcttgtccancatatgtctcacccgcgagcacccgngatgttgctgtgtctcggccagccttcctacgtatatataagacccacatttgttccgcgcgccacacatctggtgggagacacgcgtgctacactctacacacnaacacgctgtcgttatctgccactatacacacacctcctttaaataatattctcgcgctcgcgccgcgcgctccatctcgtgtggcaaccatccccgtgtatangcgcggcgttgcttgtctgtccgcgctatactcatcaatatccacatttgtcgcgtgcgcccgcgggcgtgtcgccantgaatcacacgcgagcgttgtgtgggtgtccacgtcgaccgtagagcgcgctcgtgttacatcacttcttgttgttgcgcggctgtcttcacccgacgcgtctcgtcagatatctctactgaaatgtggtgcgtgtcgcggggncgagnagacactcttctttcgactnactctacctgtgactatatatgtgtgnnctcgttccgcctnactacgcatttagcacactatccctcgttagtctctcgtctccccataatacgagtaccacgcgctcgtctgtcatatcagataggatacatagtctggggcctctcgtatgattcatttcgctcgcccgccacgagtaacaatcttgcgttcccaccctccttcgtccctctgtcgttggaaggcc

SEQ ID NO: 362421 - DNA, 598 bp, Homo Sapiens
ggcacgaggatgagggcaagaactgctcacacctgaaagaccactgccgcacgaccccctgtgaagtgattgacagctgcacagtggccatggcttccaacgacacacctgaaggggtgcggtatatttcctccaacgtctgtggtcctcacgggaagtgcaagagtcagtcgggaggcaaattcacctgtgactgtaacaaaggcttcacgggaacatactgccatgaaaatattaatgactgtgagagcaacccttgtagaaacggtggcacttgcatcgatggtgtcaactcctacaagtgcatctgtagtgacggctgggagggggcctactgtgaaaccagtgagtctgccactctttggggagctctgggatgtatgggtcatgttggagggatcccacttcaacgtgggaaaactttctttgtactggaaatctctggaagcaagaccgcagtgatttctgcactgggacagtatcacttgtgtctcatttgcatttatgagtcctgatgatagcttatggggaggagcttctgctgaggacctatagaattagactgtgtaataaatattcctgcttgcaaggaaaaaaa

SEQ ID NO: 362422 - DNA, 497 bp, Homo Sapiens
ggcacgaggctaagccccaggactgagggtcgtgcatcaccactcgggtgtcccgggaggtgccctgggcccggggacctcacaggcaggacggcgacactaatgcagggagagggagtctggccccagcttttcctatcagaggcgattttccttcaccaggggatgggcaggaaagaggcaggggccccagaagcttctgtccctcatgcctgagggcacgggggacacttggaggctgctgtcaccactgtgcgtccaaggccatgctctctgcgggtcagtgcctgagtctcgcctccctgctggtccctgaagccccctcagaagccctgcctgtcacgtcggcatttgtgagacctaccctgtaacgcctgcccctctcagcccaacatcagcttcctctttctcccttgctgtagacaggctggattccagtgttgggacagccatctccagaaacctgacttaagagagtaagatgcaaatcgtaaaaa

SEQ ID NO: 362423 - DNA, 880 bp, Homo Sapiens
  misc_feature (573)..(669): n is a, c, g, or t
  misc_feature (674)..(720): n is a, c, g, or t
caggcagggccttctgcagactgatcccaacttgccctcaggcctcatcagccacttcttccagcctgatccccaatcctcctgtatttattcattaaacttgaatccattctttcctgcctcctaacctgctgacctcactcatgcctttctcccatccacacgtcccaaactaacttgaacttcaaaacctgttgtgaatatcccccttcattccttcctcctttgaactgggccctccccatccccactggcacttgttatgaggcctcgcgactgtatttatttctgtggctgtttcatcaacactgataggccatgaacttgagacaaagaactgaagcccacccagctcagtgcccctgtccctgcagtaccaaatcccacctctggcacacatgcttttaatcaactctaggatacatttctcaaaattcaacatctcccacgagatgcatatcatggtttaattggcagtgagttttccttcttagagaggcagaaaataaaagtgttttaaatccatgttatcctaaacctgatgaaaaatggaggccaggtgccagggatcannnnnnnnnnnnnnnnnnnnnnnnnnnnnnnnnnnnnnnnnnnnnnnnnnnnnnnnnnnnnnnnnnnnnnnnnnnnnnnnnnnnnnnnnnnnnnnnntcccnnnnnnnnnnnnnnnnnnnnnnnnnnnnnnnnnnnnnnnnnnnnnnntagttggatctggtggcatgtgcctgtggtcccagctactcaggaggcggggggatcgcttgagcccaggagttcaaggctgcagtgaggtgtgattgcaccacggtattctaggtgctcagagctcaggagtgacaggagcaagcccctgtcttaaaag

SEQ ID NO: 362424 - DNA, 896 bp, Homo Sapiens
cgatatttgcccttccaactggaagaactccaaggtcagggccaccgacaaccacgccaccgtgaagagatgcttgagttatccccatgccgtctccgggaaatgcagaagccgggttgtgaggtattgttgcaatgaaaataaatacattccatggggctcacacgttgctggggaggcctggagtcaggtttggggtttttcagatatcagaaatcccctttgggggagcaggatgagacatttggatagaacagaagctgagcaagagaacatgttggtttggataaccggttgcactatatctgtgagctctcaaatgtcttcttcccaaggcaagaggtggaagggtactgactgggtttgtttaaagtcaggcagggctggagtgagcagccagggccatgttgcacaaggcctgagagacgggaaagggcccgatcgctctttcccgcctctcactggtgcgatggaaggtggcctttctcccaagctggtggataatgaaaaataaagcatcccatctctcggcgttccagcatcctgtcaatttcccttttgctctagaggatgcatgtttatttgaggggatgtggcactgagcccacaggagtaaaagcccagtttgctaggaggtctgcttactgaaaacaaggagacctggggtgggtgtggttgggggtcttaaaactaataaaagctggggtcggggggcttttgcagctctggtgacattctctccacggggcacatttgctcagtcactaatccagcttgagtgtccgtgtgttctgcatgtgcaggggtcattctagtgcccggtgtgttggcatcatctttttgctctagcccttcctctccaaaataaaatcaaataaaggaaaatctccacccac

SEQ ID NO: 362425 - DNA, 1592 bp, Homo Sapiens
tgttgtggtgccctgacttgaaggtgtgcagggtggcaggggaaagtatcaggtgcctttgctttctgtcctctcctcgtcagccgtctgagcgttgctgacagcgcgaagctgcccctgggctgcaggcttcaccgacaggaccaagcgtttgcggaacgtctcacagagcacgatgtacacaaaggggttgaggcagctgttggcatagcccaagctgatggccgcattggataagtagacaaaggtgagggtccgggcggctgatggacaactgggtcagctgtagcacatagtaaggtgcccagcacacaaagaagaccagacagatggcgatgcctgtgcgggtcaccctctttgtccgcagccggatgctgcgctgggaggcgggggccactgaggacgtcatgcgctgcaggatcctcacgtatgcggctgtgatgaccacaaaaggcagggcaaaggccaggaaaaactggtacagggtgaaccagtagaggtcagtgtctgggttgggcaggcgtatgccgcagcccactgcacctcctgggaaggggatgagtctggcatacagccacacaggggtgatgctgatgaaggagagggcccacaggaggcagatcaccagggtggccacagagggcttccggaacttcgtggaagagatggggtggacagtggccaggtagcggtcaatggccatggcggtcaggatgtaggtgctggtgaactgactattggcatccatggccgtgatgagggtgcacatggtctccccaaagtgccacaccccattgcccatgagctggtggatcatgaagggcatgcccaggagaaagaggagatctactaccgagaggttgatgatgaagatgtcggggacgttgttgcaccagtgcagcttggacttcttcacgaccgcgaagatgaccgtggagttcccgatgatgcccaggaggcagatggtgccgaacaccgaaggcatgatgatgttgatgtaggagatgctccccgtgcgaggaggtgatcctgccgaagtgaggttatcggggccatcagaggtgttgctggcattgggaccagtgggcagcagcgaggcttccaggtccatccagccagtgccggtcgcctgctcccacaaccgagctgagctcccctccacccacgcaggctgcggcagcctccagcgcctgccaccttgtcccggagcgcaagccccgcagtcgggaagggggtcttcctccgtagcctggcagccgctgccgcctccaagcccaactgccctccccactcccttcttcatggctcccactgacatcacctagacacattaacattcggaggcagatgcacattaacctcttcagtcccaggctgtggctggcttccacttctgaatgcctgcagagccccagggccctggggaagctgggagggactggacacaggcagccccatcaggaaagggatctccttcccactgacacttgggattgtctcgtgtgcttacaggggctgctgcttgccttgccctcgtgccgaattcggccacccaggcctcgctaccataacccggaggagtactggcccga

SEQ ID NO: 362426 - DNA, 1260 bp, Homo Sapiens
gcctgggtggcgaattcggcacgaggcggaggagcgggtcccgggatgtgaccggggctctgcttgtggctgcggcggtggcttctgaggctgtcgggtctttgcgggttgcggaagggggccccaatacccttcttcttcaggtcttaagaagctggccgtggtgcaataaggaacttaaaacaatggaagagcggaaagtgaagaggaggagtcctaagtcttttagtgcccactgtactcaggttgtcaatgccaaaaaaaatgccattccagtgagtaaaagcacagggttttcaaatcctgcatcacagtcaacttcacagcgaccaaagttaaaaagagtgatgaaagaaaagaccaaacctcagggtggagagggcaaaggcgctcagtcaactccgatccagcactccttcctcactgatgtctcagatgttcaggagatggagagagggctgctcagtcttttgaatgatttccactctggaaaacttcaagcatttggaaatgaatgttccattgaacagatggaacatgttcggggaatgcaggagaaattagctcgcttgaatttggagctctatggggagttagaggaacttcctgaggataagagaaaaacagccagtgactccaatctggataggcttctgtcagatttagaagaattgaattcttccatacaaaaactccatttggcagatgcacaagatgttccaaatacttctgctagctaaaatgaaatgtagtttgctttcttgtgatttgaagagaagcagcagtctttacttttccagccaaatccagtagcagaatcatcttccacaacaaggaattaaagtaattaaagtgcaagttcaatgatcgttttcacttactgcttttagtaaatgtgactcgctgtaattcgccataactggaggcctaggccttgttgaaggcttcatcaggaaatgtgacgcagagattgtgctgctgtgcttcatattgttgccttatgggattatacttgaaatgcattgtgctgatgttcttgacagggcggagggatttctctttcctgagctcaccaaacttattccagtgttgatcgcaagctgttgatgcacaggcgtcttgtggcaagcccagcttcagtttatgttagacaatcagtacacatgctggtgtgttttccaatggccagtgataagaaattaaataagtatttgtgagatttgctattttttaataaagtaattgttttaaattaaaaaa

SEQ ID NO: 362427 - DNA, 531 bp, Homo Sapiens
  misc_feature (186)..(201): n is a, c, g, or t
gcccggctcgggcagaaaagctggcaggagaggagagagaaagtcaacagattgagtttttcttttaggaggaaaccattggcttctggttagagttctaagaagggaaactggcgtgtgagtaggcagcagtttcagtctattccccctgctgtagctcttgggctctcacccctctttatgttnnnnnnnnnnnnnnnngggcaggaaagcatccaagacactttaaaatgagggtttgcaggaaaaatgacctggtggacgcatttcctaggaggggagagtcaggtgtgtgggtggctcccagtctacacaccccgacaatgcctaccttgggagaggggcagttcacaggtgggagagttgatagaggctttggtcttgggccctggacctcccaggagcttctcctagactttggagggcctcggggtgcagaaattgggcaatgtacctcctgcagtggcccagacttgttaacacacccagtctgcttgctgcttctttccttattactttttcttattcatt

SEQ ID NO: 362428 - DNA, 959 bp, Homo Sapiens
ggcacgaggcgtgctgctgctgctcctggcgggagcccccggcgcgcggcccactcccccgacctgctactcccgcatgcgggccctgagccaggagatcacccgcgacttcaacctcctgcaggtctcggagccctcggagccatgtgtgagatacctgcccaggctgtacctggacatacacaattactgtgtgctggacaagctgcgggactttgtggcctcgcccccgtgttggaaagtggcccaggtagattccttgaaggacaaagcacggaagctgtacaccatcatgaactcgttctgcaggagagatttggtattcctgttggatgactgcaatgccttggaatacccaatcccagtgactacggtcctgccagatcgtcagcgctaagggaactgagaccagagaaagaacccaagagaactaaagttatgtcagctacccagacttaatgggccagagccatgaccctcacaggtcttgtgttagttgtatctgaaactgttatgtatctctctaccttctggaaaacagggctggtattcctacccaggaacctcctttgagcatagagttagcaaccatgcttctcattcccttgactcatgtcttgccaggatggttagatacacagcatgttgatttggtcactaaaaagaagaaaaggactaacaagcttcacttttatgaacaactattttgagaacatgcacaatagtatgtttttattactggtttaatggagtaatgggacttttattctttcttgatagaaacctgcttacatttaaccaagcttctattatgcctttttctaacacagactttcttcactgtctttcatttaaaaagaaattaatgctcttaagatatatattttacgtagtgctgacaggaccccctctttcattgaaaggtgatgaaaatcaaataaagaatctcttcccatgag

SEQ ID NO: 362429 - DNA, 1627 bp, Homo Sapiens
  misc_feature (42)..(72): n is a, c, g, or t
  misc_feature (259)..(319): n is a, c, g, or t
  misc_feature (1244)..(1440): n is a, c, g, or t
  misc_feature (1501)..(1566): n is a, c, g, or t
ggcacgaggcctcttctaccctccccctcttctttcccattnnnnnnnnnnnnnnnnnnnnnnnnnnnnnnngggcaaggagccccgcggcggcctgggcagcgcctgtgcagacctccctgcaggccgcactgccaactgctgcatttgttgtgttttttaggttgcaattggtgaagttcacactttcattgtaattttagcgtgtggggttttgtccctttttttgttgttgttagctgtgtacagaatgtgtaannnnnnnnnnnnnnnnnnnnnnnnnnnnnnnnnnnnnnnnnnnnnnnnnnnnnnnnnnnnncttcttggctaattcttggcagggatctttctggaggaaaagctggggccagccagggcaggagaggtgtgaaatctgccacgaggggcctgctgtttgccacccagcccaacttcctgttgctggcccctgccctctgcccttttgcctgtcctcaggccgctggaacaaaggaaggacagctcattcctcatgggcgatcactccgcatctatagggtcgagcctaggggagcttgagggagggctggggcctccttgtcctggatttccagctctccccatgccccctccctgagcaccaccggcaccgcctcccaaacagggctgctggtttccgcagccactgctccacctcccccaaatcgtcatggaaagggtggagaatggaggggaaccaggcgtccttggaggcagcttgggagggtgactgtgtagtgtcacccacaagggaggctagggcaatggagcaggccaccagcagcagctgtgcagcatggaactcaaggcaaggctccgaggctgggggatctgcttggagttttctgccccccaccccaaacttctgtcgaggagcaagggcttgccagccaagtcagaaggatttgaacccgagcagcccaatctttccagccctccccctaccgacctctggcctggagacgcagcagcctgtgtcctcccagggcctctggtttgttgtattatagtatatttcgctgtggaaaatgtcacgtttagtcaccttggagcccactcacctggtcctgttgttttaccccatcccttctctcgcgcgcctattgatttgtttctgaggagagtacaccgttcactattgtagagtaacccctgtgactcaatattaccatagtgcgatgtcgttttgtgctattttgaacaattaaaagactttttttgaaatnnnnnnnnnnnnnnnnnnnnnnnnnnnnnnnnnnnnnnnnnnnnnnnnnnnnnnnnnnnnnnnnnnnnnnnnnnnnnnnnnnnnnnnnnnnnnnnnnnnnnnnnnnnnnnnnnnnnnnnnnnnnnnnnnnnnnnnnnnnnnnnnnnnnnnnnnnnnnnnnnnnnnnnnnnnnnnnnnnnnnnnnnnnnnnnnnnnnncgggggggggccgaccccctctcaaaaaaagtttcctggggcttttttgtgggccgggggnnnnnnnnnnnnnnnnnnnnnnnnnnnnnnnnnnnnnnnnnnnnnnnnnnnnnnnnnnnnnnnnnncttgggtgttattcactcacacaaaaaaaagcccgcgggggccgaaccaacggctttattt

SEQ ID NO: 362430 - DNA, 739 bp, Homo Sapiens
agaagaagctattaatcgatgaagcactcttcaaactcaggaagttttggacaggcatggttaacttccgcattgatgaataggataatgctaacctgaaggcaatagtattcttcagtccagatcatccaagcctagaaaacatggaacagatagagaaatttcaggaaaaggcttatgtggaattccaagattatataaccaaaacatatccagatgacacctacaggttatccagactactactcagattgccagctttaagactgatgaatgctaccatcactgaagaattgtttttcaaaggtctcattggcaatatacgaattgacagtgttatcccacatattttgaaaatggagcctgcagattataactctcaaataattggtcacagcatttgaaaactgtgactgcagtgctgtaaacttaactgttctttgccagaacacaagacaccaaattgaactcactgcttttgaggcatctggaaatttttactttaaaaagtaaccagaatccaaggtatttttattttagcttcccttaagaatttttgaagtgactgggcaggcagcagaaattaaatgaatttttcttcctgattcctttaaatgaatatgaaacactacaaatttattcttggtgaagatgatacctgaagctgtcacctcttgattatctaaactaagcgctcattctattttataaaacaaataaattagtctcttttttctga

SEQ ID NO: 362431 - DNA, 436 bp, Homo Sapiens
ggaagacaagagtaatagcaacctgtattgttagtatttaaccaaataggctaaaattttaatcaggtaccttatgtattaaatagaaatcggaatgtaccataataaatccaaactctcaattacgccatggtaattcagtcactaaaatatgtaaagatagaaaattttttaatttaaagaagtgtgaaacatagccattgattgatcagaattctggaatctgaatattaaaaccttacttagtgactggaatggtatatgctccctccaaaagtttatctttgtttattgattaaaggtaatccttactttctttgtattacttaggttcttaattaaaggtaatccttactttctttgtattacttaggttcttaaatttctatgataaacatgtattgctaaataataaaaagtatataaaaattgcttc

SEQ ID NO: 362432 - DNA, 864 bp, Homo Sapiens
agcggttctgcgagagtgagcgcgcctggccggacgggaggaaagtatccgttccgccaaggggggaaaggaggagctggagacagattgtaggaccgagcgcgggcaggcgggaggcaacggagctaccagccgctcctctctgctatatgaaatatgggagacgacagaccgtttgtgtgcaatgccccgggctgtggacagagatttacaaacgaggaccacctggcagttcataaacacaagcatgagatgacattgaaatttggcccagcccgaactgactcagtcatcattgcagatcaaacgcctactccaactagattcctgaagaactgtgaggaggtgggactcttcaatgaactagctagctcctttgaacatgaattcaagaaagctgcagatgaggatgagaaaaaggcaagaagcaggactgttgccaaaaaaactggtggtattcagacctaggctatttttattgtgctttgggataattttcttaattggttaaaacacaaaatcatgggcttagtagagtaaaaccagtaaaaccagatagtagtcactaatcccagtcagccattcaggtctttaggagttccagatgatggatcagcacaagtctgtcgtcaccgaaaattagtcctcttgttcttccaggggagtattagtttaataatcggttttttaaaaaatatttatattataaatatgttgaagatgttaaaaggtgataaattactcagattttgttggataacatatttgttgccaaattccactcttttctgagctgatcagacttctcagctacactgtttttttgaatcagcaagtcaataaacatttatcaaatttccactc

SEQ ID NO: 362433 - DNA, 761 bp, Homo Sapiens
  misc_feature (406)..(432): n is a, c, g, or t
gaggcctgggtggcgaattcggcacgaggggcgctttcggttttggctgggatcatccgcggcggccgggctcgtggggcgcctggagtgagggttctggttcccgccggcgaggattgttaaaatgagtcttcggaagcaaacccctagtgacttcttaaagcaaatcatcggacgaccagttgtggtaaaattaaattctggagtggattatcgaggggtcctggcttgcctggatggctacatgaatatagccctggagcagacagaagaatatgtaaatggacaactgaagaataagtatggggatgcatttatccgaggaaacaatgtgttgtacatcagtacacagaagagacggatgtgaagacaccaagagagcaacgcttttcatagttggatatannnnnnnnnnnnnnnnnnnnnnnnnnngcttcttttgtgatacaatttgtcctctttttataatagttggtgatttttcactgacatgtgagtaagataaatgtatacaattgtggatttaattgtgaaatgttctttcacttgtaagtttcagtcattttcttttacctcgttgtcagtgtacagaatgctaaaataattaaaaaaagacaaaatatacctcttcctacaagattatttaacttaagtttcgagaagggtcatttcatttgacttgcttttcttatccagctaaaatgatgcatatattttatatattggatggacatataattaaaacattttggagggaaaac

SEQ ID NO: 362434 - DNA, 939 bp, Homo Sapiens
  misc_feature (356)..(364): n is a, c, g, or t
tttccgggggcagtgttttaatttatccatgtacataggcaattatcataatttgaaggacactttttacttattagactataagaaaaactgtacagaaagtttatactataaaattacatccctaagtgattagggtcctcagtaacacagaaataagaaattgaaaagggtcattgctcggcaatccacataactacagagtagagcgcaagctattgttcgtgatcagaaagagacttcataaaaacatcttcacatattccctagcattatgccctactagtaaaaggaaggcctatgacaatgccattgtttattttgtgtaacgcagcccttctatttccctcaaaagnnnnnnnnncctgctataagataaagaaaaggctgtatccctaagatatatacctaatgaagattatctcaacagaagctccaacgttttccatttttcactgtctttcctgaagttcacctggatgttccacagcaattttctaaccctttcattgttgattagcctactaaaagtagaattctttagcaacacacaatacaaaagacacaggctaaaacaggcctcacaaatacactttgaaataggtatatttggatataaatataactttccagtccattattttttctaatgactaaactctaaatttttaaaaatggaagttttcaaaccaacgatgtgttaagcccattctcatgacacattcattttaacttctcattcagtatgggaaaattttatttcttccctttgtcttgcagaataatttaggttcccaccctgggcacgattcaccaaatagagtaagaccacagataaaagtgacaaagaaacacaggcaatgaagaacacttccaaaaacaaatacccccgagaatccagtatcataccagcaatgatggaaatgatggccaaccccc

SEQ ID NO: 362435 - DNA, 1152 bp, Homo Sapiens
acaaacaaacacccacaaaacgacgcccccgaccagacacaaagctggtaccggtccggaatttccgggatgccgatttaaactgagtgaggtgtgcagtgggggaagttgattgggtctagaccacagaactttgaggaacttgcccagagccctgcatgcatcagacctacagcagacattgcaggcctgaagaaagcaccttttctgctgccatgacaaccatgcaaggaatggaacaggccatgccaggggctggccctggtgtgccccagctgggaaacatggctgtcatacattcacatctgtggaaaggattgcaagagaagttcttgaagggagaacccaaagtccttggggttgtgcagattctgactgccctgatgagccttagcatgggaataacaatgatgtgtatggcatctaatacttatggaagtaaccctatttccgtgtatatcgggtacacaatttgggggtcagtaatgtttattatttcaggatccttgtcaattgcagcaggaattagaactacaaaaggcctggtccgaggtagtctaggaatgaatatcaccagctctgtactggctgcatcagggatcttaatcaacacatttagcttggcgttttattcattccatcacccttactgtaactactatggcaactcaaataattgtcatgggactatgtccatcttaatgggtctggatggcatggtgctcctcttaagtgtgctggaattctgcattgctgtgtccctctctgcctttggatgtaaagtgctctgttgtacccctggtggggttgtgttaattctgccatcacattctcacatggcagaaacagcatctcccacaccacttaatgaggtttgaggccaccaaaagatcaacagacaaatgctccagaaatctatgctgactgtgacacaagagcctcacatgagaaattaccagtatccaacttcgatactgatagacttgttgatattattattatatgtaatccaattatgaactgtgtgtgtatagagagataataaattcaaaattatgttctcatttttttccctggaactcaataactcatttcactggctctttatcgagagtactagaagttaaattaataaataatgcatttaatgag

SEQ ID NO: 362436 - DNA, 786 bp, Homo Sapiens
  misc_feature (725)..(725): n is a, c, g, or t
gggagagccctgcatgcatcagacctacagcagacattgcaggcctgaagaaaggtggtcacaagaggggtggaacattcctgcaaatggtttcaatatatgcagatgtctcgatataggaatgaaattacgtctttggaacaacttaaataagtcaaatatacttggagctttaaaaattaaaaggagagagattcgagcaccttttctgctgccatgacaaccatgcaaggaatggaacaggccatgccaggggctggccctggtgtgccccagctgggaaacatggctgtcatacattcacatctgtggaaaggattgcaagagaagttcttgaagggagaacccaaagtccttggggttgtgcagattctgactgccctgatgagccttagcatgggaataacaatgatgtgtatggcatctaatacttatggaagtaaccctatttccgtgtatatcgggtacacaatttgggggtcagtaatgtttattatttcaggatccttgtcaattgcagcaggaattagaactacaaaaggcctggtccgaggtagtctaggaatgaatatcaccagctctgtactggctgcatcagggatcttaatcaacacatttagccttggcgttttattcattccatcacctttactgtaactactatggcaactcaaataattgtcatgggactatgtccatcttaaatgggtctgggatggcatggntgcttcctccttaagtgtggctgggaatttcctgcattgcctgtgttcccctcttctggcc

SEQ ID NO: 362437 - DNA, 660 bp, Homo Sapiens
ggcacgaggaggtgtcctgcatggagtcttgtgaaatcgcgtggactgcaacacccagcagcgcggtttcacattgagtgtttagcaagttaacgtttgtaacgtgtgaagtcataagatgcaggactggatgactgccctacccacaagaggcctaggatcttcccaagttgcactacttatgggacaggtctgccaagcagcccttgtgaagataaaggtggtgatgagttcctcccacaaaacaagagcctcagagagactggaaaataacccccggtgccttttatcaactggccagcagatggcagaagcaagccaggaacagagcttgtgtgcggcggctgtggcagctacctttgaaaatcccgtggtgtttggtggtcgtattaagagatctttggtgtaggagcatccttcattctaagcaggattctgaacaaactcagaactggctttgtggctgggaccgaggacccaggggtcacggctgctcccagtgggggctgatgcccatttgtttgtgcaagttggtcccctgtagggaggacaaatggtctgtctcggactttctggcctgtgcaccaaggcccagggatggaagtggggcagcatgtccccatcattaaatagggcgttcttgataataatcccctaagg

SEQ ID NO: 362438 - DNA, 728 bp, Homo Sapiens
tttagcttgcaattcttattacatctttattatcagtcaaggtcacagtcatattaaaaatatataatttaattctcaaataatgtctttgttcctctttttcctaaagtcctttgtcaaaagaagtcaaagttgaatatattttgtagctgatatacatatgctgacagacagcacaatgttctgaaatgaaaacagagatattattgctttataaaaagaaacttggtcccagagaggagaaaaatagatagtacacaagagtgacataagaaaaaaagcaaagcattatcggagaattgtttccatttaagtgaaagcagtatctgtgatttttggctgactgctccaagtaccgtgtatctcctacatcagtgctttgaatgtattcttctataaatgcatgttaaattaatgtaacagtaataataaaacaaaaataactatacagcaattagtccaccattaccaaaagggtaacaagttcacaaataatctcctcccaaatttccaaccatgatgatttttggaattgtagtaaggcttccctttgtagatttattgaaaatgtttcgtactcctacaagtttgccctgccttcctataaagagtgaaattcagtttgaatcgactggtggataattttctccatttttcctcaggcaatttgagtttctccaatgaattccaatatgcagcaaagccgttctcatggtaaaagctgtctc

SEQ ID NO: 362439 - DNA, 607 bp, Homo Sapiens
ggcacgagggctgggccctcctaggtggatggccctgccccagcctaacttctgtaccccagcataacctccaaagtaacagccgtgccctgggagcctgttcaacactgaacatatcccacaataacactgttccagcgtcgctggtaaaaagcagaaatggcttcgctggaggcatcgacaaatctaatgcagtaacctcattttacagaagagaactctaagaggataactaacttggccaagatcacatgatgtttctggatgagattagcattcaaattcgtggactcattaaagtagatggccctctccaatatgggtgggcatcatccaatctgttgaaggcatgaagagaacaagagaaggaggaaggaagaattcaccttttttcttgctgcccacctgcttgggctgggacattgcatctcaccttctccagcctttggatgaggatttacaccctggttctcaggccttcaggctctaactggagctacactatcaactttcctgggcctccagattgcagatggtggatcacggtactttttagcctccatcataatgtaagccaattcctaataataaatctctttctctctct

SEQ ID NO: 362440 - DNA, 1290 bp, Homo Sapiens
  misc_feature (1068)..(1124): n is a, c, g, or t
  misc_feature (1133)..(1227): n is a, c, g, or t
ggcctgggtggcgaattcggcacgaggctgaagacggaaatgggcggggctgcgagctagggcgggagaaggagcgcggggaggacgtaccttgtgagatgcgagccggccaacagcttgcaagcatgctccgctggacccgagcctggaggctcccgcgtgagggactcggcccccacggccctagcttcgcgagggtgcctgtcgcacccagcagcagcagcggcggccgagggggcgccgagccgaggccgcttccgctttcctacaggcttctggacggggaggcagccctcccggccgtcgtctttttgcacgggctcttcggcagcaaaactaacttcaactccatcgccaagatcttggcccagcagacaggccgtagggtgctgacggtggatgctcgtaaccacggtgacagcccccacagcccagacatgagctacgagatcatgagccaggacctgcaggaccttctgccccagctgggcctggtgccctgcgtcgtcgttggccacagcatgggaggaaagacagccatgctgctggcactacagaggccagagctggtggaacgtctcattgctgtagatatcagcccagtggaaagcacaggtgtctcccactttgcaacctacgtggcagccatgagggccatcaacatcgcagatgagctgccccgctcccgtgcccgaaaactggcggatgaacagctcagttctgtcatccaggacatggccgtgcggcagcacctgctcactaacctggtagaggtagacgggcgcttcgtgtggagggtgaacttggatgccctgacccagcacctagacaagatcttggctttcccacagaggcaggagtcctacctcgggccaacactctttctccttggtggaaactcccagttcgtgcatcccagccaccaccctgagattatgcggctcttccctcgggcccagatgcagacggtgccgaacgctggccactggatccacgctgaccgcccacaggacttcatagctgccatccgaggcttcctggtctaagagttgctggcaagaagatggnnnnnnnnnnnnnnnnnnnnnnnnnnnnnnnnnnnnnnnnnnnnnnnnnnnnnnnnngaggatgannnnnnnnnnnnnnnnnnnnnnnnnnnnnnnnnnnnnnnnnnnnnnnnnnnnnnnnnnnnnnnnnnnnnnnnnnnnnnnnnnnnnnnnnnnnnnngtgggttgcacaccctggtaaatcccccaggctacctcctgggaaaggccttggaggcccagg

SEQ ID NO: 362441 - DNA, 608 bp, Homo Sapiens
agcctggtaggggaaggaaaataaaagggtgtgaagaaggaatagttttataatctcggaagatgataccaagagcagaggcaacaaatagaggcctggcctccaggtgccggatccagacacctgacctagaatgcctgcccgctatccctgtgacaggaaatatcccctcatgtcccagggaattgcagatgggtcttctatacccttctacctgcccttagatctccatttttatcaaatagtacattgcattttgaagttttgggttttgtccttcatctttccctttcccttcaaatcttttaatggtaagaaagcaagtgaagcttggtgcaagctaaaatttttaaatggtgtggaaatgcaaataataccaagtaaaataatacagatattattaaagtttctggttttgaggtgttgtagataaatgtatttatgtgcctagtggggaatccaatattatgaatatgaaaaagggggcaataaaagggtatgtaaaatatgtatgaagaaaaggtgtacaaaaatttgcccttatgcacggaactctgtttttaagtgccaagcacagaaagccgctaaataaaatctttgcaattgtt

SEQ ID NO: 362442 - DNA, 447 bp, Homo Sapiens
gctgagggctcgcggcgtacacaataggcttcccagaagggttaagaggcagaggtagaagaaatacggactttaatgaagagttttccctttggtataagtgagacccgtggaaacatccaaacagcaaaaggaggccaggatgaaaacggtcaactctcccttatccacaaggccaaaagagggggggccggcttgctgtggtgtggccaccccgggcctaggctgggccgggcctgtagaaggtactcaggaactgcaggttttgcgtttcccctccatgaaactgacaggcattcgggctgacttctgcctctcagtctcgcggtaagagacccaagtttttctagtcctagatggaaataaatttcatctgcctcaggtctctggtataaaaggtgcgatcccagttacctcacaggcctaggcgaggaaaatgccaagagc

SEQ ID NO: 362443 - DNA, 762 bp, Homo Sapiens
  misc_feature (459)..(484): n is a, c, g, or t
cggaagtcgggcaggtggcgtaacccagaaagggaaggagagccggattgattggggtgagagaggaaggaagcacgccaagttaggcctgggagaactgagggacctgaggagggaggagggagaccaacacagggtgggaaggcggaaatggccaaaccccaggcatcaggtctgtccagaggctgacgtagacagtgaagggtgaagggtaggttttaggagtagggggagttatgattatttggttacattttgggattatttggtctcacaggtagaagggagcctgctggtctctgtgtaacggatggcttaaaagcaaggttgtctgcgtcttggattactgtctgccattcagcctttgccaaaaaatttggcactgatctgcacatttttatagtcatttaaaattgtatgactctgtcaaatgatttaagtaattttggtggatttttnnnnnnnnnnnnnnnnnnnnnnnnnngttgcacaatctaattcaatatttgacttaaaaccaaaagtgaggctctcagattggtaatatggtattcagcctttttcttgtttggcttttgtgccatttgcccctcactgacttgattgaattctttgtggctgatgcctcagtttttctggatcagtagtgctgcacttccacttttcctctccctcattttactgtctttatttttagccttttttctgtgtagccctctaacctgccctttatattttgaaccaaataaaacatttcttgga

SEQ ID NO: 362444 - DNA, 655 bp, Homo Sapiens
tcagctgccaaagtgtcacaggttacccacaggtactaaatgctgaaaagataaatcttccagatgctcatcattttgcccaactattttacaatgatattttgtttaactttatatgaaaatgataatccctatgtgatgaaatattttgatctccaaaattgaattagcaaacaaatcttttatgtgctgagcaacatgaacatggtgcagtttagctatcggaagtaatagcattcatactgggacttacttagttttctgcattcagaaagagcagggcatgaaaggaatgtcattgaagtttagaatacccatgtttgctattagcatgtgctctccccatccgaggcccctgagaatggtggtaaagccaggtagctagtcaggtaggcagcagccctgatttcgacagctctgggattttctctctcatcatcattccctgaaaccgtacattttgacacttagaactgtaactaggattttctttggttaaagttcaaagacattattttattccactcttgttttccagtagtgcttgatgtcatttctggcacctaagtgcttaataaatgttgaataaatgagtaaatgaataaatgaacaaattgaattgaagtaaataaagtatattattatcacctgtttc

SEQ ID NO: 362445 - DNA, 1088 bp, Homo Sapiens
ccctactaagggaattagcttgcggccgcctcggttgcctcccggggccaccccgctgcctccccagccttgccgcgcctcagcgactttcggcgccgccggagcttccgccgcatcgcgggcgccgagatccagatggtcatcttactcattgccacctccctggtggtgctcatctgctccatcccgctcgtggtgcgagtattcgtcaaccagttatatcagccaagtttggagcgagaagtcagtaaaaatccagatttgcaggccatccgaattgcttctgtgaaccccatcctagacccctggatatatatcctcctgagaaagacagtgctcagtaaagcaatagagaagatcaaatgcctcttctgccgcattggcgggtcccgcagggagcgctccggacagcactgctcagacagtcaaaggacatcttctgccatgtcaggccactctcgctccttcatctcccgggagctgaaggagatcagcagtacatctcagaccctcctgccagacctctcactgccagacctcagtgaaaatggccttggaggcaggaatttgcttccaggtgtgcctggcatgggcctggcccaggaagacaccacctcactgaggactttgcgaatatcagagacctcagactcttcacagggtcaggactcagagagtgtcttactggtggatgaggctggtgggagcggcagggctgggcctgcccctaaggggagctccctgcaagtcacatttcccagtgaaacactgaacttatcagaaaaatgtatataataggcaaggaaagaaatacagtactgtttctggacccttataaaatcctgtgcaatagacacatacatgtcacatttagctgtgctcagaagggctatcatcatcctacaactcacattagagaacatcctggcttttgagcacttttcaaacaatcaagttgactcacgtgggtcctgaggcctgcagcacgtcggatgctaccccactatgacagaggattgtggtcacaacttgatggctgcgaagacctaccctccgtttttctactagataggaggatggtagaaaaa

SEQ ID NO: 362446 - DNA, 948 bp, Homo Sapiens
  misc_feature (848)..(884): n is a, c, g, or t
gggaatgtatatatttattataatctccaaaataatttcacttggtacaacgtgcttcttaaaaccatatcaatatcaggctcagaatttaattacaaccaagcaattcacaaaaacactgagcaacaaaacatgcttaatatttctttgagaaagacccttcaaatatgtgtacagcatcactgggagttacacaaaactgttacaaaggtgaccattaagtgccccaaattctgcacttctgacatacatgaatggctaatgtaaccacgtttgggaatctttttacatctcaaaataaagctttctgatgcaacttgccatccttttaaattttaaaggatattcttggtaattccttaggaaagtaaaactacacacactttcagagaaacaataagctgcttagatttttaaaattttttatattatacacttcaattatgggttatttattaaagacttcaaaaaatttatgttatgtttttaaaagtaccaattagtgagggaaaaaagttgaaaatattcaccagcatgttaggttctcctgaaatcacagttttctggataaataaatgtaatatcactaaacaattttcactatgtattttatacatagcctggaaagaacagtattttggactgtaattttcacatcttaaatagtatttttttctttatccctttgataatactaaattctttctcttaaaaatttatatctattttatagatatcaatcttactatgaattttcaactttgactcgaacttgtttatgaaaaatatctaacatctgccccgccgtaatggccgaattcccgggcatatgtccggtacctcgactnnnnnnnnnnnnnnnnnnnnnnnnnnnnnnnnnnnnngccgcttcctcgctcactgactcctgcgctcggtcttcggctcgcagctaagcgccatatatat

SEQ ID NO: 362447 - DNA, 754 bp, Homo Sapiens
  misc_feature (388)..(396): n is a, c, g, or t
gcggccgccgggtgcctgctccgggtctgcggcggcgcccgtgcgggcgagagaaggaggccgagcggtcccacccgccctgctccgagggacccccggggtcccggctggcagggaaggagacctgttgaaaactcttaacgccaacttgaaagacaatcaagtcgcccgagcaaaacccactctccaatctgttttcaagtgtcataaacgctgcactgcagtaagattgctgctcccttaaatgggccaataatttccagctctcgcccacaaattcccccaacaggggatttcaatgtaacgcaattcaaataagtaaaaaccactttattgcttttcgaaaattcgcatgcatttattccgcttaaaatttgatatagggcannnnnnnnngtattaccatttatcgcttgccaagaaataattaagaataggagctcgaagattaattttaaataaaaaatcttctcaaatgaaaatgtcaggtcataaaaattccttttaaatcataacagcatataaatctttgaaattaaccatgtaattacaatgtctatcaacttttaccttgagctttgagcctctctttttaatctcccattcttttttaatgaatagctattttgaaattaaaaagtactgttcattacacatgccccactataatagggtttttatcatatttgctgtatgtaaaaatacttgctactttgtaattattcacacgccgatcctttcctatattgagtgc

SEQ ID NO: 362448 - DNA, 1708 bp, Homo Sapiens
  misc_feature (1441)..(1481): n is a, c, g, or t
  misc_feature (1551)..(1587): n is a, c, g, or t
tgcagtacccccgcagtataaggtagcgaggcctgggtggcgaattcggcacgaggggcaaaccccagtgtcctctcctcgggccgaaacccgtggttcctacaaatgaggagccaggactagaattagtgccggctcagttcggggaagctgcaggagttctggcgtgggtgatggcagcaagctgaccttggtacccaccgtggaagcgggcctcatgtctcagtgcctcaaggccggaacagtccggtgatgcaagctctcgagagtctcacggagacgcaggtcagtgacttcctgtctgggccgttcgccactgacactggccttgcgtgtgggcgaccacatgatgttcgtgcagcttgcagctcgctggcccagcatcgctcctactgcaacatcctgccagtgtgctggcctgctgcgtggccgccgccgctgctgcgcggggggaccccagcatagcctcccccgtgtcctcgccctgcctggccggtgtccagtgccgcccgagtccccccggtgcccaccagcccgtcccctgcatctccctcgcccatcacagccggctccttccggtcccacgcagcctccaccacctgcccggagcagatggactgctcccccacggccagcagcagtgccagtcctggtgccagcaccacgtctaccccaggggccagccctgccccccgctcccgaaaacccggcgccgtcatcgagagctttgtgaatcacgccccgggggtcttctcagggaccttctctggcacgctacaccccaactgccaagacagcagcgggcggccgcggcgtgacatcggcaccatcctgcagatcctgaacgacctcctgagcgccacccggcactaccagggcatgcccccttcgctggcccagctccgctgccacgcccagtgctccccggcctcaccggcccccgacctggcccccagaactacctcctgcgagaagctcacggctgccccctcagcctccctgctgcagggccagagccagatccgcatgtgcaagcccccgggggatcggcttcggcagacagaaaaccgcgccacgcgctgcaaggtggaacggctgcagctgcttctgcagcagaaacggctccgtagaaaggcccggcgggacgcgcggggtccgtaccactggtcacccagccgcaaggccggccgcagcgacagcagtagcagcgggggcggcggcagccccagcgaggcctccggcttgggcctcgacttcgaggactccgtgtggaagccagaagtcaaccctgacatcaagtcagagttcgtggtggcttaggatcttcggatcggccaccctcgcccctcgcaccccagcccagggcggcggggactccgagagccccggagagaacgtggcccagccctggagggcaggcggccatcccccagccagaagnnnnnnnnnnnnnnnnnnnnnnnnnnnnnnnnnnnnnnnnnaaaaagttctgaccgttggtttccctggactcttcatgggcttttgcttcgctacctccttcacccttcnnnnnnnnnnnnnnnnnnnnnnnnnnnnnnnnnnnnngtctgtctcctttcacctctgcgccaggtcggtcctccctgccaaaccattccccagctccacatatgtagcagtctctctggatggcggagagtgaaggagacggagaaaaggcgcccca

SEQ ID NO: 362449 - DNA, 1281 bp, Homo Sapiens
  misc_feature (126)..(126): n is a, c, g, or t
  misc_feature (223)..(223): n is a, c, g, or t
  misc_feature (232)..(232): n is a, c, g, or t
agggactagaggacgccacaacaactacgcagggatcacggacggagtcgcatacggatgcggggggtccagccgacagtactgctttgaattaatggatttgtagcaatcagtacaagggatatntcaaacacccctcatcagtgcctcacacctaggtgaacgtgtgactcaccaacgacgtcgcgggtatacgtcagcataggcatgcgagcagtcgacngcgcgcgcntgcgtcgccgacggcataatagctcgcgcttcacccggcgccgggcatcttggcctacattaggccgacccatgcagcagacgattgcatagtctgatagtttgctttgtgagaacacgcccatatgcggccgcgtaagtagtgtcatgtaccggcgttgtttgtgccacggagtgcgtgccgccacatagcccaccgtgggggttgggctgccagaggaggcgcagtcgggggatggcttctttcttactacgtcctccggcctcatcatcgtttcaggtcgatctctcttgcggcagaaactgcctccgcgctgctctcgcccctcacgatttcagatgtcccggtggattcactatctcagtcagccgcaagcccgcgggagcgcagcgctgcgaggggggggtggcccggcccgagtgtatgtggacgcgtgaactcgaggcagctgatggctgcggggcgacaacattggtgagcgccctcgagtcgtcggggggccaggcttggcagatcgccgccgggggggcccccgtcccggcagttaacggggtgccgccgggctgctggctccatcccagggcgcgcgctgggggactgggggcggcgggcgccgccaatcctcgccgcgcctccgggacaggggcgagaggctccccggatgccgggtcctccgggcactcgggggcgcggagcagcgcgcgtcctcctcgagaaagtcccggccgcggaatgcgagaccgaaatccaaaatccgagtggctctccgaggtcgctccggctcctgggggcgccttccgggggtggggacggcacttgcttctccttcaaagggcggcgggcgcgaccgggacgcggcgcggttaagggtcctggggagggggcgccgctcggctggtggcgctgggtgccgtctgccgcccgggtcgcgcttcctcgcgcgtcccctcccttagcaacagccgtcgcctcgtgccgaattcgccacccaggcctcgctaccttggaggggagagagtgatattgagagagatgtaaaattaaagaga

SEQ ID NO: 362450 - DNA, 1159 bp, Homo Sapiens
agtagaatacatgtagtaaaaaagacgatctatttttcgaagtgggacaccaccacctaggtcactgatcttaatggataagtcttctttacccaaagtaacgagggttttaacagcagggtagccctcttttctgtcttcatagagttcaactgtcgctctcattgagttcttgaacaactcaaatagcatatgaaacagatgtgagggcacataaaccacctgaataggtttgtctggcgctttggcattgaattcttcaacttccagctctggagctaccaggtaatactgttcacacagcatcttggctgtttcatatgcatctttcaccacatccgccacgttacaggtgggatcgatacttcctatgtgtttaggatgaacaggattagtgtcacccccaaacagaagtgtgtgctgattaataagccatgcggaaagagattgccggttggtataaaaccgatccaggaaatattggatgttagtgctaatgaaaggatcaaacccaaacttctccttggtattcaatcactccttgtgccattgtaggaaccacatcattgtgtctatttctgactttaatcagaacttgtagaaagttatccaagacctgtggatcctcagggctcttattttcatattctaaaagttcaagaaaactctgcatataccaactctgaaccaatcccactgaagggcggttaagtaaattatccggcagaagattaacttctctcattgtgttagccagccgcacaggaagttcctttcgtagaaacatatatgaagttttctcacatgcattatctctcccgaagtccaggaattgtttgatggagagcggcgacggcgaaaagcgcgagtagcgctcgatctgcttgggcaccggctgcttcagcagccaccggaacagccgcatcctcgcccgggcggcgcacagacccgcctagacgcccgggtggccgcaagggctggcgcagccaagccgcacggatagggcacgtttgcgaagcgcgcaccccggcctcgatctcggcctcggcgccgccggtgcagccgccgcagcagcagcagcagctccaggacagcggcgggccgcccgcggcttccctaggctccgcctcgctgggcggagtcggttgctgcacccgct

SEQ ID NO: 362451 - DNA, 678 bp, Homo Sapiens
gaacttctcaggatttaggttaaaggttgttttaatctacagttaatatctcgaaaattcttcaggattttctactaacattggtacattgaaacaatacctgacatattttctcactatatgtcttcaacaatgcatggttgctaatgacagcatttgctcatgagccttccctgcaggagagataaagcctctggggtgaagaattttctacaacagcagacctgccatagctgatctgtcagggtgagtcagacaggcattctgctccttcactgtggttttgttgctggtgagcaggtacggattcttgacttcaccgcacaaaagaacttgagagcgagcctgatagaatttgaagagccaagacttgaactcacatcctttgattccaatattgccctccatgtttgtcaaagagtagatttctgcttcatcctgcgtgatttcaggagccttggtacaaaccctttctgctcccattacttccagtaactttcaccatcactctcaggaagccctctctcagaagcggatttctgcctgcttcactttaacgtctctcaagttggatacccagcgtggtcctcctactgaaacaagagtgccagctataccaacagaaaatctttttacatgcctatctgatttggctcaaaatgaaggagccctcgtgcc

SEQ ID NO: 362452 - DNA, 794 bp, Homo Sapiens
ataatgatcactgctgaaaagaaatgcctttgaccacacaggtaagagtacccagataaacttgcagtaagaggatgaatgtttttgaacgaccaattgtcccaatgttctgacaagagcagagaaaacacagccaactcaactttattttcagattgggagattgcacagggggtaaacttatcatcattctttatatggaatttcatagaaatgactcacagggtaccaggcagcagttcttgtactggttttgaatatgattgatagctgttctccaggttgcttctgaaagtatgcctaatggtagggccctggtctctctgaacaggacaaaggatatttcctcctctaagaacatttcccttcatcacttctctgcccccgtcctctgaggcagaaagaaggcccatgagcggccaagtgctggactctgtgcctctgtggtccccgccttccctggactcctgtgggctgcagccttcttaacacacatctcatgataaagtagcttcagtgctcactcggcaggttccaaatgacttgctttatatcttggctacagtccaattttagtgaaggcagaaaaaattctagagagactttgtggtttatgaaaagtataaaatgtgtagcttgtgtaaagtcagagtcttatttactattaactactcccaactcacacatttgctagggctggctctaggggacaaatatgaaatagacaaaatttgtggcagtgtccttcctgctgccaccactgaacctcggcttcttagctagctgtttatccc

SEQ ID NO: 362453 - DNA, 676 bp, Homo Sapiens
ggcacgaggcttaagttgcccctctgactgggcagctttctcctgaacacagtgaggaatgctaagttacatggtccagtaactgagtggataccctgagcccccgcatcccactggctgctatgcagggataagtccatgcacctgtggatggcagtggttgagctggttctctataaaagtatccagtgcccagacctttgttcacacatgcatgtaaatttactgggaaaactctagagaccaatgttctttcttccacagaaatctggcctagcagtctattcttaaattgctctttgtgtgtaagacacatctgtttgataccccactctgccctgacttttaggcaaatccgttaggacagaaccactattttctttccttccctttgaatcatcttttaaagcagcagaggcaaatgttggcagaggtccacattggaaagctagtgcatcacgactggtgtgggtaaatgaactagtgatgggattggggcagctgggctttgaagcgggtgctgtaagaggcactgctcctgtgcatggcagaggtttcagggaaaacggcagctctctgatgttttgcccatgctgtatgattttattcaatgcagttcttcttttatattgaagattcttgtttttatatctaggaatgtatcagcctttccagt

SEQ ID NO: 362454 - DNA, 288 bp, Homo Sapiens
gcggccgctcctgctgctgctactgccgccgccgcagcggctgctcgggctgagcacgccccggaacaggccgccgcgcgctgcgcgccggacccgctgcccctgccggcccggccgggtcgggcggcccaggtgcagaggacgtggtgatggcgttttccaggtcggagacggaagaccggaggcagtagctgcaaagcccttggaacaccctggatgctgttgagggccaagagatctgtgtggctcctgggccggctgagtggcagcagccccccttgccccacc

SEQ ID NO: 362455 - DNA, 704 bp, Homo Sapiens
gcggccgctcctgctgctgctactgccgccgccgcagcggctgctcgggctgagcacgccccggaacaggccgccgcgcgctgcgcgccggacccgctgcccctgccggcccggccgggtcgggcggcccagggcggcaccttcctacttctgcccagccacagccctcccctcacagttgagcacctgtttgcctgaagttaatttccagaagcaggagtccccagagccaggcagggggatgaaccgcgagggagctcccgggaagagtccggaggagatgtacattcagcagaaggtccgagtgctgctcatgctgcggaagatgggatcaaacctgacagccagcgaggaggagttcctgcgcacctatgcaggggtggtcaacagccagctcagccagctgcctccgcactccatcgaccagggtgcagaggacgtggtgatggcgttttccaggtcggagacggaagaccggaggcagtagctgcaaagcccttggaacaccctggatgctgttgagggccaagagatctgtgtggctcctgggccggctgagtggcagcaggcgggacgggacgacaggaagggagagccgcaagaagaagcgccggtgagggacaggcagcacgagcgaagggcagcaaacagccgcccgagcagacacgaaccacagagaagcaggccaggagggaagagagcga

SEQ ID NO: 362456 - DNA, 758 bp, Homo Sapiens
gggagatctcttggccctcaacagcatccagggtgttccaagggctttgcagctactgcctccggtcttccgtctccgacctggaaaacgccatcaccacgtcctctgcacctgcagataaggcgacaaggatcgctgatggggcttgcagcattggcttgcgaacaggacaagcaaggaggctgcggccaagctggagcccccgcccaccaggatcgcggcactctctgaggacaaagtacttccgaggaagtcttcctcccctctggtcttccctgcctcctggctggggacaaggcttgcaaccctgctgtagggctgcaaggcagggctgccagggtgaggctcagaggcttgctcaaggctacacagctgacagaaattgacaaggtgatcctaacattcatatgggaagggaagggacccagaatatccaacaccaccttgaaaaagaagaagttggactcacacttcccaatttcaaaacttactacaaaggcaaggtcaacgagactgggtggtactggcataaggacagacatatagatcagtggaacaaaaatgagagttcagaaataaaccctccaacttatggccagttgatttttgacaagggtggccaagacaattcaggggggaagaaatgaacaaattgggtggtgggaaaactgggatattcacatggcacaggatgaaaattggactcttaaccttggcattctaatctgggcggaaagaatggagaaccctggtctcct

SEQ ID NO: 362457 - DNA, 406 bp, Homo Sapiens
ctttgcagttaattgctatggttcgaacctgagttaacccaaatatttctgccgactttataactgtacagttttgtatattaaacgtttttgaagttattaatttaaagaaagatcatttagtttattcatttagtaactgatgtataataaacgctattttcattaagagttgctttttcaactattttattcaaattgcctattgcagttgccaacaattatttattttcaataaattctgcattgtgtttaaaaggaaattctttcacagataagttggatgtcaaaaagaaaacaattcgctgtaatgtttgatgtgaagttttagtcaaggggtttatattgacgcaatattttattgttgtaaaagattaaaaaggtttaaataaaacatttttccaaa

SEQ ID NO: 362458 - DNA, 1127 bp, Homo Sapiens
tttgtggtctgtgacggtcaatgtctttacttctaaagcatacattggactcactatatattaacatcaaaagtggctacctaaaatggagtcattctttttaaaaatccaaatcctcacatttttatataagatccaaaatgacatgaaattaaactctacaatgttatgaatagtataacaaactgctttcagaaagcaaaatgaaaggaaaagaattagcagttgggacggttgtaggcctgggttccatgtcttttgaggcattgtgacagagagccagcaccaaggggaaggaccagcccctccctgtggccacaggaaggaactcagtcagacagaggaggtgggcgtggctggtcagccttcttacggtgacagagaagcatggtggcatctccctgcccctcagggcccttggtgtgcccactgattagtcttctttcaagaccagggaggggtggggctggaagagggcaggggatagagcagggttcaaaatgattattttaataataaaggtccttctgggcttcctaaggagggccgtagccacccagcgatgttggtcaactccatccaccaggtcccccacaggcttccttaacccacttgctctttctgctccctatgactgggataccctctgcttcatgagcctcatgggcagccagagacctagggggactctaggaggacccaaaggacactctggcctttgaagtagctggatgttgtccagaacatcttggctgtaccagacccctggggtccaggccagcagccacattgatgtagggagggtactgggggggtccccaccctggcctagtcttggctctgaagcaggactgggttgagctgactggggctgtgccccaagcccctgacgctttggttcacacaattcaggggaggacacttgtttgcatctgctggggagatcctaggcctggtcctgcttcctcccagcctcaggtgggctgacaatccctgcctttcacaccagcagttctgtctgctgagagcacggcacattccccaccacacctaggaactgcactacaaaggtgggaggggcgcttccaaaccggagatttgcatccctaaatcccggccgtaccagc

SEQ ID NO: 362459 - DNA, 736 bp, Homo Sapiens
  misc_feature (185)..(196): n is a, c, g, or t
gtggttaccatgacattcgctggaagaggaatggaactgggatcagattgccacaagggaggccctctgcagtccctccctttgaacaagaagttgtagtaggcaattaagaggagaccagagtgaaaagagatctagtctgttaattccttccactttgcagcttcaattaacatttgctgggnnnnnnnnnnnnagagtcaagctctgtgctgggacttgtgtatataaaaatgagtaaaatatgcttcctaccccggtggagttcacagtcttggtggagttcacaatctatctcaaaaaacttgttaataacgttatgacaaagcacaatagggttatgttaagttatataactggactatgagagcaatgggaaggttggggaatatctggtaaatatcaaaggatataactcacataaacaaaatgtctttgaagtcctaaataagttttaagagtataaaggggtcctgagtccaaaaagttgaggagtgactgtaaagaccctaaagagatgcggtatagtaagcctaggggttagggtgatgctcccccatgaccccaagatctctatccttaaggtcatttagcttgagcactgccaaaagtgaaagtcttaaacttctgccaattaaatctagagctctaattttaattttgacattgctccccctcagccctgaactgagccattaaaaacagatttgagtacggcagcccccaccctcgtgcc

SEQ ID NO: 362460 - DNA, 1358 bp, Homo Sapiens
  misc_feature (1315)..(1315): n is a, c, g, or t
  misc_feature (1317)..(1317): n is a, c, g, or t
ggcacgaggattggaactaggtcagctgaagatcctgtgagcgaagttccagcagtgtcacagcaccctagaaccaaatccagcagactgcagggttctagtttatcttcagaatcagccaggcacaaagctgttgaattttcttcaggagcgaaatctccctccaaaagtggtgctcagacacccaaaagtccacctgaacactatgttcaggagaccccactcatgtttagcagatgtacttctgtcagttcacttgatagttttgagagtcgttcgattgccagctccgttcagagtgaaccatgcagtggaatggtaagtggcattataagccccagtgatcttccagatagccctggacaaaccatgccaccaagcagaagtaaaacacctccaccacctcctcaaacagctcaaaccaagcgagaagtacctaaaaataaagcacctactgctgaaaagagagagagtggacctaagcaagctgcagtaaatgctgcagttcagagggtccaggttcttccagatgctgatactttattacattttgccacagaaagtactccagatggattttcttgttcatccagcctgagtgctctgagcctcgatgagccatttatacagaaagatgtggaattaagaataatgcctccagttcaggaaaatgacaatgggaatgaaacagaatcagagcagcctaaagaatcaaatgaaaaccaagagaaagaggcagaaaaaactattgattctgaaaaggacctattaggatgattcagatgatgatgatattggaaatactaggaaggaatgtattatttctgccatgccaacaaagtcatcacgtaaagcaaaaaagccagcccagactgcttcaaaattacctccacctgtggcaaggaaaccaagtcagctgcctgtgtacaaacttctaccatcacaaaacaggttgcaaccccaaaagcatgttagttttacaccgggggatgatatgccacgggtgtattgtgttgaagggacacctataaacttttccacagctacatctctaagtgatctaacaatcgaatcccctccaaatgagttagctgctggagaaggagttagaggaggagcacagtcaggtgaatttgaaaaacgagataccattcctacagaaggcagaagtacagatgaggctcaaggaggaaaaacctcatctgtaaccatacctgaattggatgacaataaagcagaggaaggtgatattcttgcagaatgcattatattctgctatgcccaaagggaaaagtcacaagcctttccgtgtgananagataatggaccaggtccagcaagcatctgcgtggtcttct

SEQ ID NO: 362461 - DNA, 369 bp, Homo Sapiens
gcaattcctggtggctgtgggcctccaaccctggtccccctctgtctccagccaccctctgcttgggcttctgaactggtggccctggcccaaaggtctggcggaggcccaggcaacaaccatggcggggtgtctctacaggggaaaggcgggagcctgccaccctcttcctgccctacctcctactaacacttcctgccccatttggacccgtaccatggggctcaggacaaagggagctaacagctggcctccatggccccacaacctccttcgaggctgtgctgggtgcagaacccccaaagccacccaaaaggtgtttctcttctgctccctgaacctcttaacttaataaaacgttccagcagc

SEQ ID NO: 362462 - DNA, 1105 bp, Homo Sapiens
  misc_feature (697)..(744): n is a, c, g, or t
  misc_feature (978)..(991): n is a, c, g, or t
agcctccgccctctcttgcccgcggggccggctcagctcggctgcccaagctcccatcctcgtcgccgccaccgccgccgccgctgccgccttcctcccggtcggggaccacacgacttcgccaaagtcgccgcaccagccccgagcgtttggacctgaacatacgatatcctttggcgccaggggtgggggggaggcggtctccggttaccgggggtccgttccctcagcgaggcgccggctgcgcgggtcgcagccccacatgaagctccgccgcggagcgccgtgcagaccgcgcacagcctgtcgtcgaaggggcgccgcagggcgacaacatgagggagctcgccgaggcgggacggccgggaacacgcgcacgccgagccgcagtccgcgcgcggccagcggctacatggaccacagcggcggggctgctcaacaactccagcccccgcgctttaggggggctgcaggcggcgcgccgccagaaagaccccacatgggccggcgagccttcaaaagttgtgcggctggtccatgagcacaaagcgctcgcgcgaacccctaaatgtgtctggaaagccctgcctttaccttgccttttttttaaaccaaagcgcttaactacatgggcttttcccgcaggatccgaaaggcaggcttgttgatacccccagctcccttcttactccctgcnnnnnnnnnnnnnnnnnnnnnnnnnnnnnnnnnnnnnnnnnnnnnnnnctaaatccctggatttgcatgcacgaaaggccaacgccgtctcaggtcccaggcgctagatgcacttggagcgagtttctcctggacgcgggtgtcaacacatgagtggaagctgtaaaaatcccaaagagctgctgggaatccttaattaaaaatgcagtccaccgatgcagaggtcgcagcccgccccacgctgccctcggacgcttcgtgcgccgaggctgccgaggtcgnnnnnnnnnnnnnntccacaaaagtgcctcccggtggccccggggtcccagcgaggtctggcgaggcagcgcccgacggctctttctctcggctcagcatcgcgggaattccggaccggtccagcctc

SEQ ID NO: 362463 - DNA, 1189 bp, Homo Sapiens
tatcgtcgacccacgcgtgcgatgatgggatcatcgatccagcagacaccagactggatcttgggctctcagttttagtgcagccctcaacgcaccaatagagaagactgacttcggtatcttcaggatgtaactggaataaaggatgtacttctgttaggacatgtactgaaaattaacacatgtagtagccttaaagattttagacttctcgaacatgaggctgttacagtaatttttataagcactgtgcatagtacttttctaccttaaaaaaatcagtgaggatatgtatttaatgaacatcaattccttttaaataatcttacgagaaatttctctgtggctcagtatataccacccataaacgcggagacagtaatttatggttatcctttctgacccacaaagtatgaaaagttctgtaatctgtaaactcagttctgtaatctgtattattgagatgattaatataaagttgtattttcactgaaactgattgtcattgctgagttatgctatggtgatactttcacgcgggctataattttatgacaaggcatctgttacttcagctggccataaagtgccctcaacactgctgtgcagaccatcaccaccattcatctccagaattggtactcagtaccaaactgcaaactataccgattcaaacaacagcgctccccaatttcaccactaccacgagcccatgacatctactatatatcatactgagtctgagaaagcgatgtaaccacaatagacacaaaccagacaatacgaaagaataaatacacgactccaccgaagcaacacaacacccagaagatcaaacaagactatgcgccaccacaccacccaaacagcaggaacaaagagaacctaagaaaaacaccacaaacaagaatctacacaacaaacgcaacatcaacaagatagccaaggatagactacacaaaaagccatagaggaacctcggactggtcaccaagagcagaacaaccgacaacacacaatacagtacaaacaagacaaacgctggacaagcgagtaaaaagatgaagaaaaaacgaagaatcaacaacaggagaagtatatgaaaacaacaccaacgcaagaacacaacagtctgaacgacagagacaaatactaaaacgacaaacgtcagctactattaaccgaaaaa

SEQ ID NO: 362464 - DNA, 674 bp, Homo Sapiens
  misc_feature (316)..(324): n is a, c, g, or t
agtcaaagaaaatagtgactttttgagaactatacatctcatcctttacaatgcaagtttttgggctaaggaatgtaaatgttccttacaaactcaacctgaaatactgacattcactaaaagcaaaaaacattgctgtaaataaaaccgcaccaggtatacgcatgtgtcaaaacaagaaagcaaacttcaacactggctctgtcagttgctctgcacccagatgtgcactgatttttgtttagaaatgtaagagactcagctttttttgtttggtaatgcattttcagagggatggttctatggggctgaagtnnnnnnnnntgaaattatgacagcacaatacttggcccaaaatcagtactcaaaaattgtagctaatatttttattttaataacagcttggcctgctggacagacactaggctagtcaccagaggtctgtgagggcatataacataacatgcataaaagcaacttgatttcttccttaacaagatggttacactttaaggccatattaggatattacctggaaatcctatagccctgttgggataaatacatactagatacctaaaagccagtaaaccatggaagctaggctttgtttcaagctattacttaccctttccaattcactgcaagagaaacttagtaatattcctcgtgcc

SEQ ID NO: 362465 - DNA, 1410 bp, Homo Sapiens
tgccggcataagggggccggggttcccccccgccccgggaaaccgcaaagacctggatctctttggggagccggaggcacggagacagaaaacaaaccccacggggacaaagagtccttcgtcttttcttaaataaaaaaatccatatattaaatcatgacaatgaaatttcaacaatctgaaagaaaaagcagaacacaccgtgcttccccggcccagctctgggcggtgacagcggctccgtccaccctggggaccagggagtcccttctccagcaaagcactgcaggccaagggcaggtagaagcccacggcccacaagacgtggacaccaagaaccccaagacgggacagaaccggccacccgctgcggcctgtcctgcggggcccagctgcctggtacagtccgtggggagatgaagggggacggcgggcagcccgggcctccgctttgctcccaactcccacctgtgcccgtgcccccggctctgctctgatagatttacagtatcaaactggaaaagaaagattgttacgaaaaatctgtagataaactgtgaatataattttatatctctatatattttctgtttctctctttaaatatccccctggtccttatgacatccaatatggattacctaccacggccacgggggcaacggctgtttgggaacacgcaggcctttgctctgtagggacccagtggtcctggcgggcctgcagcttcccactcaacttctaacagtagacacagaaccaagtcgcagccccggggctgtctgtcctctgccctcccagcgtggctggcacccgcctgggctctgtagctggtggggcctgttactgggtgggcagcgggcagccgagaaggagccagggccccaggcaccaccttgcaggtcttatgtggcggcccccggccggcggctcacattccgccagctcccccaggcaggggctccgcaacccccgcggctctcgctgcagagaccccagtcacaggagggaccctcaaggcggctctccaggaaaaggaagcccaaggtggagtgccaagcccactggtgcctcagtgctcttggaaggaggagcaggcaaaggctccgggtgaggactgagtgctgaggccagccacacctgcagcccgtggctgtgctcctgggggtgtgcagcagcaggagccacagtccacgaagctctcctggactggtgccatgctgccatccccaccctgccgcagccctctggagtgccaggctcactcgctgagctcttctacaagccagctgcatcactggtcactgcccctcaaggctttccacctgctctcgcacacggctcccgcctcctcccaccactccacgcaacgtcctcctccttccacctccacatccatgtccaccaacc

SEQ ID NO: 362466 - DNA, 541 bp, Homo Sapiens
ggcacgaggatattcatccctgtggaggaaaatagtggggtctctgagatttgattctgaaaccttccttgtatccctcctgagacatctttgctgcaagatcgaggctgtcctctggtgagaaggtggtgaggcttcccgtcatattccagctctgaacagcaacatggggtgcaaagtcctgctcaacattgggcagcaaatgctgcggcggaaggtggtggactgtagccgggaggagacgcggctgtctcgctgcctgaacacttttgatctggtggccctcggggtgggcagcacactgggtgctggtgtctacgtcctggctggagctgtggcccgtgagaatgcaggccctgccattgtcatctccttcctgatcgctgcgctggcctcagtgctggctggcctgtgctatggcgagtttggtgctcgggtccccaagacgggctcagcttacctctacagctatgtcaccgttggagagctctgggccttcatcaccggctggaacttaatcctctcctacatcatcggcaaa

SEQ ID NO: 362467 - DNA, 625 bp, Homo Sapiens
  misc_feature (41)..(73): n is a, c, g, or t
  misc_feature (531)..(531): n is a, c, g, or t
gcggccgcgggctcccgctaaccgcagcctccactcctctnnnnnnnnnnnnnnnnnnnnnnnnnnnnnnnnnggtctcgccggccgagcgtccgttggtccttgagcgcgtccgacagtctgtctgttcgcgatcctgccggagccccgccgccgccggcttggattctgaaaccttccttgtatccctcctgagacatctttgctgcaagatcgaggctgtcctctggtgagaaggtggtgaggcttcccgtcatattccagctctgaacagcaacatggggtgcaaagtcctgctcaacattgggcagcagatgctgcggcggaaggtggtggactgtagccgggaggagacgcggctgtctcgctgcctgaacacttttgatctggtggccctcggggtgggcagcacactgggtgctggtgtctacgtcctggctggagctgtggcccgtgagaatgcaggccctgccattgtcatctccttcctgatcgctgcgctggcctcagtgctggctggcctgtgctatnggcgagtttgggtgctcgggtccccaagacgggctcagcttacctctacagctatgtcaccgatggagagctctgggcctcatcaccggcttgg

SEQ ID NO: 362468 - DNA, 572 bp, Homo Sapiens
  misc_feature (224)..(236): n is a, c, g, or t
ggcacgaggcgcttaggaagtaaagccttgtctccctccctgttctctgcctcttgtacccctctgacccacccgctgtgccccactcccagccctcctcagccccagccctgcctgccctgccccttcagggggccatgagtgcctaggtttctcataccccacaaggtcacagcaggggagggagggacaattttataatgaaccaaaaattccatgtgttnnnnnnnnnnnnncggaggagggtgaggggtgccgcccatgggccacaaatctctacaagtgcctgctatccctctcccactccccaccccagcaccggtccaaccccttcatccccagctgctcctaggactggcccatgggcaggcgggtggggggatgggaagggggtgccctgaaaccaaactggaagccccctctgcctcccagctggggcctctggggtggggtggggggctgtggtcaagccttattctgtattggggactgagggtggggggagtagaggggccgctggagaatgtattcaaaacaataaaactttggacctttggatgcagtgaaaaaaa

SEQ ID NO: 362469 - DNA, 1228 bp, Homo Sapiens
  misc_feature (917)..(917): n is a, c, g, or t
gcggctcccgggccgggacaggcctgggcaccgggcggagctccgcggccgggcggcagcggcgcggagcgggcacggcgcctgcagccgggccccggccccgggggcgccgcctccccccgcaccttctgcacggctggcctgccactcctcctgctatgatgcctgggcagatcccggacccttcggtgaccacaggctccctgccagggcttggccccctgaccgggctccccagctcggccctgactgtggaggagctgaaatacgctgacatccgcaacctcggggccatgattgcacccttgcacttcctggaggtgaaactgggcaagaggccccagcccgtgaaaagtgagctagatgaggaagaggagcgaacgaaaaggcgccgggaaaaagaaacaaggtcccagcaagccccgatgccgggaaacaaggaaaaaagggagcgggacgggagttttccgggcagaggggaaaaaccgaacagggggttgggaaaatccccgggaacacccagagagattggagagacaccccccgaatttggcgggggcgggtggaaagtcgagggaggcggggccgcaaaagccctccccgtaccccggagacgcgggcggaaacaccgggataccccggcgggacccgtcacccgttgtgggaaatccggagatccggggggacgaaacggcagactcaggtgtgtcgcaccaaacgaaagagaccaccccggagagaagtcctctgacgacaaagcgggcgacagacaccccccacaccgcgtggtgaggctccgatagggcgctacacggcgccccgcgagatacacaaaaacagacacatgcgtatcgcacccccgagtgcggcggggtatgggggccgacgcgcgcgcgcagggctctgagcgccttganacgaggcgcgtcgccacgcgacgatccatcattcgcaccgtgtaaagattccaccgcgcacgacacgacataaatgcttaaagtaacatgcgcgcgctcgaagacatgagagttgcgtgccacaactctgaacgagcgtgcacgcacgagctagagtgacgcgtcgcgaaaggagatcaagatcacatcgaagtcgcgtgacccgggcgcacgcgagagtcgcattgacgcgacagcggaggagacgcataaacacgtcgctagacacacatcaggcgagaaccggacgttgctgcgcgccgtctccctgg

SEQ ID NO: 362470 - DNA, 598 bp, Homo Sapiens
tgcccaaaaggcacaaggcaacctggcctgaggttggagcatggagatctagaggaactcatggatggattcaggcgggatgtgaaagtgctgggagtgagggcctgggcctcctctgggtttagccacccttccaggttgtgtacaacctgccatatgctggggctcattgactgtgctctgctctgtggctacaggatccccttttactgagcgtagtgcatgtgtatgctctgacaaactcctccgtggtttgcctctgtagtcctccctacaccctaccaactccccagtccccgcgaataaaaacccttgcctttttggaggcaatgtagcaaagcaggactgctgcattggaatagtttggctctggagagttcactagatgtttgaaattcagtttcgtcccttgtaaaaataggggaaatagacccctacctagtacctagtaccatatacatatattatctcaaaatggatcgaaggcctaaatgtaagagtgaaaactagaaaactcttagaagaaaacagctgtaaatctttgtgaccttggattaggtagtggtttcttagattttatgccaaaaataaaagcaac

SEQ ID NO: 362471 - DNA, 1799 bp, Homo Sapiens
  misc_feature (1616)..(1694): n is a, c, g, or t
  misc_feature (1720)..(1747): n is a, c, g, or t
cggtgacgtcacccccagcggggataaagcgcccccgcccgggtcggggccaggacgccgcccggcgcggagtggctgccctgcgcggggacactcagagcccggtgggcgggaggaaggcggcatgccccagacggtgatcctcccgggccctgcgccctggggcttcaggctctcagggggcatagacttcaaccagcctttggtcatcaccaggattacaccaggaagcaaggcggcagctgccaacctgtgtcctggagatgtcatcctggctattgacggctttgggacagagtccatgactcatgctgatgcgcaggacaggattaaagcagcagctcaccagctgtgtctcaaaattgacaggggagaaactcacttatggtctccacaagtatctgaagatgggaaagcccatcctttcaaaatcaacttagaatcagaaccacaggaattcaaacccattggtaccgcgcacaacagaagggcccagccttttgttgcagctgcaaacattgatgacaaaagacaggtagtgagcgcttcctataactcgccaattgggctctattcaactagcaatatacaagatgcgcttcacggacagctgcggggtctcattcctagctcacctcaaaacgagcccacagcctcggtgccccccgagtcggacgtgtaccggatgctccacgacaatcggaatgagcccacacagcctcgccagtcgggctccttcagagtgctccagggaatggtggacgatggctctgatgaccgtccggctggaacgcggagtgtgagagctccggtgacgaaagtccatggcggttcaggcggggcacagaggatgccgctctgtgacaaaatgtgggagtggcatagtcggtgctgtggtgaaagcccgggataagtaccggcaccctgagtgcttcgtgtgtgccgactgcaacctcaacctcaagcaaaagggctacttcttcatagaaggggagctgtactgcgaaacccacgcaagagcccgcacaaagcccccagagggctatgacacggtcactctgtatcccaaagcttaagtctctgcaggcgtggcacgcacgcacgcacccacccacgcgcacttacacgagaagacattcatggctttgggcagaaggattgtgcagattgtcaactccaaatctaaagtcaaggctttagacctttatcctattgtttattgaggaaaaggaatgggaggcaaatgcctgctatgtgaaaaaaacatacacttagctatgttttgcaactctttttggggctagcaataatgatatttaaagcaataattttttgtatgtcatactccacaatttacatgtatattacagccatcaaacacataaacatcaagatatttgaaggactctaattgtctttccttgacaagttgattttgcaattgtggtaaatagcaaataacaatcttgtattctaacataatctgcagttgtctgtatgtgttttaactattacagtgcatgttagggagaaattccctgaatttctttagttttgtattcaaacaattatgccactcgatgcaacaaacataataaatacataaaagatttatnnnnnnnnnnnnnnnnnnnnnnnnnnnnnnnnnnnnnnnnnnnnnnnnnnnnnnnnnnnnnnnnnnnnnnnnnnnnnnntcttgtgtggccgccttcggccctcnnnnnnnnnnnnnnnnnnnnnnnnnnnnggggccccgggccccctagggaaaataaaaaagggcctaaaaattttttccc

SEQ ID NO: 362472 - DNA, 515 bp, Homo Sapiens
  misc_feature (32)..(32): n is a, c, g, or t
  misc_feature (34)..(34): n is a, c, g, or t
  misc_feature (37)..(37): n is a, c, g, or t
  misc_feature (162)..(162): n is a, c, g, or t
ccctgcgcggggacactcagagcccggtgggngnagngaaggcggcatgcccagacggtgatcctcccgggccctgcgcctggggcttcaggctctcagggggcatagacttcaaccagcctttggtcatcaccaggattacaccaggaagcaaggcggcantgccaacctgtgtcctggagatgtcatcctggctattgacggctttgggacagagtccatgactcatgctgatgcgcaggacaggattaaagcagcagctcaccagctgtgtctcaaaattgacaggggagaaactcacttatggtctccacaagtatctgaagatggggaaagcccatccttttcaaaatcaactttaggattcaggaaccacagggatttcaaaccctttggtaaccgcggcacaacaggaaggggcccagctttttgtttgcagctgcaaactttgatggacaaaagacaggtagttgagcgtttccatttaatttggccattttgggtttttttcaatt

SEQ ID NO: 362473 - DNA, 573 bp, Homo Sapiens
  misc_feature (229)..(237): n is a, c, g, or t
ggcacgaggtttactattataaccactttttaggaaaaaaatagctaatttgtatttatatgtaatcaaaagaagtatcgggtttgtacataattttccaaaaattgtagttgttttcagttgtgtgtatttaagatgaaaagtctacatggaaggttactccggcaaagtgcttagcacgtttgcttttttgcagtgctactgttgagttcacaagttcaagtccagnnnnnnnnngtggataatccactctgctgactttcaagattattatattattcaattctcaggaatgttgcagagtggttgtccaatcccatgagaatttacatccctattaggtggaatatttggataagaaccagaccattgctgatctattatagaaactctcatcctgccccttaatttacagaaagaataaagcaggatccatagaaataattaggaaaacgatgaacctgcaggaaagtgaatgatggtttgttgttcttctttcctaaattagtgatcccttcaaaggggctgatctggccaaagtattcaataaaacgtaagatttcttcattattg

SEQ ID NO: 362474 - DNA, 536 bp, Homo Sapiens
ggcacgaggtggagttggaagagggggtgtggtggctggggattgggaagaagctggcagccactaagttcagactgttctgggtccgattgctgctgaggctgtggtttggcttccttggcttcccaggctggttatgggtttctggccagagtctattgtcatatgtggcctggccattgtccagttgtatgttcagtctcttggaaggaagggtattgactctgagaggggccaccatcgctggaatgggggacacacagtacttcctccagctgcctacacccccctagggtcagtggcgcctgcctgtgagggtgagcccaatggctagagggctctgctccaagtcattgcttactacacccacaaacattcttcgttctttaaggcctaacttaaagcccagatcctacaggaaaccttgattagacccctctctttattaagcttcctaagatcaaaccctgcttttgtgtaaatgctgacctccttgcctacattttaaaaacctagagctgggcatgatggcccca

SEQ ID NO: 362475 - DNA, 662 bp, Homo Sapiens
tccataatgtgtgcccaatagaattaaattctacgcaggtaggttcaggcaataaacattctaataacatgtcttttaaacaaattataggatacgatgggcatagactgctcttggtcttcccccagcctcctcatcctccctctttaggggtagccttgaacttgcaatggagaatgagggccaggagggggtggagtcagcacctggctgtctggatagccccaccataccttgttcagtcgcttctcttcatttcaaatgatccctattggacctcacactctttgctagtcttgcccctaaggatgcagacagaaaattcatgatgggcagacagaaaattcatgatcctccatactccattcttgtgtcgtctgtggaggacctccacatcagagaaaagggtgactgcacccttgtcaatgccgaatattatttttaaaacctttgcaaatttggcagtaaatgatatgggcacatgacgtttaaattttctttcctatctttttattttgaaaatctgactttgtgtcatctggcttatcgatgaaaagagttttgctgtttgctagaattttgttaaggccaaacatcataatgtcagtggatgatctcagtaggtggggtaagacctttgtgctttttaaaatttgaaaaaa

SEQ ID NO: 362476 - DNA, 777 bp, Homo Sapiens
  misc_feature (701)..(701): n is a, c, g, or t
  misc_feature (724)..(724): n is a, c, g, or t
  misc_feature (743)..(743): n is a, c, g, or t
  misc_feature (745)..(745): n is a, c, g, or t
ttttggctctaaagggggtagagggggtgctataggaggaaagtgtgtgctggccaagctgggccaccaaaagcacttgggccacctgggccttctgggtctcaggactgtctggtcactgccccatcaacactgggcctcatttttcccctaccttccccactgcgctcccgtccatgaggagcacagcgctggcgagctaggcccagggaaaagctgttccacaggggactgatcatttgaaaaaaatccctccccctcaaccatcactcctccaggtcaggccctgcccgcactcctcctgggcttcctgcctgggtgggggtgggaccagggaggggaaaaaggctttgtggaatctgagggcagccacctttcacctgtaggccccaagcaaagcattagcacctccaccatccccaaggcccatagaaatgcccacaggcaagtggtcaccagagctctagggagcaaaggggccccagaaggcagggaagaggccccccaaaaacacagtgctacaagaaggggttggtggttggaggtttggaggcgaatgggcttgatgagggtccagtcatgaaggggttggtggagatcccagctggctggctcagtggcctctgccccaacttggctgatcctaagtccccgaaggaagagccattctgctgctgaacaagcggggtctgcgggggganacagcggtgctgggaaggagctngcaagggccccagtgggtngnactgcctgggggaagccaggcccagcactgct

SEQ ID NO: 362477 - DNA, 793 bp, Homo Sapiens
  misc_feature (493)..(605): n is a, c, g, or t
  misc_feature (619)..(644): n is a, c, g, or t
ggcacgaggatgggcaccatgactgtgaccctacaggtaggattggatcactccatgagagtagccggcaggtttctacaatggcctgggaatggactgattatttttatacattttctggcctgagagaaagccaaagtcccctgctgttcacagcaaccctgcctgggagcttggaatcttggtaatctgcccggttggatctatggaggtagtctcacccttttcgtcttttgtgggaaattaagagaaataattatcagacatatcatcacctccagtggaactacagagacctggacccagctgcactattttaatgtaaaaataacagtatggccaggtgcagtggctcacgcctgtaatcccatcactttgagcagccaaggcgggcggatcacgaggtcaggagattaagaccatcctggccaatatggtgaaaccctgtctctactaaaatacaaaaaattagctgggcatggtgttgcgtgcnnnnnnnnnnnnnnnnnnnnnnnnnnnnnnnnnnnnnnnnnnnnnnnnnnnnnnnnnnnnnnnnnnnnnnnnnnnnnnnnnnnnnnnnnnnnnnnnnnnnnnnnnnnnnnnnngactctatctcaannnnnnnnnnnnnnnnnnnnnnnnnncagtatatttggtgtcaggagagggctcaattctcatttctgcctttcctgtgctggctcatggtagctgggcatgacttgccttcctacataggttgtcttcatacatatgcactgggaatcaataaaagcccatggtgagaatgaac

SEQ ID NO: 362478 - DNA, 480 bp, Homo Sapiens
  misc_feature (167)..(214): n is a, c, g, or t
tttttagaaataaaactgcctttatttgcagataacaatcacatacatagaaaatcctaagggatttacaaaaaaagctgctaaaactaataaggagatttaacagtattgcaggacacaaagcatttctgtatcctaacaaagaataattaaaaactggaatttannnnnnnnnnnnnnnnnnnnnnnnnnnnnnnnnnnnnnnnnnnnnnnntccttaaatttttaaagaactgtgtatttcaccttctggctatgtttaccttttacatgtgttagggcctagaagctgcaaatacttacaaaaatggtgaaatcttactaaagataaattagaattatgatgaccattatgtggaacattccagatgaataagactgttcatctaagaattgagtttaaaaatgagggcttctgaatcaggccctcctagggatacctattgatgtgcaaaagcttctaaaaagatttcaaaaatg

SEQ ID NO: 362479 - DNA, 816 bp, Homo Sapiens
agaggcaggggtttttgaatatcatcaaaggtttgtacctttgctaataatatcttatccgtcagtttttcaagtctgcattctaaatatactgcaagatgctgcccgttgactttctgtctgagaggaggcagcggactcagaaccgcacgctccttccctcactctcccgacttctccaaaactggaagtctctcacacgtagaatgccagaaatttatagaaggactccaaggctccctgagaaacttctcgagttgggaaaaaccttgtcaacgcacacctggacctacagattcggaaaaagtaaccggctgtagccaaaaaccaaacactcaaccacccgaacacagtctgcaagaaacacagagttctttgacgtgacaagaagaattataaataaaatagctccaaggcagacaggctgaatgagccttttaagacagcctgttggtgcctcaaactttaatacttagaatatcaaatgttagctccacgaggatagcatcctgggatacgtgtgtgtgtgtacgcatatgtatacgtgtgcataagtgtgtatatgtaggtttgtgtgtagcgataaatgttttgttgcctttatggcctgggggctgattgagggcctggtggaacgcccctagcccagaggaaggagcaggccctacctgcgttctccctgggttactccctacttcattacacgtaggcaaacaccaaaagccagggaaagcataactgctgtagataacaagggcagatctcagatagagaaaagctttctctgcaataaagaattattttgtgaatggtaaa

SEQ ID NO: 362480 - DNA, 576 bp, Homo Sapiens
gctaaattaagtcatactgtcaaccacacgtgatctcgtctgaaacagtgtttggaagtgggaacagttttgtcctgtatgctgatgtgtccagaatttcatttaatgatagacggaaaatgtgtggttactgaaaactgtatatgatacagaatttcataagagccatgctgttgggcaaagcaactctttttcaaccactgctcatcagtttctgtagagacaaaaactctgtacatattttggaatctgaagaatcctatgtaaatcatttgttacttaagtctgtgaaaaacatatttctttggaggaaaatgtatgcatttataagtgttccatggaatcagtttttattgtatcgatataattgtctctaagtgttgactgtcttcattgcaatatgaaattcattaaaatgtccatgttccataattactattataaaagctttgtgttattgggagtcttattatttttatagtttttcatgttttgctttggtgaaacattgtgaatgactatataaacatcacgatgagctagaaattgaacaaatataatactggtcactcgaaa

SEQ ID NO: 362481 - DNA, 358 bp, Homo Sapiens
ccctgagggcccttttgcctaaaattaacttaatttgtagaaaacaatggattcagttaatatcatttccatttatggaaaaaattgttaggggtgccaagggctttttattaaaagtttctctttaaaggtctaaaaaattgtgaatcagttgaatgttgggcccccaggggaaacagtttgtaaaaaatgatttaaatttttcagttcagttccaccagtcccttggagctttgcaatttccagaccagttttttcatttttaagttcattacaagccgggaaaaattttgaaattaacttgaacctgaggatttggcacaagatgggttaaaaaattttaactttcaataatttg

SEQ ID NO: 362482 - DNA, 527 bp, Homo Sapiens
aattgttatttaaaacatagtccctatagctttatttaaacgtatctagttaaggttaatttggcatttaaagtagtaaatcaggaacattctcctaacttggattttcttgggaaatgcactaaacaggacaattattcctgaaaacctagtgaccttcacaggaacatggcgggacctgtgacactaagtaagcttcagtgaaaactgttcacggtcgtaaccgtagaagtgttgccaaatctgtttccatactctctttgatcatcatcaaacattctcaaatgtaggcaatgctaacactaattatagaaattaagaaaatgtgggctcctgtttgtaactaaacggacgtggggaggtgcacctcctgtcactgaggggtgcctttcatggacagtgatgctttgctttgaatggagagggcgaggaaccttgacttacagtgactatctaaggttgtgataaatatggcatttcaggttttttttcttggatttcccattaaaaatagtcttgtatcttgc

SEQ ID NO: 362483 - DNA, 486 bp, Homo Sapiens
tcacttgaagagtggatagtggataaacttgaaacagcttttattactcacttacatccctggaaaccaacagatgggatctctcattgccaagttctaatgtatttcatgttcatgctcggctgcaggataccaggtttgccaaataccaataagctgttgagagtgaggtgagtatcaagaatctatagctagatcgtctccctccattgcacaaggaaagtactcactctaggtgaatttccacaaaaggcagtaagtatgtgggtccacagacacggacatggaagataaccagtgtccacaagaaatatttccttttttagtataaaaaatatagtggctacccctaagggtaatttacatctattccttgaaagggctcattatgagtactgcagcaactaattattatcctgatggatagtcaacagaatagctattatgttcaaatattaaggcaacctagaaaataaacctcaagaa

SEQ ID NO: 362484 - DNA, 895 bp, Homo Sapiens
agcggggggcgctgaacgcactctgacgcccgtgtgtacagagcggcccggtcgccggcatggtttctccgtcctgctgcagccggcgggaggcagccagtccaggcgcccgctagcttcggcggcgacccagacggggaaagcggaaggaatgtcgcgtgcaagcaggcagctggtgtggaagaatggcggtgagccattcagtgaaggagcggaccatctctgagaacagcctgatcatcctactgcagggcctccagggccgggtaaccactgtggacctgcgggatgagagcgtggcccacggacgcatagacaatgtcgatgctttcatgaacatccgcctggccaaagtcacctacacggaccgttgggggcatcaggtcaagctggatgacctctttgtgacaggccgcaatgtccgctacgtccacatcccagatgacgtgaacatcacctcgaccattgagcagcagctgcagattatccatcgggtgcgaaactttggtggcaagggccaaggccggtgggaatttcccccaaaaaactgtaagtgaggccctcagcaagccctggccccaactcggagtcctccagtgatctccggagctagttccctgccctcacaccctgtctggtacccgagaagaaagcagggccaggccagaagctggtgtccaacagacaccacctgtcaaagctgcctttcacagggttccacctcccagactcactctgggacccagaatcctatatgtggccttggggtaggtgacaatccccctttttgatgatctgaatctctgacttattgattatggaacctgtcaagtagttttcaactctcccagtgaggataattaaacatgctcagcctgagccacctctaagtgtc

SEQ ID NO: 362485 - DNA, 800 bp, Homo Sapiens
atcaatatactttgtcttcttgcttcagttaggaaaggttttgatggtaaattctgtcatggtaatagatacctattttcctacctgagatttacaaggaaggtttttaggttggcttaaatgaaggtatttatttgagtgagccctaatttgaaaattaccagacttgatcctcctggtatgaatcaaggaaacactgtaccttgctcttagcaactcccagtggcctgaaagagaaaatgcacttcttcaaggtgagtgaatcatgctttttccacagttcagatcagaccctttatttttcaaactacaaggcctgcttattggacagtctaaggaatagctttgatacttggtattcagttggttccattattaatgtatattatttttatttaaacatcaaaacttaaaatatcagataatgttgcatgttttaaaaacacatttcatccctttggctacccaggaccagcactatttaagacactgcttatttataaaatgagaataatgattatatgtacatattcagacatcaaaatttaatgacattctattttgagaagggaagacaatgctgaagaaagtaaaactgttgattgaaatgctgacagggtggagaacgaatttgaagacagtggaataaactatgaactatgctaatggtaattagattttttgtttgtttagtatagtggtaaattgtgtagtatcttgctgagaatctaattctatcttgtaaaatcaatccaaatgtgtattgtgaaacacctgtataaaatcatttttgaaataaa

SEQ ID NO: 362486 - DNA, 503 bp, Homo Sapiens
caaacatgtaaacctattttcctatgaaaaaaattttaaatgtcccacttgaataacgtaattcttcatagtttttttaatctatggataaatggaaacctaattatttgtaatgaattatttagacagttctaagccctgtcttctgggagttatcaattttaaagagaacttttgtgcaattcaaatgaagtttttataagtaattgaaaatgacaacacaataacactttctgtataaaagtatatattttatgtgatttattcctactaaatgaaagtgcactactgcctcatgtaaagactcttgcacgcagagcctttaagtgactaaggaacaacatagatagtgagcatagtccccacctccacccctcacaatttatttgaatacttcaattgtgcctctcaattttttgtaatgctaaaaaatcagtatctagatggtttttaaatgtattctctggaaattgttttatgtaaaataaatgttacttaattcc

SEQ ID NO: 362487 - DNA, 463 bp, Homo Sapiens
agcgacaggttcctctggacttctctggaccacagtcctctgccagacccctgccagaccccagtccaccatgatccatctgggtcacatcctcttcctgcttttgctcccagtggctgcagctcagacgactccaggagagagatcatcactccctgccttttaccctggcacttcaggctcttgttccggatgtgggtccctctctctgccgctcctggcaggcctcgtggctgctgatgcggtggcatcgctgctcatcgtgggggcggtgttcctgtgcgcacgcccacgccgcagccccgcccaagaagatggcaaagtctacatcaacatgccaggcaggggctgaccctcctgcagcttggacctttgacttctgaccctctcatcctggatggtgtgtggtggcacaggaacccccgccccaacttttggattgtaataaaacaattgaaacacc

SEQ ID NO: 362488 - DNA, 1942 bp, Homo Sapiens
ggccgggccgcacccgccgagccgtgaaaaaagtacatctcctggaagggatgctttttagctgagctctggtggatgagaggagctagccttgaaaaacttgatactgatggacattgtgtgggccagaggcagggatggttggctatgaccccaaaccagatggcaggaataacaccaagttccaggtggcagtggctgggtctgtgtctggacttgttactcgggcgctgatcagtcccttcgacgtcatcaagatccgtttccagcttcagcatgagcgcctgtctcgcagtgaccccagcgcaaagtaccatggcatcctccaggcctctaggcagattctgcaggaggagggtccgacagctttctggaaaggacacgtcccagctcagattctctccataggctatggagctgtccaattcttgtcatttgaaatgctgacggagctggtccacagaggcagcgtgtacgacgcccgggaattctcagtgcactttgtatgtggtggcctggctgcctgtatggccaccctcactgtgcaccccgtggatgttctgcgcacccgctttgcagctcagggtgagcccaaggtctataatacgctgcgccacgccgtggggaccatgtataggagcgaaggcccccaggttttctacaaaggcttggctcccaccttgatcgccatcttccccgtaacgccgggctgaagtcctcttgctacagctccttgaagcacctgtacaagtgggccataccagccgaaggaaagaaaaaatgagaacctccaaaacctgctttgtggcagtggagctggtgtcatcagcaagaccctgacatatccgctggacctcttcaagaagcggctacaggttggagggtttgagcatgccagagctgcctttggccaggtacggagatacaagggcctcatggactgtgccaagcaggtgctacaaaaggaaggcgccctgggcttcttcaagggcctgtcccccagcttgctgaaggctgccctctccacaggcttcatgttcttctcgtatgaattcttctgtaatgtcttgccactgcatgaacaggacagccagccagcgctgagcgcaggaaggaccccaggtcttccctggaggcagcctcctgaaggaaggaagattcagtctccactgagaggtgccgtctggcccttccctgcaggccagctgccccaagcggggtagcagccttgaacccacccagctgggacaccaccagaaggtccagggctctccccatgagagaatcagagggaatgcaggacgtggtctatggtgagccaacgacacagtgagaaggagcaggaagttgctgtttctcctctgaccagcccacactgcaaaggaaacagacgccatcctacacctatcagccctgcctgccaggagaacagaacacactcctggtctggatggggctgctgcttgagtgcagagggctgcggtaggcccttttgcaggagtcaggtccctacacttggcctgtttttccaacctatttaatagacattaaagctaaacacacattccttatcttactccatctcccctggcacatctgcctactcacaaagtatgagggaaaggactcctgccttcctcaaatcccatgttctccatagcggcagcccttggcagctctgcttctagtgctgggggagactccaggctgagcaagtcactgtctgggccccgtgcccagaccttcgtgtctgcagacacaccaccacccaggctgtcctctcccaggaccgggctggtcatggccgtggggctccatggaaagcagatcccagcgcccgtgcaggaagtggatgggccatgctgtgggcaggcgtgggtgaaggtgcagcctctccccagtctacctcactgactcctctaacacccaggagctagcctca

SEQ ID NO: 362489 - DNA, 478 bp, Homo Sapiens
catttcaaagatgtgatgactaaagtctcgagagggccaaggctcgcccaaggttgctctgtggtgacagctttacctccttgctatgtattctcagatattgcaaacggacgagagaaaagtggagaatgaatcctggagaaaacaaggtcgttcgacgatttcgacacgtcgcatccctgagagtctctcgtgtcctgatcaactcgagaactggaggcggtgacattttagatgctgcagtgaaagccacagagccacggaaggccgagactccaccatgtttgtgatcttcacattcagcaaactcactcgcactctgcctcatcttatctctagaatgtattttaccacactgtgtcccttctttagtgggaatgtctttggccaaaaataatgaatagttctgacctgacttgctaatacccagtgataaaaggatggaatttgttgggaataaaagaaaactaagcttaca

SEQ ID NO: 362490 - DNA, 490 bp, Homo Sapiens
tctaatatgtggtagattgtattttccaggatggccacatctcccttcccacatgctcttcttacaatatggtcatgacattcctcacgtagagagatgtgtctctgttctttcctcttgaatctgggcaggctcgtcactacagtggaagtgattccatgtgatttctgaggctagatcataaaaggtgatgaggcctctgcctaactaggggaaatgctttctcttgagatgctcactcttgaccagcctatagagagatccacagggaggaactgaggccccagcccacagccttggttgagctccagcctgcagtcatccccaacttgccagccatatgagtgggccatcttagaagcagatcctccagtcaagccagcccagctgatgctgtgtggagtggagacaagccttctgtgctgagccatgcaaaaaattgcagatttgtgaacgaaataaatgattgttattgttttaagctaaaaaa

SEQ ID NO: 362491 - DNA, 498 bp, Homo Sapiens
  misc_feature (14)..(14): n is a, c, g, or t
cccccggaaggccnacaactccccttccccaaaagcctccttccttaaaaaaaaggtccatgaacaatccctcaacgtaaaaaagatgtgtcctcctgttcctttccctccttgaaatcctgggccaggcctccgtcacctaacagtggaaagtgaattcccatgtgaatttcctgaggcctagatccataaaaggtgaatgaagccctctgccctaactaggggaaatgcctttctcttgagatgctcactcttgaccagccctatagagagatccacagggaggaactgaggccccagcccacagccttggttgagctccagcctgcagtcatccccaacttgccagccatatgagtgggccatcttagaagcagatcctccagtcaagcccagcccagctgatgctgtgtggagtggagacaagccttctgtgctgagccatgcaaaaaattgcagatttgtgaacgaaataaatgattgttattgttttaagct

SEQ ID NO: 362492 - DNA, 780 bp, Homo Sapiens
  misc_feature (49)..(49): n is a, c, g, or t
  misc_feature (611)..(611): n is a, c, g, or t
cgctgcgagcagcggctggctctgcgctgcgggacagcgcggcgcccgnactcacgagatggaaccccactgagctggtgtgttggaagaaccaatgaaacacaaacgtactggggaggtctatccgcctgatcttcaaaaatgtacttgtggattagagggaaactgcattgattctcagtattactgcaattgtgatgctgaccggaatgaatggaccaatgacactggattgcttgcttataaagaacatcttccagtaactaagatcgtgatcacagacacaggccgactgcattcagaagcagattataaactggggccactgctctgccgcggagacaaatcattttggaattcagcttccttcaacaccgagacttcataccttcatttccctaccttccacggagaactcaacgcggacgtatccttcttttttaagacaacagcttcatctggggtatttatagagaacctggggattgctgattttatacggatagagcttcgctctccgacagtagtgactttttcatttgatgtggggaatgggccttttgaaatctcagtgcagtcacccacccacttcaacgacaaccagtggcacncatgtgaggggttgaaaggaacatgaaggaggcctcccttcaagtggatcagctgacaccaaagacacagcccgcccccgctgatgggggcatgtcctgttacagctcaacagtcagctcttcgtgggtaagttctctttttaagcaatcattttattgtatgatatgt

SEQ ID NO: 362493 - DNA, 546 bp, Homo Sapiens
aattctgtttagacattttttgtcccagaaatacagaagcttgaaatgctatgaaggcagagcttctattctttatgggatgaaatatttcaaaagaggataaatcctctgtggtaagccatttggaaaatcctaccaagaattggcttatttaattttccagaaccaggaatgagtatctaatagcttttgtagaaccttccagaatatgtggggaaaaagggctattgctaagtgagctttatctaatatcctcctaagagttttactagtgcttttttgaggaattacagggaagctcctggaattgtacatggatatctttatccctagggggaaatcaaggagctgggcacccctaattctttatggaagtgtttaaaactattttaattttattacaagtattactagagtagtggttctactctaagatttcaaaagtgcatttaaaatcatacatgttcccgcctgcaaatatattgttattttggtggagaaaaaaatagtatattctacataaaaaattaaagatattaactaaga

SEQ ID NO: 362494 - DNA, 854 bp, Homo Sapiens
cttggtgactaagaagggaaaggactgcatttctctctcctctgctgcacgaatccccattgggagagagagtgttgaagaggacactcaggtccctaggcggagctcctgccacaccccaagtatggacagctccaggacacagagctgcaggtggggacctccccctgctctggaaatcagccagggagcactgggcagtgcggtttgaggctctgtacccctggcccccacagctcagccacagcaccctctagcttgggggactagtccagggccaaaatgggataacccttccccatataagcagtaggatggcgtcccccctggtggagagaggaaggaggcctagagggtgtggggcagcttcgaagcacggggagccgggggtctccaagcaccttctcctggacatgccagccttgaatgggggatgtgcagggcttcaaacccacctggcaggagccctgtggcagggcagagggaccctgctccaaattctctgttggctgcgcttttgtatccaatgcttttcagagtgtattcactcacccacagaaatagagccctgtgctttaggggtgactgtcatatgccttattcttaataaaatctctgaaaaacgaaccaccaaccctaaacaaagagaaaaaactgtcggccgctcggcctcgagagcttctagaccatcgtttgcgcgcggcccgtagtagtgacatgtcatactgtttctagaatctgtctgatatgcttgatctcacataaaccccgcgcacgacgtcgacatcgaggatctagtctctgtctcaagatcacgataatcatacccgctccctcctcgtatctactcgcag

SEQ ID NO: 362495 - DNA, 780 bp, Homo Sapiens
ggggacctgagctggggcctgtgcttccagcgggtggtggggggcctggtgtgctggcatcaagtaagccgactacctcggcaaaggcttagggacaagagaccagcagcctgaactggctggggcatccggaaggcttagatcttgtggccaagagttcagaccgtggcgaagtggagagtgacatgcagttggatggcggtgactgcgtggtcctgcaaccctggttccagtctggcaagcattgtagacctggctgctgaagactgacggggcccagggtccgctgcccccaccgccatcaccacctcggaacccagggtaacgctgtcagtctttgagcctacgaggaaaccattcggaagctccagaacccaggccctaatcacaacgcccctatccagcaggaagcagccagatgatcaacgacgccctttttcctttttatactaaagtaagaaataagaatgttagcccaaactgcactattttgcagacccctaccattttacaaactggtcagagtggaaaattccaccagggcctgagctgtgagaaacatcctgtcaggcaggtcccaggcctaacccctggctgcactaaattccttcattatcagcagccaaacacaccgcccccaccccattttcacaacaatcccagacctctcctgcccgggactgtaactggtccagcctgtaagcgggaagggggctctggcactagctggtaccccctctccgcaggtctttctcccaataaatctgtgttgccattgag

SEQ ID NO: 362496 - DNA, 887 bp, Homo Sapiens
  misc_feature (764)..(764): n is a, c, g, or t
  misc_feature (854)..(854): n is a, c, g, or t
  misc_feature (877)..(877): n is a, c, g, or t
ggggacgctaggttccggaacctgacctgagctggggcctgtgcttccagcgcgtggtggggggcctggtgtgctggcatcaagtaagccgactacctcggcaaaggcttagggacaagagaccagcagcctgaactggctggggcatccggaaggcttagatcttgtggccaagagttcagaccgtggcgaagtggagagtgacatgcagttggatggcggtgactgcgtggtcctgcaaccctggttccagtctggcaagcattgtagacctggctgctgaagactgacggggcccagggtccgctgcccccaccgccatcaccacctcggaacccagggtaacgctgtcagtctttggctgaattgttttatccaggcaagcatgcaaaaacacattgataatatatttcacctttgccacgtctaataccagagcctacgaggaaaccattcggaagctcccagaaaccccaggcccctaatcacaacgccccctatccagcaggaagcaggccagatgatcaacgacgcccctttttcctttttagactaaagtaagaaataagaatgttagcccaaactgcactattttgcagacccctaccattttacaaactggtcagagtggaaaattccaccagggcctgagctgggagaaacatcctgtcaggcaggtccccagggcctaacccctggcctgcactaaaattccttcattatcacgcagccaaacacaccggcccccaccccattttcacaanaatcccagacctctcctgcccgggactgtaactggtccagcctgtaagcgggaagggggctctggcactagctggtaccccctctccgcnggtctttctcccaataaatctgnaaagccattg

SEQ ID NO: 362497 - DNA, 525 bp, Homo Sapiens
cagacattgagcctgtaactgtgagaactgaggctacagtgacaacattagctccaaaaacatcgcaacgaacaagaacacgtcgtccacgtcccaaacataaaaccacgccacgcccagagactgcagaccaaactagactttggacctattactcctgggacatcttcagctccaacaacaacaacaaaaagaacccgtcgtccacatcccaaacctaaaaccacgccccatccagaagtacctcaaactaaactggttcctgccacaatcctcgaaccagttcttagaactgaggcttcagggacaacagcagctcccaaagtgcctcaacgaactcatcgtccacatcccaaacctaaaaccacactgagtcccgaagagcttcagactgaactggttcctgctacaatctttgaaccagtttctcctataaaagaggctccagggacaacattcgttcctgttacagacctcgagcctgttacttttagaactgagatccctgcaacaaccttagctacc

SEQ ID NO: 362498 - DNA, 410 bp, Homo Sapiens
  misc_feature (24)..(24): n is a, c, g, or t
  misc_feature (33)..(33): n is a, c, g, or t
  misc_feature (63)..(63): n is a, c, g, or t
  misc_feature (70)..(70): n is a, c, g, or t
  misc_feature (79)..(79): n is a, c, g, or t
  misc_feature (86)..(86): n is a, c, g, or t
  misc_feature (91)..(91): n is a, c, g, or t
  misc_feature (131)..(131): n is a, c, g, or t
  misc_feature (286)..(286): n is a, c, g, or t
cccccattttggaaacccagaagnactgtctcncctgaacccgtgcactatattgccagttgnacatggngaccccgtncaaattnctganctagaggttgaggaaaaagatgaattgctgcttacattcngataatcagtgaccacgaaacactcagaccagagcctggcttatcaaaaaccttcagtgagtgctgggggtgtgagtgaataactaattattttattatgcaaataagtgaatttataaaacgtttgctactgattttttccagtcttttttctnttttacgttctattttgattctttcatattgtacaccattttatgtctccagcgtcttcattttagatttatgtttaatattctcagcatcttcaaaatcaaataaattatatttcgtttcatt

SEQ ID NO: 362499 - DNA, 122 bp, Homo Sapiens
ccctttccccattcccttgtaaatacattttgttctatgtgacttggtttggaaatagttaactggtactgtaatttgcattaaataaaaagtaggttagcctggaaatgaaattaaaaaaa

SEQ ID NO: 362500 - DNA, 725 bp, Homo Sapiens
  misc_feature (211)..(287): n is a, c, g, or t
agtccccttactccaccactgccatcctcacttcctataactggaggccatgtcacacagggcatttctagataacaatagctaatattgagagagcacccattatatgtcaggtactacgtaagaactttataaatattatctcatggatatgtgtgcaggggtgggcagtagatctacaggaaattatctcatgcccttttaaaattannnnnnnnnnnnnnnnnnnnnnnnnnnnnnnnnnnnnnnnnnnnnnnnnnnnnnnnnnnnnnnnnnnnnnnnnnnnnaaaacaggcaaatgccagtatttgaaccaaagataatgctcttacctggtacaccatatttcagagttgggatctccaaagcagatctgaggatggcaccggggcagcctgagcccagcccttccacttccaccccaaccctgcagacgcctgatgtatttacaagcatctgccctgggcggcagccatggagtgagcctcttggagaatcccaaggctctacattgaggaaaggtcccatctggcttcccctccccagtctagctcagctggagagacaggaaggaggggtggcctccctcctggccaggcctcatgtatagacccttgtcatggctggcagacttgaatgactttctttatcctcccttctcttccctacttcccccactgccagctgtggccatttaataaaattagcttaatgcttgttccttc

SEQ ID NO: 362501 - DNA, 559 bp, Homo Sapiens
gaaaccgagttcagaccgagcaggttctcctcctgaggtcctcgacgcctgccgacagcctgtcgcggcccggccgcctgcggcactgccttccgtgacgtcgccgttgcactatggacagttgctcttaagagaatatatatttaaatgggtgaactgaattacgcataagaagcatgcactgcctgagtgtatattttggattcttatgagccagtcttttcttgaattagaaacacaaacactgcctttattgtcctttttgatacgaagatgtgctttttctagatggaaaagatgtgtgttattttttggatttgtaaaaatatttttcatgatatctgtaaagcttgagtattttgtgatgttcgttttttataatttaaattttggtaaatatgtacaaaggcacttcgggtctatgtgactatatttttttgtatataaatgtatttatggaatattgtgcaaatgttatttgagttttttactgttttgttaatgaagaaattcctttttaaaatatttttccaaaataaattttatgaatgacaaccag

SEQ ID NO: 362502 - DNA, 841 bp, Homo Sapiens
ttagcataaaacttttattttaagcacacataaaacataccagagttgtcatttagttatttaaagactatcaaggtctcatccttagattgatcagttaatttattgatcaattgaattattcatttattagtgttacattgaggagcacttatgtgactcttagtgattgccctttttaaatttatagacacaaatttaatttataggaattgaatctgtttaaaattatatcactttttaaataaagtataagtatttcaatgatacattcaaaatttccaataccctatttttagtgatatttgtagttttcaggatagttattatgcatagaggctcctgttttgttaattttgttgtcatgttctcattttttatcaaaaaaatgtatagtaaatttatgtacctaccatacagtcctttgttacaaatcagttactgtgttttgtgtaacttatgtagtatttaaacatatgtcataaagggccaatgttcatttttaatgtacgagattttttgtaaaaaattttacttgggaaaaactgatgtgagtttttaagattgaataatgggtgacatgatgtagggggaaaatgacattatttcatgttaaataaggtggattcttccaccgtaaactcttttacgtctataaatttattatgttcataattattgtttctgcctttgcctttttataattagcgtcttaatttgtgacgtaattttactatcacagactatggcttcaaaagaaatgtattattcttcagtaattcacagaatatttaatttacagaatactcatgttcattgtaataaatttgaaatgtagctc

SEQ ID NO: 362503 - DNA, 606 bp, Homo Sapiens
aggaagagtggtggctggaagaatgtcctagaatgtgttattgcccctgtccatgaggtacgcaatgaaaattaaattgcaccccaaatatggctggaatgcccacttcccttttcttctcaagccccgggctagcttttgaaatggcataaagactgaggtgaccttcaggaagcactgcagatattaattttccatagatctggatctggccctgctgcttctcagacagcattggatttcctaaaggtgctcaggaggatggttgtgtagtcatggaggacccctggatccttgccattcccctcagctaatgacggagtgctccttctccagttccgggtgaaaaagttctgaattctgtggaggagaagaaaagtgattcagtgatttcagatagactactgaaaacctttaaagggggaaaaggaaagcatatgtcagttgtttaaaacccaatatctattttttaactgattgtataactctaagatctgatgaagtatattttttattgccattttgtcctttgattatattgggaagttgactaaacttgaaaaatgtttttaaaactgtgaataaatggaagctactttgactagt

SEQ ID NO: 362504 - DNA, 888 bp, Homo Sapiens
  misc_feature (531)..(541): n is a, c, g, or t
actgaatgagtaaatcaatcacacaccaacagtgttgtaaatttaagtgcaaaagcattgaagtgctttactacaaattacaacctagaaacacgttaactgaacaattaaaattcatacaatcagatttagatatataacaacacaaagtaggaacagaattacagtacatttacaacacaagacagatacatgaattcattagaaaatattgtaataaataattcatgaattatagtgcaattgatttatgcataaatataactaattgcctaacaatcagtttatattaacaaaatctgtcaaaatcaaggcagccacagagttttactaaattactgcgacattggaaatactgcaattaaaaaacaaatacaagtatttgtactgtaaacaactaaaaaaatcagtctcactaaagttagtatacaatttaatataaaattgtcattagctaccagaaatggtttaaacaactttactgagcagtagttttctaaaaacagaggcactgttttctcttttccttcnnnnnnnnnnnaatataaaatacttgaggaacattcaaataagtagaaagcacataagggttgctttcaccttcattaagtctgctgaaacgggatttttcagaaaattgtcaattaataaatagtaactggtaactaaattcataaagtactttgaaagtttaacataaaggtcatcttaatagaatcactggggagaaggggaatttccctgcctttcctagtttgtataatcaaatgttaactcaataatagaaatgttttgtttcttttaaaagttatgggttgattattacctataaactatcaaaaaatattttaatttactatttctgaccaaaaataaataatacaagta

SEQ ID NO: 362505 - DNA, 647 bp, Homo Sapiens
  misc_feature (35)..(35): n is a, c, g, or t
acgccaaagtcacatggccgcatccgccacgtgtntgatcacttctctgacccaggtctgctcacggccctctatgggcctgacttcactcagcaccttggcaagatctgtgacggactcaggaagctgctagacgaagggaagctctgagagccctgagcctagcacattccaccttgacaaaatggttgactgagaaaacacagataatgggcttcctaaccctgctcacctggcactaacacttttcaatcttcaggcttcattccttcccaagagtgcttttgactctgagaccagcccacccccaaacagctagtggagaaggagcaatgctgaggggtgaggcctctctcccactccagccccaggacaggaaacagaactgcctgaaaaaggtgaagtgaaacttggatctctatttctcccataagggacttctgaaacagggaagccccctcccatgtgaaccaaggaaaggaggcacagcccagagaacccctttggggatactaaagacagaagaggggaaggtggcccttagagacagagcttggacagatgccagaggctctgttccagagtgcaggaagaaggggctagggcaggggagattctcataggggaaataaaactactaaaatatg

SEQ ID NO: 362506 - DNA, 534 bp, Homo Sapiens
aggccaggtgctgtcatccacaaaggatgggtgaaataactggggccctcaggtcacggtctagccacaccagcttctcccaagtactacccaggcttgaccctgcttagcttcagaggtcagacaagatctggcatgttcaggatggtatggctgtagaccaggctgggttctggccagagctgttgcactaggcaatgctgccagagatgaggaggcatcagggcagtcatcccttctgctgtttgccccaagaatgccatacaaacctggggatgacccttaaaagtctcccgtcacccccagtattggggggaagctgactattcctcagatgatagcccagtcacttgaagaacaggacaagactattctgtgtctagggggctcaagcactgtgtgtgggtctaacgaatgcattttgtggaaatgggctcagactccccaaagggccatccaacctatgggagtgtctggccttctgaggtcctgaaatgtctcttttgtcagtaaacagctaataccctcaaaaaa

SEQ ID NO: 362507 - DNA, 717 bp, Homo Sapiens
catttatgtgaagcaaagacttactccagcgtggtgtggcactccatgcaagatgaatttatacgccagtataagcactttgaaggtttgatagctcgctgttatcctggatctggtgttacaatggaattcactattcaggacattctggattattgttccagcattgcacagtcccactaaaccttgtgaaagaagaaaagataactgaatgaagcatttgagtataacagacactataccaaaataccaagcaactgttttgagaacccagacttaaaattttatgtattattaaatgttagataaatgggtagtaccatactacaaatatttaaatgcaaaattaccaacctatatagcagttttatttgccctataggttgcatactaacttaagcattcatgtcaccataaaatgcctttagcatttctcaatgactggatgggaaattttcctttattgcctagctgcttgtgtttgagtggttgtcctatgagcaatgcatttggagttcttcagctttcactacttctctgttgcttgctaatcatgtaactactaaaatactgtacaaaattgttttttcacactaacaaatgtgtatatggagaagagggctcatgtgatgatcatttgtgaacttagatttttgaggattatgtgactagtaataaatgtgaaataaattttcaaaaaagttgacatttgataat

SEQ ID NO: 362508 - DNA, 349 bp, Homo Sapiens
gactattaagggagcactttaatgaacagaagtacagacgtgctggcaaggatggaaatctccactggttcctggcccccttcacctccatgcatccccagcatgggtgttaatcattacccaagctctcgctgttccccctcaccccctgcagagtccagcaggtctagatacgtgctctttgaaatgtgttctgggattaaaaatggtgccctgaggctgtctaaccctcacaaaagacagacacatgcacacacgggccttggggagggctgtgtattaacagtcaggtgggccctcctgggagagcttgctcaagaactcttctcggaaggaaacccaccttaag

SEQ ID NO: 362509 - DNA, 408 bp, Homo Sapiens
  misc_feature (393)..(393): n is a, c, g, or t
gttcctctatgagactggagccaagatgtatgactcatcttaatcatgctgcacccaaaatcagtgttctacagccagcacaaaccctatatatgtttattgaaaattagtccatctaaaaatatattcagatgttacacacctaaaaacaacgcattcaaggctaaatttagactttgtcccatagaaatacacctctagcccagattttaatttaagcacttcagtgtgtcaatcactttggcaaatacagccgggtacccacatagctctgtactgttgatgctaagtcagccttccagccaaaaccagagaggcaccacctagcattgtgatgtcagtattatgtgtcagcaagatacttagccctgcaacccttaggtggtcatgctntctcccagcccatga

SEQ ID NO: 362510 - DNA, 1783 bp, Homo Sapiens
  misc_feature (698)..(715): n is a, c, g, or t
atcaggccaaatcggccgagctcgaattcgtcgagagcggggcatattaatgagctcgctcgctgcgagggcaggagcggatttaaaagaggccaggcgggcggagggaggctgtggagagagcgcggagacaagcgcagagcgcagcgcacggccacagacagccctgggcatccaccgacggcgcagccggagccagcagagccggaaggcgcgccccgggcagagaaagccgagcagagctgggtggcgtctccgggccgccgctccgacgggccagcgccctccccatgtccctgctcccacgccgcgcccctccggtcagcatgaggctcctggcggccgcgctgctcctgctgctgctggcgctgtacaccgcgcgtgtggacgggtccaaatgcaagtgctcccggaagggacccaagatccgctacagcgacgtgaagaagctggaaatgaagccaaagtacccgcactgcgaggagaagatggttatcatcaccaccaagagcgtgtccaggtaccgaggtcaggagcactgcctgcaccccaagctgcagagcaccaagcgcttcatcaagtggtacaacgcctggaacgagaagcgcagggtctacgaagaatagggtgaaaaacctcagaagggaaaactccaaaccagttgggagacttgtgcaaaggactttgcatgattacgnnnnnnnnnnnnnnnnnngcctttctttctcacagggcataagacacaaattatatatttggttatgaaggcactttttaccaacggccagttttcacacttttatagctgcgtgcgaaaggctcccagatgggagacccatctctcttgtgccccagacttcattcacagggctgctttttatcaaaaaggggaaaactcatgcctttcctttttaaacacaatgcttttgtgtatttgcccatacgtcactatacatctgagctttataagcgcccgggaggaacaatgagcttggtggacacatttcattgcagtgttgctccattcctagcttgggaagcttccgcttagaggtcctggcgcctcggcacagctgccacgggctctcctgggcttatggccggtcacagcctcagtgtgactccacagtggcccctgtagccgggcaagcaggagcaggtctctctgcatctgttctctgaggaactcaagtttggttgccagaaaaatgtgcttcattcccccctggttaatttttacacaccctaggaaacatttccaagatcctgtgatggcgagacaaatgatccttaaagaaggtgtggggtctttcccaacctgaggatttctgaaaggttcacaggttcaatatttaatgcttcagaagcatgtgaggttcccaacactgtcagcaaaaaccttaggagaaaacttaaaaatatatgaatacatgcgcaatacacagctacagacacacattctgttgacaagggaaaaccttcaaagcatgtttctttccctcaccacaacagaacatgcagtactaaagcaatatatttgtgattccccatgtaattcttcaatgttaaacagtgcagtcctctttcgaaagctaagatgaccatgcgccctttcctctgtacatatacccttaagaacgccccctccacacactgccccccagtatatgccgcattgtactgctgtgttatatgctatgtacatgtcagaaaccattagcattgcatgcaggtttcatattctttctaagatggaaagtaataaaatatatttgaaatgtaa

SEQ ID NO: 362511 - DNA, 488 bp, Homo Sapiens
aatctgcaaagtcctttgcacaagtctcccaactggtttggagttttcccttctgaggtttttcaccctattcttcgtagaccctggggagaaaaaacacatgtgtaagtggctcaggacatgaggcaggccgttcacaagatgctggctaagcggcttcattcacgtctggtctgcagggaatgcccctgtcccagaactgcaggaacccccaggagaagtgggagggatccttctgaggatgtggtcccggggaccatgaaaactcacaccagtgtggctttgtcttttctaaccatcttgcaatctcacttctgcaatcttcattttgttcctcagagggcctatgggaacaaacccgctttgcatatgaggaaactgaggcaccacagacttaagatttgcccagtggccaccgactgttagtggcaggaatgtagtctttctctagcatggcgggctgctcccacacctccttgtttctttcc

SEQ ID NO: 362512 - DNA, 533 bp, Homo Sapiens
gagcctggagtcctgggaatacggtccagggtcacctacagctctccccatccttccactcagcttatcctggaagccccaagagacgcagctctgctgatgcagctagacacagctccgaagacaccacaggaagctttggaagcacaatacactttgtgaagaaatttgaaaacttcagtgctacttagcaagtttcttggcattagcagttatccagggactcccagcgggtatctacccagctggagaaagaaatattccaacaggaaggaagaaactctccaatctcactgcaggcctggatatttggaaagatctcatcaccagacagggtgaaggacactggactttgacttttggactcacatagccaatggcttgcttggcgtcttcacaaagatatctaacaagcatctcaaccctaacagaactctcggttccttccctctcatccccaacatacgcccccactaatgttccccatttcaataaaataaatggttttggcttaagccaaaagcctagactca

SEQ ID NO: 362513 - DNA, 705 bp, Homo Sapiens
ggggaactggagtggaatcgcgactatgggagctccggggggaaagatcaaccggccccgaacggagctgaagaagaagctgttcaaacgccggcgggtgttgaatcgggagcggcgtctgaggcaccgggtggtcggggctgtgatagaccaagggctgatcacgcggcaccacctcaagaagcgggcgtccagtgcacgtgccaacattacactgtcagggaagaagcgcagaaaactcctccagcagatccggcttgcccagaaagagaagacagccatggaaggtgaggctgggacagaggtgggtgaggggaatcctggatttatttgggataatacttccttcttccctttactcagtggaagccccttcaaagccagccaggactagtgaaccacagctcaaaaggcaaaagaagacaaaagccccccaggatgtagaaatgaagggccttgaagatgagagctaaaccttttcccctagaagattttcaactggagccagccttcagactcagtggttgtttcaaaggactttgacaaaagcaaggccccttttccctttccagatttcctcctacctaatggcctactgacctcccctaaagggatgtttttgggagggaaaaagggacaaaaaaaagattggagaagggcctctttagcagtcaactccctttgtaataaagccctagccctttg

SEQ ID NO: 362514 - DNA, 819 bp, Homo Sapiens
ggggcgactatgggagctccggggggaaagatcaaccggccccgaacggtgactgtgtgggggccgcgactttgtttcctcaagcgttcctgagcccttttatctcgcacgagatgggatcagtgaggggccggggctgcctggtggaggggccccgggtcgcggcgagcccactccatctgattcgcatctttctccccggcaggagctgaagaagaagctgttcaaacgccggcgggtgttgaatcgggagcggcgtctgaggcaccgggtggtcggggctgtgatagaccaagggctgatcacgcggcaccacctcaagaagcgggcgtccagtgcacgtgccaacattacactgtcagggaagaagcgcagaaaactcctccagcagatccggcttgcccagaaagagaagacagccatgggaagtggaaaccccttcaaagccagccaggactagtgaaccacagctcaaaaggcaaaagaagacaaaagccccccaggatgtagaaatgaaggaccttgaagatgagagctaaacctcttccactagaagattctcaactggagccagccttcagactcagtggttgtttcagaggactttgacaaaagcaaggccccttttcactctccagatttcctcctacctaatgggctactgacctccccttagagggatgtctttgggagggaagaaggtaccgaagaaagattggagaagggtctctctagcagtcactccatttgtaataaagcctagcactcttgaagaaataaagaccagctgtgagaaacaaaaaaacttccccaggggtg

SEQ ID NO: 362515 - DNA, 1140 bp, Homo Sapiens
  misc_feature (686)..(686): n is a, c, g, or t
  misc_feature (688)..(710): n is a, c, g, or t
  misc_feature (719)..(757): n is a, c, g, or t
  misc_feature (806)..(881): n is a, c, g, or t
  misc_feature (924)..(933): n is a, c, g, or t
  misc_feature (968)..(968): n is a, c, g, or t
  misc_feature (1028)..(1045): n is a, c, g, or t
tcggctaggtacgaggcctggctgtgaattcggcacgaggacggaccgtgaactggagtggaatcgcgactatgggagctccggggggaaagatcaaccggccccgaacggagctgaagaagaagctgttcaaacgccggcgggtgttgaatcgggagcggcgtctgaggcaccgggtggtcggggctgtgatagaccaagggctgatcacgcggcaccacctcaagaagcgggcgtccagtgcacgtgccaacattacactgtcagggaagaagcgcagaaaactcctccagcagatccggcttgcccagaaagagaagacagccatggaagtggaagccccttcaaagccagccaggactagtgaaccacagctcaaaaggcaaaagaagacaaaagccccccaggatgtagaaatgaaggaccttgaagatgagagctaaacctcttccactagaagattctcaactggagccagccttcagactcagtggttgtttcagaggactttgacaaaagcaaggccccttttcactctccagatttcctcctacctaatggcctactgacctcccctagagggatgtctttgggagggaagaaggtacagaagaaagattggagaagggtctctctagcagtcaactccatttgtaataaagccctagcactctgaaaaaaaaaanannnnnnnnnnnnnnnnnnnnnnnctcgaggcnnnnnnnnnnnnnnnnnnnnnnnnnnnnnnnnnnnnnnncatgggtcatagctgtttcctgacccagctttcttgtacaaagtggtannnnnnnnnnnnnnnnnnnnnnnnnnnnnnnnnnnnnnnnnnnnnnnnnnnnnnnnnnnnnnnnnnnnnnnnnnnntgcagaaacccggggaattttaaccggcctaatgaacggggcnnnnnnnnnngggatccaaaaggaaccttctttggaaattctttntttttctggccaataaatcctgcttgcttggcaaaccaaaaaaacccccctttataaaannnnnnnnnnnnnnnnnngccccggattcaaaagacctcccccatcttctttttttccccaaaggggaaactttgggcttttcccccaaaaacgcccacaaaatcccaaatta

SEQ ID NO: 362516 - DNA, 463 bp, Homo Sapiens
ggggtataatcgagaacgaggaatagaggcacgacggggacaaggctgagatagaccaagggctgatcacgcggcaccacctcaagaagcgggcgtccagtgcacgtgccaacattacactgtcaggaaagaagcgcagaaaactcctccagcagatccggcttgcccagaaagagaagacagccatggaagtggaagccccttcaaagccagccaggactagtgaaccacagctcaaaaggcaaaagaagacaaaagccccccaggatgtagaaatgaaggaccttgaagatgagagctaaacctcttccactagaagattctcaactggagccagccttcagactcagtggttgtttcagaggactttgacaaaagcaaggcccttctccaatctttcttctgtaccttcttccctcccaaagacatccctctaggggaggtcagtaggccattaggtagg

SEQ ID NO: 362517 - DNA, 647 bp, Homo Sapiens
  misc_feature (127)..(135): n is a, c, g, or t
gtagtcaaaacatttttttaaaatttataatatgacacaatttcaaacacaccacaaataacaacatccatgttcccactacccagattttaagaatgttaacatattgtcacatttgcttcagaannnnnnnnnaagaaataaaacattatagagacagttttagtcccaccaccggttagcacaataccacagaacagggccaccaaagaggctgtctcctctggcggtcaggaaggtcgagaatcagaaagccaacaccgctgtgaccactgcaatggttggatcggttctgtgccagatagatctccactggtgaacaatagatgcccatgccctgccctcgacgcttgtgaagctggtaataggacactgggaggccttctggggaaaactcagcacctcatcactgtgcttaccgacagaaaccacagaagcggcagaagcatgctctccatttccttctctcctccaaatctcacacgaggtcatctgattgttcatctcagcagaatgctcgtgggaatacttgtgaaaaaccgtctcagcggctgcccccgcctcctctgctggatgtgaaatggcggtcggcgaggcaagtgtgagcatcgcagctcctgccaatcctgcatagccgccaaaacggc

SEQ ID NO: 362518 - DNA, 920 bp, Homo Sapiens
  misc_feature (70)..(119): n is a, c, g, or t
agcggacggtaagaaaatccgcccgcgtgaggagggaggcgaggcgcagatctcgtgccgctgcggcctnnnnnnnnnnnnnnnnnnnnnnnnnnnnnnnnnnnnnnnnnnnnnnnnnnacgcagccggcccttctcaggtaacgccgcggctccgcgcgtggcccgggggcggtgcgaagggtgggggcgcgcgggcgcgggcttcggcctataaaagggccgccctggcgttcccccttcccgaacgtgccgcgcgagccgcggtgccccctcctctttgctgctgcagtgtctgcgccgggccatttaatgagatttattcacgcacggctcttctcagctttgcgaggggttggcagatccagtgcacagggatttcccactaccgtgttttctcccgcccccttccttccctctcgtcctaatacatccttcgttggtttcctcggccccgcaggctgcgtccccgggcacgcgcaagtacatgtgcattttagtggttaccaggttgccacgtatttgaagtggtgtgagagctactcgtttggaaccgttgtggattttcaaataggaaaatcaaaaggcccaaagagacagctcactggtgaccatgctttgggattttcatagtttgagtaattcctatgggctctaccacccagcgagttaaagaagacaagattccacccccagggggttgtgggttctggggcaattgtgagcagcttgtttttccaggagaatctgcatcttgatctggcctggctattaggatctgtggtggtggtgcctgtctggttttagttgtttcttttatcttacacagatttttgtaagttatttgcatataaaggtttttgaaaagtgaatgttttatgggggcatcttgcttatacaaagaaaaattaaaactgtttt

SEQ ID NO: 362519 - DNA, 555 bp, Homo Sapiens
ttaagtgtatctataatcactatatatgtgtgccctagagaatattattttaaagaaaaaatggcaacaatacattgtatattttcctccttggtaagctaacaaatgctatgtttggtaaaaacaaacacaattatctacctgttgaagctcacacaacttttactatttaaggttgttttctttaactgttattagaagaaaataattatgctcaagtcatatctgtctcatttccctgtaggtgaccatgctttgggattttcatagtttgagtaattcctatgggctctaccacccagcgagttaaagaagacaagattccaaccccagggggttgtggttctgggaatgtgagcagcttgttttcaggagatctgcatcttgatctggcctgctattaggatctgtggtggtggtgcctgtctggttttagttgtttcttttatcttacacagatttttgtaagttatttgcatataaaggtttttgaaaagtgaatgttttatgggggcatcttgcttatacaaagaaaaattaaaactgttttaaaat

SEQ ID NO: 362520 - DNA, 760 bp, Homo Sapiens
  misc_feature (629)..(710): n is a, c, g, or t
cgcgctcgcgcacactacgccagaacaagatggccgacgcggcggccacagctggggccggtggctccggaacgagatcgggaagtaaacagtccactaaccctgccgataactatcatctggcccggaggagaaccctgcaggtggttgtgagctccttgctgacagaggcagggtttgagagtgccgagaaagcatccgtggaaacgctgacagagatgctgcagagctacatttcagaaattgggagaagtgccaagtcttactgtgagcacacagccaggacccagcccacactgtccgatatcgtggtcacacttgttgagatgggtttcaatgtggacactctccctgcttatgcaaaacggtctcagaggatggtcatcactgctcctccggtgaccaatcagccagtgacccccaaggccctcactgcagggcagaaccgaccccacccgccgcacatccccagccattttcctgagttccctgatccccacacctacatcaaaactccggtgagtgatgaagcactgggactgcgcgtggtgtaaagcacggagtcagttcctactgactgtcacgtggcagagtccagtccaaaagcttgttgatgaaagagtggttcnnnnnnnnnnnnnnnnnnnnnnnnnnnnnnnnnnnnnnnnnnnnnnnnnnnnnnnnnnnnnnnnnnnnnnnnnnnnnnnnnngagccttgggagttcaagaaccagcctggggcagcaagagcaagaccctg

SEQ ID NO: 362521 - DNA, 407 bp, Homo Sapiens
ttttttttgattgtcagcaaacacaatatatttactgtattagcatttgctcacagtgcaaatggtacaacattacaccatttcaatatttcggtttttaaaaatgctgttttcattaactatattatattggcattacaatatgacaaaggagcaaatgaaatgttggtgaagaatttcaccttttcacaatatcaagcatatttttttaaccttagtataaggtactataaatccaagaaataaaaacatccacaaaatatattacatctggtttgtcttttttctaagtactcaactttatacaaaagtctttcaaaaaatatcattccccataggttttcctgtttaaaacctgatttttttctctcagttcacataagttagagtgcattttcttttgctgc

SEQ ID NO: 362522 - DNA, 425 bp, Homo Sapiens
  misc_feature (58)..(68): n is a, c, g, or t
ggagacagagtctggctctgcactccagcctgggtaaaaaagcgagattccatctcgnnnnnnnnnnngtgtatatgtatagtgtatgcatgcacagaatactttacagcaataagaatgagtgttctgcaaatatacacaatattgctgactctcccaatgttaaacaaaagcatccagacacacaacaatgtgtacagtatatgattccattgatagaaagcttaaaaacaggcaaaattaattcacccttatggagtcttaagtaaggggaacaaaaggggccatctgggcagtgataatgctgtttcttgagctgggtgctgggttcacaggtgtgttcagtttgtcacattcatcaagcttacacttctcatacatcttcttttctatatgtatgtcatccttcaataaaaagtttttaa

SEQ ID NO: 362523 - DNA, 469 bp, Homo Sapiens
cagaaaccttgtttgttttattcaccatcatgtaccaagtgcttggcacatagtgggccttcattaaatgtttgttgaataaaagagggaagaaggcaagccaaccttagctacaatcctaccttttgataaaatgttccttttgacaatatacacggattattatttgtactttgtttttccatgtgttttgcttttatccactggcatttttagctccttgaagacatatcatgtgtgagataacttccttcacatctcccatggtccctagcaaaatgctaggcctgtagtagtcaaggtgctcaataaatatttgtttgggtggtttgtgagccttgctgccaagtcctgcctttgggtcgacatagtatggaagtatttgagagagagaacctttccactcccactgccaggattttgtattgccatcgggtgccaaataaatgctcatatttattcacacaac

SEQ ID NO: 362524 - DNA, 629 bp, Homo Sapiens
  misc_feature (446)..(575): n is a, c, g, or t
ggtctcaaatagctgggcttacaggcatgagccaccacacctggccaggattgggtggttgaaataaaaatctgatcacccccctgcttagaacccttctgctttctattacccctcaggtaaaactgtaaactcttcaccttggtttatgagaactggttcttgccttcccattgaactctcatcaaatgctgatttcttgctaagctccagcccgagtggtctcctctcagcttctaatattgtgctctatcctgccatttgcctgggccttctcagctctccacccccaccactcttgactcagagtggtgtccttcttcatcaagtcttgacaattcccgggcccttcagtccctgagcagtctacttctgtgtctgtcaccacatcttgtcttttcccctcattgcatttattgcagtttatatatatgctacttttactnnnnnnnnnnnnnnnnnnnnnnnnnnnnnnnnnnnnnnnnnnnnnnnnnnnnnnnnnnnnnnnnnnnnnnnnnnnnnnnnnnnnnnnnnnnnnnnnnnnnnnnnnnnnnnnnnnnnnnnnnnnnnnnnnngaaggcaagccaaccttagctacaatcctaccttttgataaaatgttccttttg

SEQ ID NO: 362525 - DNA, 643 bp, Homo Sapiens
gctcgcggccgcctggctcccgcttgcggatggtgaagaagccccggaggacgctgcccagagtgtccccggtgtcctgatcgtccgacacctccacgcagcggatggagaatggaggcttgaggtaggcgaatcccaggagcgggggtctggagcagctggtcacgaacttcagaaacatagctctctcatccggtgtgaagtcggaggccagaatatcccagagccagatgatgactctgtgacttccatggaaaccaccgtagtagactgtgtgcttctttaaatcttccagatcaatctcagcattgtcgccagagatgagacgctgcagttcaggagttgagaacattcggatccactcgggtttgataatggaacggaatccgctaatgagggcagctgtttggttttttatttgagtgtgcattcgaaaatgtgccatcagatggatgtagctaattttattttcatttgtaacaggaatggtctaccctccaggaatcagttcatggcaaacaagctgatccatgacgtcctcgtcgtatgacagcgtcatgcccatgtcagtgatgtccccatcatagcgcttgatggtagtgatgtctttatagtactctgagtccagagcaagcagttcatc

SEQ ID NO: 362526 - DNA, 698 bp, Homo Sapiens
ggtaaatacacgtgcattgctgtcgtgcccattaagaaagggggagtaagtaaaagaggaatcgctcagatctttccttggatgaacagcagtggcgtggttggtgtgttgactgtgaacaggctgacttagctgttgatgtatactcagaacctccatctcctcccagaccctgcacttttccttctctgcagtctgattctctaatgactgtcactggacaaaccccagttttatgctcgcttagtaaaaataagtttaaacatttcatggtggttgacagaactttgtccccaaacatgcggattcaattccttaaaactcgttgaacgtttataccaaaggtcccgccccgcaggtgtgtatgtggtgcacagagggtgaggtttggagcatcgggcactgtgtgcattgctaaggggacatagtgagacaatgtgggatttaactaaaaacacatcaattgtgtgtcacattaccagtgttgtcaggtatttgttcttaattgttattgtaatatattttcagttgtttttctaatttaattctctccgtctgttgtctgactgtgaactgctaacagtgttaaacttgatgtaaataaatgaggcccttgaaagggactgctttctctgtcttctcacaaggtttgccaagttgtgttctgttttaaataaaggttgcaatattttattggc

SEQ ID NO: 362527 - DNA, 412 bp, Homo Sapiens
  misc_feature (121)..(121): n is a, c, g, or t
gaattccaaaccctttaaaaaaccccgttgaaacgtttaaaccccaaaggtccccgcccccgcaggtgtgtatgtggtgccacaaagggtgaggtttggagcatcggggcactgtgtgcantgcctaaggggacatagtgagacaatgtgggatttaactaaaaacacatcaaatgtgtgtcacattaccagtgttgtcaggtaattgttcttaaatgttattgtaatatattttcagttgtttttctaatttaaatctctccgtctgttgtctgactgtgaactgctaacagtgttaaacttgatgtaaataaatgaggcccttgaaagggactgctttctctgtcttctcacaaggtttgccaagttgtgttctgttttaaataaaggttgcaatattttattgattcat

SEQ ID NO: 362528 - DNA, 681 bp, Homo Sapiens
gtctgccagggatccattctgaaagcaccagcctgtcaactgtgtttttgaaggacatttcttgatgtgagtatagtctgggtgcctatgtacggcccacctatagaaattgtttgactatgtagtggaccagtaatatatgataaattagctattttaaacacagctggggtatgagttgtgccctctatatagctgtgtgaacttggctaaatttcttatcccctaatgacctcagactccatgtttgtgtaaagacgacttaacttcccatagaattcttgagggtaaaatgggataatgaatcttgccagttctagaaactgtaaattgctacacaaatgctctgtgttgacattcatgctaaagccagtctgcattttcaaaatgaaaatttcttcactatttaaggctttcattgcaataactttaaaaaccaaatatttgtccaccaacttagccctacagtaatgttcccaaagactcatgagagtttatggtttattggaaagggtccaaattggaagcagatattgattttctgggagcaaactggtctgcctttacaaagtgcaagttcaccctctctggataacacctgtgtctcattcctccctctctgccagatctcgaaggcactgaataaaccatgcagcttttgaggaagaaagaaccatttgg

SEQ ID NO: 362529 - DNA, 470 bp, Homo Sapiens
tttaagaaaaacgtgattttaacatttatattatgtttataatctagatgggtatacttctttaccctgctctagctgtgttcattgcaagataggaaattcttctgaaaacctttactgaactactgttgtcttagatcatttgtgtcatgatgaaattagcctcagagctatatttttgtgtattattcctccatttcccctgtagcatttgtactaagaaagatgttgaaaataagagttctggttctcatgttaatattatggccctgagacccagtgtcaaagtcatacaacgtccccaagctccatcctgtttcccccaacattaaatagggaagttaattcttaccttatcacccccggatgtttagagaatgaatgaaaaaaagtatttgaagcccgttgggggcaggtgtgtgtgtggaaaggctgcataaaaccaagatactgattttttccttaaaaaa

SEQ ID NO: 362530 - DNA, 545 bp, Homo Sapiens
agactgtgaatatagcagaaggttccaagaactctggtgtctgacctagaagaggcacagttctctctactggaaagaaaacgatgtagccgattgcacaagggtgccaagggaagacccaggatggcccatcaaaggaacctgggggaggatgcaggaggctgaagggatgcacctggcatttctctcactgtgctcttaccgcatcagcaacccccaacttttgggcctactctgccccccatgcgtgaataccctgcttggatgctgtgcttttccggtttgtctctaagcccctttctccagggcatgttggtttccctggcctctcagtgtcctaactggagcccagagtgccttgttctgagccaggagacggctgagcactggccctccacacctaagcgtcctttacattaacttattggtcttgtataacacctggtgccattgccaagtggctgtgtcctcagctacagagctggaattgtgtggggtttagtgctaaatacttcaataaagtctgttttttgtgattggctgaa

SEQ ID NO: 362531 - DNA, 981 bp, Homo Sapiens
  misc_feature (71)..(134): n is a, c, g, or t
cataataatgactatactgaagatttcaggaaagaataggaggcagcagggtggtggttgagagtaaggcnnnnnnnnnnnnnnnnnnnnnnnnnnnnnnnnnnnnnnnnnnnnnnnnnnnnnnnnnnnnnnnntataaagtgagcaaggtcagagtgggaagtattgttgtatgtatttagggtagaagccagtccactctggtcatctgagctctgttggggatcttcattggccccaaagagtcctgttttcatcttctctgagccactgcaatgaatgaatggtggtaggcgtccacaaacctggtgcacaaaatgtggataggatttaggtgatatcttcacaactcaagaagaacccaggcttcaacagtccaagaagctgtaatctccttcttctaggcacatctgaaaacaaaatgccaaatgggaggtcctgttgctaatgttggtcctccagttctttacgagggagtgggtagatcccatggcctgtctgaatgtcactttcctcatccatagggtagaaatgacaggataacctcattatcttttgtgaatccatattaaaaggcccagaaccattgcaaatttgttactgaaactttctggagttccccagttggatccaattaggatcattactgagatggttgtctcccctaggcgctcatgcaagtgtcttgagctccaggctgcacagcgccgctcctctccgttgtttcacacactcgtgactttggttctctgccatcctctgctctgatctcaggaaagtgtgactttaagttatgtgttctggaataaagggatctgggtgtgtccttcatggtaagaattcccaacaaactaggcatagaaggaacatacctcaacatactaaaggccatataggacaaacccacagctaacatcatactgaatggggaaaagatgaaagcctttcccctaagaacggaacaagacaaggatgcccact

SEQ ID NO: 362532 - DNA, 476 bp, Homo Sapiens
  misc_feature (28)..(28): n is a, c, g, or t
  misc_feature (52)..(52): n is a, c, g, or t
gaccaggtggcctgctccttttctgggncccttagcacaggtggtaaccccnacccaacccagctcctgctgctgtcccagtcttgggctggggcctggaaagaggaagaggctcccctggggctgggccagcccgctgtgcactttgacccccagttccttgccagcacggctgctaacagactgccacttgagtgcgccttgcaggcactcccagagcagccatggaaggagctggccctcacaccatccacctccacactgcctcctggccagctgcccaccccagtgccaggtgggagagggagcagaacagccagccccttccaggtggcagtcggaagggtttttgtttttgtttctgttgccatttgtgtaaatactagtctttttggaaaaaaaataatgtaaagatgttttgtataaactctgaattattttcttgttgcttttttcttagaaaaaaatgagaactt

SEQ ID NO: 362533 - DNA, 817 bp, Homo Sapiens
  misc_feature (471)..(471): n is a, c, g, or t
  misc_feature (473)..(570): n is a, c, g, or t
  misc_feature (708)..(717): n is a, c, g, or t
ctcattgattaatggacatgatgctgagattcaatcactacatgaaacacctggctgtgaaaacaaaacaacccagagggctgtgttccaagcagcgctggggaagctacgtaacagtcggatgccagttttggaagattcaccatgcgttctgaccctctgttcgtctctttcctctcctctttcttcaagaaggaaattgatcctagtgatttcagcccatgcattaaacaggaaacaataataaatttgtagaattcatatttttctaaagggaacttaaaaactgctgctacatgttatgtacaaaactggtttatgccacatgaacagagaatcacaagtttggttttggtactttttgttcctctttgtattcagttgtatagaacttccaaattcagaatgagaagaaagctgttctgtatcaaaccatttaagcaataaatgttatattttaaaagctgcaanannnnnnnnnnnnnnnnnnnnnnnnnnnnnnnnnnnnnnnnnnnnnnnnnnnnnnnnnnnnnnnnnnnnnnnnnnnnnnnnnnnnnnnnnnnnnnnnnntggggggcgcccttggccccctaaaaaattttttaaaaccttctctttgggcgccgggccccaaaaggaaaggaaactgggccaaacgtgttcccaaagaaaaacccgggaaaggaaaaggggttgggaatcccaccnnnnnnnnnnccccggggggaaaccgaagcgttttgaaaaaaaacccagagggggggtccgggagggcctttccggaatctttccacacgggggccccaggggggctccc

SEQ ID NO: 362534 - DNA, 562 bp, Homo Sapiens
gcggccgctggacatgggaaagcggaaccaccaaaaggagtgatgatcaacgatctcatgataaatctggatgctagttctcatgcctcaggacatcctactgggaacgacacaccagctcctgggatcagactttcatctacttaggacccctctttgcccagactactaaagccagtcttcactagccacgaatggctacccaaaggaaacacttggtgaaagattttaatccttacattacctgctatatctgtaaagggtatctgatcaagccaacaacagtgacggaatgcctccatacatctgcagaatcctactggatgtccacttggatgtcctgaagccacctgaaactcagcatatctacgaatgatcaaatgggatgccagcactcagttatccaagcaagaaatatgctccatgcttgactctttaccctcactaacaaaactgggcaaagtcctgctggtctctctctttaatacttctcaaatctgtccctttagtttcatccctctgttactgttctcattcagattcttattacatctcaccaaag

SEQ ID NO: 362535 - DNA, 752 bp, Homo Sapiens
  misc_feature (622)..(624): n is a, c, g, or t
  misc_feature (629)..(629): n is a, c, g, or t
  misc_feature (634)..(634): n is a, c, g, or t
  misc_feature (646)..(646): n is a, c, g, or t
  misc_feature (648)..(648): n is a, c, g, or t
  misc_feature (657)..(657): n is a, c, g, or t
  misc_feature (666)..(666): n is a, c, g, or t
  misc_feature (689)..(689): n is a, c, g, or t
  misc_feature (693)..(694): n is a, c, g, or t
  misc_feature (700)..(701): n is a, c, g, or t
  misc_feature (707)..(707): n is a, c, g, or t
  misc_feature (720)..(720): n is a, c, g, or t
agcggactcgccccgcgcggcccgcccggatcgtggcctctcgagagcaagacatgggaaagcggaaccaccaaaaggagtgatgatcaacgatctcatgataaatctggatgctagttctcatgcctcaggacatcctactgggaacgacacaccagctcctgggatcagactttcatctacttaggacccctctttgcccagactactaaagccagtcttcactagccacgaatggctacccaaaggaaacacttggtgaaagattttaatccttacattacctgctatatctgtaaagggtatctgatcaagccaacaacagtgacggaatgcctccatacattctgtaagacttgtattgttcagcactttgaagatagcaatgattgcccaaggtgtggcaaccaagttcatgagacaaatccattagaaatgttgaggttggacaatacattagaggaaattatatttaagctggtccctggactacgagaacaagaacttgagcgtgaatctgaattttggaagaaaaataagcctcaagaaaatggacaagatgatacttcaaaagctgacaaaccgaaagtagatgaagaaggtgatgaaaatgaagatgatnnngattntcccngaaattgacccncnaattggctntctgtctanattgttttacaaaataatgggcnatcnnggggannattttnttaaaagggtttnattgaaaaaaattcctcccaatgttcttcccc

SEQ ID NO: 362536 - DNA, 935 bp, Homo Sapiens
  misc_feature (58)..(58): n is a, c, g, or t
  misc_feature (71)..(71): n is a, c, g, or t
  misc_feature (383)..(415): n is a, c, g, or t
cagaaggacttgccgctgacgaagcccgagatgtttaagaaccccctgtatgggtccntgagttccttccntaagcctgctcccaggaaggaccaggaatcccccaaaatgccgcggaaggaacccccgccctgcccggaacccggcatcttgtcgcccagcatcgtgctcaccaaagcccaggaggctgatcgcggcgaggggcccggcaagcaggtgcccgcgccccggctgcgctccttcacgtgctcatcctctgccgagggcagggcggccggcggggacaagagccaagggaagcccaagaccccggtcagctcccaggccccggtgccggccaagaggcccatcaagccttccagatcggaaatcaaccagcagannnnnnnnnnnnnnnnnnnnnnnnnnnnnnnnncagtcaagagcccggcggtgctgcacctccagcactccaagggccgcgactaccgcgacaacaccgagctcccgcatcacggcaagcaccggccggaggaggggccaccagggcctctaggcaggactgccatgcagtgaagccctcagtgagctgccactgagtcgggagcccagaggaacggcgtgaagccactggaccctctcccgggacctcctgctggctcctcctgcccagcttcctatgcaaggctttgtgttttcaggaaagggcctagcttctgtgtggcccacagagttcactgcctgtgagacttagcaccaagtgctgaggctggaagaaaaacgcacaccagacgggcaacaaacagtctgggtccccagctcgctcttggtacttgggaccccagtgcctcgttgagggcgccattctgaagaaagggaactgcagcgccgatttgagggtggagatatagataataataatattaataatcataatggccatggatggaaacatg

SEQ ID NO: 362537 - DNA, 508 bp, Homo Sapiens
caaaagctgaagctggagcaacagtctcagaatatgacaacaaccatgagaatggaggccattcatagcagaactacgagacaagaggagcctaggtccctgagctgcagaactgcatactaacctgatgagaagactaatgctcagtgaggtgaactccttcagggccacaggctgtaaagatctaaacaccatctgatccagtttcaatatgactgcctggatgaagaaggatttgagactaagtttattcctccaaagcaaaccaactgagaatgcagtttctgaggaccttggctcatttcaaaatctggaaatatatttgaacacctctcccagaagtgggtaagaagttagaataatggaaaggcttggctccaagttcagttgaatgtcaaaaagcccaagtttggctgaatggactttgtgtcgtgaaatctcagctccctctctcttcttccaggccaaatacctactggatgaaactgataaaattaaacaaagagag

SEQ ID NO: 362538 - DNA, 536 bp, Homo Sapiens
  misc_feature (17)..(17): n is a, c, g, or t
  misc_feature (27)..(27): n is a, c, g, or t
gtgaggtgaactccttngggcccaggnctgtaaagatctaaacaccatctgatccagtttcaatatgactgcctggatgaagaaggatttgagactaagtttattcctccaaagcaaaccaactgagaatgcagttttcaatgcaacccatcatcaaagggaaggagttgatgaaaagaaatgaaattgaaacgtgcacctggggagaagtgattgaaggttcttcatttaagggattggctccttttctcttattatactgtgaaatctgaaaacatctcttgaaattctgggtcactgtcttctgggacatcccaagggcgcaccatctccacagttcctccctcctaggattatcccatccagtgtgggcatccagtgtgggcaaatgggaaagactcttccagtgggcaactgaaaaggacaccaaagaaagcagatacagcccatgatcaaagaagcacataacttcagtttggaacatgactgatagaaagatcaattagacaatgtacaccaatcaaaggtaagcacca

SEQ ID NO: 362539 - DNA, 1091 bp, Homo Sapiens
tttttttaccaccaaagcatttagtgctgccagccagagctttgggtagagcaagaatgtgtgtgtgtgttgaatgggaagggaagctagtaggtgtccaacaaaccctgccatgaatactggggccaaaaaagaggggacccgtaggacagatgttgatcccactcaaagtcagcacagcgggatgcacttaaagggcactgagcacgcaggggctgtcacaaacccatgaggatctgcagggtgtctcccacaagtcatttctctcagaaggatcagttacctggggacactggacacatatgtgcccatgatgatgaggacggtgcccacgaggaagcccaccaggccgatggccaggcccagggcacagaccagggtctccatggcatctggtggtggaataggcacctggagctcccaatgcctgaggagtggcgcatccaggccccagtgctccacctggcagtcatagacgtcctcggctgagggcacgaagggcaggtagtggaacttgcggaacaaatggtcaggctgggaatagaagctggtctgggccactccctcagtgacagtttggccgttgcgcagccaggtgatattgatcacaggggggaagatgttgtccacgatgcagatgaggatgttgggctggcccagctccacccgagacttggggagcacggtcacccgtggaggcacgttgatggctctgctgcggttggagcgctccaccaggatgtccagatgggctttgattgcggcgatgccggccagcccgccctgcgggtcaaagcgggcaaagtcaccaaactcaggcagacgccacacggcctcgcttttcttcaggtccacagagaacagctgttcctcatcaaattcatgggtgaactggcccgaggcgccgtaagactggtagaaggcgggtccgtaggagcccatgtggtcagccttggtggcccctgcctcctgcgggctcaggagggtcatcagggtgtggaaccccaggaccagccctgctctgagggccattgcactctggtgctttaatcaaatcagtctcagtccgtggatccggaaaattccggacc

SEQ ID NO: 362540 - DNA, 433 bp, Homo Sapiens
  misc_feature (56)..(279): n is a, c, g, or t
ggccaccccactctttctccacccatacacactggcacatattaaaaagcaaggannnnnnnnnnnnnnnnnnnnnnnnnnnnnnnnnnnnnnnnnnnnnnnnnnnnnnnnnnnnnnnnnnnnnnnnnnnnnnnnnnnnnnnnnnnnnnnnnnnnnnnnnnnnnnnnnnnnnnnnnnnnnnnnnnnnnnnnnnnnnnnnnnnnnnnnnnnnnnnnnnnnnnnnnnnnnnnnnnnnnnnnnnnnnnnnnnnnnnnnnnnnnnnnnnnnnnnnnnnnnnnnaagactacaaattgggtgcagtgtacactgcttgggtgaagggtgcaccaaaatctcagaaatcaccactaaggaacttactcatggaaccaaacaccacttgttttccaaaaacctatggaaataaaaaaattaacataaaaataatacactt

SEQ ID NO: 362541 - DNA, 962 bp, Homo Sapiens
  misc_feature (790)..(790): n is a, c, g, or t
cagtttgttttaaataaatacaatagttgaaaatttttctctgttacatcagtaatattgttaaagtaatggatagaaccataacttacacatgaaagtcatatactagatccaatactatttagtttattatcgaaattggaaggattcattgagcagcatagaagtttgtttacatgttactttgagatgctaggtatttgtggaattaaaaagaatcaggctcttttgtactttgtttttaaatctgtgatgcttttcaaatttaattcataataaattgatgcaatttcatacttaggaacatacaaaaggtaatgtaaactctgccacttttttgtgttcaaaattttggtttttatgaagccagatggattgaagagttacataagcatttgaatgctctaatataaggctaatgattttctgttagtgtttgaatatcttcattcctctcaaattcataacagttctatttaactgaattaaataaccatatgaaaaatcttttgggtctccccctttttacacagataattatttttgtcataacactttttaattgtttttcatcataggggcctttgctgaactacaaaaatgtgtaacaaattaaaatctgatgtgaatgatattaatgctaccttttaccaaactgtggctttcctaatacaaaattttaaattttcgaggcataccatgctgtgaccggaagcaagttcttgtcggcccccctcggcccctcaagaagcttttctaaaccattccttttggcgccccggggcccctnaaggtaaagggaacctgggccataacttgttttcccaaggaaatcccgggcccatggattagggcttgggatttccccacccaataaaaaaacgcccggggcggcaaacccaagcggttcttgaacaaaatccccaatgggggttctggaggggcacttaggggaccctttc

SEQ ID NO: 362542 - DNA, 852 bp, Homo Sapiens
  misc_feature (80)..(150): n is a, c, g, or t
  misc_feature (180)..(180): n is a, c, g, or t
tacaaaactgggtacatacatactgtctaactgctaatccacatttccagtcttacaaaggacataatgattagttaagnnnnnnnnnnnnnnnnnnnnnnnnnnnnnnnnnnnnnnnnnnnnnnnnnnnnnnnnnnnnnnnnnnnnnnnacccagaatctcagtctcactccttgggancctgtgtatttccctgagtcttctaacatatgaaaattcatatctaaatcaacaagtgactgtaatctggtactataaatactaaataaacacttcttcataacactgtaccaattcagcttttaaattttattactttgctttcctgtcctttgccaactcttaacctagttaatcctagttctgttgacattggaccaggctcagtaaataaacgaatggatttccagcctttttttcccatctgttcctgcttttagtcctctgaatctgcttcttttcttactgctgctttattttacagtgattttgtcaaacatagaatacaggactaaaaatgcaaagaaattgggtctgtgtttaattttgatgtttcaaattttgagcttccaagtctttgtggccacccaatgaagtttgagtctgcctgttcagatgtgaaaggtaagggctgcagcaggtttaagggtggcccttcaccaccctgttgtcacctgcacaggcactcccccatttgcagatgaagaaatgttcagagaagaaaaatgatggaccaaacgtctgtttgcacaattgaaactctaccagtggactattctattttcacagctacctagtttctgccgatgatttttttaaatgtgaaataaacagtgatactttcaggttaaa

SEQ ID NO: 362543 - DNA, 1646 bp, Homo Sapiens
  misc_feature (50)..(50): n is a, c, g, or t
  misc_feature (95)..(95): n is a, c, g, or t
  misc_feature (100)..(154): n is a, c, g, or t
  misc_feature (1437)..(1507): n is a, c, g, or t
gctcattcatgaaacagaagaggctgtacaagtgaagacaagggcttttnatgcaagttttgaaagataggtatttatttttcctagagacaggngtttnnnnnnnnnnnnnnnnnnnnnnnnnnnnnnnnnnnnnnnnnnnnnnnnnnnnnnngcactcctgggctcaagtggtcctcctgcctcagcttactgagtaaggatatgtatttcttaaaagttagtttatccacttcagatttcatgttttcatttgtaaggataaacttttcccacaaattttcaacaatcattgtagaaactaagggggagaaagtaatctcagttgttttagaaacgaaaaagttaagcattgtttacttgaagtggggcagggaagcagcacttgagtaaagttccaattgagtggttacagtctaggggcagtggttcccaactctccgatcagaatcatctgggaagcattttcaaacagcaaagtactttgaaaaccattattaaatagaattatgcatgaattactgtttcagatcctttaatgtggtagttggtaataataagatgaaattcctctgttgttagtaaaattatgaaattgaagttctgcagcatgtcaggccaggattattagggagattcctcgaaactagtgtgtgtttattaaaaggagaaaggataacaatagaatgttctaaaaccagaagtccaagtgcgtgtctacttatgggaccaataaataaagaacagacatttgatttgaggtgaggtaaaagcctgaaacatggaatggcattctgttttgatggattttcatttcttcgcacttctgagacggcaaagccaaccacttagaagccttccacatctttgtcacctgcctggctcctgctctctgatgtacctctgggtagtgagatggaaatggtgcctgcagaagttggggagaaggatacttttgcacagcctccatgatgtctttattgcaaatatggatgacaagggtctctgttacaggggcctcagagcaccttcgtttctcctctagaccagggacaggtgtagagataaggactggcaaccagagcctcagcatccaaagatggactgaagtgggatggctgacaggcacataacttacgggaaagggaatttcatacatacgatttttgttttgtgggtaggagggcttatcatcaacactgattttataatctgacaataaatgtctttcattaaagagtttacctaaatgatgttcgattatatgtataatttataaaatatttaatgtatagtttgtttattcaggtatatgtataatttattgaacaccctactatgtccccagcatatcctacaaaactgggtacatacatactgtctaactgcctaatcccacatttccagtcttacaaaggacataatgattagttaagnnnnnnnnnnnnnnnnnnnnnnnnnnnnnnnnnnnnnnnnnnnnnnnnnnnnnnnnnnnnnnnnnnnnnnnacccagaatctcagtctcactccttgggatcctgtgtatttccctgagtcttctaacatatgaaaattcatatctaaatcaacaagtgactgtaatctggtactataaatactaaataaacacttcttcataacactgt

SEQ ID NO: 362544 - DNA, 431 bp, Homo Sapiens
tttttttgaaagtatcactgtttatttcacatttaaaaaaatcatcggcagaaactaggtagctgtgaaaatagaatagtccactggtagagtttcaattgtgcaaacagacgtttggtccatcatttttcttctctgaacatttcttcatctgcaaatgggggagtgcctgtgcaggtgacaacagggtggtgaagggccgcccttaaacctgctgcagcccttacctttcacatctgaacaggcagactcaaacttcattgggtggccacaaagacttgggaagctcaaaatttgaaacatcaaaattaaacacagacccaatttctttgcatttttaggtcctgtattctatgtttgacaaaatcactggtaaaataaaggcaggcaggtaaggaaaaggaggcaggtttcagagggtttaaaaggca

SEQ ID NO: 362545 - DNA, 483 bp, Homo Sapiens
cagatagccttcaagggacaccattgccttaagcagaatatgcctcctaagcattgaaagcctttgacccatctgatatccaagttctggcttattatgttattagggccttgaataactttatgtatattattatggactgaatgtatccccacaaattcatgttgaccctctgacctccagtgtgatggtctttggagatgaggcctttggcaggtgattagagctagatgaggtcatgagagggaggccctcatgaaaggctcagtggcctgataagaagaaacaccagagagcttgctctgtttctctgcctacctggcgcacacatacagaagaggtgatatgaccacacagcaacatggtggccaccagcaagctaggagagggatcagaatgaaacctattttgctggcaccttgatcttgaaattctagcctccagaactgtgagaaataaaattcttttattgaagccaaaaaa

SEQ ID NO: 362546 - DNA, 434 bp, Homo Sapiens
acatcgtatcaggaatggtgggtcactttggactcttgtgtagataagatagactaagggttaaaggacgttcagcctcccacccaccaagaaacacacaggagaaagagtgagaggaagagctggaagtgattttaaatacactgtgattgctaaagcaagtcaatcatctccaaactgtggtctgcttcaattactagttagaaatgatttgtgaaagaccctccacagaagactgcccacacccacgatgcattgagaaattgttttctagtacagtggtctttgaaagcaattgctaccgtcctcagaaactgtgcaggatcatgtatagggatgaagaaaaacacaaattggagtgctttatttgtacttcttttccagcttacaaaaaataaagatattatgcttcattaacatttaatgactagatt

SEQ ID NO: 362547 - DNA, 1498 bp, Homo Sapiens
  misc_feature (1371)..(1435): n is a, c, g, or t
ggctggaccggtccggattcccgggatggagatgggatgtcccagatgatagggctcctgggatttcagacccaagaccagcaggactccagtcacctctaccccagctctccaggacacagcgctcccaactctgagtgacgtcccacctctggtccttgcagcacaaccaacgtgggaatcacaccctccagacctcccacagctccaccccagactgggcgccggccctgcctccatttcagctgtgacaacctcagagccgtgttggcccaagcatgacaaggacgtatgaaaacttccagtacttggagaataaggtgaaagtccaggggtttaaaaatgggccacttcctctccagtccctcctgcagcgtctctgctctgggccctgccatctcctgctgtccctgggcctcggcctcctgctgctggtcatcatctgtgtggttggattccaaaattccaaatttcagagggacctggtgaccctgagaacagattttagcaacttcacctcaaacactgtggcggagatccaggcactgacttcccagggcagcagcttggaagaaacgatagcatctctgaaagctgaggtggagggtttcaagcaggaacggcaggcagttcattctgaaatgctcctgcgagtccagcagctggtgcaagacctgaagaaactgacctgccaggtggctactctcaacaacaatgcctccactgaagggacctgctgcccgtcaactgggtggagcaccaagacagctgctactggttctctcactctgggatgtcctgggccgacactgagaaggacctgcagcccaagaacgtccaactgggtggagcaccaagacagctgctactggttctctcactctgggatgtcctggggccaaggctgagaagtactgccaaactgaagaacgccccaccgggtgggtcatcaactcccagggaggaccagaattttgtccagaaatatctaggctccgcatacacctggatgggcctcagtgaccctgaaggagcctggaagtgggtggatggaacagactatgcgaccggcttccagaactggaagccaggccagccagacgactggcaggggcacgggctgggtggaggcgaggactgtgctcacttccatccagacggcaggtggaatgacgacgtctgccagaggccctaccactgggtctgcgaggctggcctgggtcagaccagccaggagagtcactgagctgcctttggtgggaccacccggccacagaaatggcggtgggaggaggactcctctcacgacctcctcgcaagaccgctctgggagagaaataagcactgggagattggaagcactgctaacannnnnnnnnnnnnnnnnnnnnnnnnnnnnnnnnnnnnnnnnnnnnnnnnnnnnnnnnnnnnnnnnccaacttttgaaagtcaacttcatgaaggtataatttttacataataaaaatgcactcattta

SEQ ID NO: 362548 - DNA, 1297 bp, Homo Sapiens
  misc_feature (514)..(539): n is a, c, g, or t
  misc_feature (548)..(586): n is a, c, g, or t
  misc_feature (633)..(705): n is a, c, g, or t
  misc_feature (747)..(755): n is a, c, g, or t
  misc_feature (964)..(973): n is a, c, g, or t
  misc_feature (1226)..(1226): n is a, c, g, or t
ttttcgctgtggctcgtccttaacgtttctgaaccaccttggtgccctgagcaggaagatgtgccacttcctagcaggcgcaaggcctgtgcggaagaaacgccgctccctgccaccagggctgaagatgcgagcccgtcctcatgacgcaggcgccaccctgctgccggagccgggcttcggcagtcttctccactgagggactgggctgggaagtcctgcgtttcagtggagcgtatgagcgtcaagtcctgctttctcagtagccccattgcggggccccaccattcatcctgtctgaaggtcctgggtttggtgtgaccgcttggcggctggtgggtggggttttcaagtgggtgacggcgctctccggcagccggggatggccgtgtccgcactgaccaggcctgtggagagtgctcggcctaaccttagaacacatttgtaactgaatacagtgttttcaatttgtacagaatagttagaatattctattaaagtggtgaaacattgnnnnnnnnnnnnnnnnnnnnnnnnnnctcgaggcnnnnnnnnnnnnnnnnnnnnnnnnnnnnnnnnnnnnnnncatggtcatagctgtttcctgacccagctttcttgtacaaagtggtnnnnnnnnnnnnnnnnnnnnnnnnnnnnnnnnnnnnnnnnnnnnnnnnnnnnnnnnnnnnnnnnnnnnnnnnntgcagtacccggggaatttaacccggcctaatgagccgggcnnnnnnnnngggaatcaaaggaatttccttgaaatccctttttttctgcaaataatctgcctgcttgcaaacaaaaaaaccacccgctaccagcgggtggtttggtttgcccgaatcaaaagcctacccctcctttttcccaaaggaaactgggctttcaccagaaccccccaatccccaaaaaaggggcccttcaagaggaaacccccaatctaagnnnnnnnnnnttcaagaaaactctggataacaccccccttaattacccttcgaccacgcttaatccatgtctaaccaagggcccccccgcccatacggcgaaaatattcctggcctttccccgccgttgggacctccccgaaccaaatcctttcaccccgataatagcgcaccatccgctccgagtctttaaacgcggggggtgtacacgttgaccacaaacctcacaatttgtaggaacccacaccccacttctcggccganacactggaaagacccacctcaacctcgcctgagatcttcttccaaaaataagctccgcccacctttccccc

SEQ ID NO: 362549 - DNA, 416 bp, Homo Sapiens
  misc_feature (33)..(33): n is a, c, g, or t
  misc_feature (102)..(102): n is a, c, g, or t
  misc_feature (141)..(141): n is a, c, g, or t
cgaaacccgtccctcaatgaacgcaaggcgccnacccctgctgccggagccgggccttcggcaaatccttcctcccactgaagggaactgggcctgggaaantccctgcgtttccagtggaaacgtaatgaaacgtcaaantcctgctttcctcagtaaccccattgcggggccccaccattcatccctgtctgaaggtccctgggtttggtgtgaacgcttggcggctggtgggtggggttttcaagtgggtgacggcgctctccggcagccggggatggccgtgtccgcactgaccaggcctgtggagagtgctcggcctaaccttagaacacatttgtaactgaatacagtgttttcaatttgtacagaatagttagaatattctattaaagtggtgaaacattgaaaaaaaa

SEQ ID NO: 362550 - DNA, 1040 bp, Homo Sapiens
cctacatttgcaggattctgtagtatgaattgggatgcttcttggctttccctacagccagcttagaattgtgctttctcaggtctactaagttcaataccatccttcagcctgctctccagtttccaacatgttactgttaaggccttttccctcattttctatcattgtgagtatgtgccctttgaaaacccttttgctgtcatttttgtgggatttggtgaagaagcagtggtaaatgcatgtattattctgtcatctaagtgttcactgttagctcttctcataagtgggatgctaggcctcagttgctttctctgtgaaatgagaggatcatactaactggataatttgtaaaattcctttcatcacagactttttatgattctgtagtacttactgttaagtcaaacacagttcttccttttttctgaaataatttctccttgtcttaaatccttaaagctgctagcagaagaaagtctccccacaaccccattttatttcatattgggaaaacacaggcaacagcaggatgaaaaactaaacgaaactttagagaatgagctggtacaactacccttaacagaaaacatacccgcaattagtgagcttcttcacactccagcccatgtcctgccatctgctgctttcctgtgctccatgtttgtaaattcattgctgctgtctaaagagactaagagtgctaaggaaattcctgaagatgtagatatggaagaagaaaaagaaagtgaagattcagatgaagaaaatgattttaccgaaaaagtccaggatacaagtaacacaggtttaggagaagacattatacatcagttgtcaaaatctgaagaaaaagaactgagaaaatttaggaaaatagactacagctggatagctgccctttaagccttggagatggggaggatccttggactttgtgtttttgattgtatgttgatattctaaaaacatctattttaatgttatttctgttctaaaaataagataataaatattaacaaactttgcttttttaa

SEQ ID NO: 362551 - DNA, 672 bp, Homo Sapiens
  misc_feature (354)..(391): n is a, c, g, or t
agacataattctgtattttcaaaattttctatactgaggatgccttaattcgagggtgaatgaaaggaaacaaagcaaaaagccacaagaggggaattgattcccaagtgtaaatcagaagcgaccaccaagtcttcattaaatacacacacacagagtacataaaacacccatttaaaatcttatctcattaagctagcaaggtaatttagtcccattaacatcaatatgaacacagaagagttagacagttataatcatgcttcctcattatcataagaagcctttggggatgtttgataaaatataccagaaaataatatttcatcattctaaggtgcggtccaggaagcnnnnnnnnnnnnnnnnnnnnnnnnnnnnnnnnnnnnnngagcccttcagtgattcatacaaacaagccaaggagagaacacatggacgacagcattgattcactggaaagcaaagtacagcttccaccataaaaccctgcagctgaaaaaggacaaactgagcagctctcaaataaagacagcctcagccgtcttgcacagcacggcccctctccgtgcccgagtcctgtgcctgtatgaaagcactaaatcacagaccccgcaacctgttataagccctggtaacaatcagcagctgggctcgggcaagctcccttag

SEQ ID NO: 362552 - DNA, 540 bp, Homo Sapiens
gcggccgctggtcaaccgcagcgtgcccaggtcgctctcgggcgtggtggtcttgatgaagtagtgcgtgtccttgccctcgatggtgaagtgcaggttctccaggtagaaggcgttgttgagcacggccgccaccttgatgcagtcctcgttggcgatgttgagcacgttggtctgcacgcggccctggctgacggccagcatgacgcccttgccgatcagcgacttgaccgtggcgaaccacagccaggactgcgcaccgccggcccggcgccggctcacctgcacctcggccatcttccccagcgacaggaaggccttggcctgccgcgccacttgctgctggactccgaagatgggcggtatatcatcccactgctgactcttcacaagttcgtaagaaggttctgttaaatcaaatttgggaacagggaatccaggaatagcattgtgcagatggaaaccaaatgtcaccagccagctgttaacatctgtgatgtaatctttcacgtcatggattttgcttgcagggttgttatt

SEQ ID NO: 362553 - DNA, 526 bp, Homo Sapiens
  misc_feature (279)..(316): n is a, c, g, or t
aaaaaatgatagtctgctaccctttacggtataagttaagaaactggcaacagcagtgtatacacatgtacttaaaatccagtttagatgtaatataagtaggccaggtgtggtggctcatgcctctaatcccaggactttggtgggaggaatgcttgagcccaggagtttgaggttatagcgagctatgatcacaccccccacactccaatttgggcgacagagcgagattttgtttaaaaaataaagttcagtgagtcaagtgggcccatttccccnnnnnnnnnnnnnnnnnnnnnnnnnnnnnnnnnnnnnngtgcatcattacatgtaatatatcaaataattcagtttctcctggtagtctaaatttgtggtttaacagttccactagtatttcaattaactattatttcctcacactaagttcccaagtatgcatagacataggaaccttgtgattcaaaattttggttttaattgtaaaaacaggttttggctgcaaagagaataaaaaagccatgcc

SEQ ID NO: 362554 - DNA, 974 bp, Homo Sapiens
  misc_feature (48)..(48): n is a, c, g, or t
  misc_feature (259)..(337): n is a, c, g, or t
aacccaaggaaaaagggaggaagcccgagaaagtgggtctggtagggntagggacccccctatttacccggtcaggttcccaacagtgggaatgaatttgggaggaagttacaaaccttctccctgctttggaaacggagccaacctttcattccctcccagagggagaaaaggcagaaaccctgtgtggagggtgccggtgtaccacatctgctttgttcccacacccatgcagttcctggcttgggtgcttatcagnnnnnnnnnnnnnnnnnnnnnnnnnnnnnnnnnnnnnnnnnnnnnnnnnnnnnnnnnnnnnnnnnnnnnnnnnnnnnnnaactggcatccttgagctgacaacacttttccatgaccataggtcactgtctacactgggtacacttttgtaccagtgtcggcctccactgatgctggtgctcaggcacctctgtccaaggacaatccctttcacaaacaaaccagctgcctttgtatcttgtaccttttcagagaaagggaggtatccctgtgccaaaggctccaggcctctcccctgcaactcaggacccaagcccagctcactctgggaactgtgttcccagcatctctgtcctcttgattaagagattctccttccaggcctaagcctgggatttgggccagagataagaatccaaactatgaggctagttcttgtctaactcaagactgttctggaatgagggtccaggcctgtcaaccatggggcttctgacctgagcaccaaggttgagggacaggattaggcagggtctgtcctgtggccacctggaaagtcccaggtgggactcttctggggacacttggggtccacaatcccaggtccatactctaggttttggataccatgagtatgtatgtttacctgtgcctaataaaggagaattatgaaataatttcaaaaaccaacacctatactcccaccctcaacatgt

SEQ ID NO: 362555 - DNA, 884 bp, Homo Sapiens
cctccatgaaacttacgcagtaatcactacctggaaggtgagttttgatctctttttaaggagaggcactttccaactgaaggtgattgatgtagggaaatgtttgtactatatagaatccatatatttgactgcaagttacaaagttttaagaacatgatggttggtctctaatatatttggaactgattcataagaaaagttattaaaattatctttgaaacacctcttgaagctaatttattagaaaaaatatttcagttggaaggctgtagaagtaatgtttaaatgctaagtcataagttcaggatatttcttttctatttggttgtgcaaaatgtttttcccagttatttaatcgaagtaattccttttaatagaaagagtcagttaaaattcagcattcatggatagatttttggaacgaaaaagggtaagtataagaaaatattgcaaacacattaaaacagttgtatggtgcaggaaaagaagattggaaaaagaccaaaacacacttctccagcaacactccatcagctttttaaaatttagagctatctgctaattttttccctctttccgttctcaataaatgaaacaaacactgggcagctgcaggtttctcccaatcatgtctctttatgtaaagacagtaacatgcaaacacttttagtttacatccctcattcacagtgtaaagcaggaaatggtgtgggagatgtgagaccattctgaggtcagcgatagcccaaaggctctgcagtattccctccaatggccaaggattccgtgtgtcatctgcagggagtgagtaggccctgctgtatttctttgttaactgcctggggtgttacaaaaataagttacaaaggttttacactttt

SEQ ID NO: 362556 - DNA, 536 bp, Homo Sapiens
ttttccgccagaccttcaacctgggtcaaaagtggtacaggaaggcttgcagtatgatggcaggagaatcagcctggggcctggggatgtaaccaagctgtacccttgagacctggaaccagagccacaggccccttttgtgggtttctctgtgctctgaatgggagccagaattcactaggaggtcatcaaccgatggtcctcacaagcctcttctgaagatggaaggccttttgcccgttgaggtagaggggaaggaaatctcctcttttgtacccaatacttatgttgtattgttggtgcgaaagtaaaaacactacctcttttgagactttgcccagggtcctgtgcctggatgggggtgcaggcagccttgaccacggctgttcccctcacccaaaagaattatcatcccaacagccaagacccaacaggtgctgaactgtgcatcaaccaggaagagttctatccccaagctggccactatcacatatgcttactcttgcttaaaattaataaatcatgttttgatgagc

SEQ ID NO: 362557 - DNA, 509 bp, Homo Sapiens
actacctgaggctccccagcctaaggaggagccgccagtgcctgaagcccccagctcggggcccccctcctcctccctggaattgctggcctccttgaccccaaaggccttctccctggacagctccctgcggggcaaacagcggatgagcaagcataactttctgcaggcccataacgggcaagggctgcgggccacccggccctctgacgaccccctcagccttctggatccactctggacactcaacaagacctgaccaggttttgcctacctgggccttacacaaaatcatcatcatctcatgcccacctgcccacacccaacaaagcttctcagtgggcacagtctcttaatcccatttttgctgcctttggccctgcctggcccagcctgcacccctgtgggggggaaaagtactgcaggctctggggcaggttctgctcctttatgggacccgacatttttcagctctttgctattgaaaaaataaaccaccctgttctgtg

SEQ ID NO: 362558 - DNA, 1251 bp, Homo Sapiens
tgggctggaacgcgccggaatctgaggtgtgagtagagcctgggggagagtggatccaggtgaagggggcagaggactgggagttttcgtcctcttgaataagaactcgacaacagagtgggaactttctgtcttgtgatccattgcctggtgagtcacagctcacaccatggatttaacctgagagctttcaacctcttgaataagaactcgacaacacagtgggaacctgctgtcttctgatccagtgcctagtgtgtcgcactggagcacagaggacactcgatcgtgcggcgcgcagggcggggggccgccgctgcctccccgcgggatggctggcactgtgctcggagtcggtgcgggcgtgttcatcttagccctgctctgggtggcagtgctgctgctgtgtgtgctgctgtccagagcctccggggcggcgaggttctctgtcatttttttattcttcggtgctgtgatcatcacatcagttctgttgcttttcccgcgagctggtgaattcccagccccagaagtggaagttaagattgtggatgactttttcattggccgctatgtcctgctggctttccttagtgccatcttccttggaggcctcttcttggttttaatccattatgttctggagccgatctatgccaaaccactgcactcctactgaccactcttcaggaaatacgaaaacctgttctctccttcattgtgatgacattgatgagcaggaaggcactattcagagccttgttttgacagccctcatgccttaaggttagaggagtatctgtccatcactaagacaaatctctggagtcctggcttccagaaacaggattgccaaattgtccctgtggggctagattcttaccagcttaagaaggatattgctatcttcttagtacccgtaccttaggatttccaactgttttgaaagggaaatagtaacagtgatctgcttagagtggattttcactcaagtccttagtaagtggattttggggaaaaaagcacctgggcttctggttctttttgataatatataaaattattcattatgaggttgcagttgtttgcaaaggagaggcactcaaatttgaaaggttattttaatgtgataatttggaagacttactcagatgttggtcattgaccactctgtgcatatatttctgcagagctctgtgaaggcaatgagtgtcacttccctctgctctaataaagcaataaataatagct

SEQ ID NO: 362559 - DNA, 935 bp, Homo Sapiens
cccaagaaaggaggggcctcccaaggggaagaatggcctttagggaaaacccaagccaggcccatagccggcccaatgaaaaagtccatcccccaatctttaccttcccacttccggggcctgggaatccaccagctcgcggggaaaagcaccagaactgatgtgatgatcacagcaccgaagaataaaaaaatgacagagaacctcgccgccccggaggctctggacagcagcacacacagcagcagcactgccacccagagcagggctaagatgaacacgcccgcaccgactccgagcacagtgccagccatcccgcggggaggcagcggcggccccccgccctgcgcgccgcacgatcgagtgtcctctgtgctccagtgcaacacactcccgtgaaagcattcagacaaatacagaaagcctaaactcattacaggttattttttgatgatcagtgtgttaggaggattactcagtacaggtcattaattttcagaaatgtccagtcccagagtcccttaatggaaactggaaatttagaacccaaagcctttctctttggtggggactgagagggtgttttccgctctgcgctcagaagttttttctgagtgtttcctttcaaatttggtacctgagttctactttgacctcttcccccagcccacgggagaaagctgaaccctctctgaatacaaaaccctacctaagaactggtagaagacaccagggcatgggaactccagggccaaagcagaagttgaagctctcaggttaaatccatggtgtgagctgtgactcaccaggcaatggatcacaagacagaaagttcccactctgttgtcgagttcttattcaagaggacgaaaactcccagtcctctgcccccttcacctggatccactctcccccaggctctacttcacacctca

SEQ ID NO: 362560 - DNA, 450 bp, Homo Sapiens
  misc_feature (233)..(233): n is a, c, g, or t
  misc_feature (259)..(259): n is a, c, g, or t
acccccggcctccccagaaaacaggattcccccaaattggccccctgtggggcctagatccctacccagcctaaagaaggataattgcctatcctcccttagtaccccgtacccttaggattccccaactgttttgaaagggaaatagtaacagtgatcctgccttagagtggattttcactcaagtcccttagtaagtggattggggaaaaaagcacatgggcttctggttnctttttgataatatataaaattattncattatgaggttgcagttgtttgcaaaggagaggcactcaaatttgaaaggttattttaatgtgataatttggaagacttactcagatgttggtcattgaaccactctgtgcatatatttctgcagagctctgtgaaggcaatgagtgtcacttccctctgctctaataaagcaataaataataaaaaaaa

SEQ ID NO: 362561 - DNA, 547 bp, Homo Sapiens
  misc_feature (15)..(15): n is a, c, g, or t
  misc_feature (78)..(78): n is a, c, g, or t
tccaggggttccccntcttaaaatgcaagtccctagattaggtagactttgcctaagtttgacaactgcacatgaaantttgcaaagggaaccaggctaaatgcccccaagaaagcttcttccagagtgaagaatcttaatgcttgtaatttaaacatttgttcctggagttttgatttggtggatgtgatggttggttttatttgtcagtttggttgggctatagcacacagttatttaatcaaacagtaatctaggtgtggctgtgaaggtattttgtagatgtgattaacatctacaatcagttgactttaagtgaaagagattacttaaataatttgggtgagctgcacctgattagttgaaaggcctcaagaacaaacactgcagtttcctggaaaagaagaaactttgcctcaagactatagccatcgactcctgcctgagtttccagcctgctagtctgccctatggatttgaagtttgccaaccccaacaattgtgtgaattaatttctaaaaataaagctatatacagccaaaaaaaa

SEQ ID NO: 362562 - DNA, 450 bp, Homo Sapiens
attacatttgctcaccttgcttccttacccccaccatgtgaacatgcccaagcccgcctgctggagggacatgagaaacacagaatgaagggtaagtcaccgcagttacactggtggaggttgtcctcagccagccaccatgccaacttgctgctttaatcacaggagagagcccagccaacatcagcagacctgctcagccaacccataaacagactgaggagcagcaagaaagtatcatttttcagacactgagtttcaggagttatttgttatgaagcatttatttgtagcaattgctgatggatacaacaaccaaagtatggtcaacattctgcattggactgcaacaatttggaatgtaaaaagaaagaattttgatctcaatttcttctgagatatcaggataataaattctgtactacttgaataaagttttttccctgatag

SEQ ID NO: 362563 - DNA, 480 bp, Homo Sapiens
  misc_feature (405)..(417): n is a, c, g, or t
caaaaaagcatttatttgatcagtatttacttcaacatttattttcatcattcactagaagaaagatttaattgtgtatatcaacatcagtagtacaaatcttgttatatcaaatgatgtttttgggagtcagaatccctcaacactttaagcatttgtattataaagtgcctcattggtaaaataatgagaatttgaagaaaaccagcccagcagaactaaaattttggttttaaaggagataaagagaataagtttttcttacttgtcatcttaatttgtttaggtttctttttatagagtagaataaatgatgtttgctctgaagagaattgatgaccaactagaattttcatttttaaaaagggctttaaaataaaattctcctatgtgttggatgcattnnnnnnnnnnnnnctctacaaaattctatccttaaccttctttgggaaaataaaatattctggaataatcataaaa

SEQ ID NO: 362564 - DNA, 567 bp, Homo Sapiens
  misc_feature (24)..(24): n is a, c, g, or t
  misc_feature (32)..(32): n is a, c, g, or t
  misc_feature (39)..(39): n is a, c, g, or t
  misc_feature (56)..(56): n is a, c, g, or t
gcacagccaagaagcttcaggtcntgggaacntggattngatcttagactttaagnccccggagattctgacttcaccccttgccaccttttccccaagaccttcactggtctgtggacagcagccagaaatgtttgccaagataggcccaaaatgagtacaaaaggtctgtcttccatcagaccccagtgatgctgcgactcacacgcttcaattcaagacctgaccgctagtagggaggtttattcagatcgctggcagcctcggctgagcagatgcacagaggggatcactgtgcagtgggaccaccctcactggccttctgcagcagggttctgggatgttttcagtggtcaaaatactctgtttagagcaagggctcagaaaacagaaatactgtcatggaggtgctgaacacagggaaggtctggtacatattggaaattatgagcagaacaaatactcaactaaatgcacaaagtataaagtgtagccatgtctagacaccatgttgtatcagaataatttttgtgccaataaatgacatcagaattttaaacataaaaa

SEQ ID NO: 362565 - DNA, 1382 bp, Homo Sapiens
tccggatctggtttcctgtggatcacagtcctgccctgattccttctcctaagacattctcaccctgatacgtcaacatggcctgtgtctgcttcctaagtgagggtaacagaccccctcggcttgctttgggtggagagttagtaactcctgtggtgagtggctctgtcccatttctaggttacaggcctgggatggcaactacagaatcacatgccacacagtgatggaggtgctgcgagagcacaaggacagtgtcatggccgtgctggaagcctttgtctatgaccccttgctgaactggaggctgatggacacaaataccaaaggcaacaagcgatcccgaacgaggacggattcctactctgcttggccagtcagtcgaaatttttggacggtgtggaacttggagagccagcccataagaaaacggggaccacagtgccagaatctattcattctttcattggagacggtttggtgaaaccagaggccctaaataagaaagctatccagattattaacagggttcgagataagctcactggtcgggacttctctcatgatgacactttggatgttccaacgcaagttgagctgctcatcaaacaagcgacatcccatgaaaacctctgccagtgctatattggctggtgccctttctggtaactggaggcccagatgtgcccatcacgttttttctgaagcttttgtactttaataaatgcttccactaaactgaaaaccatggtgagaaagtttgactttgttaaatattttgaaatgtaaatgaaaagaactactgtatattaaaagttggtttgaaccaactttctagctgctgttgaagaatatattgtcagaaacacaaggcttgatttggttcccaggacagtgaaacatagtaataccacgtaaatcaagccattcattttggggaacagaagatccataactttagaaatacgggttttgacttaactcacaagagaactcatcataagtacttgctgatggaagaatgacctagttgctcctctcaacatgggtacagcaaactcagcacagccaagaagcctcaggtcgtggagaacatggattagggattcctagactgttaaagacacagaagatgctgaactcacccctgccacctatcccaagacctcactggtctgtggacagcagcagaaatgtttgcaagataggcccaaaatgagttacaaaagtctgtcttccatcagacccagtgatgctgcgactcacacggctcaattcaagacctgaccgctagtaggggagtttatttcgatcgctggcagcctcggcttgagcagatgcacagagggggatccctgtgcaggggggaccaccctcactgg

SEQ ID NO: 362566 - DNA, 719 bp, Homo Sapiens
tacggtctaggtacgaggctgggtggcgaattcggcacgaggcctctccgggctccaatccccagcccaagctcagatgacccagcctgtgtccctttagcggccgaggagccaccacctgttcgggggctggaggatggcttcccagaggacctgggacactcacctagctcgttcatggcacggcggtactcctcatcaaaggacagcttcataacagcacaggtggcctggcagatctgcggctcgatggggatcggggctgtgggcacagggaccagatcagagcccccattcccaggaaatgtcccaggtgactcccgaaggtccccgcaacccgcccgccccaggcctgaaggatcccgggagctttgcaaatggctgcaaagttgggacttcctttcccagcctctctaagatgggatgatggggtggcctctctcactcagccttgggaagggaggcgaggtagttcctggagcaccacacctttcagctgtgcttctgccctttttaaaaataaaactgacgagacaggctctcgctcttgttgtccaacaaacaataatcattaaaaatctccgatgttttattttatgtgtaaaagggtcaggagggggaaatcgtggccatttggacggggtatggagcacttttctttaagatacgccgagggggagtgggacgaaattttccaaaaacagagagatagttggctc

SEQ ID NO: 362567 - DNA, 526 bp, Homo Sapiens
  misc_feature (419)..(428): n is a, c, g, or t
tctctctggggtggcagcagggacagaaaacaacagagatacattctcttggcagcacagaactcagctcaagggttctggggatggggccttccctcctgccagggaggccatctcgagaggctgactgctcacacctgggcagcactctgtctcctcccctcctgcctgggtcccagctctgttcaccaccccaaagcacatcaccacaaggtcagttgcaaaggcccggtatcacaggcttaaatacagagggctaggagggaggtgggaggtgggagaggaaggtggagtactaacaaaggtgttgaattatcactgcccatcaggacacggttatttccccttactctgggacaccaaagattctacacaatcttcctataatcctgaaccacaaaagggaggcacagcctccnnnnnnnnnngtaggagaggggaggggggaagtacttttattttgaaatgtgttcatttttctttgttttattttctatcttgatgaaaagaatatatttttaaacct

SEQ ID NO: 362568 - DNA, 511 bp, Homo Sapiens
tacaccttcaccgtctttgcttcctgtgcccagctatcttcaaggacaagaggggatttttttgtacctgtgtgtgaacaccgcagcccacaaaaccaagttctgttcacactttctaacagccaccctctgtctgcgtctggatctgaggtgtgcctataccagttgttgggtccttcattgggaggacagttctcagaagaagctagctcagggccaagaagtggctttggtaataccagtcagggaattccagggtcctgggtcttggggacatagtgggtacccaggctttgggtgctggcctggagatttttcaccccataagaagagtcaggttggtgtcctctaaaatggagggcctagaacacggtttttcttgctggggtctaaggacactactgcctctggcccctacaaaatttatcttagggaccaatttgcaggaatctgtttatctggctagagctttctcaatgggaagtaaataaatggtctccatttatcattt

SEQ ID NO: 362569 - DNA, 449 bp, Homo Sapiens
acttggatggatttcaagggcatttttatgccaagtgaagaaaactaatctcaaaagtcacatactatgtgattccatttgtacgacattctcaatatgaggaaattttagagatgaagaacagattagtggttgccaagggctaggtatagatgggagaggcagagggatgagtagaacttttaataaaggggtagaatgagggtaattcttgtggtgatagaatagttctgtaccttgattgcgactgttgcatgactccatgtgtggtaaagtggcatggaattatacatatgttgtatcaatatcaatttcctgattgtgatattatgctatagttatgtaagaggtaacattgaggtataactgagtgaagagtacagaggatttctctgtattatctttgcaacttcgtgtgactgtataatgatttcaaaattaaaaagttt

SEQ ID NO: 362570 - DNA, 721 bp, Homo Sapiens
attaagctttgggcaagggctatttaccagggcttaaatgttgtgtctagaattaagtatgggcataaactggcttctgaatccctttccagagtgttggatccatttccctggtcttggcctcactctcatgcaggctttcctcttgtgttggcaagatggctgccaactcttggcaattcatacatccttgtttctgtctggtagagagtttgcttctcaaatggagcaaacaaatttgattattttttcattgttaaataggcaacatgaccagaaaggatggaatggcttaagtaaactaagggttcacttctagagctgagaagcagggtcaaagcacaatactgggcaattcagagcatggttagaagaggaaaggggagtctcaaagctggagagtttaccaacaaatattgactgcagtgattaaccaagacatttttgttaactaaaaagtgaaatatgggatggattctagaaatggggtatctctgtccatacttctagaatccactctatcagcatagtccagaagaatacctggcagtagaagaaatgaatattcaagaggaagataaatgcgagagggcaatcctttactattctcatatttatttatctctcattctgtatagaattcttgccgccatcccaggtctagccttaggagcaaatgtagtagatagtcgaataataaataacttaatgttttggccat

SEQ ID NO: 362571 - DNA, 890 bp, Homo Sapiens
  misc_feature (64)..(64): n is a, c, g, or t
  misc_feature (729)..(738): n is a, c, g, or t
ttggacctcaggaatggcatctttcaattagaagttgttgctactctaacgattttgttaatcnttaggtggcctatcttcaccatgcttcctatacaaaagtgaattgcctaaaactcagcatcggcgcttctccctcaaagttttagacaataaactctgactgtttgaaactcagctgtttgccttcaccactcctcctcccatcttgcctcctcccatcctcctcaactgctttttctgatgttggccaagatatcagaacctgagattagtatcagaaaattgagctcctaccatgaccccacaccaaagcttgaggctttcaataacaaagacagacaccctcctttctccaagagcctatatattgtgagggaattgataattaaatatgtgattgtataatggtttaatgagaaccacaacaggggaggtgctaccttcagaaaggcttccctcgagaaatgatacctgagtattaaactgcaggatgagtaggattcagctgagcaaagaagggttggagaaaagtagacagcagggaaaatccctgatcctagagaagtgggtcttgttggaggagccagaactggcaggtggctgggaacccagtaggaggtgtgagtagtgggtaaaaccagggctgcaacaagcgttagaaacagattatcctaaggcaaaaataactccctttcactgctgctgctggtttggttggcaaaaggnnnnnnnnnnggactccatgattttagtaatcagattgctggtaataatattggtattattattctgatactattcactatatatataataggatagagcaaataagtaattaggctaatgttgatagaaaccaagattcttcaccataagagatgcaaata

SEQ ID NO: 362572 - DNA, 329 bp, Homo Sapiens
gtcgaagctggatcttgaggttcaactgcaggcgaggggtgctgttcagttgatgagtggtgtttctcgcgtttaaagcattgtcagcggttgtggcggtggtggtggcagctgttggtggcaataggaggtgtgtgtcaaggtggatgttaaacagtgtgaattcccttccagatggctccagagagggagaaaggtgcaggactgcaccgggtaaggcgctcagcttcttttcttagagagacaaatccacagggtcaatacacagccaaaagcatatactcaggattaacatatcacgctagcttccagaagtttaagatatagct

SEQ ID NO: 362573 - DNA, 879 bp, Homo Sapiens
gtttagtttcaacacagacgactgggcttgggagcctacgaggttgcagtctggagggcgccaacagcagctaccaggctgcttttcctgaacacgctgcaagcacgtcaaggtagtcggagtcccctaacaatggataaattcgtcattcgaacgcctagaatccagaatagccctcagaagaaagattctggaggaaaggtttacaagcaggccacgattgaatctctgaagagagttgtggttgtagaagacataaaaagatggaaaactatgctggagcttcctgatcaaaccaaagagaatcttgttgaagccttacaagaattaaagaagaaaataccctccagggaagtgttaaaatcaacaaggataggtcacactgtgaacaagatgcgtaaacactcagattcagaagtggcttctcttgccagagaagtttacactgagtggaaaactttcactgaaaaacattcaaatagaccttctattgaagttagaagtgatcccaaaaccgagtcgttgaggaaaaatgctcagaaattactctcagaagccttggaattaaagatggatcacctactggttgaaaatattgaacgggaaacgtttcatctctgctcccgcctcattaatgggccgtaccggcggacggtgagagccctggtcttcacattaaaagcaccgagctgaaatccggggctcaggtgaagagcggctcgctgccagtcggcacgtttgtacaggacccacaaaaagtgacctgaggacggttccagccctgggccaggcagagaggaaaatgggcctgtctctgccgttcaaagacgcttagagtaagggtgatgggtgatgcttggctgtggctagatttttcca

SEQ ID NO: 362574 - DNA, 559 bp, Homo Sapiens
attttggcagcacaaaccaaaagagcaggcagggccgggagagggaagtcagtggtaccagaaggtagatgggctcccttgcaggctccttgttctcctgccatcaccagtagaaccttctggctgacagaccagggacaagtagactgggttcaaagtgacagacctttcactttcaacagctttggctcagcagacatgtacacatacaaagtagagcctacaaggtcaggggcattctgcccccgccacaggactaaagactgccctgcgggaagatggcaggagcagtttctgacctcagttgagtatctgtggccatgagcagaaaaggcaggggtctgcctcctgaccaagcacatcttgaacatcacctgagagcttgaacatcactaaggacctagacactcacttgtctttcaacttgagcccatcactcaccatgtgagttctgttgagggtgggtagaaagcaaataggttcaggttatcccaccagactaactcggtgaatgaaaggatcatgccttcttcacattttaattaaatggatcaagcac

SEQ ID NO: 362575 - DNA, 605 bp, Homo Sapiens
ctcagttcgatcacaaaagactggtggaagggcactgcgggggagccacgggattcttccttctctccttcgtgaagatctcaaaagattcctggaggaggacgccccaccaactggctgcgttgctactactacgaagacaccatcagcaccatcaaggacatcgcggtggaggaagatctcagcagcactcccctattgaaagacctgctggagctcacaaggcgggagttccagagagaggacatagctctgaattaccgggacgctgagggggatctggttcggctgctgtcggatgaggacgtagcgctcatggtgcggcaggctcgtggcctcccctcccagaagcgcctcttcccctggaagctgcacatcacgcagaaggacaactacagggtctacaacacgatgccatgagctgacggtgtccctggagcagtgaggggacaccagcaaaaaccttcagctctcagaggagattgggaccaggaaaacctgggaggatgggcagacttcctgtctttgaggctaatggacccgtggggcttgtaatctgtctctttctactatttacatctgatttaaataaaccattccatctg

SEQ ID NO: 362576 - DNA, 774 bp, Homo Sapiens
ggatcccaagctccaacaagaagataccacaccaaagtcctctcagcgggtccttctggatcaggagtgtgtgtttcaagcccaaagcaagtggaaaggtgcaggaaaattcatccttaagctaaaggagcaggtgcaggcatctcgagaagataaaaagaaaggcatttctttcgcaagtgaactcaagaagctcaccaagtcaactaaacagccccgaggacttacatcaccttctcagctcttgacctcagaaagtatccaaaccaaggaggagaaacctgtgggtggcttgtcctccagtgacacaatggattaccgacagtgactaagggcagcatgtttaacccaggtgaagatctttaagcaagaagttaaagagtgaacatggtggaaaaaatataattattttcatcagacttaaactggaaattgatgatttctgaactgaagccttcacacatgtgagatccatgctgaggagaagcaaaatggcacagggctagttgccaccaaccaatttactgatgaatgaagcccaggggactgccattttataaatgtcagcagttggaaaaatcgtcacgaattgacttagagcaagggtcagcaagcttgtctgtaaagggccaaacagtaaatattttagggctgggggccataaaatatgttgcaaccacccaattctgccattgtagtgcaaaagcagccatagacaacacatacatgaacgaacgtggctgtattccaataaaactttatttatggacactg

SEQ ID NO: 362577 - DNA, 570 bp, Homo Sapiens
tgagtttttcaaattgctaatttaatgtataaaaagcagctaaacactggtactttataaaaatgaaacagcattttgaaacaaatgttacagatctataaatattcattatatagaataaaccctagttacttgcatgcaccacctcaaatcatatttctttacactgacctattatatacacaaagtatacagtggttaatgatcttctcttctgtttgtttgtttgtttgtttgttaggaaatttcctcaataagccagaaaaccttaggtattattttcacaaaagttaactcaggagaaattgtaaggaagtccttgacccatggagaaggtcactgtttgtttgtttgttagatacgtgtgtctgtcataaaacaaaatgacaccagtaattacttggtaatttaaaaacaagttcataaaaagaaaatacctgcaggtaatttttatggtcagttatattctataacctgaacactgaaaactaaaaacttttacttacaaactattattatctgagcacagcacagtgctttgctttaattggaaataaaaatgcatgagtg

SEQ ID NO: 362578 - DNA, 595 bp, Homo Sapiens
gcggccgccgtgggaccccactttaagaaccactggggtagagtggccttgcacagaggagtgctgggtgaacatttggtggaggatacggaaacccacgtggattccaggtgctgacttttgtgccactacagagtctagcgtacattaggaagacgatgccaaccaccaccatctattgacttactcaacgtttactgcacacctactgtgtgcaggggtcctggggaccccatagatgaaaacataagcacatgatcaaatggaaagctgggcttcgtctattacagtgggtaccatacagttttacactcgtgtacctaaaacaacctggacaaggcacgggattgattttcaattttgtaaaacagagcaaaagtgcttttactgatgtttcttttctttttcctgagatcttatgtccctagacagaactataaagcgtttttatattaaaggtctgtgcctcagactttaaaaatatctgtagaatgtgtagtaaagttatccatttcatttgtgataatggtcatttttattttctcttttgttcctgatcaatctaactataatttataaatttaacaattttctc

SEQ ID NO: 362579 - DNA, 918 bp, Homo Sapiens
  misc_feature (574)..(689): n is a, c, g, or t
ctgtatctctctgttttctgtttaggaccgggagtcttcttgaatcccatgagctctgcccaggaccctctctcaagcacctgtggcataccttcatgtgctccactgcacccagagcttaagccacagtcctgctcaggctacacctccaagggtgggaccaggcccaccttatcttcctgtactccagaggcccaagtcagccatgctggtgtggtccaagcttctgtgtgaaccctggcccttccataagacagcattaccctttgtcctcctctagccccaagctcccagaagcttctgccaggcacctcagagcaccagctcccctgtcccagggcctaaccacagatcctggagttctgcaacctccagaccagagcggtctcatgaaccacctccccttgaatatcacataccacattgttatcaattcatcagtaaggtcagatgctgtttgcacacctccagcaatagggtgctcactgcctctcactttccaatggcacagattacaaaagtaaagaacaaccaccaccaacatcggtaactccctgtattctcatttttctgnnnnnnnnnnnnnnnnnnnnnnnnnnnnnnnnnnnnnnnnnnnnnnnnnnnnnnnnnnnnnnnnnnnnnnnnnnnnnnnnnnnnnnnnnnnnnnnnnnnnnnnnnnnnnnnnnnnncaagtggacagacctggtgtttgagcacaggccattcacattctgacccgttgcctggtgctgccccgacactctcctctcctgggcttgggcattgccctctggctctgtgtggagcctttacgaggccacctgcctctctgagggatctaaacaactgggagggaggggaccgctccccctttctctgtgggggtggactaacacaattaaaatgaacaacctgctt

SEQ ID NO: 362580 - DNA, 492 bp, Homo Sapiens
ctgtggcagataggaccacgtttggcgagctcatccagcccttctttgaaaaggagatggcagggtgtttttcctgaatgtgccatttgattccatcatggagcggctgactctgagaagaattgatccagtcactggggaaaggtaccacctcatgtacaagccacctcccaccatggagatccaggctcgcctcctgcagaacccaaaggatgctgaagagcaggtcaagctgaaaatggacctgttctacaggaactcagctgacttggagcagttgtatgggtcggccatcaccctcaatggggaccaggacccatacacagtcttcgaatacatcgagagtgggatcattaatcccctgcccaagaaaatcccctgatgggttcagagccaggagcgctgccccagggaaagagttaatcccctgcccccagccccccagcctcggcacagctcccctaaaaagccaataaagcctgctggatacag

SEQ ID NO: 362581 - DNA, 561 bp, Homo Sapiens
actcccaaataaactcataaatattttgctttttatattattcaagaaactttgcaacatttcccctcatcatgtataatctagggtctccaaaaggctgtagacttttccccccaagatccctgcatttttttgtgacaggctgggccttagatgttccaggctcttcaccggactgtcttcttgggaggtcaggccaacaggggtctttaactaagatgaaggatgggttgatggaactggtcactcacaggtcaggtctgaagcccaattcacactcaactaatcacaagtggctgacgttgaggagcagagaggggtgcagctggcacttcctgatctgaggatggctcttagaaccagggaactatccagtctcttaggatgattcagtggacctgagagctttgataatacgtttcaatttggcctatcactgacatttgggtgattctgcaagttctgagccagaagaaaaataaagaatggttgtcaaagttggaatttaaaatggtgggccatttcaacttggcatacttgtccataatgcatatagtaaaa

SEQ ID NO: 362582 - DNA, 586 bp, Homo Sapiens
  misc_feature (294)..(415): n is a, c, g, or t
  misc_feature (479)..(540): n is a, c, g, or t
caaataaaacccaatacttttgtccaatgtggttggtcaaatcaactgaataaattcagtattttgccttagttgttgtgaagcctgtgattctcagctgggactgaggatgggctataggagttgagttatagattggaaggaaatgtgtatcataagaaggcaaaaaataccaggagctttgcaaattgtattaatacactccttttctattgctcttgtatgaagctattgtcagctggaatggtttgcatcccccggtacattgaggtagaaaaaacaattgtggttgtnnnnnnnnnnnnnnnnnnnnnnnnnnnnnnnnnnnnnnnnnnnnnnnnnnnnnnnnnnnnnnnnnnnnnnnnnnnnnnnnnnnnnnnnnnnnnnnnnnnnnnnnnnnnnnnnnnnnnnnnnntgtgatggtgcatgcctgtagtcccagctactcaggtggctgagatgtgaggatcacttaagcnnnnnnnnnnnnnnnnnnnnnnnnnnnnnnnnnnnnnnnnnnnnnnnnnnnnnnnnnnnnnngagggaggccttgtccctgctaaaaataaaataataattgtgtgcc

SEQ ID NO: 362583 - DNA, 232 bp, Homo Sapiens
aaagtaggaattaaagtcatacacaaaatgtggtaattcatatgtagatgaaatattaaacatttaaatgaccgagtaaaaaacatctatcaattacacaaatgaacaagaatgtgagttagaaaaatgtaataaaatatgaattttgaatattttattaagggatgatttaattcctggatttcaaaaacctttaaaaacatcaaacaataaacttttataaaaaagtgcc

SEQ ID NO: 362584 - DNA, 564 bp, Homo Sapiens
acgaggtccacttcttcgactgggaggagcattacagccacggcttgggctggtacctcagccagatgcccttctcctggccacaccagctcacagtggagaagacccccgcgtatttcacgtcgcccaaagtgcctgagcgagtctacagcatgaacccgtccatccggctgctgctcatcctgcgagacccgtcggagcgcgtgctatctgactacacccaagtgttctacaaccacatgcagaagcacaagccctacccgtccatcgagggagttccctggtgcgcgacggcaggctcaatgtggactacaaggccctcaaccgcagcctctaccacgtgcacatgcagaactggctgcgctttttccccctgcgccacattcacattgttgaccgtgaccgcctcatcagggaccccttccctgatatccaaaaggtcgagaggtttctaaagctgtcgccgcagatcaatgctttgaactttttcttttacaaaacccaaggcttttactgcctgcgggacatcgggcgggaccccttgttacattagtccaaaggccc

SEQ ID NO: 362585 - DNA, 571 bp, Homo Sapiens
gcggccgccacgtcggggtgcaggctgagcatctccagcagtgcgcgcgtgccgcccttgcgcacgccgatgatgatggtctgcggcaactgctgggcagagccgtttggggccacgccatcgcggacgtcatcctggagggtccccgctttccgcagaagctcctgctggcctagctcggcggggcgggaaggcactagctggggctgggccaccagcagcaccgcgcccaggagcagcgcggccatgctggacaccacggtggcttcactgggccgcgcgccgctgggtcatgaagtgccgcagcagggaagcctcctagtcagtggcacatgggcgtttcaggccttcaattactgagccgcgcctctgtccagcccgtccggcgccctaaataggctcctgggctgggccatgggcagcactgccgagcacccgcggcgggtagagcaagtttctggatggcccggggcaggcgggcggggagaaggcgcaggcacccactgagacccggcggtcgtggcggcgactcctggctgccagggcgcagaggaccttgcaggcgggcgtt

SEQ ID NO: 362586 - DNA, 845 bp, Homo Sapiens
taaggctggtacggtccggaagtcccgggatatcgtcgacccacgcgtccggctggtacctcagccagatgcccttctcctggccacaccagctcacagtggagaagacccccgcgtatttcacgtcgcccaaagtgcctgagcgagtctacagcatgaacccgtccatccggctgctgctcatcctgcgagacccgtcggagcgcgtgctatctgactacacccaagtgttctacaaccacatgcagaagcacaagccctacccgtccatcgaggagttcctggtgcgcgatggcaggctcaatgtggactacaaggccctcaaccgcagcctctaccacgtgcacatgcagaactggctgcgctttttcccgctgcgccacatccacattgtggacggcgaccgcctcatcagggaccccttccctgagatccaaaaggtcgagaggttcctaaagctgtcgccgcagatcaatgcttcgaacttctactttaacaaaaccaagggcttttactgcctgcgggacagcggccgggaccgctgcttacatgagtccaaaggccgggcgcacccccaagtcgatcccaaactactcaataaactgcacgaatattttcatgagccaaataagaagttcttcgagcttgttggcagaacatttgactggcactgatttgcaataagctaagctcagaaactttcctactgtaagttctggtgtacatctgaggggaaaaaagaattttaacaaaagcattttaaggtataacttcatttgtaaaatccagaaaggtacttctgtacagtattagaattcacaattgccatatatactagttatatg

SEQ ID NO: 362587 - DNA, 561 bp, Homo Sapiens
ggaaggaggaggctggggcaggagaacagcatcaggactgtgagccggctgcagcagctgttcggattacactcaccctctttgaaccagatcacaaacgctgcccagagttcttctacccagagctggtgaagaatatccgagggaaggtaaaaggccttcagcctggagataagaagaaagatctgtcagatcctttcaatgacgaagaaaaggaaaggcataaagtagaggcccttgcccgaaaatttgaagaaaaatacggtggaaagaaacgtagaaaagaccgaatacaggacttgatcgatatggggtatggttatgatgaatccgactccttcatcgataactctgaggcgtatgatgagcttgttcctgcttctttgactacgaagtatggaggattttacattaactcgggaaccctgcagtttagacaagcatcagagtctgaagatgacttcattaaagaaaagaagaaaaaatctccaaagaagcggaagttgaaggaaggtggtgagaagataaagaagaagaaaaaaggataaccacgttcgcgag

SEQ ID NO: 362588 - DNA, 827 bp, Homo Sapiens
agcggggagtttgcagcaacctccaagtaggaggctgtgcgcgcgtgtgtgtggagtggctgcgcggccggggaggatgtgcgctgcagggcggccgccgcagtgagcaacgcggcaaccggagcccggcgggcagccggggaggccgggactgagaggggcgagccgctggtgctccccggcggcagagggccgcgtcggccacgggcccgggagagacgcgctccagccggccccaggatgtaggcgatcggcggcagcgctcctgcaggcggccggctcatcatgaagaagcactcggcccgggtggccccgctcagcgcctgcaacagtccggtcctgacccttaccaaagtggaaggggaggagcgcccccgggactccccgggcccggcggaggcccaggcaccggccggggtggaggccggcgggagagcgagtcgccgctgctggacgtgctcccgggcgcaactcaagaagatcttctggggcgtggcggtcgtgctgtgcgtgtgctcctcgtgggcgggctccacgcagctcgccaagctgaccttcaggaagttcgacgcgcccttcaccctcacgtggtttgccaccaactggaactttttattcttcccgttgtactacgtggggcacgtctgcaagtccacagagaagcagtctgtgaagcagcgatacagggaatgctgtcgatttttggagacaatggcttgactttgacaggtgtctctaaccaaggcagcacccctttgggtgtcctttggacactcacaaactacctgtacctcctgcatacagaaaataaccctacggatgtctcg

SEQ ID NO: 362589 - DNA, 504 bp, Homo Sapiens
ctgtgggcttcagggttggagaagggctgggaccaaccgggtgagatccacaagtctctggatgtggctgaaggcaaatacacaattgaagtactttctgttttgaagtgctttcccttttgaatctggtttgaaacatgcagcttctgtctctagcccaaggaaagaccaaaacatagggaaataaaagcatttatctttgtcttggaagtaattgttgaagttgtgcagttgatcagtgcacagttagatgcaatgtttatagaaattgattgttaaaccaaatttacactggcatgtgtggtgtagtttctaaaaggcacttcacatttgaaatttttcttaccttagaaagtttctagtgatctaaatgtctagttttgtattcttttgtgtgtgttcactgtttctcagtattaccacttgaataattctctgtacaggggggtttgtgctatacactgggatgtctaattgcagcaataaagcctttctttaaaaagg

SEQ ID NO: 362590 - DNA, 307 bp, Homo Sapiens
ctataacaaaatagtacactgtttccacaaacttgggaaggctagtatttgggggtggggggcgtggaaatcactaaacaacaaagaaaatctgatgaattggacagcataaaaatattggcataaagatgaacataacataagcaggaatatttaaagcacatactttttatagagtgtctcccctgtaatgtctctggttaaatgaaagggtttcaaatgtgaagacaaccctaaccatactcattatctgtaaaagatgtagcattgtcatggactccttaataaacgtgaagactttaatcca

SEQ ID NO: 362591 - DNA, 569 bp, Homo Sapiens
tctgtaagaattggaatattgattttgttgatccaaatgatagttattgccaactcagagagttctgttttctactttgtgacaccccttcttcatcagaaattctttatatgatatatttgtaaatgcaatacctgtgtcactcaaggtacaaatgagtacatgctttattggactttttagtgagtccatgtttacctaagcattgctgagtggaatggaacatcgaggggtagaaggccaggtctctgctgcagagacctgacagtcaaagaatgccgagtctagtgtttgaaagcagatggtggccatgtgaatcctggttctacctctttctacctgtgtgaaccccgggtaaggtggtgagctcaatttccttccttttctcatatgtaacatcaataatacttccccacaggcatggtaagatgactaagtaagatagtacatacaaattctcacaagagtgcctgccactctgtgagtttggcaaaggtgaggtgtatttatttagaaactactgtgccgcctcaccattttgattaaaaaaataaattggttttgtcttt

SEQ ID NO: 362592 - DNA, 457 bp, Homo Sapiens
aagcttttaaatacatgtatgtaaaaacaagattgtactgggtctcgaatcctagctgttgttttaacatgttttgcttcaaatcataaactctctttagaattctctagtaagtcatacggaaagggactccaacaaacccaagaaaatatgtaagaaaccagccaaactgattaaaattaagctccgtaaatttatttattttgcttaatatccacgatctattcaagccacaaaagaagtcctttaaagaggaaaaagtcgatgctacatgtgttcaccttctctttgccacctccaccacacaaaagagaaggaaggaagtattaaaatggaaaattatattttgatgtttatgattggatgtgctacgaacattttatctggattcagagtaagagtccctcactcactacttcttttcatgtcactcatgagtgacagtctctaaaacata

SEQ ID NO: 362593 - DNA, 868 bp, Homo Sapiens
  misc_feature (58)..(58): n is a, c, g, or t
  misc_feature (438)..(693): n is a, c, g, or t
  misc_feature (701)..(734): n is a, c, g, or t
agaacagttttaaaacatttccccaagaatggtaacatctgcccggcaacctgctgcncccgggtcccagtgccccgccttgattgtgcacggtgagaaggatcctctggtcccacggtttcatgccgacttcattcataagcacgtgaaaggctcacggctgcatttgatgccagaaggcaaacacaacctgcatttgcgttttgcagatgaattcaacaagttagcagaagacttcctacaatgagaatgcacactccagtcttggtggttccttcgtgtggggcttgatcgtgttgctgcctgttaacatgatgcctttgaaactctccgcctttgaaactttctacccctcccttcaatcttatcctaaccaaatgagaataatgacatattgaaaacagcctctagcttcaggctgggcacggtggctcacannnnnnnnnnnnnnnnnnnnnnnnnnnnnnnnnnnnnnnnnnnnnnnnnnnnnnnnnnnnnnnnnnnnnnnnnnnnnnnnnnnnnnnnnnnnnnnnnnnnnnnnnnnnnnnnnnnnnnnnnnnnnnnnnnnnnnnnnnnnnnnnnnnnnnnnnnnnnnnnnnnnnnnnnnnnnnnnnnnnnnnnnnnnnnnnnnnnnnnnnnnnnnnnnnnnnnnnnnnnnnnnnnnnnnnnnnnnnnnnnnnnnnnnnnnnnnnnttgtcttnnnnnnnnnnnnnnnnnnnnnnnnnnnnnnnnnnggaataaagcctctaacttcaatagctatgaaaattaaatccgattttctaagatgaagttgtgacaagttataccattgtcttaacaggtgaattcctgccataatttattttcaaataaattttaggtgggg

SEQ ID NO: 362594 - DNA, 422 bp, Homo Sapiens
  misc_feature (14)..(14): n is a, c, g, or t
  misc_feature (184)..(205): n is a, c, g, or t
gggtatgtaacaancctggaaaaaggtgtggggccaccccaacccctccctcaaagaaattcacaggccacagtatgaggctaaagtaacttcccatccttggatgcctaatctaccatgttgacttctgataaccagttcctggaatgccctctaagatttctacttttatctattaaaagannnnnnnnnnnnnnnnnnnnnntgtaaatcctggccttaagcaagttataggctaagttgtaaacagcattcttgcctttccctgaggaggtgacttcagtgtctcacatgttccttcatgtacccccttttctctatggcatataagccctgggtcggggggtaactgtggggatcactgcctgagacatggcttctgtgcataagtccctattaaatgtttctttctgacaaactgg

SEQ ID NO: 362595 - DNA, 1043 bp, Homo Sapiens
  misc_feature (917)..(933): n is a, c, g, or t
atcatttgctcccaggcttccccatcatcaccctcaccacatatcctgctaatatccaacaacaaacaaatatttaatattgaaatagcccattgcctgagaatgaacacaagctaaaatacatgcaagggtacttaatggaagccaaaccatgttctatacctaaggataaaacatggacatgtagaatgcttttattcatgtattcaaaatcagaacaaatcagtgtatatcactagaacatcagatggaggataacacaagaagtgatacagatcagggttcacttctcttaccctctctctgttaggaccacattcctattttagccaaatgtttctggtacgggccatcttttcaccataaatggcattatgtttcaaatggctaaaagcatattatgggtatgctcaaaggagtaaaacccaattcacagagatgtggcttttctaaagaaccaaattaagggaatacttagtatctacaactaaagtattagtcattctgaggattatttgttgctttaagtattagctccctactacatccataacaccctacttactaaatttaattacacacaacttttcaagaattcgtattttatttgaagggaggtacctgtctactttatctacaataaaaacaaagggtattggctttctctaatccatgcaaactacaaattccatcgggagtcctacatcactaacagtggtatgaacaaaactaagaaagtacttcctatccacatgtgaatgttttaaaaaagtttttgccataaaacctaagtgtaatttagcataccacagtgctctgaagatgggtcattgacgatgtaccatttgtatataggtaatacacatgtaaatcactaattgttaattaaatataagaagtaggtttttatctttttnnnnnnnnnnnnnnnnnggtgactccctttctcattctgttctgttgtattgcgtccaaaagttgtgtgtaatttttttaaggtccaagaaatgtaaagaaatttgttggaatacctgaatttctgt

SEQ ID NO: 362596 - DNA, 596 bp, Homo Sapiens
agaaagcatattgattagaagtttattactaaacaagaaaacaaacttttttttgaaaaatattgaacaatttgatagagtgactgaagctctaaaataagagcattttaaccagaggttatgtttctaactcttgggcatggcttctatttaaattgaggaatatattttatgtacaaggtatcatacaaaatactaaaaataatttttttaatatgtgtttttcaatcctgatcttagcatattattatataagatttgtcaataaatttagccagttagtttgtagtcgatagactcctttttgaagaccaattcttcaaatcccaaagtagtaattatttacattaaaggagaatatagtcatgaattaaacccatcaaaatactagatttttttgttctgagtaacagaataaaataaaagttgtaaaaagagaaagtgtttttcatttgtgtaaaacaatgtctttatacatgtgaagtagctgaaatttatatttacttaaaatttgttatatatactttaattttaaaatatctaaggaagccagagaaggaaagatgattgattcctttaagaaatagtaacagaat

SEQ ID NO: 362597 - DNA, 620 bp, Homo Sapiens
acggaggagagccatacctgggcgtctccaccccccaccccactgtctctggagaccaaggccggcgccgggggaggcgggtgtgcgggcgcgcgagccgagccctttgttcaggagaacattcctcagcgccagcctccccacctggagagcctgtggttcctgtttcaggctttgccttggagaaactctcgccgagtatgcagctctcaagcctggcttctggcgcatcctacttcatggccttcaacgggtcctttgacctccctgaacctcaattttctcacttgtagaatgggaaccaaaattctgacgtcgaatgatcgctgtgaaattaaattaaatgccaaaacacaaatgtagagtatctgcaggcataaggtgaatgttagatacttgcgtttggaagaccttcaccgaaagaagctaacatttttgtattgagttcaccctactcccccatcccgctttgtatgggcaatttgtagtcctcccaaatctttgaaatctcacttttttagtaaagactttccctgatttttggggcacaccctcatggagtcaccctctggcatatttccatagcatgctgtaacgtctattaaaatatttgcagttac

SEQ ID NO: 362598 - DNA, 744 bp, Homo Sapiens
  misc_feature (32)..(33): n is a, c, g, or t
  misc_feature (161)..(161): n is a, c, g, or t
  misc_feature (248)..(249): n is a, c, g, or t
caggaaacatcattcatactttcttagatagnngagcagtgtgggtattctctcacttctctgtccattttcccctaacctctctcagttctttaccatgatttaccttcaggtttccatcaaggaggactcttaaaatacaagagttgaggtggagattncgtatctctactcctgtttaaaccctatctgttcaaactttggtgattcctatgaagttgtatttattcttgtattaaaaaccccanngcatcttcttatttataatctatatgttaatatttggctatctgaggcacaagttgtatttctgagagtttccaggtactttcttgtgagtttatgggtattttctccacgttcttcttgtagctcttaagttctattgcatttggtttatggttttttaatgcctttttaaaaattctgttgcttatttcagtttgaacccattttcttacgtcaacacatatccttctaaaacctagtttttacagtgagacatgttccattcctgttacagagtccctagactatgaatctgggccaggtctgtacattagctagaactgctctgttgaaatctacttcccaaacccccacatgtgctaccaattcctcattcctcagttctttcattcctggaagcggaaagcttattcagatgtgtcatcctactgtatttaagatattttggataatatcttaaatcttggtcaaaaataaaattcttcatttttaagc

SEQ ID NO: 362599 - DNA, 561 bp, Homo Sapiens
  misc_feature (488)..(497): n is a, c, g, or t
ccctgtgcaggacgccgacacgaaaagatgaagagttcaatccgtgctgtctgaactcacagtgtagcaggcgagatagacgggaagatcggtagggtgggagatgccggaaaggcttcccgtgagactggataagaaatcaaaaatctggtgaaattgccggcaagagggagttaaggacattccaggcagaggcaagccacataatattacctttggctgatgatctattctgtaggaagtctgctggaactggcgtatctctctgatgatgtgtgatatttaccagagaaaaaacccaacccaaatgccccccccaaaagcaaagaaagtcatagcctgtgttttttaaagggcatggttcaaaattctttcccttcaaatgtgggggcctttgcccttttggttcagttccaataaagaaaagatttgcttttagttttctggcgatgcttgggcattgatgaccattccgggatcctgggttnnnnnnnnnnatccctcccacgtttatcagcagtttccccagtttaataattgggcatttataatgcccccccc

SEQ ID NO: 362600 - DNA, 576 bp, Homo Sapiens
agcagccctggaagcattccatcttcctttgcttgtgacaacagccataaaactctcattttcccttgcacggctgctatctaaagtctcaccgctcacccaattctctgctcacaaacagactgacggggcccatttgcattctgaagtgcagctcccctgagtcccctgtccctccaggcaggtattattagtccccttgttttgttgggtgactctgaatgggagcctgtttacgggctgggttcctaatagaaggcttcggttccctcctaataatctatcccctggtgggttttatttccaaagtacagcagtacagaacctgccctcttgggagtttattgggcttttttcttccccacaatattttctcccacgttttcatgcgagggaagagtttcctgctcgtggaactgattgttgaccaagccacctgcgttggtcttttgtgtcctggcaagagggggttcacggaaagtggggggcaccctcctccccgcctcggctccataaagcatctcaagaacacggaaaacctggatccggttggcatcaataaaaggagtttgggtc

SEQ ID NO: 362601 - DNA, 687 bp, Homo Sapiens
gtaattgtgctggttggtgtgtgtgctgaatttgtagcgacatcagagtcaagcattatttgtcctgctgctttcttggaggtcacagtaactataaaaccgtgagccagcaaggcagagaggaccctttggggtaaggagtggagctctgggagatcctaggtttcggaagcaggtccagtttccttggggaggggagggctcgctgcagggcggaggaggggcagccactgtaatccttgtctggagtgaacattgtatatgaggttgcagtggcttaaaaaggaaggacttttgcggggaggggttgagattgtactttctaatttcgcttgcttcagacttgactttggaatgaaggggagaggcggggcaatgttcctggacattccaaaaacaaaactgaagaggcagcatttctcttccgtagtccagtcagctcatttggtagatgcgctttttcctcctttgcgcttattcatccataaggatatataatttgcatatatatttcatatgcgtgcatatgtgtgtgtatgtgtgaactggcaggtgttgatttcataaggacaaaattgttctgcaaaccttgcaccaattatggggtgtttcaacggaaaaacttcaccaaatgatctgtgtgttctttcaaagagaagttatgtctaattaaaatgtgtaacggaa

SEQ ID NO: 362602 - DNA, 400 bp, Homo Sapiens
gagaagtttgatcgtctgaggccttcttctgtcaactcatcaaagtcattctccatccaggactcgactctctttggcctactggatgtacaggaagtggtaaaagctgtatggtgtctccttaggaattgaaaggccttgggcaaatcaatcaggtcctggctttccacatcagcaagtcaagataatcatgttggctaaacttatttgaataccatctggattcacttactggcaagtgtaaagtgttttcagaataccaaatattatatagggcatccaagcagcttaaatttcagtgccctccattccttcccttcctgtacttcagtctactactgaatgcaatgagatataataaaaccaagatctcagggctcctagcccttttcaaaaaaaa

SEQ ID NO: 362603 - DNA, 694 bp, Homo Sapiens
tgcgggagcaacgtggcgtgggagtgatcgttctgggggagagtgggcagaagagagcgcgaggcgagcccggggccaggggcgcagggaatagtggctttggagctagcgctctgccgaccagacagtaggacacatgctggtttcgcctactgagatggcttcccacccgtaacctgcttggagattcttgacactgcctgcccctctgacatcgctgccctgagatggctctatagagccagaggactggacaggacctgcctcccgctcgtttggttccggcctcaggcttaggacaatggggtgttcctagcacccgagcgggcctcctggtcacagtgcgccttttaggtggctctcccagcgtcttcactgactttcgtgaaatagtgtcctgcgccctagtgaaactaccctgccttcacttaggcccgttttcttgaggagtgaagctgtcggccgctgtggcccctcctgtgccgcaggcgcatgcgaaacagggaccgaacgagccccgcctcgacgcctccaatcccactgatccccctgcctcggccctcgttccgagaacgaccgttccattcattcagtcttggcagtagttatttgattcgtcttctcttgtagtatactttaaagtgtgggcgatgcagttggctgtggtgctttaataaagatctgatcgatgcgg

SEQ ID NO: 362604 - DNA, 937 bp, Homo Sapiens
atggtgacaccaggccagctggggattcttcccaggctgggctcacaggctggggctgggcacacggagcagctgcgggaaaaggatctggacaccagccccccagcgtgtcaccggcaggaaggtgaggtgggaacagagtgacgtccaggcatgttcaggactaagccagtggatcacaaacatcctggagagcagtgactctgtgattccatcacaagaatatgaaggactgagaagatctccagctctgcccattgcaccttcccattgagaagcagcatggcaccctggtggcaggggctgatactcagccgggccagggtgctctcctgttaaccataaccaagctcacaggacatgggatgagcccactgtgtgacacagggagcgggacacagtctgttaagtcttgcacagccatgctctgccacgcaggcaggcctttccttggcctccctctccctgttcgtgctcatgtgaacatccacctacgtggatagactgggctttggttcattattgctctgtgaattcctcgaacttccgcatctgcccaacctcccccaccccattgttttcattgtgtttcaccaaatggaaattctagagtaagcatgtgagtcctctcccaaacttgttcactgttgagagtgctaaaatgctaaccccagatgctaactgaggggtagggttaccttatctttagagcactgcgaattgtatgttaagtggaacttaatgaaaaaatagttaattgaccaacatgaatatcccctgaacagaatctcccctgaacagaatcctacaatgaaactaagggagataaataaagctgtttacctgaaagctctctctaatcaagatcctttgaaatttataaaacatggtcaatatttgccctggactttgtaaaaataaagcttgataagagaag

SEQ ID NO: 362605 - DNA, 798 bp, Homo Sapiens
  misc_feature (145)..(212): n is a, c, g, or t
taatgctgctggtaagacatgaataaatacataccatctctggcaatcaataccagaagctttaagcattgccttttgactttgaaattgtacctggaaatgtatgtttcagtaaccatcatgaatgtacacaaaatcctgaaannnnnnnnnnnnnnnnnnnnnnnnnnnnnnnnnnnnnnnnnnnnnnnnnnnnnnnnnnnnnnnnnnnnaatgctaaaaggaagtgacaactgaaactaatggtcacagtcagtcaagacttcccttttctgaggggcctagcaggaagagaatatttagactgatgcttagtgtaagaaggaatgttgtacaggttaaccagcaacacaaagacatattcaaaagacctaataggtcagaagaataacataccacaccaaaaacaaatctgtatggaaatctagaatcatgtgcatagaaaaagaattttcatgaggataaaaagaagcaaagagaagtaatgctcttattggggcgtgcatcagtggacatgtgctaaccagtaagaacagcaggaggcctaaatgcccatgtttagggagagaatatggaaaaaatggatgggattatttggaaaagatgtaagagattaaaatacgtggtaagagctactcaactcttgtttttctccttttccatagataaagacctgaacaaactgaaaaggtaggacgtaaagtaggaattgtaaaacggaaatactctttatataagaaagctctactgtatgtcagaaagcaatgtaatagatagaccaagcacagtggctcacac

SEQ ID NO: 362606 - DNA, 622 bp, Homo Sapiens
ctcaccctgctctgtgtctagaagagagctgaacacgcagtagaacacaataaattatattcaaatggcagtcaaggaggaaacttttcttcctcatcaacaaagctgatcgatgggggctgaagccccagggaagaagcatctgttgtaactcaaggatcccggcttgagctgaggatggaattaacaggcacagagtggttggcagcccaacgtttgtgcaagtctggcacatgcacacatcattagcaactatgctggagaagaatgatcaaggaggtgaggaggggaatggatctgactaaagggatgttcaagaaaggaaattccaagcacttgggtaaaagcttcatagctaaaatgaatgaactcgtgagcaaagcaaacagccaggtacatttgggagatgctgacagacaatctggataattttgcctctgaaactttcaaaacaaagtcatttcatgcagtgaattccccagagtggctgcctctttcacttagctccttcggctgtgtctccttcactaaaatgaagcccccatgaaggcaaaaattttgctgtcctgttcatggctccaatcttggctcctggttgataatattaaatattcatggaata

SEQ ID NO: 362607 - DNA, 702 bp, Homo Sapiens
  misc_feature (316)..(328): n is a, c, g, or t
ttttccctgcttcctttttcttttgtcatattcttaaaacaattttgcaaccacaggtacccacattgctggcactaccagccttgggctactaccgaggataatggagccagggccttgtagaagcacagaggaagtctagaactgagggggcctatgatacaggaagttcaggaggcagagtctcaaaggaacacctgcctttaataatgtttacagaagtggagaaaggactaaaggacttaaagacatgcaggtgtcttcatcctgattctgtctttgttattgcacaatgactataaaataatgacctaannnnnnnnnnnnnctggcttggctaatggaaatcgacactagcgcttccccaatattagacttaatctaattccaaagtaacattcaagaaaagaaaaaccagtggaacaggatcagtaagctcagactctccatctccattattttagccttgaccattcttctctaatccttttaaattatcttcagtttccagttcaagttacattgcttcagttacagtttgtttgaccctgtattcagagctgcattatgattcttgtgggccctagatagttttgccatcttagaccccttcttccatacaaaattaaaagtgatattttacaattgtatctgtatgaaatgaatgtattaatattttagattaaaacattttgtttagaa

SEQ ID NO: 362608 - DNA, 178 bp, Homo Sapiens
taaaaataaaactcctactcagtaattttggagaagacaaggttaaaataatggagatggagagtctgagcttactgatcctgttccactggtttttcttttcttgaatgttactttggaattagattaagtctaatattggggaagcgctagtgtcgatttccattagccaagccag

SEQ ID NO: 362609 - DNA, 466 bp, Homo Sapiens
gacgttgtttacacctgggtgaatggcacagatcttgaactactgaaggaactacagcaggtcagagaacagatggaggaggagcagaaagcaatgagagaaatccttgggaaaaacacaacggaacctactaagaagagtgagaagcagttagagtgtttgctaacacactgcattaaggtgccaatgcttgtcctggacccagccctgccagccaacatcaccctgaaggacctgccatctctttatccttcttttcattctgccagtgacattttcaatgttgcaaaaccaaaaaacccttctaccaatgtctcagttgttgtttttgacagtactaaggatggtaagatctttttatggatattttaaaatcatgttatcattggatgtttgaataacaaaattctgagtggaatagaaatgattcattcttaaatgtcgtgataaacttttctaaaaatgc

SEQ ID NO: 362610 - DNA, 1219 bp, Homo Sapiens
  misc_feature (104)..(160): n is a, c, g, or t
  misc_feature (1057)..(1057): n is a, c, g, or t
  misc_feature (1108)..(1108): n is a, c, g, or t
  misc_feature (1192)..(1192): n is a, c, g, or t
gcggccgcggcgcggagccgagagggcgtccgtcgccggagctgcaatgagcggcgcccggaggctgtgacctgcgcgcggcggcccgaccggggcccctgaannnnnnnnnnnnnnnnnnnnnnnnnnnnnnnnnnnnnnnnnnnnnnnnnnnnnnnnntggcggtgaaggggtgatgctgttcaagctcctgcagagacagacctatacctgcctgtcccacaggtatgggctctacgtgtgcttcttgggcgtcgttgtcaccatcgtctccgccttccagttcggagaggtggttctggaatggagccgagatcaataccatgttttgtttgattcctatagagacaatattgctggaaagtcctttcagaatcggctttgtctgcccatgccgattgacgttgtttacacctgggtgaatggcacagatcttgaactactgaaggaactacagcaggtcagagaacagatggaggaggagcagaaagcaatgagagaaatccttgggaacaaactacaactggaacctactaagaagagtgagaagcagttagacgtgtttgctaacatcactgcattaacggtgccaatgcttgtcctggacccagccctgccagccaacatcaccctgaaggacctgccatctcttcatccttctttacattctgccagtgacattatcaatgttgcaaaaccaaaaaacccttctaccaatgtctcagtcgctgatattgacagtactaaggatgttgaagatgcccactctggactgccttaacaggaaatagcagacagacagtatggaggggctacttgacaacagataaagaagtccctggattagtgctaatgcaagatttggctttcctgagtggatttccaccaacattcaaggaaacaaatcaactaaaaacaaaattgccagaaaatctttcctctaaagtcaaactgttgcagttgtattcagaggccagtgtagcgcttctaaaactgaataaccccaaggattttcaagaattgaataagccaaactaagaagaacatgaccattgnatgggaaaagactgacccataagtccctgcatattttattatggggatctngagcgcccatcagcccagtctaagccagggatgaaagacattctctggccaagtcggttttgaaggaataaccgaagaacctgnaagttactcctttgcgaatctattcca

SEQ ID NO: 362611 - DNA, 729 bp, Homo Sapiens
  misc_feature (419)..(598): n is a, c, g, or t
taaaccctcatcacttttttccaagaccctggcctgagggaattaggcatagctcaaccttctgaagctgtgggttgttgacactgagacttagtaagcagtcagtgggggctggaagggagtcagccctgagagccagccggcaggggcgagagagggagccagagggtgtcaggaggcctgtggtcttaggatggcatggggagcagggtgggttaggaggtgctgtgccctcgttcacaggcgatgggtggtacccagtgtgggatggactttcaggtgctaaggaacccactcctgtctttgaagagtttatgttccaaggtgacctcacattacacatttgtttagcatcctatggaggcctcgacttgacattggtccactctttatttaacatttgctttttaaaatttttnnnnnnnnnnnnnnnnnnnnnnnnnnnnnnnnnnnnnnnnnnnnnnnnnnnnnnnnnnnnnnnnnnnnnnnnnnnnnnnnnnnnnnnnnnnnnnnnnnnnnnnnnnnnnnnnnnnnnnnnnnnnnnnnnnnnnnnnnnnnnnnnnnnnnnnnnnnnnnnnnnnnnnnnnnnnnnnnnnnnattgcctccccattgctctgaggtaggacataaaatacattttaagaataacagcattaaaaaatggctactataattcattactactattacatttttgatacttttcaataaaaagaaagtagtgaccc

SEQ ID NO: 362612 - DNA, 598 bp, Homo Sapiens
gctaatgaagtgggtgttaacctctttgatactgccgaagtctatgctgctggaaaggctgaagtgattctggggagcatcatcaagaagaaaggctggaggaagtaacttgacaagaagctgattatccccccacacacatgcatttatgtttgctgtttattttattaactctggatgcaaaggaatgatgaaacaagaagactttgggataaataccccaaagctttcttatctgaacacatttagtcagcatctctcctgtgtgcccaggaaccctattatctggctattcagaacaatgcttcatctgctatccttgagaaacatgaggggctgtgcttacacgtccctttccaacacctcctgtagccaaagatagtggtaataagggaagctataacatctatgggcagtggggaggtaatacttccccatttcactatagatttcagccccaacagccactacttccccagcacgagtacagaattaagcaaagcccagcaaaggttactgaacaagtttggggtcctcctctgccctggcataatatctgctgattaccaaataaatgacagtgtaatgatattagtga

SEQ ID NO: 362613 - DNA, 773 bp, Homo Sapiens
cagacgcttaagcgaacacacattgattatcctacggttctatagctcgagaagcctggaactctgtggtcctgcacctccccctacaccccccaacaaaaattagcctccaatcagctcctggagacaatgttggtgggaaccacaagggttcctgggcatgcccaatctctggcactgaagaggagattcaatcaaaataaatgtatgctgtcgaggccaggctggccatatgttcctgccaggcagttgtcaggaggagatatttgttacattcaaatgtggacacaagctcctacgaaggcaaacacttgtcatttaaagggacatctgaatatggcagcatgtttccagtgataacccaatttcattttacagccttttccttccctttctcttgggctctgggcctccttaccaacacatcctgttggccagcctgctctatcacagcagtatagttgaaaacctaggcacagctttctacccataagtagctttgtaatattcctaggaggaacttcctttctcccttcctctcccacattgcctctttgtccagatgttaacgtggaagcatattgactgcctactttcaagcccttaactctctaatttcactgatttctgtaatagaaagagctattattattaagtttttatcacagagctaaagtttagtttttgcaagtgaatagaccactattctccttcctgtgttagtaactgctttttaaagctcttgtgttctattaaaataacaatataaaatt

SEQ ID NO: 362614 - DNA, 920 bp, Homo Sapiens
gaggttctggggccatgggggtccggcgccggccagggcggtacaggatgtaccacagagacccactccccagcatgccaggggtcccccgaagcagcaggcgtcatggatacgagagctgagggctcgctagctcgcagcgctccgcctgtcttcctcatcgcgagcattctggtgccggcagtcagcgtctggcgctctgccggggctctgcgccgaggcccggcagcacagcaccgcgggcctctctcctgaagccagctgcgcactgcgtgcgggggcttgtagttgcttgtcttctcccatcatcctccccttcctcggggccccaccggtggaaactgctgcatgtgtactcggatctctgccataggggattttttagctgagacttggcacccctttcccgcttacgtacctgaaaactcttggcaccccctggtttttttgtgccccagccaactgtagctcagcttccaagatgcccttacctggtgacagaagtctgggatgcacgaaagcggagcagctgggcacagtgggcatgcgcaacattagaggaaggtgggctttataccggaaaaggttttcctgcgtctggaccagaagatttttaatacgattatttacagccacttcagacgaaaaaccaagtgatataatacaaaaatgctcaggaggcgacaggactaaccacttttacactttgatctttccttctaggctgtacattattttttcagtgttagctggtgagtcaaattcattttttaaaacccgggacacatgttccacgtggcaaggcttccataaaaacatttggtgaacgaataaagtaacaaaaacttacagttcagactctcaaattgctatcatgtcttttgaaggaccggcatacattaagctaaggcttccctcag

SEQ ID NO: 362615 - DNA, 658 bp, Homo Sapiens
catttctgataccatcttcacgtggcgttgaccaaggcccataaacaatttgtgccttcttggtcagcaccaagagctcaaagcttggcaagtgagcccacgacggaagaactcaaaggcctcaggggccccggggcagtgaaggtcaccttctcctccctccactgtgttctctttgtgcccaagtgtgccaacatgggtgccaggttattccagcctgccagttcccactcctcctgcccaggttcatgctgcgccccctccaccagctcagactggcctctcttgcctctgagcacaccttaccctccacagctcttaactgctttcttccttctgggtccctgcctgatacctgatgcgtttccaaaacccagatccccaaggtttatctcaagtccaggagcacctcaaagacctcatggcaaagccaggtagaattgctcagcaccctccaccacaacctcacccagtcctttgggtgaataatatgggcacgcctggttgctcccaaagcctaaataggcacggaaggcaaggagggcggcacccatgtgtcttgggaccaggcccccttggcttccaacaactgtttagctctgtccccaagttaagtcagccccagtttcctcttcagtaaaattttgagcctgaaaat

SEQ ID NO: 362616 - DNA, 892 bp, Homo Sapiens
tgcatctgatggtgccattatgaagatgaactgttaactaaattgctttggtggaatatgtatgctagggaagagagcgtgctggcccttctcaaagtgtcccatgaaaaagttattccacacctcctccctgaccttgtcgtgcagacgcttccaggatgaactccaactcgccgagccaccgcagctcctcagctgactaaaagagttaatgatcctccaggttaaaactcctccttgagcacacaccttctctcaacaaatgacaatacttggcaaactgaactcctcccacgagtcgccctctgctaggaggaattgctggctgctccctgcttattgcattctctcagagcagctgtctcaaaggaggctgctcccatgccgatctttttgtgcccaacttacagggaaagaactcattgcctgcccagtgcctgccagcctcagacttctgactgcaaatccaacaggacaatacagagttggcaggacccttctcaggagtgaggagcgggtgcaagaactcccaggtcactgctttattcagaggacctaaggaattgggttgagcggaagcgcacagagctgcagattttctttgatgaatgaaagcttcaatccacaggtttctaatagtactctcattcattttgcttacaaaaggtacagattatcactaatcctcttcaaaaggtatttgtaatcacatttccttgtatatgcaaaaaaaattctatttaaagtgtatgtgaaattaagtttacttttttgaaacacatgtagaaaaagaacaaaggtatcatcaaactagtctatgtagtctcctttcactaaaatattgatggttcaacacttaaggaagtctagaaataaaatattcaaatgacaa

SEQ ID NO: 362617 - DNA, 508 bp, Homo Sapiens
ggacctgcaggcctaggtactggggcagtgggcgggcggcaatggagagccactggccaggcccagccccgcgtgtgccggccccaaggggacctgggggcaaatgggcctgctgcttctctttaaacacgtgaaatacgttccttattttaaaaatcagaaaacagaagtaagactgtgttgccagcagcaacacccggacagcaagtggctcttcctgctgggcgcagcccgacccacacaggtgtccagggctcacgcagagtttgccactgtgttttacacaatcgatggaatattctagagcacccgaaacaaacccatgaggcctgcaggcaccagcgtggacgaatctccgacttggtgttcatggaaatgcttgctgcaagaggctgacggccagagggcaggagggaagtgccccagtcacgggtggcggatggggccgtgggcaagggacactgcaaataccgtcaatattaacacagctctttagtgtggggtaaaa

SEQ ID NO: 362618 - DNA, 544 bp, Homo Sapiens
tttggccctcgaggccagaattcggcacgaggcttccatgtgggacacgagccttcaatgcctgataaagcctgaaagccacaatctgccctggaaacccagctccaccctgcttccactacatcaggaggtgaaggaggaaattgaaagtgtgaaacaccagtgggaggaaaaggttcctgtaacaaatgtggttatcaatgggaaagaagctttctagagcttatatacggggccgagtcatgcacacttcatcatactcaccaggggacgacccagaccatcattcttctctggtctgccaccttcatcctccacttgcagcctcctttgcagtgaccatacaggtgcagagcatgagcaggatgcacaggggtttatgtggtcaggcctgcctggagttggcacatagcatttctgcttccattcttaggtctgaaatccaggtcacagagccctaacataactacaaaggatcctgaaaagtgttgtattccagtgtgcctcggaaaagaaaataggattaataaactttgattagact

SEQ ID NO: 362619 - DNA, 985 bp, Homo Sapiens
  misc_feature (141)..(409): n is a, c, g, or t
agcatcctgaataaagtagctgaaagaaaggggcctaccttttctcaatagccttgcagaaatgaattagccttgcagaaatgattaccatgtaatcagtgatgggtgtatagtttaaatacaaaaagtaaatgtggctgnnnnnnnnnnnnnnnnnnnnnnnnnnnnnnnnnnnnnnnnnnnnnnnnnnnnnnnnnnnnnnnnnnnnnnnnnnnnnnnnnnnnnnnnnnnnnnnnnnnnnnnnnnnnnnnnnnnnnnnnnnnnnnnnnnnnnnnnnnnnnnnnnnnnnnnnnnnnnnnnnnnnnnnnnnnnnnnnnnnnnnnnnnnnnnnnnnnnnnnnnnnnnnnnnnnnnnnnnnnnnnnnnnnnnnnnnnnnnnnnnnnnnnnnnnnnnnnnnnnnnnnnnnnnngtgaatgtaatgtcagtagactcttgaaaatgtcccttaccctctggatctgttaaaaatgttattttatattcaaagttcaggttgttttttggtttcatcctctcttgcttttttaaagttgtatatgtgattatgtcattactggaagagtcttattcctttcccttaatctctcactcttgccccctgcccctgtgtaggactgaatacttcattctgttgtagagggtctttgtacacagtacattattacattatttaatttattcactccccacctgtgaccttcctttctctgatgtctccttactaattccttcactttcacttttcctttcagctgtcatccactctttcctttttacttatctgctgaattaacttgctcacactgattaaccctcttttgtttgttattagtgctgcttagagtctttcttctattttctccatccagctttccttttactctctcattctgactttgcatccccagtcatgctcctagcctttaaagagttatccttagctacaagaaaaactggtaaataaaaatataaaatgaaacaaaac

SEQ ID NO: 362620 - DNA, 518 bp, Homo Sapiens
gattgtgacccaaagagaagggaaacaaatgagtaggcactattatcctcactgaaaccgagagacccagcagataaagaacttgtctacggctatgcagccagggatgaaaacgaatcaagtgactgaaagagaagaaagtttcagatgacaggagtgacgtgcaaaggtacagacgcttgaggaagcatggaataaaatttttggtcgggcatctgctgtccagaataaagactacattttccagcctcctttgcagctggacgtggtcatgtgaccgcatttaggtggcatgtaaatggaggcactgtgtggcagcttctggaaacttccttttgaggtgccatgtaggtgaacttggattcttctctgcccacttcccactcctcattttgatgcctaggctttaatgcaagcttggaccacaaagttgaggactgccccacagggatggcatagggtaagccagactgtgacctgaatgtgagaaaaataaactctcttgtttaagccaaaaa

SEQ ID NO: 362621 - DNA, 1007 bp, Homo Sapiens
  misc_feature (52)..(88): n is a, c, g, or t
aaatgtatacgactcactatagggcgacctggagttcacgcggtggcggcgnnnnnnnnnnnnnnnnnnnnnnnnnnnnnnnnnnnnnatcaggccaaatcggccgagctcgaattcgtcgagagcgggggtggcgggttcgggcgcagctgtagggttggctgcgcgccgccgaggcgttttggactgggttataaacaacttgtgaaatgagtgatttggaagatgatgagacaccccagctttctgcccatgccttagcagctctccaggaattttatgctgagcaaaagcaacaaattgagccaggcgaggatgataaatataacattggaataatagaagagaattggcaactgagccagttttggtatagtcaggaaactgctctgcagctggcacaggaggcaattgcagctgtaggagaaggtggcagaatcgcatgtgtgagtgcccctagtgtttaccagaaactcagagagctgtgcagagaaaacttttcgatatacatctttgaatatgacaaaagatttgccatgtatggagaggagtttattttctatgattacaataatccattggacttacccgaaagaattgctgcacatagttttgacatcgtaatagcagatcctccctatctttcggaggaatgtctcagaaaaacatcggaaaccgtcaagtacctgacgcggggcaagattctgctgtgcacaggtgccatcatggaagaacaggcagcagaactccttggagtgaagatgtgcacgtttgttccaagacacacccggaacttggcaaatgagtttcgctgttatgtgaattatgattctgggctggactgtgggatctgattacagacggtgacataacacaggaaggaaccctgtcacattcctctttttgtattttcgtagtagatttaaaagttataatctcttcccctccccccaaactggagctgtccctggcctggttttcaaaataaagtgtgcgatcttcaaaaa

SEQ ID NO: 362622 - DNA, 936 bp, Homo Sapiens
  misc_feature (163)..(178): n is a, c, g, or t
caagcttattaacctgaatagctgaaatccgggtgaacaaatggcacagcagtggtatccctccctattaaacaaccatcagtatgtttactgtgtaataaatgaaacatgattagccaccatgagttcatgacctacctttattgtgctcagactagtgacnnnnnnnnnnnnnnnncagttttatccctcaagccgtagaggttcctaaactattagaaacaaccatttgttcattcgtggtcacttaatggtagaaaaaatagataatataatgctaattcagtacaaccattcttctaatctataatgagttgaattgtctgggcacaatgaagtgtgaggtttctctcttaagagccctgggcttctctccttctagggattcactgtgacgactaacatcccagagccagtgtggtccttgtaggccgaggttgggtagatggcagaaataaaaagcattctgatagagaatgaaggcattttgcttatgttattagctgaatgattccttagcgatataggtaggagtccacaaaaatctatgaaaattataaattgttattttttaaactagacattaataaactcccttaatagtgataaagagctcctcttgactaaataagtcatcctaacatggagttcaagttttcacaatcgcttttaacagaataatacaagatgacagtatagctgacttgcaattataatacaatttcaattacaatgagcatactttctagattttctttcccaaatggagagcccaaaaagaagtaacaaaagactcattcatcaagtgaagaagaaaatcctttattttttgatgagcaaaaataataaattgctgttcacactggataagaccatatcaaaagtgacagtaaacatgtacactgttggtgttatatggggatggggttctcggta

SEQ ID NO: 362623 - DNA, 728 bp, Homo Sapiens
gtatgtctcataattgcacatattcccttacttagctgtagagaaagagaagccctaaatctgttagagtaatgataaaggtgtaggttaaaagacaaaacaaacaaaacaaaagtggtttattatacagaaaacatgcaaaagctcaacgctacatccaactgtaaaggtttcaggtctaagtttaaattttcacttaaggcacattaagccacatgataattttatacatgccaaataatcagacaatcaagtgtcatgtttaattctatttgctctttgagatatttcttgaaaaagaatgagggcataattcagattttcagaggggaaatattctgactttgcctaataaagaaatgagtcttggataatttgctcatcagctttcccaagagaggaaatgggtagtaaaaggaagaaagtcttttaaaaataattttgctactactttactataaagtcttggtgacaagatttagtttctagggtcctaaatgtctttcatcaaagatactcctcagttcagacttctccattatgctagaaggatggcatggtcccatgttagtttcaatttgctgcctacagagggaggaccaaggcactctaactatttttggcactataatcctgatatgttgatgtatttgacacaattctaaaaactaagctcaaagtatataggattagtaaaatgcaactctgcccaataccacccccccgct

SEQ ID NO: 362624 - DNA, 414 bp, Homo Sapiens
aaatactttgaaaaagagaagtaaaagtttaactttttaactaaagttagtatttgtttttcagaaatgaccactgaagattcattctgattatacaatatgatttttatgcataaaatttccatgtaacttgaatttaatatttttaaacagaatattttgactaatcctctattttttcatgactattcagttgtgtgtgtttattcgtaaatgttatgttttgtaattggatcacatatttctactttcagtgagagtatgccttcactatgttaaaaaataagctcataaaacagggtactttttattcaaatgcttatcattgtactttcattgctttgaaagagtaaagtaagtatactcaaaacattacgttttacaaaatcaaataaaacttttccataaaaagtg

SEQ ID NO: 362625 - DNA, 517 bp, Homo Sapiens
  misc_feature (95)..(113): n is a, c, g, or t
gcggccgcgcagccgtagccgggcgggggcccgtgcgctcccccgggcatgacggcgccgccggggcccgcgggcgcgcccgggtagtcaaagtnnnnnnnnnnnnnnnnnnncgtggggcccacggccgccttggccttctcctgctgccggctgtgctggaacaggtcggccaggaactcgtcgttgaaggcggccgggtcgatgtaggcgctgatgtcgatggacgtctcgtgctcgcagatgccgcccagcggctccggggcggcaggtggggcgggaggctgcgcggggcccgcgccccggggaaagccgaaggcggcgctgctgggcgcgtgcggggggctctgcaggtggctgctcatcgggggccgcggctccgcctcgtagaagtcggccgactccatgggggagttagagttctcccggcatggcgagcctcggcggcctccagcctgcgacggggcgtcgccgccgcccacccggagaccctgctcgcccgcgcccgcgcacctcc

SEQ ID NO: 362626 - DNA, 401 bp, Homo Sapiens
  misc_feature (99)..(188): n is a, c, g, or t
cctgggtctagccagctggacttcctgggtcgagtggggccttggagaacttttctgtcttacaagaggattgtaaaatgcacccatcagtgctctgtnnnnnnnnnnnnnnnnnnnnnnnnnnnnnnnnnnnnnnnnnnnnnnnnnnnnnnnnnnnnnnnnnnnnnnnnnnnnnnnnnnnnnnnnnnaaaatgcaccaatcagcaggattctaaaagtagacaatcacagggaggattgaaaaaaagggcactctgatagggcaaaaacggaacatgagaggggacaaataagggaataaaatctggccaccccagccagcagcagcaacctgttcaggtcgcctgccgctgtggaagctttgtccttttgctcttcataataaaccttgcgtactgttc

SEQ ID NO: 362627 - DNA, 1527 bp, Homo Sapiens
  misc_feature (710)..(901): n is a, c, g, or t
  misc_feature (913)..(924): n is a, c, g, or t
  misc_feature (1229)..(1229): n is a, c, g, or t
tgggcccccgggggcggccgggccgggccccgggcaactgtgctgcctgcgggaggatggtgagcggtgcggccgggcggcaggcaacgccagcttcagcaagaggatccagaagagcatctcccagaagaaggtgaagatcgagctggataagagcgcaaggcatctttacatatgtgattatcataaaaacttaattcagagtgttcgaaacagaagaaagagaaaagggagtgatgatgatggaggtgattcacctgttcaagatattgataccccagaggttgatttataccaattacaagtaaatacacttaggagatacaaaagacacttcaagctaccaaccagaccaggacttaataaagcacaacttgttgagatagttggttgccactttaggtctattccagtgaatgaaaaagacaccttaacatatttcatctactcagtgaagaatgacaagaacaaatcagatctcaaggttgatagtggtgttcactaggagacgtggaattgagactaataacttggatgttaacactgtttactgttttttcacatgtagaaatgttctttgtgtattttttctacagaggattttctctgattttattttctttgtttctgactctaataattagttggaaactcatataaaatgagctttcctaaattaaatctattttaaataaaggttattactattnnnnnnnnnnnnnnnnnnnnnnnnnnnnnnnnnnnnnnnnnnnnnnnnnnnnnnnnnnnnnnnnnnnnnnnnnnnnnnnnnnnnnnnnnnnnnnnnnnnnnnnnnnnnnnnnnnnnnnnnnnnnnnnnnnnnnnnnnnnnnnnnnnnnnnnnnnnnnnnnnnnnnnnnnnnnnnnnnnnnnnnnnnnnnnnnctattctggcgnnnnnnnnnnnntttggaattccttcatttaaaaaaccttttttccaacagcggcccgcccctgaaaaaaaataaggagaagtttccataaggagaattaaccgcgcattctaccaacaacaatctctgggagaaccttctctcattacaaaataaaaaccccccgccccgggcgcgattcctgtaatttggggaggcgccctctcccgaatagacgtttgtttgcaattttccctcgccaccactctatacatacccccgagcaacagaaggggcccttttaattttatctaaaagctgtcccctccccccgcccntacagcacccctccctccgcaacaaaatagtggcttccccaaaatatgaacaaacgcccgggcgccgccgcaaaaacaagcgactatatcatatgcgcgccggagggttataaacttcttccccgcgcggtgaaaaacaaacccgcccgacgcccaaaatactcgtttgtttattaatcataaaaaacactctctctctctcctccatacaaacacgcccccgtggtggggcgaccaatcgaggcgcacgttatttgtgtcttcttccccgccacccacacaccctctactattctcg

SEQ ID NO: 362628 - DNA, 401 bp, Homo Sapiens
  misc_feature (36)..(36): n is a, c, g, or t
  misc_feature (67)..(67): n is a, c, g, or t
  misc_feature (72)..(72): n is a, c, g, or t
  misc_feature (132)..(132): n is a, c, g, or t
ggggcaggacaaacattccctacacaacctaggatncctccccacaacagattttttaacctttggnccttncctaattaaaatggtactgttacatacacctacattaaaactcccattagcacttaatancctctcggttgtgcagatagttcaaatagtttaaaactcatatatacctcaacaagttgtgctttattaagccctggtctggttggtagcttgaagtgtcttttgtatctcctaagtgtatttacttgtaattggtataaatcaacctagaaaaaattaacatgtataaatgagttcatacaatttgttgaaaatttatcattgatatgtataataacaaacattttaacttcagcacaataaaaatttacttccaaaatcaaaaaaaa

SEQ ID NO: 362629 - DNA, 624 bp, Homo Sapiens
  misc_feature (279)..(294): n is a, c, g, or t
  misc_feature (568)..(576): n is a, c, g, or t
tgcctccagttccagcgggaggaacggccctcttccccacgatcctggccacaattaggttgttgcaacggtactccccaaaattgaaaggagtgccttggaacctcctctgcaccgcacccagggcgattagttgcctgcctgcctaatcagggcaggccgccttgtgccttagggcccggccaaaccaccagggagccaatttcagccctccacgccaaggagccttgcccaccaaccaatcaatgtttgtttttgccctgatggtgcctcaggatnnnnnnnnnnnnnnnntgggaaaagaggggggccccatgtgcttttccagtttttttggaattggggggccccccccaaaaaatgagccccctgtttcctccatcaattgggttcctcttggctttggggaaaattttaaaatttgggagctcctccatctccaaagggtgggatttgtggcagggattcccctcaaaacctctttggaatttgggcctgatgggccctcccctggattttggggttcccagccccccatgtggattttgggggggcccttttgtgtttnnnnnnnnnttcaaggactcctctcttttttccccaaaaagcccaaaattttgctgg

SEQ ID NO: 362630 - DNA, 719 bp, Homo Sapiens
  misc_feature (497)..(554): n is a, c, g, or t
gagttgcctgcatccaagttaggacagacagctatgtgcgttaggcccatacccgagccgccagggagccaatatcagccatccacgccaaggagccttgcccaccagccaatcaatgttcgtctctgccctgatgctgcctcaggatcccccattccccaccctgggagatgagggggtccccatgtgcttttccagttcttctggaattgggggacccccgccaaagactgagccccctgtctcctccatcatttggtttcctcttggctttggggatacttctaaattttgggagctcctccatctccaatggctgggatttgtggcagggattccactcagaacctctctggaatttgtgcctgatgtgccttccactggattttggggttcccagcaccccatgtggattttggggggtcccttttgtgtctcccccgccattcaaggactcctctctttcttcaccaagaagcacagaattctgctgggcnnnnnnnnnnnnnnnnnnnnnnnnnnnnnnnnnnnnnnnnnnnnnnnnnnnnnnnnnnccttgtcgggccgcctcggcccttcaaaaagttttctagacctttccgtttgggcgcccggggcccaggaaggtaaagtggaccatgggccaatagcttgttttccctaaggagaacccctgggtcatggaactaagggggttttggaatttcctccccccaaat

SEQ ID NO: 362631 - DNA, 836 bp, Homo Sapiens
cctgggggaaacttgtggagggggcccccccgtttttagtgtatttgtcttttttggtgtctttaggtatttcaaatccaggcagagcacacaccagtttattttgaaatgcaacacagatcagtattttatgaatacaacttattactacattatcaggtaaaaacagctttcaaatgcatgcatagaaagttaagcgtagtctctggactccttatttctaaatatacaaaaaatacatttaaattatataattttagtgaatcaaagacttataaaattacaattttggttttcacaacatagaaaaaatacaaaaatgactatatatacggttgtacaattttttacccaaatttcaaaggagcagtatgtattgaatttaatgttttataatgttttatctgaaactcagaactgcaagtaatttgcaggttgtaccatatcaatgccaaccttttattataaatgaataaccaaaaaaataagtgaaaaatgagggcacgatctcttcttacacctcttcaactctccagcatctaaacctttcctgtcagaagtctgctctggagacttttttcatctgcaaggacagtgctttattccatgactaactctccatggtgcctctggataatggttggtacgtgttaaatgaataagcccaacctcagcaaacagaacgcagcaagatgtagattagcagtctgtgctgacaaaagcactactgcgtacctcaaagaattctctgtcagaagaaggcccccacggagggatctgaaatacataatcaagtgggtagttgggaggatgatgcctttgactatgccctgacc

SEQ ID NO: 362632 - DNA, 722 bp, Homo Sapiens
  misc_feature (665)..(665): n is a, c, g, or t
tataacgagggataaatttttggtggtgatagtgtcccagtacaaaaaggctgtaagatagtcaaccacagtagtcacctatgtctgtgcctcccttctttattggggacatgtgggctggaacagcagatttcagctacatatatgaacaaatcctttattattattataattatttttttgcgtgaagtgttacatattctttcacttgtatgtacagagaggtttttctgaatatttattttaagggttaaatcacttttgcttgtgtttattactgcttgaggttgagccttttgagtatttaaaaaatatataccaacagaactactctcccaaggaaaatattgccaccatttgtagaccacgtaaccttcaagtatgtgctacttttttgtccctgtatctaactcaaatcaggaactgtattttttttaatgatttgcttttgaaacttgaagtcttgaaaacagtgtgatgcaattactgctgttctagcccccaaagagttttctgtgcaaaatcttgagaatcaatcaataaagaaagatggaaggaagggagaaattggaatgttttaactgcagccctcagaactttagtaacagcacaacaaattaaaaacaaaaacaactcatgccacagtatgtcgtcttcatgtgtcntgcaatgaactgttcagtagccaatcctctttcttaagtatatgaaaggacagggat

SEQ ID NO: 362633 - DNA, 515 bp, Homo Sapiens
  misc_feature (141)..(244): n is a, c, g, or t
  misc_feature (249)..(267): n is a, c, g, or t
agtttccagctagtgtgttgagctcaaaatgtttctgtttgttagttgtcctagcatattggtgcttcttcacctcatcctttgagaattgctggggcttcctatttagaatggagctggctgggcacagcccattacatnnnnnnnnnnnnnnnnnnnnnnnnnnnnnnnnnnnnnnnnnnnnnnnnnnnnnnnnnnnnnnnnnnnnnnnnnnnnnnnnnnnnnnnnnnnnnnnnnnnnnnnntcccnnnnnnnnnnnnnnnnnnngaatggagctgcctctggaacttcctctctaaccccagcattttcccttcctattcccaagtttagggactttaccgtcagccttccctgtcctcactttccagtcagctgaaagtttcaagggaacaaaatatttctttcaaaagataggaacctgttttaaaggtattaattgtgcttcaaaatcatgccaccttattaaaatatttgtcacttaaaaataaacttacacttccaaaatgaaaaaa

SEQ ID NO: 362634 - DNA, 473 bp, Homo Sapiens
ttgaattggccctgacttggactaaatgcactaatgcaaaatcccttgacaaaagcgcataggttatttcaaaccagcattgttttttatgtaacctgttttaccgcatcttctcagcagcttctgaccactgctcaattttctcctttacagccattgttctggtggacaaataacctaggtactccaaatcctggcaggaaaaatatacagcattatgaaacagcactcagtaatcctaaaatgatttccaaagctggttacacatgacctgcaaagtctattaaattaaaagactttctcattacagagtttagtcaacgtagcaaaaccatgggaaattaaatggaaagataattaaatatgtaaattcataaggaacaaaagacgagaagttaattatacaataggctggtgacaccagagttcattgttatgtgccacaagaaaattaaattttttaaaaaactaaa

SEQ ID NO: 362635 - DNA, 855 bp, Homo Sapiens
  misc_feature (42)..(88): n is a, c, g, or t
gcaaatctgccagcctaggcaacatagcaaggtcccatctcnnnnnnnnnnnnnnnnnnnnnnnnnnnnnnnnnnnnnnnnnnnnnnncagaactgccagtacaatgtttgttgcaattgtttccaaaactttgaaataacgaaacccctattcaaatgtaaattttacccattcccacctgatagtactgtttattactttgctatgcaggagaaacaaaacagctttttatttgtgtgtatactctgaagtcaatgtgcatgggttaaatcccacctctgcttcattttatttgtgtggctttggacaagttcctaagccctctgtgtcaggcccctcattaacaaaatggagtttatgatggcatctacctcacatggttattgtgtggttgaaattagttcaaatctgtaaagtatgttgatgagtatctggtacttggcaaacactatataattgttagctttattattatgtgttgtttgaaggggaaaaaagtttttgtagattggagaacaccatgtaagagctactaagctcaccaccttcccatccaattattactcctctaaatgaatactacttaaaagtgatggagcttctgtttgtttattgaattgctaatacaaataaatatttgactataacttcttatactcattttaattttaacctgaaatgtcattaaattatgctgataaactttgaataaattgtgatacaaaagctatttttctcatttaaatatattttagaattttatattggataacttttaattattctttagttgggatttccaatttatatgcaaaattttaaatgtgaagtaaagcagtttcagaagaaaaatg

SEQ ID NO: 362636 - DNA, 692 bp, Homo Sapiens
gaggaatcatctacgactcactgctgagtgagagggctaggcagtgtctttaaggtcctgccagctttaacattgtatgctttttcttttgttcaatctctcaccacaactggaagtgttgcctcaactacacaggagaaagtttgcagtaacttagagaaaacattattttaatcaccagtgtatgttctcctgctccctggacaaatccatcagcagcggcaacactgaccaggtccagattggggccgctgcggtggatgtgaatccattgaaactaggggtctccagtgctcctgactcctcacagctctgttcctatgacaaggatggtcagcaaagccagcaaccttgaagggggaccttcttctaatctcctccctgcctgctgagagagtgtacagaagcagccacttgtcagctgcgatgaatccaatgataattacataaatcattaacaatacttgatatttgcccatcacatttctcatttcaaagtgctcataaaattgtatctcatgggtggcactgccggcacaacagaattccaaggaaggattacgggctaagtaaataaagcctggaggctgctttaaagcctaggagtctgttattaaccctttcctcctttttgtttaactttttctcatggaaatgttcaaacataccaaaaatagagaaaatacaaaaaa

SEQ ID NO: 362637 - DNA, 526 bp, Homo Sapiens
ctattgaatgggaaaggtttaaatgctaaccaaagcaatttatttttaattaatatttttagactctgtgctgtcatactgaactcactgctagctaagagacctatcagagatttagatatattttctccaggttttttgtgggttttctttgttgttgttgttgttctagccatgtgacagaggctctttctaaaagtatgtagttcgctgtgtgtcggctccagcagtaaccgtcctcactgcgccacgcactcctctgtagatgtgtgcccagtgggagttccttccagccccaggaccgcagcagcagccaggtgccgagtggattgagtgccaggtgcatccaagactttccctcccttccagaaggcactgactgaagacaggatggatcatgcggagccggctgaaatgctccaactttttcaaagtgtgggtggtccagtttggactgatgggaatcttcttgtcattctttttaaacggatgataccgatggaaataaaaggtgggaaatataaaa

SEQ ID NO: 362638 - DNA, 355 bp, Homo Sapiens
cctaagattttaggatgaatgtgaaaaagatgttagaataacaggaagacaactccagggctgagttttatcagcaattgggtataaatttaaagaccgctgttgcaggatggctctgaattctgttgtgtcgtcttttaaaattttaattattctcatatagtaccgaacagaaaactcagtctagttttaatttgccttttgtgctctaaagaagcattgtacatacaacactagatccagcccctcgattatctgtttggtttcaagtgaatgaaaagatttcctggtaagatcattggatttacagaatacaaaaatgtacgggatggaataaacctagaaagtgaatgct

SEQ ID NO: 362639 - DNA, 409 bp, Homo Sapiens
atagatgtgtttgtttaattaacgaagcacaagtctgttaagcagaaggctccaagctgtattctatacttgggaatccttggtgccatctttattctaccaagtgccaatcaccatggctaaagtgggcgtatattacagcctgtgtcctaagcttagaagctttaatgtacttttttaaatgaaaagtattagagggggttgaacattgtaactaaagcataaagttagaccaattacatgcagagatgtttatttaatattgtgtgagctgagtccttctgtataaattatttgcacacttttcttgcatgatgaactgattttttatagttgtttgtaccagacggtggcatatttttgtaaaaaacttttgacactgaattgcaataaatgtttttccaacaac

SEQ ID NO: 362640 - DNA, 341 bp, Homo Sapiens
  misc_feature (135)..(143): n is a, c, g, or t
ggggctttctggtttgaaaacaaaaatgcatctatgtggttgaaagtttgggaggagattcaccaatatctgaggagaagatggagtgaagggaattcttactttttgctttatacctttctataatatttagannnnnnnnnactgtaagtatggatcaaattgcaaaataaagaaaaatgccaaccttagaaaagacaataaatgcacaaaagatataaacaggaacagcaaatatttatattttttccattttgctctttttaaatctatgtttagaactttatatcttgggacttatgtatatatataccttttaaataaaataaattttctaaata

SEQ ID NO: 362641 - DNA, 564 bp, Homo Sapiens
  misc_feature (453)..(473): n is a, c, g, or t
aatgttgcacatcattcattcactgtatagtaatcatggactaaagccattggtctgtgttttcttcttgtggttgtatatatcaggtaaaatattttccaaagagccatgtgtcatgtaatactgaaccactttgatattgagacattaatttgtacccttgttattatctactagtaataatgtaatactgtagaaatattgctctaattcttttcaaaattgttgcatcccccttagaatgtttctatttccataaggatttaggtatgctattatcccttcttataccctaagatgaagctgtttttgtgctctttgttcatcattggccctcattccaagcactttacgctgtctgtaatgggatctatttttgcactggaatatctgagaattgcaaaactagacaaaagtttcacaacagatttctaagttaaatcattttcattnnnnnnnnnnnnnnnnnnnnnttttgtatgtcaataactttatatgaagtattaaaatgcatatttctatgttgtaatataatgagtcacaaaataaagctgtgacagttca

SEQ ID NO: 362642 - DNA, 2453 bp, Homo Sapiens
cttccccgcttgacgggtgcagcggacttgctccagcctgggtgaggaggccccgctgaagaactcgcctcctgggacccagcttcagccatcgggccaggctgcaggaagaagacaaaggcagcgtgaggaaaccttggctttgaccccttctcgtgttgtcatctttggcttcgctcaccacccgggcttaccagatggaactcttctgtaaagcagcttggcccctccagccagtcccattcgggaaagatgaaaccggaggccgggctcacggtggtggtggagttcttggatgactcagccctgggacctgcacagggacctgtgacttgtgttcatcgggggccggtgtcacttccagttttgatccaggctctttcactgtaaaattatttattggattcctttggagtaatgggaacattctaatgttttatgtaggaaaatgccttgccattctagttgaatatgttcaaggaaattatttttgttgttgttctgtgttctcgagtttcaggagttaaatcattcttccacccagatacaacattttctcttttaggacgtgaatattctctctaggcagttatttttgtttgtatttcgacagtatcaagcataggccctgaacgtgacctgttagccatatcctgacgtgtaaaattatctaaaaactcagacactcttccattctaatctaactgcacgatttctaacagtgggcaccatgtgcctgccctcaggttattttccagtggtagtcgaatgtgctcatataccctatggagagcactgttttagcagaaatctaatttctcttcctggaggaatttgttctcatttcttttgccacttaaaattaactgtgggctactcagccagggtacagtgggagcctcaggaaggtcagaggcaacctcctcccctgttctatcaatagaaacccaacgttgaggcaattcctaaacagacgcacctcgtagcttgctgtatgtgtttattctttattgctttcagctttggggctgtaacaggtacaaatatttggtttccctatgatttatagagaagaagaagaaacccagctttctatcagaacactgcaagagaagagtcttacacctgccctcagtggggagatgagaatggtcattatggacttagagaatgctacacgtgtatgttgctggtgtgtcctgaatccacaggcataaagcactccccatttttcctactgtaatgcagattctccggctcaaggtctagaatatttgatcctaagatcaagacatcatgcccttcgaatagtactgctctttgttttcaggagtcacgtgaacacacaactctcctatattcctcacgaacctcaggattgagcaaggtctttgtaatttttttggttcactttattgacctgggagcaaggtgctaattctgtggtcagtattcaatgtttttttcagtggagctttttctttgggccatatttgccttctaatacattcctgcaatatgtagtggtgatttcccttagcttcctcctactacctcttatactcatctccccaaattatttgcctcccctaaataagttttcctagaaggtaagctggtcaggcaatttgaaaaatattagatcccaagaaatctattccgtttgcattggacttctcggattccatgtgtttgcagcaggactacatcgaactctgatgtgccggattgtggcatgtctgcatgtctcatccatctattgtttttggtaactcagtttggaatttcagtgtctgtcttccctgggttgacattggaatcagcctctcctttgagcttattttaactcttgagcaacataacatagatttaatgtgaacagtttataccaaagggcagcctgtgcctgtttatggatcctctctgcctttgtacttgaagagcgcattttacatttccagtcctttcacagacaggagctccaaccttacgatggagaattaaacttgcttgtatttccactttgtggatgaggaactatgagaggtggagtgacttcctgggtccccgctgagacttagtgacagatcccagacaagaacttcatctctgactccaggtctagtcctcttccccctgtctcctgccaactccagccctgacaccgtgggcgtctcccctgagagcagatatatttcaattgtccaggccaaaagaaggacgaagcggcataaacacccaaattaggtggaggatccaaaagtcattttcatttgggctgtggaatatgttttttggaattcaaacagctaagggtggggttcactgttttttggaaattcacagcgcttgagcctccataatgaagccgggctgcagagcacctggcacgtgctccaggctcccagctcccaacctaggacctttcctgccctcctctctggttggtttat

SEQ ID NO: 362643 - DNA, 484 bp, Homo Sapiens
  misc_feature (395)..(435): n is a, c, g, or t
cctccgtgggaactgcaggtctgggtcctctgtgtgccccggggccaggccaaaaccaggctggaacccgccggcagggcccccgaggcgcctctgcctgctctctccgttcttgccggcggcagcgattcggactcccgctttcgacaaagtctcagctccgcagcagcacccggcgcggactcgctgggcgcgcggactgagctccgggtggaaccaggaccctcgcgccctcgccctcgccctcgccctcgcccgagctggaccaccgcgagcaccgccgacgccagccgcagaaccgcgggtgcgcggggaagaggaaacgaaagcgcgggctccggagctgaggtgagaagtgagcagaaagtgaaaagagaatccatcggaaacagatnnnnnnnnnnnnnnnnnnnnnnnnnnnnnnnnnnnnnnnnnttccaacaaaaaggataaagtaacgctaaatgaaataaaaaggagccat

SEQ ID NO: 362644 - DNA, 893 bp, Homo Sapiens
  misc_feature (98)..(109): n is a, c, g, or t
  misc_feature (649)..(809): n is a, c, g, or t
  misc_feature (853)..(853): n is a, c, g, or t
  misc_feature (877)..(877): n is a, c, g, or t
tccggaattctcggcataaaagcaactcaacactcatggtcaagtgtgattagactttcctgaaatctctgccattttagatactgtgaaacaaactnnnnnnnnnnnngcttttgttttgtatttgtttactatgagtcgttatttaatttctcttgaaaataatttcctcaaagcccaagtcaataaatgttatcagccagtcttccaaaatggtcataaactttataaactgctttgggtaaactgagcagaaggtgatacacagaagggaaaatgtgcactcatgctagtgtgaatttggtaagttgcgtgactctgcaggctgtttctgtattattttcacactcatattgcttaaatattacatattagggattgtaagaaaactttaattaaaaattaaagactatatataattaaactactctgccctggacactctctgagaaacagatctactgggccctttttcatgagccattaggtggaagacagcaaagagatcttctcaagtgcttaggattacctctcaacacacagcaagcatgtccctgcctcccatgaatcttaccatgtaaatccaaatctcagcaatcctgtggcaccaaccagtggtgctcattctattgtttaaaaatggccttcnnnnnnnnnnnnnnnnnnnnnnnnnnnnnnnnnnnnnnnnnnnnnnnnnnnnnnnnnnnnnnnnnnnnnnnnnnnnnnnnnnnnnnnnnnnnnnnnnnnnnnnnnnnnnnnnnnnnnnnnnnnnnnnnnnnnnnnnnnnnnnnnnnnnnnnnnnnnnnnnngcacctggtaagttccagcctactttggggaaggctgaaagcanaaaaaaatcaactttgaaatcctngggaaaggggggaagg

SEQ ID NO: 362645 - DNA, 799 bp, Homo Sapiens
gcagccgggcacaggctctcggtggacgtcagcacctgcccgctgggcttcagcagggacacggtgaccaggccgctgaccgtcaccgcgatccagccctccatgggcttgccgccgaacagcgtgagcgacggtgagaacttgactcgggagaacttctccccgaagctggaggcgcccgacttctccacgtgcagggccagtttcacaccattgtgcagccaggacagggccacaatggggtccccctccactaggctgcccactgagctctcccagctattagccaggtggtccgccatgctccagcacttgatctgcccgtcggcatctgctgacaggagccgggagcctgactggtcccactccaggcaggtgatggcctcgtggtgctctgaggggatcgagtgcaggtcccaggggtgctccgtgtccaggatgtggatcatgcgggtcaggtcctggtcatcgctgcgcaggtccatggtgaaggcgatgagatttcggcaggaccaggcgcaggccaggggcaccgatgggcagtgggtgctcttggaccatttctcccactcacagacgtaggccaagtccatcatcccacctgccgctggccgccgcaaatcacacatgagggcagtcaccagctcctggtcggcccgtgcgccaagctcagcgggcgtccgcggtgcgatcttccctagcgcctcgggtctggcgccgccatcttcctcggtaacaaccagtcgcctgaggcgtggggccgcccctcgtgccgaattcgccacccaggcctcgctcc

SEQ ID NO: 362646 - DNA, 540 bp, Homo Sapiens
  misc_feature (293)..(338): n is a, c, g, or t
tttttgttaataaatctacatctaggtattttattcgttatgtataaggtaaagtatatttaatggcacagtagaataaacaggctatgattacaagtccaaagatctacaaatataatgatgatatcaaatatatgcacacacaaacacaatccaacaaaattcttgactctctttcttttttcaccgctaaaggtagcaaacattcctctgtacctagctctgaaaacacatctacagaagcaaatgaactcatctgcaaaataaaaagcacatatctttaatttctaatnnnnnnnnnnnnnnnnnnnnnnnnnnnnnnnnnnnnnnnnnnnnnngcttaaagaaagtaagtcacacaagaataagcttttgcatgtctgctaaggtaaattattatattataagtttgttatgaagttataaataaaacacatattgtgcttatgtgaataaaaccacagcataatcggagtgcatttgaaatgcacagagtattctcattgtttcaataagacaaaagaagaacattacctatta

SEQ ID NO: 362647 - DNA, 836 bp, Homo Sapiens
accatcttaatccaaatttatcatattgatggtaggactaacaggctttttagaagctggctttaactttgagtctcaagctacaatgctgttgggcagcctggtcttcccacgtgagggtttaactttgtttatttgcctccagttattccaaaatgcttattaaatgaaaggcccaggaacatgtttattttagtcacctttgctttttaacaattttgttttgtaatcaatgagtaattcatgatgaattatttttgactaatggatagccgaaggccaagcttttaattctaataggtaatgttcttcttttgtcttattgaaacaatgagaatactctgtgcatttcaaatgcactccgattatgctgtggttttattcacataagcacaatatgtgttttatttataacttcataacaaacttataatataataatttaccttagcagacatgcaaaagcttattcttgtgtgacttactttctttaagctaataatataaaaataaatatgtatcttaaaaatctataataaaacattagaaattaaagatatgtgctttttattttgcagatgagttcatttgcttctgtagatgtgttttcagagctaggtacagaggaatgtttgctacctttagcggtgaaaaaagaaagagagtcaagaattttgttggattgtgtttgtgtgtgcatatatttgatatcatcattatatttgtaatctttggacttgtaatcatagcctgtttattctactgtgccattaaatatactttaccttatacataacgaataaaatacctagatgtagatttatttacaaaaaaaa

SEQ ID NO: 362648 - DNA, 556 bp, Homo Sapiens
ttccagaaccagtcctgtcctttgacaagaaggatttaattatcagtagtggtggggactggctggagagaggaaaaacacttcaaggactctgccacctttcgtagatggagagtgcaaagtttgtaccatggaactccttctctaacagttactctgtggcagtgcctatttcaaacctcccttaacttctgattgtatagatgtttgtttcatttgttcatctgtttgttcacttagtcagagatgttttaagccttaagagaaatagtggactagaaaatgccttggaaaagtacaaagttcaatccaagtaaactgtttttaaactaggaatttatgaagcctaaaatataaaatgtatatacatggatatgctctgaagtgaggtagaggggtagaaatcaacattgtgatattgtactatagttttgcaagatgttaccattgggggaaaatgtttgaagggtatacgggatatctctgccttatttcttacaactgcatgtgaatctacagttatctcaaaataaaaatttaattaacaattgattac

SEQ ID NO: 362649 - DNA, 609 bp, Homo Sapiens
gatgtttttcatttttttcatgttatctatccaagcactgttccatggtcagcaagtcatatttcataatgtggattttccaaaataattattgaatacagctattctatggctacttttagtgtttttgtggtatgtggtgtgggagtgtttatggaattaccagtatcttaaattttcaaaggaaccttggaagtctatcactctaaatgaaagtctgtcactctacatgaattatgtgctcaaatttgaccaactcagtttaagacacaaaacagtaatttgaagaaggaaaaatgaagagagtttctagtttaatgggttaaatttttgttgttgcaatagtaagtttagtcttcttataatatttctaaatgaaaaatcataggtatttgttaccatgtgtgaagattactttgttaaaagcaaaagtggtcgtgtgatatgctaaatgttaattactgattttatatgtttaaatcacgccaaacaaattatgtctgtgccatccagggtctgttgttaatctttttctgagtacttggattgggataaagggcttgtactatgcactttttattaatgaataaatagaaaacgttagtaaaa

SEQ ID NO: 362650 - DNA, 952 bp, Homo Sapiens
gcgatgaccgtcgaaaaccccggcgtgcacgtctccccaggtcctgggagtggctaccgcaggtagtttctggagagcacgttttcttcattgataagtggaggagaaatgcagcacagctttcaagatactattttaaaaacaccatgaatcagatagggaaagaaagttgattggaatggcaagtttaaacctttgttgtccatctgccaaatgaactagtgattgtcagactggtatggaggtgactgctttgtaaggttttgtcgtttctaatacagacagagatgtgctgattttgttttagctgtaacaggtaatggtttttggatagatgattgactggtgagaatttggtcaaggtgacagcctcctgtctgatgacaggacagactggtggtgaggagtctaagtgggctcagtttgatgtcagtgtctgggctcatgacttgtaaatggaagctgatgtgaacaggtaattaatattatgacccacttctatttactttgggaaatatcttggatcttaattatcatctgcaagtttcaagaagtattctgccaaaagtatttacaagtatggactcatgagctattgttggttgctaaatgtgaatcacgcgggagtgagtgtgcccttcacactgtgacattgtgacattgtgacaagctccatgtcctttaaaatcagtcactctgcacacaagagaaatcaacttcgtggttggatggggccggaacacaaccagtctttttgtatttattgttactgagacaaaacagtactcactgagtgtttttcagtttcctactggtggttttgatattgtttgtttaagatgtatatttagaatgacatcatctaagaagctgattttgctaaactcctgttccctacaatgggaaatgtcacaagaatgtgcaaaaataaaaatctgaggaaaaaacccaa

SEQ ID NO: 362651 - DNA, 372 bp, Homo Sapiens
ccacttaaaagaaagtttttattaacaaaagttttccttaattcacatttcaactttattaaatagtccaagggtttcatttatgaacacttattccagtttagttctcttaaattcatttgcttgttgtgcatttatgtttaaaaaggtaactaactgcactggaaaatgaaaatttatagttttatcaataggtcagtttttaaaaaatcaaaggataaggatttaaaaatattagggcattacacctttttcagaacaaggataatttacagaaattatacaaagcagattttcatcaaatatcaattatttagcgatgttttatttagctgaaatgttatttcacttgtaaaaactatctccggttac

SEQ ID NO: 362652 - DNA, 654 bp, Homo Sapiens
attccctcaggaatagcgcgaagatataggccagccccgaggtacaccgggggtactggggctgtacaagttaggtcgcacggatccattgacggcgaggacagggagccaaatgaacggcgtgggccggctccggtgtcggcgggtggctcggcgcccccggagggggccatatctaacggggtttacgtactgccgagcgcggccaacggagacgtgaagcccgtggtgtccagcacgcctttggtggacttcttgatgcagctggaagattacacgcctacgatcccagatgcagtgactggttactacctgaaccgtgctggctttgaggcctcagacccacgcataattcggctcatctccttagctgcccagaaattcatctcagatattgccaatgatgccctacagcactgcaaaatgaagggcacggcctccggcagctcccggagcaagagcaaggaccgcaagtacactctaaccatggaggacttgacccctgccctcagcgagtatggcatcaatgtgaagaagccgcactacttcacctgagccacccaacctaaatgtacttatctgtccccatgtccccacaccagcctgttttcataataaactttattgtgacaggcaacaaacacaagaaacaaa

SEQ ID NO: 362653 - DNA, 490 bp, Homo Sapiens
cgggcgctgccctacccatgcccgcgccctcctggacaccagccccgtctttctgctgtctgaaagcccccacgcctgcctcttaggccactctaccagtcatgattctcctcatgtaaagaagtatgtaatgatttcttctgtgtgtctctagttctgaatttatgaacaataatgccttagccataaagactctatttttaaaaattgcttttagtgcttcgaaggcttagaaaatctacaggcagacttttaattaaccaaagtaatatctatcaatttttaaaatggagaaccatcactccaattgtaccaccctggcacaagcatcattaatgtttatttataaatctgtttagtgttttattgctgtgtgtactatgtattttaacatagatattaactatattgctgatgcaatttggtgttctgtttctctcatttaacatatattttgcatactcatgaataaaattttaagactgcttaa

SEQ ID NO: 362654 - DNA, 356 bp, Homo Sapiens
gggagcggccgctgcatccagatgtggtttgattcagcccagggcaaccccaacgaggaagtggcgaggttctatgctgcagccatgcatgtgaatgctggtgagatgcttcatgggactgggggtctcctgctcagtctggccctgatgctgcaactctggctccttggctgagttcagtcctcccagactacctgccctcagcttggataaccaggctgggctcagctcagctcccacaaatgacagccccttaagcatgcttctattagtcacctaaccctctgtcacccagtctgttgctgctccatggtggggccaagagtcacttctaataaacagactgttttctaata

SEQ ID NO: 362655 - DNA, 211 bp, Homo Sapiens
aagagtttgagatctgaatgtgatttctaattgtatcagacgttaatgttttaaagctataacaaagtttaaaatttctactttttgtttttcatttattttaactgttcttttatctattaaattgttgtatgtggatggggaagttttgtttctcctcttagcatttgtttctataaccagaaataaaattctatattaaagaaatgac

SEQ ID NO: 362656 - DNA, 559 bp, Homo Sapiens
  misc_feature (37)..(37): n is a, c, g, or t
  misc_feature (81)..(81): n is a, c, g, or t
gtgtattggcttgctggagtatgatgccaaaatgagncctcttttacctcagctctggtattgctcataacttacccaggnggctaatactaacctgggaaaattgtttaagtatgttttatccaagcagtctgggttttgttttttaatatacctttttaatggatatgtgaaaactgaaggaaatgttaaaaggttttttaatggtgcaagtgaaggtgccagttgctatttgatatcacactctacaaaagcttcattactttatttgatggtggttgctaagcagccattgcacagagcataagtctactgggtgcctttacatgccagaggctgatgctgcactgttgatgtcatgtgaggaaataatgcacatgctctaactgctcaacaggaaatgaacctagaaacagaaaatgaaaaggttgattgaaataaaacttgatcaacgcgactgtattttgaaacattccaggaaggttacttcttgtcaaacttgcctggcagtgtttgttcaaaacttgtatttaataaatgaacatctgacttacaaaaa

SEQ ID NO: 362657 - DNA, 440 bp, Homo Sapiens
  misc_feature (385)..(385): n is a, c, g, or t
  misc_feature (416)..(416): n is a, c, g, or t
aagtcaagatgttcatttattaaatacaagttttgaacaaacactgccaggcaagtttgacaagaagtaaccttcctggaatgtttcaaaatacagtcgcgttgatcaagttttatttcaatcaaccttttcattttctgtttctaggttcatttcctgttgagcagttagagcatgtgcattatttcctcacatggacatcaacagtgcagcatcagcctctggcatggtaaagggcacccagtaggacttatggctctgtggcaatgggctgcttaggcaaccaccatcaaataaaggtaatgaaggcttttgtaggaggtgtgatatcaaataggcaactgggcacccttcacttggcacccattaaaaaaaccttttaacnattttcccttcaggtttttcacatatccccntttaaaaaggggtttttttaaaaa

SEQ ID NO: 362658 - DNA, 629 bp, Homo Sapiens
ggggagtgacgtcgtgggctgcagcgcagcagcacccaacgcatctagcaggaaaggagagggagctttccccgaagaccctcctggaccagccccaggctcctgtgctggttgcacgccagggcctgtactgaccacctccacgtgccactggggctgtaaggaggaatggcggccgtgggcagcctgcttggccggctgaggcagagcaccgtgaaggccaccggacctgcactccgccgcctgcacacatcctcctggcgagctgacagcagcagggcctcactcactcgtgtgcaccgccaggcttatgcacgactctaccccgtgctgctggtgaagcaggatggctccaccatccacatccgctacagggagccacggcgcatgctggcgatgcccatagatctggacaccctgtctcctgaggagcgccgggccaggctgcggaagcgtgaggctcagctccagtcgaggaaggagtacgagcaggagctcagtgatgacttgcatgtggagcgctaccgacagttctggaccaggaccaagaagtgaccgtggctccagccaccccgggacattgctaagatgggagggctgttcttaaatcactcgttcttgaagctgcc

SEQ ID NO: 362659 - DNA, 1095 bp, Homo Sapiens
gtgggctgcagcgcagcagcacccaacgcatctagcaggaaaggagagggagctttccccgaagaccctcctggaccagccccaggctcctgtgctggtgaggccgagggagagggatgtgggcataggacacgtagcaggatttccattttagaggcagccggacctgtcttcaggtcccttccttggtgagagacaggggtacgccagaggaagctgggcgctcggcctctgtgcagcctcatctcctggaatctgagtattgaaaactgggcttttacttcgcacacctcagcacagactcccatgggaatccaggtcacagcaaagcagccctgggcctccattctcctttaagcaagcatgacaatcctcacttcactgagtttttattaaaactagcaatgaccttagaaagcaaggcatgacctcagctccacttttgaggctgcagtccattcagagaggtttcgcagactcggtaacggccagaacagacagcctgggccctgccgcaggctgactcagaatctttgggagtagtgaccaacttctgcttttggaaaaacctctacaggcggttctgagaagtccaagggttgctgggagaggttgcaggttgcacgccagggcctgtactgaccacctccacgtgccactggggctgtaaggaggaatggcggccgtgggcagcctgcttggccggctgaggcagagcaccgtgaaggccaccggacctgcactccgccgcctgcacacatcctcctggcgagctgacagcagcagggcctcactcactcgtgtgcaccgccaggcttatgcacgaatctaaccccgtgctgactggtgaaagcaggatggcttccacaatccaaatccgctaacagggagccacggcgcatgctggcgatgcccatagatctggacaccctgtctcctgaggagcgccgggccaggctgcggaagcgtgaggctcagctccagtcgaggaaggagtacgagcaggagctcggtgatgacttgcatgtggagcgctaccgacagttctggaccaggaccaagaagtgaccgttagactccaggcgaccccgggac

SEQ ID NO: 362660 - DNA, 1172 bp, Homo Sapiens
  misc_feature (742)..(750): n is a, c, g, or t
  misc_feature (893)..(1051): n is a, c, g, or t
gggagtgacgtcgtgggctgcagcgcagcagcacccaacgcagttgcacgccagggcctgtactgaccacctccacgtgccactggggctgtaaggaggaatggcggccgtgggcagcctgcttggccggctgaggcagagcaccgtgaaggccaccggacctgcactccgccgcctgcacacatcctcctggcgagctgacagcagcagggcctcactcactcgtgtgcaccgccaggcttatgcacgactctaccccgtgctgctggtgaagcaggatggctccaccatccacatccgctacagggagccacggcgcatgctggcgatgcccatagatctggacaccctgtctcctgaggagcgccgggccaggctgcggaagcgtgaggctcagctccagtcgaggaaggagtacgagcaggagctcagtgatgacttgcatgtggagcgctaccgacagttctggaccaggaccaagaagtgaccgtggctccagccaccccgggacattgctaagatgggagggctgttcttaaatcactcgttcttgaagctgcaaaatcctttacagcacttccccctaatcgggcggccgctcctagaggatccctccgaggggcccccagctttacccggaccccacctttcttgtaccaaaccggtcccatcactggagcccaatttcctccctcccgctcccgtccctctcttccccaccctttccctttgcctaaacctnnnnnnnnntgggaactcctttttccccgaaacttccctcccttcctcccctgctaccattctgcacctatccttaattccctccctcccttctctgtctttatgcgcccgccttggtacctttcctccctcgccctcttccatcctttaannnnnnnnnnnnnnnnnnnnnnnnnnnnnnnnnnnnnnnnnnnnnnnnnnnnnnnnnnnnnnnnnnnnnnnnnnnnnnnnnnnnnnnnnnnnnnnnnnnnnnnnnnnnnnnnnnnnnnnnnnnnnnnnnnnnnnnnnnnnnnnnnnnnnnnnnnnnnnntatacccctctctcagacattccttttacccctcgccttcctccattcccctctcgttagccaccgccgcccctccgactatatcccctccccgacctgaccactatttccccccccttct

SEQ ID NO: 362661 - DNA, 774 bp, Homo Sapiens
  misc_feature (666)..(666): n is a, c, g, or t
gggagtgacgtcgtgggctgcagcgcagcagcacccaacgcagtgagtaccttgatctcctgcgtggcctcgtccctggtcttagttccaccgggcagcgggagtcaggaccgcctgtcctcagacccctccgcagcgactgtggcgtccgcagtctagcaggaaaggagagggagctttccccgaagaccctcctggaccagccccaggctcctgtgctggttgcacgccagggcctgtactgaccacctccacgtgccactggggctgtaaggaggaatggcggccgtgggcagcctgcttggccggctgaggcagagcaccgtgaaggccaccggacctgcactccgccgcctgcacacatcctcctggcgagctgacagcagcagggcctcactcactcgtgtgcaccgccaggcttatgcacgactctaccccgtgctgctggtgaagcaggatggctccaccatccacatccgctacagggagccacggcgcatgctggcgatgcccatagatctggacaccctgtctcctgaggagcgccgggccaggctgcggaagcgtgaggctcagctccagtcgaggaaggagtacgagcaggagctcagtgatgacttgcatgtggagcgctaccgacagcttctggaccaggacccagaagtnaccgtggctcccgcccacccccgggacattggctaagaatgggaagggctgttcctttaaatccactccgtttcttgaaagcaaaacatataactaccgcaccgatca

SEQ ID NO: 362662 - DNA, 468 bp, Homo Sapiens
atacctgggccgcaccttggcgcacttctagcaggaaaggagagggagcttccccgaagaccctcctggaccagccccaggctcctgtgctggcggttctgagaagtccaagggttgctgggagaggttgcaggttgcacgccagggcctgtactgaccacctccacgtgccactggggctgtaaggaggaatggcggccgtgggcagcctgcttggccggctgaggcagagcaccgtgaaggccaccggacctgcactccgccgcctgcacacatcctcctggcgagctgacagcagcagggcctcactcactcgtgtgcaccgccaggcttatgcacgactctaccccgtgctgctggtgaagcaggatggctccaccatccacatccgctacagggagccacggcgcatgctggcgatgcccatagatctggacaccctgtctccagaagtgcgcctgggtgcgg

SEQ ID NO: 362663 - DNA, 453 bp, Homo Sapiens
  misc_feature (264)..(264): n is a, c, g, or t
  misc_feature (392)..(392): n is a, c, g, or t
taccctcctggaccagccccaggctcctgtgctggttgcacgccagggcctgtactgaccacctccacgtgccactggggctgtaaggaggaatggcggccgtgggagcctgcttggccggctgaggcagagcaccgtgaaggccaccggacctgcactccgccgcctgcacacatcctcctgggcgagctgacagcagcagggcctcactcacttcgtgttgcaccgccaggctttattgcacgactctaccccgtgctgctnggtgaagcagggatggcttccaccattccacatccgctacaaggggagccacggcgcatgctgggcgattgcccattagatttttggacaccctgtttttcttgagggagccgccggggccagggttncgggaaggtttgagggtttaagtttccagttcgagggaaggattacggagcaggatttaat

SEQ ID NO: 362664 - DNA, 293 bp, Homo Sapiens
cagtgcgtttcaccggttatatttttgtctctttaccttacaagatatgtggcacgtttgcctaaaacaagccttgctttctgatttctgtgcactaggcacttaaaccttgcaaatgtcgcttacctaacgagtcactgtcaaggagtacctggctaaagaatctccagctagacaaagtagaagtgtctgtgctctggcagttgaatatattgtatcaggctcaacagcacctttcaccaaaggatgagacttcacaaccgattagatcttcttttattttgtttttatta

SEQ ID NO: 362665 - DNA, 460 bp, Homo Sapiens
taataatcccgaataatgaacgtagaaatctatctccataaattgagagaagaagaaggtgataagtgttgaaaattaaatgtgtaaaaccctttgaaccttgaatttgggagatgtattcccaacagcagaatgcaactgtgggcatttcttgtcttatttctttccagagaacgtggttttcatttatttttccctcaaaagagagtcaaatactgacagattcgttctaaatatattgtttctgtcataaaattattgtgatttcctgatgagtcatattactgtgattttcataataatgaagacaccatgaatatactttttttctatatagttcagcaatggcctgaatagaagcaaccaggcaccatctcagcaatgttttctcttgtttgtaattatttgctcctttgaaaattaaatcactattaattacattaaaaatcaaattggataa

SEQ ID NO: 362666 - DNA, 525 bp, Homo Sapiens
agcgggttctcagcctctcccaagccctggctactgaggcgtcgcagtggcacagaatgatgacaggtggaaatttggactcacagggagaccctcttcccggtgtgccgctgcctccttcggaccccacgcgccaggagacccctccccccagatctcccccggtggctaattcgggttccacggggttctctcgccgagggagtgggcgtggaggaggtcccaccccctgggggcccgcgtgggatgccgggatcgcccctccggtcctgccacaagacgagggggcatggcctctgcgagtcactctgctacaatccagcttctaatccgcccaaaagcggcagccaatcggagcgcgaggacgtggtctggaggtaccgccggagatctgggaccactcagggcatcagggggcgtggtctggtccccattgcgggcccgggaggggaatggtttctatggccaaagtttggttttctcaacactgtctaaatttggattaaaactttgaacttttagtcc

SEQ ID NO: 362667 - DNA, 910 bp, Homo Sapiens
  misc_feature (19)..(19): n is a, c, g, or t
agatgacacaaattatttntgacagcaatacccaagccctcgttttttaacaagaaaatcttactcttctctgatggtcaattttgtcacaggatcatgaattttctaaaactgaggaactaaaactagaagatgtggatgaggaaattaatgctgaaaatgtggaaagcaagaagaaaactgtgggagatgatgaaagtgttccctacaggttatcacagtaaaacagaaggagcagaaagaaccaatgatgataactcagctgaaactattgaaagaaagaaaaagccaacctagaggaacgggccatttgtgagtacaatgaaaacccaaaaggatacatgctagatgatgcagatagcagttcattagaaatcctagaaaacagtgaaacaacaccaagcaaagacatgaaaaaaaccaaagaagatttttctgttcaaaagagtcccctcaataaatcaaaagattgtcaagaataacaatgagccgctcccagagataaaatccataggagaccagatcattttaaaaagtgataataaagatgccgaccagaaccacatgagtcagaatcatcagaatatcccaccaacaaatacagagagaagatcaaaatcctgtacaatactataaatatatatttatgttttcacagtcaccaagtgtattgtaatgtatacttgaaaaatgttataacttatgaagtaaagtttctgatagtagtctttaaaagatataagacttaatatgttttattcagcttctataagtgtgaccagttttgatatttatttatgctaatatttttaacaagtcatttcaaaatatgtgtatctcaaattctccctaaagtgttgtggccttaactgttcagtattgcaataaaaaatatatttttatatgtgga

SEQ ID NO: 362668 - DNA, 1054 bp, Homo Sapiens
gccatgtcgagggaagacaccggcaaatagtcctgcagccctgttgaccgccagaccgcatgcaggacagagagcacatttccatcacaagttgctggagccagcctttgccagcataattcttgtcgtttgccacgtctagagggtgcgtgacttgcagcggcaaatccacttgcaaaagcgtccacagactgctgactgccaagaatccaccacatgatcctgcctccaggaccagagggcttttaaggactcccataagggaaactgggaccaaagaaaaaggaatctctcttaaaactgtgcttttatagcctcgatacaacccttggataccctcttcatataagatgttagagaaaatctgaaatgttcttgtagaagcagatacctgtgccctctgcttaaccacttcagatggaactcgaatcaggcaggcaaccacttctccagcagaggcagccaacatatgtttcataggtgtcaaatatgaagatgaatcagcatgcaaaaaccacttcacatattcataggtgataaaaaatgcagcagcattaggaaaggatccaatagcagcagaaggaacgccagcatatattccatgaaaaccaccagccttactaaatccttggggactctgcagcctggttttaatggtatccagaggaaataatatcaagtcaacagaaacacctgctaccccaccagccaccagcgctgccacgaaccccggccggtccatggtcgctcagacctcgtcaaggctacaatccaagccggagcagaagcggatcacgtcctcgcgcgctgggcgccgccatgtttgaggcgggtctgtcttgacttccgggaccacgtgacgtagaaccacaacaactgcacgtgcaacgcgagacacctgggcctaggggagggccagagaggagggcggggcctcggggagtgtggtggagctaagtctcggcaaatcccttacctcggtttcctgcagcagcgttgtgtgcagctagacggaggaactttcgcgagcaaaagatccgtggccgagatccag

SEQ ID NO: 362669 - DNA, 1029 bp, Homo Sapiens
agcggaaaacatggcggcgcccagcgcgcgaggacgtgatccgcttctgctccggcttggattgtagccttgacgaggtctgagcgaccatggaccggccggggttcgtggcagcgctggtgctgctgcattttttatcacctatgaatatgtgaagtggtttttgcatgctgattcatcttcatatttgacacctatgaaacatatgttggctgcctctgctggagaagtggttgcctgcctgattcgagttccatctgaagtggttaagcagagggcacaggtatctgcttctacaagaacatttcagattttctctaacatcttatatgaagagggtatccaagggttgtatcgaggctataaaagcacagttttaagagagattcctttttctttggtccagtttcccttatgggagtccttaaaagccctctggtcctggaggcaggatcatgtggtggattcttggcagtcagcagtctgtggagcttttgcaggtggatttgccgctgcagtcaccacccctctagacgtggcaaagacaagaattacgctggcaaaggctggctccagcactgctgatgggaatgtgctctctgtcctgcatggggtctggcggtcacaggggctggcaggattatttgcaggtgtcttccctcgaatggcagccatcagtctgggaggtttcatctttctgggggcttatgaccgaacgcacagcttgctgttggaagttggcagaaagagtccttgaagcagagacaagcctcacctccacttctgtcaagagaggggcctgcagtgcaaaccctcttccgctgagcagctgtctgaactataggccccagtgctgaagaccagttgtgctaagataccggcatggagattgtgccatccgtggtataggctggctggtatgaagtcattggcctgtatgccagagagctaagagaagaaaacggggtctgtggcggtactctgaacaatttcctcagaacctcttaataaataagtttggtaatgctg

SEQ ID NO: 362670 - DNA, 410 bp, Homo Sapiens
catttccctgctgggctctcacatctatctggttgttcttcaccaccctccaagtcctctgacctaattttctgctgcaaggtcccctggcagtggcccatcctgtacttctacttgaaacgtcctgagtcacttggtctaaaaagtagcctcaggtggccagaaggccgagttgtgtaatgagttggggcagggtggtggggtaggtgcatgggagggtgggccctctggggaggcccaagcagcttgttttgcaaaggcccaagtcctcctgctaggaaaagcttttgcatgtgtcctgaatgtgtctctgtaaacatagctgttatttattattgtgatgttgggacctttagcccatagcggatgcctcctgcaggaatattctcgatttaataagctaaaaaaaa

SEQ ID NO: 362671 - DNA, 1435 bp, Homo Sapiens
  misc_feature (1119)..(1119): n is a, c, g, or t
gcggccgcctgcacttgcgctggggactcgctggactgcggtgggcgcgggctggctgcgttgcccggggacctgccctcctggacgcggagcctaaacctgagttacaacaaactctctgagattgaccctgctggttttgaggacttgccgaacctacaggaagtgtacctcaataataatgagttgacagcggtaccatccctgggcgctgcttcatcacatgtcgtctctctctttctgcagcacaacaagattcgcagcgtggaggggagccagctgaaggcctacctttccttagaagtgttagatctgagtttgaacaacatcacggaagtgcggaacacctgctttccacacggaccgcctataaaggagctcaacctggcaggcaatcggattggcaccctggagttgggagcatttgatggtctgtcacggtcgctgctaactcttcgcctgagcaaaaacaggatcacccagcttcctgtaagagcattcaagctacccaggctgacacaactggacctcaatcggaacaggattcggctgatagagggcctcaccttccaggggctcaacagcttggaggtgctgaagcttcagcgaaacaacatcagcaaactgacagatggggccttctggggactgtccaagatgcatgtgctgcacctggagtacaacagcctggtagaagtgaacagcggctcgctctacggcctcacggccctgcatcagctccacctcagcaacaattccatcgctcgcattcaccgcaagggctggagcttctgccagaagctacatgagttggtcctgtccttcaacaacctgacacggctggacgaggagagcctggccgagctgagcagcctgagtgtcctgcgtctcagccacaattccatcagccacattgcggagggtgccttcaagggactcaggagcctgcgagtcttggatctggaccataacgagatttcgggcacaatagaggacacgagcggcgccttctcagggctcgacagcctcagcaagctgactctgtttggaaacaagatcaagtctgtggctaagagagcattctcggggctgggagggctggagcacctgaaccttggnagggatgcgatcagatctgtccagtttgatgcctttgtgaagatgaagaatcttaaagagctccatatcagcagcgacagcttcctgtgtgactgccaactgaagtggctgccccccgtggctaattggcagggatgctgccaggctttttttgaacagccacctgtggcccaccccagaatccctggaaggggcccgaagacattttctcccgggtccccaccccaaaagatttcccgggtggccaaatgaatttccctgaaaaccccccagaaatttttttccccccgggcccagaaaaacccaccctctgggg

SEQ ID NO: 362672 - DNA, 436 bp, Homo Sapiens
  misc_feature (19)..(19): n is a, c, g, or t
  misc_feature (49)..(49): n is a, c, g, or t
tcaaccttctctcccccanaaaggactggctgttaaccttaagcccatncaaagttacttccagccctggagagaacctcaccaaacagctggtgtggcctgagggtggcccatggtgggaaatgggcatgagaataaatacctccccaaattcaatctgagcccagcaggagaggatggtagggttgccagggctcagaagtgcaagctgattactcaccccaccctgcctcgccgcacctttcctttgtttccttgggtgaatgcaggagcagcagtggctgcccttcccacctggacagtggtgtgtgtagaaagccagctggatgtttgtggtggggcctcatggtgcctaggaggagataaagatgaggaggtttttccttattgtataaatgaatatttgtatgattaaattaacacacacaccaaaaaa

SEQ ID NO: 362673 - DNA, 462 bp, Homo Sapiens
gcggccgctcgagggaagcacccgccggttggccgaagtccacgaagccgccctctgctagggaaaacccctggttctccatgccacacctctctccaggtgccctctgcctcttcaccccacaagaagccttatcctacgtccttctctccatctatcggaccccagtttccatcactatctccagagatgtagctattatgcgcccgtctacagggggtgcccgacgatgacggtgccttcgcagtcaaattactcttcgggtcccaaggtttggctttcacgcgctccattgccccggcgtggcaggccattccaagcccttccgggctggaactggtgtcggaggagcctcgggtgtatcgtacgccctggtgttggtgttgcctcactcctctgagctcttctttctgatcaagccctgcttaaagttaaataaaatagaatgaatgataccccggc

SEQ ID NO: 362674 - DNA, 619 bp, Homo Sapiens
  misc_feature (16)..(16): n is a, c, g, or t
gctcctacagggcttntatggtgcagctcgccaatgatccgtgtgttaaagactccccaaatacacattgacacgatagactggagttgtttgggtctatcgtggcaatgatccggggataatggcagtgtcttatacaatttcactgagattggagtgctcatggtcctaatggcagaaccggaactgccccagttaagtcccaccatggcgcccagtaaagggtgtgtgggtctttgaccttctgcttcatgacactgtggcatcgctaattttactgatattttaactaacataattgagttagcatttttttccccctgaaaattcatttttgtaattcaacacctgaattagggagtccatctagtgatggtttcatttgggtaatcataagctaaagacctaggaaaggtcattcttaaacctaaagtgttttgggaaaaataatcgtgggagatgcatatgagcttgagacagagttaatatggaataaataacctcagtcctgagaaaacctagttggctaggctgaaatagacaagatgagaaggtgggaagaagatgtttttaaaaataatgaaagtaacatattcaataaaaataattcaaacactgt

SEQ ID NO: 362675 - DNA, 323 bp, Homo Sapiens
agcggccgctccaacatgtggtaccagcggccatgtgccctcaaggggagggaggaagagcacaggagggtgggaggaggacaaacagccccttttatagggtcatgggggggctccactcagagtctggcaggaatctgccaggaaaacctcgttctagatagggagaagcagaactgtgtgtggggcaggccgccgtggtcctgagagacagggcccgggccttccactgctcgtttgcacaccctcttcgggcctatcccaaggaccttcctagcatataaaaacaggggctctcctgatttgtaaacagaacaacaaat

SEQ ID NO: 362676 - DNA, 478 bp, Homo Sapiens
atttattggttaacagctcatatcagaagctgtgataagtaagtgtttacatacactgtctagtgcataaaaaccttagtgtttgctatcattcattctgtagccaatggcttacagtttctgtctggtcatctggaacttgaaaaatcctcaaatgccttcactcttttacctaactccctagtctttttgggaagtagttaagatatgcctgctatctttaactttggaggtagtatcaaaattttacttctttggttgtttagtgaattaatgttgaatattttctactgtcatcaaaacatattcccaaaaagtattaaaaaggaaccttagcacatttattttattaaaacaagaaaacccaaaatatataaaccttttcttattatgataataagcttatatatgtgaataagttataacctagtgtataaaaaattatttctaacaaactacagtatactgtcttcggttg

SEQ ID NO: 362677 - DNA, 590 bp, Homo Sapiens
gtgaaaaagaaattatattcagataggactgcactacattatttgtcacacatggatctgttaccatcaggtcaattcctagtatgcataaattttttaacccttttaaaagagacctatgttgaaaacccctgaaaattcactgaagaaaaatcattactctttttctcagtaaatcatatcatctgaaatattacaaatttcaaatttctaggtgctatattaattcaatattacaataactcttacctaattattcttacaagttttaagttgtggtagtttagtgatttttttaaaagatgtgtgaaatgttctctgcaaaataattcaggccactgtctccttttatatattattataattatttattatgaagaccagtgaattacgatatttaaagtgagagaacttaattatttgcaaaggtaagttacagcttgttttttgagagaatcaaatgagtttacttttgttcctgttgtttttaactagctttaagtttaaagatggaagctaagcaatggaaatgctatacgtttttgacatttattaaatggtaccaataaagtattttattaccaaaagtt

SEQ ID NO: 362678 - DNA, 514 bp, Homo Sapiens
gactcgaccatgacttagttgtaagggtgtgtcggcttttccagtctcatgtgaaaatcctcctgtctctggcagcactgtctgcactttcttgtttactgtttgaagggacgagtaccaagccacaagaacacttcttttggccacagcataagctgatggtatgtaaggaaccgatgggccattaaacatgaactgaacggttaaaagcacagtctatggaacgctaatggagtcagcccctaaagctgtttgctttttcaggctttggattacatgcttttaatttgattttagaatctggacactttctatgaatgtaattcggctgagaaacatgttgctgagatgcaatcctcagtgttctctgtatgtaaatctgtgtatacaccacacgttacaactgcatgagcttcctctcgcacaagaccagctggaactgagcatgagacgctgtcaaatacagacaaaggatttgagatgttctcaataaaaagaaaatgtttcactaaaa

SEQ ID NO: 362679 - DNA, 249 bp, Homo Sapiens
taaggttgttcattgtaatatatgtaattagaaaaacagtacacaaaatgttgaatatgggaatggcttagttaaggtatactcacatgatagggtattatacaaatattaaaaatggcatttttgaacaatatctaataagtgaaatgcttaagatatcaagaaattaaaatgtaggctataaaattctatacaatattacctcaactttgaaaaacatttacatatttaatacatctacatgcatag

SEQ ID NO: 362680 - DNA, 555 bp, Homo Sapiens
ttcacctggtgtatatgaagagctacgctacattttgaaggatagaaagaagtttaatataagtatctgtctttagtttacatctagttgttgaaacaagatacatatactgaatgactgcagataaaaacctttattattttggtggtgtgagttatcacaaagaaagtacaaaatacacttattttctttttacttaatttctgttccatgttcaaatcatctcatttgcctatgtgccctatatttcaatctgtcattaaccctcctaccttctaaatggccaaggtaattatgtctaaccttgcccttctcttacactggcagcatactcacataaacagtaaatggggattgttttatgtcgtaaaatttcccagaaggaacactcttgggtagcttctgttcagtgtagataaggaactccagcagctaactagccttctaataacccaaaaagaaaacaaatagtatgaaagagagaatggtcagagaaaaggcagaagagaaagcagtcaagaggggggaaaaggagggggaaaatagaaacaagat

SEQ ID NO: 362681 - DNA, 462 bp, Homo Sapiens
tgtctggaattaatggggttcttataaagaaggttcccagaaaagaatgttcatccagcctcctcagaaacagaacattcaagaaaaggacaatcaggatgtcatcagggaaatgaaaataaaaaccacaatgagatatcaccttataccaggtagaatggctactataaaaaaatgaagtgtcatcaaggatatagagaaattggaacccttcttcactgctggagggaatggaaaatggtgtagccgttatgaaaaacagtacggaggtttctcaaaaattaaaaatagaactgctatatgatccagcaatctcacttctgtatatatacccaaaataattgaaatcagaatttcaagaaaatatttacactcccatgttcattgtggcactcttcacaatcactgtttccaaagttatggaaacaacccaaatttccattgaaaaataaatggacaaag

SEQ ID NO: 362682 - DNA, 532 bp, Homo Sapiens
cacacagaagggcaagaatcccaatttaactcatgttatcatcattagtgatctgtgttgtagaacatgagggtgtaagccttcagcctggcaagttacatgtagaaagcccacacttgtgaaggttttgttttacaaatcacttgatttaacacactcaggtagaatatttttatttttactgttttatacccagaagttatttctacattgttctacagcaagaatattcataaaagtatccctttcaaatgcctttgagaagaatagaagaaaaaaagtttgtatatattttaaaaaattgttttaaaagtcagtttgcaacatgtctgtaccaagatggtactttgccttaaccgtttatatgcactttcatggagactgcaatacgttgctatgagcactttctttatccttggagtttaatcctttgcttcatctttctacagtatgacataatgatttgctatgttgtaaaatctttgtaaaaaatttctatataaaaatattttgaaaatcttaatttttcctg

SEQ ID NO: 362683 - DNA, 501 bp, Homo Sapiens
aattaatcaggttttaaaaatactaagtgttcctataagatatacacaccacttagacgtgaatacttcctaaaaacaggcagcgcatgagcactgctgaggggcattgtgactgcattgaacacttgcaactgtgaggtgaataaagtctgtactggctcccggttgcaacatatagtaacacagtgtgctactttatattgaggagatgtcttggactcacccagtaactcagggctgtggaatgaaggtaaatgtaaaaaacaagcgggagtcacagatatattgtctgcgaaagtcaaacttagtagctttgtgagtcctgttgtaatgctttcagacacatttatagatcaaggggccaaagttacatttttttaccgattagattcctgatcattcaggggttgccaagattctgctacccactgtagttaataaacaaagagaaaacttgtctctattctatctcatgcactcaggcacaacttttccagattt

SEQ ID NO: 362684 - DNA, 449 bp, Homo Sapiens
ttttaacttttggcaattattttattgagcaaaaagttaatggttacacgtaccataacagtagattcttagaggattccaatttcctgtttagtatttaagtgacatcataaaattctcaatatatgatatttactgataatgacatttgaattgtcacttctccaccaataagtcttccaaaaagcacaagactattattattattccaattgtctgttttagtagtacactttatcttacttcttagcttctttgaactattttttctttacaattcatccacttaatattcttgcgatagaaataattttcaaaataaaagtgagacaaaaaggataaaaagtcatacactctaattcaaatttcaacatttataaaaatccttctcaagaacaactgtgaaatatcacaaatctgtatattattcaaacaaaggaaaatctctg

SEQ ID NO: 362685 - DNA, 1630 bp, Homo Sapiens
  misc_feature (319)..(319): n is a, c, g, or t
  misc_feature (1385)..(1443): n is a, c, g, or t
  misc_feature (1475)..(1475): n is a, c, g, or t
cagtgatgtggtggtggtgctctttatagggcagcggctgatattggacgattcggtaagtgtccagaggagctgtcggtgtgtgggtgaacgcgaggttaaggcgggacgaggcaaccgcgagtgcagtcgataaccgaggttggaggagagagagtggaggtaggttgtgaactacggtgaagacgaggaagatagtgatgaggggcagtggtgggtatgagttgttgtttctcgcgatgtggtgtatttcgtagggttggtgagggaggagtcgtcgtgagaaatgcgggaatggtgacgtggaggggttaagctncggtggtaggtccagtcgacagatggatggatcttgtgtgttgaaccggatcaagggagagtgttcgggtgagatccctcgatattagtttgccactgggtgcagacgaggcgggtacgctaatgcaatcggcgacacgagtgctgtagcgtgtcttgtgagatgctagaaaaacgccagttgccgatacggagagatcgttgggaataactgatggtgttgaccgtctgggggggccgtgggaacaagaacgcatggtttgggtgggaagaggtggcgagagaaagggtgtggaagaagacaggtaatgggaagaggggtggagggtgtgaggagggagaaatatggtaggaggaggggggcccccggagatcgcgggaggcgcccgaaggcgccggcacttgccccacgcggtgggccaccttccaggaagggggatggtcaaagtgcctggaaagaccaggacctgagggccccaggtagcgtcgtggcggatgacctcattgataccatattcgaagtctagtgtgagctgctccactgtcaggtactggccctgcgggtgagtgggtaggcgcagggggacggtgccaacttgccccccgggcagctccccgggactgtccttggcccgcccactgccccacacccacctggacagcagtccgctcccgcatgggccgcaggttgcggccacgaagatcagtcaccacgaagggcagggagatcttgtcgtcctccaactcatcctccggctccgtcccctctccggactccagcacatagtacagcttggtgtagttgacatagccaggctcggaggcaggtgcctccgaggcaggggggctgtcccggggtgccgtctctccacacagggctaggggctcagagtgcgcacggcagcggctgccagagggtcctgggcacagggcaggccgggcttcctcagggaccccgcccttggcctctttggcccggcggaagatgtcagccacaaactccttggctttggcaatggcgggcgagggctcaggagacccagaagaacgggctggggccgcctcannnnnnnnnnnnnnnnnnnnnnnnnnnnnnnnnnnnnnnnnnnnnnnnnnnnnnnnnnnaggcgccagggggcaggtgctgtggtcatacnaggatttggcagaaactcctgtcacctgccgagtggacggagacggcgcaggccaccagggagtagctggtgttgagcagcaccacctggtccttattgagctgaagcggcctcggccaattaacacccggcctcgtacctagcctaacgtctta

SEQ ID NO: 362686 - DNA, 1100 bp, Homo Sapiens
ggtgttcccaaactccccacagggggcccaaaccgggggagtgtgccctgtgcccaagccgcccgttttcgggcgaggtttaacccttagtggcccggtccatcccattcgggtggggcccaaccgggcccaagggaaggaggccccacccccagggaaaggggggcccggttccccagggcccagcggagggaagttttggagttcagttttccgggggccggccttgggcccttccaagcagggattccacggtatatccgctcgctgtccgccccaggacccttcaagggagcccccctttgggcaagcgcttcatgggtcatcctgttgacgtagcggccgctgctctccggcaccagccacttcatgaccatgtccacgcagctcttgcggtaggagctccagacactgccgctggtctgccctttgacctcagtcaggtcgcctacactgactgtctcgaagatccctgtgttgaggtcccatgccaccttgaggctggtgtgataggtctttggtcggagctggccctcctcagtgggggacgggaaggccaggagcagcaggccaatgttgatgaggacctggttggtttctgggcagacctccagaatgacgatgtcatagtcgctgaaagaacagaactgatggccccaggtagcgtcgtggcggatgacctcattgataacatattcgaagtctagtgtgagctgctccactgtcaggtactggccctggacagcagtccgctcccgcatgggccgcaggttgcggccacgaagatcagtcaccacgaagggcagggagatcttgtcgtcctccaactcatcctccggctccgtcccctctccaggactccagcacatagtacagcttggtgtacgttgacatagccaggctcggaggcaggtgcctccgaggcaggggggctgtcccggggtgccgtctctccacacagggctaggggctcagagtgcgcacggcagcggctgccagagggtcctgggcacagggcaggccgggcttcctcagggaccccgcccttggcctctttggcccggcggaagatgtccctcgtgccgaattcgccacccagc

SEQ ID NO: 362687 - DNA, 879 bp, Homo Sapiens
  misc_feature (184)..(184): n is a, c, g, or t
attttgaccaggaacaaaagagacagatttcgattttatagccttccctaagggatttgggcctcagggcaagattcggcaccaggttttttcaattgggtcgattgacccgtcccaaaggaactttgaagccccgtcctggccaggagcaagggaagaaacctgaagtcggaaaccagaagcnaagggcccggggccagttcttcagacatgggggtccccagcaaggaaacccggaaatggcagcctttgcccccagctgggacacacgttcctttttgtcctcagaacagatgagctcagggtagggtagagaacgcactttctcagacctgtcccctttgtgtttagaaatgagttaaccaggaccaagtggccatttagtgtcctggaaacttagaggacagtgttggcctttggagtcgggccttcttgtgttaaggggcacaaggtccagatcactctggagcaggccagctctgctggacagtgaccctcttcccaggcctcaggagtgaccatagccactgctgaaaagtcacgcagctgctccctcggaccccccaaggatggttgctgttagcagaggattggtgcagtcccagctgaagcccactgtgtgccaaaggaagaagctcccagggctgcttccttcacctgcagaaagccccaagtgagccaccagcactcatggggcagtccctgtccaggctgcccagggcttctcatagacgtcctgagaaggacggtataatgcaaggaaatggctgtggtaacactgatccttcagaagaagcttcattccctcttaatctagttaagccaggacatcccgaattcattgctttaataaagaacccaggccgggtgcagtggctc

SEQ ID NO: 362688 - DNA, 468 bp, Homo Sapiens
  misc_feature (110)..(141): n is a, c, g, or t
gtcccttctttggatgtccttgtgagtcactctgggcctgcctgtcgtccctcctcagcttcttgttcctgggacaagggtcaagccaggatgggcccaggcctgggatnnnnnnnnnnnnnnnnnnnnnnnnnnnnnnnntgctgctttgcggggggcagggcagaaatggactccttttgggtccccgaggtggggtcccctcccagccctgcatcctccgtgccgtagacctgctccccagaggaggggccttgacccacaggacgtgtggtggcgcctggcactcagggacccccagctgccccagccctggtctctggcgcatctcttccctcttgtcccgaagatctgcgcctctagtgccttttgaggggttcccatcatccctccctgatattgtattgaaaatattatgcacactgttcatgcttctactaatcaataaacgctttatttaaagccaaa

SEQ ID NO: 362689 - DNA, 1092 bp, Homo Sapiens
  misc_feature (903)..(934): n is a, c, g, or t
ctggtccggtccggattcccgggatctggaaagcccctcccttcctgtccttctgtggcctccatcccctcatgggtgctgccatccttcctggagagagggaggtgaaagctggtgtgagcccagtgggttcccgcccactcacccaggagctggctgggccaggaccgggagagggagcactgctgccctcctggccctgctccttccgcagttaggggtggaccgagcctcgctttccccactgttctggagggaaggggaaggagggggtcttcaggctggagccaggctgggggtgctgggtggagagatgagatttagggggtgcctcatggggtgggcaggcctggggtgaaatgagaaaggcccagaacgtgcaggtctgcggaggggaagtgtcctgagtgaaggaggggacccccatcctgggggatgctgggagtgagtgagtgagtgagatggctgagtgagggttatggggagcctgaggttttatgggcctgtgtatccccttctcccggccccagcctgcctccctcctgcccgcctggcccacaggtctccctctggtccctgtccctctggtggttggggatggagcggcagcaaggggtgtaatggggctgggttctgtcttctacaggccaccccgaggtcctcagtggttgcctggggagccggacggggctcctgaggggtacaggttgggtgggccctccctgagggtctggggtcaggctttggcctctgctgcctctcagtcaccaagtcacctccctctgaaaatccagtcccttctttggatgtccttgtgagtcactctgggcctggctgtcgtccctcctcagcttcttgttcctgggacaagggtcaagccaggatgggcccaggcctgggatnnnnnnnnnnnnnnnnnnnnnnnnnnnnnnnntgctgctttgcggggggcagggcagaaatggactccttttgggtccccgaggtggggtcccctcccagccctgcatcctccgtgccgtagaactgctccccagaggaggggccttgaaccacaggacgtgtggtggcgcctggcactcagggacccca

SEQ ID NO: 362690 - DNA, 571 bp, Homo Sapiens
aaagaaaggttgtgctcgctacactgctggtgtgtgcattctgagacctcttgtattcaatctgtgaaggatatgtgtattaatccgtacacccgtatagcctcaatatttgtctgaagacacttaaattctgacccataaaggaaagttctagaagcaatattttcacttatttaacattctccaaacaacatcaagcattgatacacactgaagagtgcgtttattttttgtatcactctaagtatgttggaatatgcaaggactgtggttcaaattagaatgtataaggcatattataatttagttcatactgaaaaagaaattaacagaacattgttcggttcacacgttccaaaatttgagtgatttctggagttagacatagattttctattttgttttaatttgtcaaggtatttttcttcccttcatgaactttaggtacacataacttatgtcatttatttatggtcttttatacctagtttgtaaaattgtaaaatagcaaactaaatgcaaagagtttgcatttgaaaataataaagtagttgcagaatacaagaaaaaa

SEQ ID NO: 362691 - DNA, 1037 bp, Homo Sapiens
  misc_feature (47)..(47): n is a, c, g, or t
  misc_feature (691)..(856): n is a, c, g, or t
  misc_feature (859)..(957): n is a, c, g, or t
ctcttgtgcttttttgattttgctgactttaaaaggatttatctggncagacattatgtaaaagaaagcttgcgtttaatatattttttgaactttgtaggacaaaacatagctggttaaccttgaagtgactgttgtaccactggttgtgcacatgcttcagaatcctatggaagagaatattcctacttgcagtacatcaaaggaatggatggtggaccctactattcatgttttgagacataaatgttcactttaaagcaattgcataatagataaaaacctgaactttcattggatttttgttaattttcctcattttgaattatgtgcactaccatagctacatcagtttgatacagtattgaaaaattatcagttatattttgctgtttatgatctatttgtagattaggattaaaatggatttaatccatttttaaggctgtgtgaatttttctaaacaagaaccatttgcaatatggatttcttagagattaaaccaattataacttattagcagtcgcgagcacatgttcatatagtcaatgtaaaaatacactaatgagtatttggtaaatcccagtaggcttttaccattagcataattttgtgttgtacaattaagttacaattacatctctaattttggataatattcattggttaacaataaagtgacaaaagctcnnnnnnnnnnnnnnnnnnnnnnnnnnnnnnnnnnnnnnnnnnnnnnnnnnnnnnnnnnnnnnnnnnnnnnnnnnnnnnnnnnnnnnnnnnnnnnnnnnnnnnnnnnnnnnnnnnnnnnnnnnnnnnnnnnnnnnnnnnnnnnnnnnnnnnnnnnnnnnnnnnnnnnccnnnnnnnnnnnnnnnnnnnnnnnnnnnnnnnnnnnnnnnnnnnnnnnnnnnnnnnnnnnnnnnnnnnnnnnnnnnnnnnnnnnnnnnnnnnnnnnnnnnggagaagaaccgcgccggggggacccccccggcgcaaaaaaaggcacacacgagggaaaccgggggggcggggagggccc

SEQ ID NO: 362692 - DNA, 465 bp, Homo Sapiens
  misc_feature (394)..(394): n is a, c, g, or t
  misc_feature (434)..(434): n is a, c, g, or t
tgctgactttaaaaggattaatctgggcagacattatgtaaaagaaaggttgcgtttaatatattttttgaactttgtaggacaaaacatagctggttaaccttgaagtgactgttgtaccatggttgtgcacatgcttcagaatcctatggaagagaatattcctacttgcagtacatcaaaggaatggatggtggaccctactattcatgttttgagacataaatgttcactttaaagcaattgcataatagataaaaacctgaactttcattggatttttgttaattttcctcattttgaattatgtgcactaccataggctacatcagtttgatacagtattgaaaaaattatcagttatattttgccgtttatggtccctttgtaggantaggggtttaaaatggggttttaatcccttttttaaggcngtgtgaaatttttccaaacaggaccccttgg

SEQ ID NO: 362693 - DNA, 164 bp, Homo Sapiens
ccatatacctgatagtctgtgtacagcattgttttgtctgggaagcagggattgctgacatgtatttttgaatccatacattaatgctaaaacgaatatagtagttgttccttagagcaatatgttgttacgtgtagcagaaataaagttttctttgcttaact

SEQ ID NO: 362694 - DNA, 536 bp, Homo Sapiens
gctcttgcctctcttcctgtttgtttgtttttcagagaaacagggaagggaggacattttctaatataattgtttatagggacaaattgttaaaatatgatgtgtgtgcattttgcaagtttgacttgtgtaaaatagattacctctcctgtcttctttccttcccacactgtataccatcctgcctcatgtcaacccaatgaaattgattccattatttttcctctttcttatttccaaacctcataggctatcttgcctatgaacagttgaaagttttgacttctttggactcaattgaattcactaaaacaatgaattttaataatttttttccaaattcttattcccattgcctttaaaagtcctttagaggcaggttgtataatcataatagcctcctctgaactgccttgagttgtttttcttttctgcttttctgtcacttatgtaaagagtacatgtatttacataaaccttctctgtcccggcctatttcaaaataaagtggaaataaaaatctttagctcaatctt

SEQ ID NO: 362695 - DNA, 472 bp, Homo Sapiens
aagataactctgtattttacgccacttatatagactcagtgtgttaagacgtatcttggggaaaatatggctactttctcaaagttgtaagctttatttctatgtataaagtccagctttattagatgtttctgattcccaaaataatagtattaggatattccttattttaggctttaaataatttgtataataaaatagtgtcagtaggtccaaagctgaaatgcaaagttcagatttctaatacaaaggagaggagtattttgtttcttttggtacagccatggttcccaaactgtgtagcagggcaccttagcaaattaacatgggtgccacacaatattttaaaatttttgagaaaaacatagcaacacctgttggacatcacataaactactactttgaggtagtttacattttcaacattaaatagcattatattcctttctataacaacatatctttacaaaac

SEQ ID NO: 362696 - DNA, 311 bp, Homo Sapiens
acagtgcaagggttttaatagtccacactaaaataggctgtacagttttgtagtttaacattaaaagcaatcctgccttattttaaaatgcttctacttaagaatgcttcgttcctcccccagctccttcacttcaaggtataagtctacccctaaagtgcattctctcaggcattaaaaacagcactgtgatttgctattccacaaagtcctaaataaacaggccaccttcttcatttgagaggctacacgagttcaagctgagctgtgtacaggagccgagggggccagggccccagaatagctttttg

SEQ ID NO: 362697 - DNA, 577 bp, Homo Sapiens
  misc_feature (397)..(407): n is a, c, g, or t
ccgctggccatcttgaatcctagggcatgaagttgccccaaagttcagcacttggttaagcctgatccctctggtttatcacaaagaataggatgggataaagaaagtggacacttaaataagctataaattatatggtccttgtctagcaggagacaactgcacaggtatactaccagcgtttggatattgatatatacatggcaaatctgaatattgttttatgagaggcctggcaatgggtaaaacaccaaacttgaaatcagaacataggtgcaaatggccactcctgtagtttcttttctgtaaaatgggatctggacgaatgataccaaacgtttctttctaacattgtattttataactctggcctatgattgtgttgtgtcttgcattnnnnnnnnnnntttgagagtggtagaattacttctgttatctgaaatacctgagatgcactttaaactgttgaaatgtaagctctgagggcagggaccgtatcttatttactgttagtatccgttgcatctagtgtggtgcacctggcacacagtaggcactcaataaatatgtattgatt

SEQ ID NO: 362698 - DNA, 567 bp, Homo Sapiens
tctggaacaatgtccctcctcttagaatgtcccaactaaagaccagttaaaatattagggtacgttcttgtgaatttccactttccaggtagatgaccaaatttaggtggtcaagatataaaggtgtcagctagttttaagtgtgaaacttatttcactttcacactgccttcaggccagaagcaaaccaaatttaccaggtttggctggaggagttttgtgactcatcttttactggtttgaattttttcaaaccagtggctgatacctgccttgtacttagtaccttaataccaataacctaatggtacttaggcgagtaccatttgcacaatcactgttttacttatgagcagatacagatatatccaaacccttacctactaggtatcctgctagggttttcaattccaattcttgtattaagttttttcctttcagttttaggtgcgaaagtaatcagtcaatccaatatcccccatctttgtcttgaaacaaaaactgttttaagacgtctacgttgaattattcagagaattaagcaataaaagctcacaccttattgtc

SEQ ID NO: 362699 - DNA, 712 bp, Homo Sapiens
atgccctaaggatgggttcctgtttatccttgccacgcagctgagcttactgcatgtttatatctcccaaggactgttctctgctcagaaatgccctgtcaaggtggtggcatcacgcagtttcatccaagttgtttcaggaattgctgacactgctgggtgcagttctatcccctaaagcctagggtgtggccctttaacttccccttcagtagaactgggaaaggcagtaccattcctagttatgagtgaagcatccactttcttttgtaacaatgaggaacagaaaggataagactgaagagtgatcttttgtccaactaaaccatttatctccttttgtaggtaaattcaaatcctgcccagttatagttttcagtcactggagaattccaggtaggagccctactttaggtgatcctaggaactcctatgttcagaaaagaattttcttcctactatataattacagtatttagctgtcaattttaagatgaatttggtagagccttatagtaaagtatgtatcttggtcacacacaaagcttggaaaaagtaaaagatgtctaaaccataatcttgtaactcataacatctgggctggggcccggggaactaattgtttagagagccccaaaagtggctcagatgtaaagccagggttaagaaccatctgccttgaaagatttaagggaaacatataaacttgtac

SEQ ID NO: 362700 - DNA, 519 bp, Homo Sapiens
  misc_feature (46)..(94): n is a, c, g, or t
  misc_feature (123)..(296): n is a, c, g, or t
caaaagtatatttacagattttcaaataattaggaaatgttagtannnnnnnnnnnnnnnnnnnnnnnnnnnnnnnnnnnnnnnnnnnnnnnnntgttgctaaaaagtagtgttatggctgannnnnnnnnnnnnnnnnnnnnnnnnnnnnnnnnnnnnnnnnnnnnnnnnnnnnnnnnnnnnnnnnnnnnnnnnnnnnnnnnnnnnnnnnnnnnnnnnnnnnnnnnnnnnnnnnnnnnnnnnnnnnnnnnnnnnnnnnnnnnnnnnnnnnnnnnnnnnnnnnnnnnnnnnnnnnnttttttaactctgaaaactaatccagaaaagttaaataaccagcccaaaattgcagagctaataaaaggcagctaacagtgttttctatcttgattctatttgggtggacaagtgtgtgtacttgtcaatagtcatttgatgggtcacttaagatctgtacatcacactatatgttgattttacttttaaaaggcacaaataaactgccctctgggtaacaat

SEQ ID NO: 362701 - DNA, 485 bp, Homo Sapiens
cctgccgccggctcatttcctccctccccggggcagccggaagactctcgcctgagctaccgtcccccaccctccagggggtcgcgaggctgcagtactggggcagggcgcccccatcttacaggtggggacacttgaggaccactggctggtaactgactaaacaggcacctttggattcagggagtgtttcccagccaatacggagtgctggcagacacgggtgggtgtctgggtgcggttcagctaccatcaaaagaccccgggcttcgttcctgcctgtgccacactagctgtgggatctgagctgtcacccaccccaaagggcctcagtatctgcatctgtatatggggataactcagttctccagagtttgtaacaggcctagcacagtgcctgcacatgtaagagctcagaaagttatttgtaaattagtaaattaatttataaaattgtaataaatcaataaccattaattataaag

SEQ ID NO: 362702 - DNA, 800 bp, Homo Sapiens
gttaccaatctgaagtgggagcgtcctctaacacattcagactacaagtccagacccaggagagcaaggcccagaaagaggtcaaaatggggtttatattttcaaaatctatgaatgaaagcatgaaaaatcaaaaggagttcatgcttatgaatgctcgacttcagctggaaaggcagctcatcatgcagagtgaaatgagggaaagacaaatggccatgcagattgcgtggtctcgggaattcctcaaatattttggaactttttttggccttgcagccatctctttaacagctggagcgattaaaaaaaagaagccagccttcctggtcccgattgttccattaagctttatcctcacctaccagtatgacttgggctatggaacccttttagaaagaatgaaaggtgaagctgaggacatactggaaacagaaaagagtaaattgcagctgccaagaggaatgatcacttttgaaagcattgaaaaagccagaaaggaacagagtagattcttcatagacaaatgaaatcatgcttaccaatcaaatctcaaagcacagaattattgacttgaatcatggtttttacagttttttaaatgctcaagattttgatattatagattttattttaaaatattaaaatgcaagatagttttgagctattttaaaataaaatttataacattcaacacaaaatcatggaggtgctctaaataacttttagatttcctctctctgtgtgcattaccaatatctaagtgtaaaattaataaattgttttgaattcctggaagc

SEQ ID NO: 362703 - DNA, 491 bp, Homo Sapiens
  misc_feature (77)..(104): n is a, c, g, or t
  misc_feature (158)..(203): n is a, c, g, or t
ctgtgaggaagaagaaaagcaaatagctcacttgattaaatacattataataatcactacattctgtcctttagacnnnnnnnnnnnnnnnnnnnnnnnnnnnnaccttatggtcactgagcacctaaaatgtgctcctagtacaactgagagactgnnnnnnnnnnnnnnnnnnnnnnnnnnnnnnnnnnnnnnnnnnnnnnaagctgattctcagctcaattattggaaaatgttaagtacgcttggaataatttgggtatatacacctatttttttcaattatgaattttatgacatctaaatatagatcacctatttctggtaaaatttagcatctgaattgagatatattgtaggtataaaacacacactggacttcaaagacttagtataaaaaaggaatgtaaaatatctcaataatgtttatattgatgatgtgtcaaaatgataatcttttgtatgtattgggttaaataaaacatattatt

SEQ ID NO: 362704 - DNA, 540 bp, Homo Sapiens
tggtccacccgtggctccaaaatggtctcctggtccgtgatagcaaagatccaagaaatatggtgcgaggaagatgagaggaagatggcgcgagagttcctggccgagttcatgagcacatatgtcatgatgaacatacatatgatagttgagaaagacacatattctgatcatgaagaaataaacacaagttaaatatgactaagcagaaagatggaaggaccaggaatggtgatgctaacttggaaccacgatgcaggctctaaactcctctacaatcatcctcccttgtgagaaaaatacttgatctgaaggtcccagcaaggagccgactcacagaagaatgaagttttcacatcatgatgatttaatcttccttgacctgagcaattgacaaccccaattctccagaacctcacccgccacaatccccttaaaaaccctggcccagaacccctcaagcagacagatgtgaagcttgaggattccttcatctctttgcccaatggcattgtgattattaaactctttttctgctgc

SEQ ID NO: 362705 - DNA, 514 bp, Homo Sapiens
gactcccgcagatttgtggggcagtttggtttctttgaggcctcctgtgagtggcaccaatggacttgctacccacagaatctagttccattttagacaatgaagctgcttagtaatctctgccaagccatctcttaatattaaagcagacaccacagaatagatttcttcacttacaaatgcatattgggcacttataatacagcaggaactcttctcacctggagccttgatgttaaaagacacagccatgctcttgaggagcttacaatcctggctggaggcaggggagggtatattctttaaatatgcttaagtgttatagggaaagacggggttaccagtaaacatgtaactagaaagccaggctcagttcttacctctgggaatcagaactctttatgcaacttggttaatagaatctactatctggaagataaatgaaggattttaataaaattttcaatagaataaacctaatcttgtatggatacctttatccaaaaatggaatg

SEQ ID NO: 362706 - DNA, 575 bp, Homo Sapiens
gcggccgcgctcaggtaccgagcccgggcggagcgcgccgccgccccctcctctcttgtccacgctgcccattcctcggcgcaccggctccgagctttgcccgcggcacgtggagggcgcgggcggtcgtgggcgcggggccctgcgctccgagctgggcgcgtggactacgtccccctgcctccgccgtctgcgccgcccgtcgaggcgacttttccgcacgaggcgaggcccgccctggtggccccgcgccgtggttcggtggcgcgagaggcggggagtcgccgtggtaaacggggccttggggcgtcccgaaggggacccagacgcgggaggccagacttccccggcgacccgaggaggggacttgcggcggattccgaagccgctttttctgcgtagcctgggggtgtaaatcgccgagattctcctgtgtggagaaggcgccggtgcccgcccgctgctgccggactctagaggggtgtctttttccgttaatctgagcgcagtcgcggagcccctgtttcccacgcagcctgtgttaagtggcctcgtgagttttcgcgcggcatcct

SEQ ID NO: 362707 - DNA, 1066 bp, Homo Sapiens
gggtccggaattcccgggatttccagagaaggtctcgcgtaggtgaagacagccaggtgctttctctaagagatacagggtgggtgagagacaagccagggaggatcttaattcaagagaagaattcataccaagagctgaccaagaaggcagtaaattctgtgtacttgtagcagaagaaattggactaggaacttgcccaaagctttatcaaagaaaagcattgtgttcaatcttggtagaaacatgccagcaataagtgcttatgttccatagccatatcatgggcttctcacttttaaacctcctccaggggatgttctcagacatttcacaatccctctggggacattacagtagaagagaaacacatggaactgtaccagtgctttttgcccatgttcatcctaagctccggctttaggcagtgctttctgacctgggcggagtgaagacgctgctggtggctgaggccagtaacatggggcccctgcccagccaccctgaaggctgggtaggtccctcttttcaccaccagttttccacacctgtgtactctagattaacaaactctggataaacagatatttacattttaaactcaggcctacacagagtagttttccttataaggagcatgtatcacttagcaagaaactaaaaatggcaaatgagtttttcatcctttaagaaaaaaatcagctttagaattctctgcggtcagttgtgtgcaatgcaacaaaactacctttcagtaaattacttagttatttatttcagtgttttgtttcttttgatactaagtttccctttcaataatgaatgatgtgaccaaccaaggagaatttgtttgttctgtactaaaattatattttacagttaggaattataaaaagcaagggagcatctttaaatgttttttggttaagcgatgtcttccatccaaagtaagaataatactctcggaaggtccttttggtgtcatgtcactggctgtatgtggcagccttacagtgccacacttgggtactgaaaaatcaataaaacgaaagttcatcaaaaaaaa

SEQ ID NO: 362708 - DNA, 1150 bp, Homo Sapiens
gggtccggaattcccgggattccagcaggacccattgagcagaaggaggccaggtgggaaagctcctgggaagagcagccagactggacactgggctgcttgagtcctgagtcacaattcagaattcctgggctccctgggtgcattctatcattccagttgaaagtttgcttccttccagtcatgtggctcttcattctactctccttggctctcatttcagatgccatggtcatggatgaaaaggtcaagagaagctttgtgctggacacggcttctgccatctgcaactacaatgcccactacaagaatcaccccaaatactggtgccgaggctatttccgtgactactgcaacatcatcgccttctcccctaacagcaccaatcatgtggccctgagggacacagggaaccagctcattgtcactatgtcctgcctgaccaaagaggacacgggctggtactggtgtggcatccagcgggactttgccagggatgacatggattttacagagctgattgtaactgacgacaaaggaaccctggccaatgacttttggtctgggaaagacctatcaggcaacaaaaccagaagctgcaaggctcccaaagttgtccgcaaggctgaccgctccaggacgtccattctcatcatttgcatactgatcacgggtttgggaatcatctctgtaatcagtcatttgaccaaaaggaggagaagtcaaaggaatagaagggtaggcaacactttgaagcccttctcgcgtgtcctgactccaaaggaaatggctcctactgaacagatgtgactgaagatttttttaatttagttcataaagtgatgctacaacagaataatcaccatgacaactggcccacacctcagagactgattctgatctcccaggaattctgaaggaccctctatccttgacaacaatcatttgcagccaggtagcaacggcggtagtcagaggagctatgatagaccacacccaagcaaggctgccctcaaataacatctcaagatcttagttcttatgcattccatcagtcagaagtgaagaagaggtggagaatctggattggggaccaggaaatcacttgtattttgttagccaataaattcctagccagtgttgaatgaaa

SEQ ID NO: 362709 - DNA, 1582 bp, Homo Sapiens
  misc_feature (1003)..(1082): n is a, c, g, or t
cgtcaacctccaggcatcctccgcggcgggccggaccgggccggcggaggggagcggaagcccaccggggctggcccgccgctgacccgccgcctccgtctgcctcctcccgggctctgggcccagcgcgcccagatgccgggcaggacccctccgcccgctgctggaacaccaatagcagcgttggagcctctgggccggaggaactggggcctccaccgacacctgcttcttccctcacctcgcagccttccacacctgttgatctgacctctgccccgctgccgcccaggagtaacctaaggcttttggcctgattcgagctcactccgtctaaacctctaaatgcggtgcgaaaaaatcctggggaatgtgccatgcaaagcctgggcatttcaagtgcttttctggattcgcatcaactcctctttacaggcatctttatccggaattcagctcgtcccaaaccccacgtggtgtagctctgcttgtgtttttgaatcccggggcctctttgaatcagaagccctttgtatagagataagtatcctttaggccagaatcagcctccatttttttcgcagtcccatttcctacccgtaatactttcttctgattttaaagccatttgatagagaagggacagggaacagaaccttcgccccccgcctgagcagctggtagactagatatcttccaaacattatctcatttactttccctgggagttacaaataggtagatttcatgtccgttgaggggtgagaaagctgaaactttgagacttaagaatcctggccgaggtcagcctcctccgaagcttcatctcttgccaccactttctggtgcacacctaggacagatttcaatccctgagatcccaggatgaaacctatgtttgccaaataccagctactgtgccagaagagatcatggaaccaggtgtggaaagctgcttgagaagaggagccgaaaaatcatagttgaaccgtcctggaatagnnnnnnnnnnnnnnnnnnnnnnnnnnnnnnnnnnnnnnnnnnnnnnnnnnnnnnnnnnnnnnnnnnnnnnnnnnnnnnnnagtccacaatgccagagaattaaagagaaccacaaagctgaacctcataaaagttagcctggcgaggggaggatgatgagatttcccctgttgtcacataaacaaggaagtaaagggggccccttgtgctctcagaactccaagcatgaaacgatagcaaagggaaaaacagctaagtgtttcctggctgaattttattttgctttcagtttctgccatttcagttcctgttatcgtgctttgaggtgcactgaactgcagcaaacccaggggatccaaggctacgttgaaaagcctttgaccacagtgcagggagcagaagacattaatgacgtgatgtcgacacagcccgcactcaggatcctccaggaaaagaacacagagataaccccggatcgatggtactttttgaaaatgctttattgcaaaagagtggctagggttttacaagggctatgaagaaacatattaaggttaataaagctttttattgagtgttt

SEQ ID NO: 362710 - DNA, 623 bp, Homo Sapiens
  misc_feature (40)..(40): n is a, c, g, or t
  misc_feature (61)..(61): n is a, c, g, or t
atcatgcagaggctgagcgacgggcgggacctggtcagcntgggccaggctgccccgaccntgcacgtgctcagcgaagaccggctgctgtggaagaaactctgccagtaccacttctccgagcggcagatccgcaaacgattaattctgtcagacaaagggcagctggattggaagaagatgtatttcaaacttgtccgatgttacccaaggaaagagcagtatggagatacccttcagctctgcaaacactgtcacatcctttcctggaagggcactgaccatccgtgcactgccaataacccagagagctgctccgtttcactttcaccccaggactttatcaacttgttcaagttctgaatcccagcacatgacaacacttcagaagggtccccctgctgactggagagctgggaatatggcatttggacacttcatttgtaaatagtgtacattttaaacattggctcgaaacttcagagataagtcatggagaggacattggaggggagaaatgcagttgctgactgggaatttaagaatgtgaacttctcactagaattggtatggaaaagcaaaatactgtaaataaactttttttctaacaatttgcaaaaaaa

SEQ ID NO: 362711 - DNA, 476 bp, Homo Sapiens
  misc_feature (69)..(69): n is a, c, g, or t
actacaaagatgagaaattaccagaagcctcgccttttcctaagcaccaacggaaggaactgtgccccnggaatgaaataaagggtggagggcgcgtcagccacgggtgggccttgtgtcgccttgtatcggcccaggtaggttgttggcctcttacttgggctgacctgacccccgaaagagaaacagacaactctgttctcaggattggggatggacggcttcggccaagcgttttagcctcattcactcaggccccactcagcactctgccagccaagaccattgatttggaaaatccggtccccacccgctaatgagctgttgacactgttgttccttgctgaattggattgttgacttgtagttcagaggcgtacaactagttggcgattagacttgttatgtgatgttaccagcctgaaatgcgatcaccccgtaggaaataaagcaggcatctctggacctcatccaaa

SEQ ID NO: 362712 - DNA, 608 bp, Homo Sapiens
agaacgtctctaacatgatttaccattttaaacagccttataagttttgtctcttaaaatccatgctgcagaaggagggggtaaaagtcgtggtctgcccctgtctgtggcaattgaagtcccccgctaaggtaagaaaccaatgcttagatcttgcttcccaggcagcagcttgaattcccgaatcttcctgcaaggtgcatacaaatgcagcgttagaatccatacacgtaatccatattcaccttcccatccatcccgcagaagaggcatggtgacacccaggctactgtccatgcttgagaggacgtatttgaaggttctgttactacaagttgggaatattcacggacatgcctgaataccccggctgtaactcacacgtggtctgtgtaagtggattaacctcggggcggccttgtttaatcctgaataatatctgaaagactgagtttacttgggaatgtgtagtttttctaatgcacattaaaatttattttagctgttaaaaataaaatcattttattatcagcagactcttttatactttatggggcatctacatactacttccgccactcttcataataaaattatttgtaaaatat

SEQ ID NO: 362713 - DNA, 495 bp, Homo Sapiens
gcggccgccggagttcactcccgacgcatttccatagcgtggggagaggctgtgtgagctgaattaggaagtggggcagccagctgcaacttacgacaatatttgtgatcggaagagggcagccacatggatctttccctcctctcccttcctttctggttaaacgtaaaaaacagccgagtgcaaagggaagggctcaggccggcgcaggctgctccccggcgcggcatttccccggcgctggccgcggccccggcgggcccccgtctgggtgctcgccttccctggattccacacatttcagcgagcctcgtaaacacaatgaacccggcagctccgcagactcgcaccgcgaatttaaggtggcaatttgtttacaacttttcctcccccgaccaggccctaaggagaggcggctccaaaaccgggaaaaccggggggaatatctttttccgagaataattttttaagggagcagagatttcatgctcaaca

SEQ ID NO: 362714 - DNA, 541 bp, Homo Sapiens
  misc_feature (206)..(236): n is a, c, g, or t
tccatgatgcagattgagtttaatgaacaaaaatctctgtataaaaaacatttaaaccttatcaaatgctttaaacacacacacacaaatccaaatccaatacacaatcttagaacattatctttgtgtacctcaacataacctgtaaaagtatttctagataaaactttacaagtgaagaaagaaaacccatgatgttacacttnnnnnnnnnnnnnnnnnnnnnnnnnnnnnnnatcattcttaaggaagaacaaaaacatggtaagagtgtgaacaggaagggaatgcatctttttttgtaaagcttatattaaaaaacacagcatgagtaaaataacttcctatgccaagagaagatgcagagagaggaaacagaaagcagggatgagactaactcattaataaatagtttgagaatgtcattcaagaacagtaaatttggggagttacagataatccccagttgtcaccacctcaaattctttgattccgataactaatgacacttaaaaagcatctatgtgttcatttcttgtag

SEQ ID NO: 362715 - DNA, 565 bp, Homo Sapiens
tctaccaaagattcttgctctttgaagatatgttgtcaagatgtggcaatccagccagggacatttccctactcccagcatctctgtgagaacatatgactaagtcgtaggcggtgaaatgtgggcataggaatccaggcttgccccataaacatttcttgcatgatcctccattctcttctcccagctgctggttggacggtcgtatccaggataagtttggaagccaccgaagatggcaaagattgtcagtctggttctttgaatgaccgtgaggactaagtcttcctttcagtaactccactctgcccctagctaattggactttatatgagcactttcttctcttcttcccccgactgtccatctgctcttccaccaaggtgttagtggagagttgaccttgtgtctgaggatctctgcctgccgttttcttaatgtaggcccgtggttcttaaagtgtgtggtcctggaccagcagcattggtatcacttggggacttactagaaataaaagttttagtataatccgtaggttcagaaaaataaaaaataaatgagggtt

SEQ ID NO: 362716 - DNA, 276 bp, Homo Sapiens
  misc_feature (14)..(14): n is a, c, g, or t
  misc_feature (94)..(94): n is a, c, g, or t
cttgcatgtttaanaaaaaagttgattgcttcaaatttctgctactaacttcaagctatgggagtttggcagtagtcacttgaggattttttcnccaattcttttctttttgttgttaaagctgtacttcagtgaacagaaaaattgccaagcaaactaatggctataaaagcgtaatttgcatgtgtgggcataaactacagagcctcattgccatgaggtattgtacaaagttttaatacattttgtaaataaaattgtaaagaaagaaaaaaa

SEQ ID NO: 362717 - DNA, 323 bp, Homo Sapiens
ccagagacccggcctgcccaggaagagcagtctctgctcttgtgtgggtccctctgcccccaccctgcccagggctccccagcagcctgaggcccctaaggaagaacagccctcaatggtgattctattggtgttatgaagttgtgtcccccaaagagatatatcagtgtccctgaccccacagtaccctcagaatgtgactgccatttggagatagggttccttccaggggtaacccaaggtagaatgaggtcgttagtgtgggccctaatcccaatatgacggctatccttataaaaagaggaacatttaggctggataca

SEQ ID NO: 362718 - DNA, 413 bp, Homo Sapiens
ggtttaacgtgattttattattcttagatacattttagttattttatatagataaaaatatacaatattgcttttcaaacttttaattttataactgtataactgattgtcatcatattcatgattaaaaagcctattttccactaaacaatttatccagtaacatgtggaagagagtaacaaaaatggtttatgtaagacttataataaaaggtttaaatgtaaaaatagagtattaatctagacctctggtctaaatccttagatacctcatgctggaaacaaattatgaaatgtttcagacaaattttttccaacacttaaattgattctacaggtttaaagttttgactgaaaatacacagaactcagagatattttgaccgaagccatttttatatacattaacttac

SEQ ID NO: 362719 - DNA, 469 bp, Homo Sapiens
gctgcaggtcagactctctggcacggcaaatccaaattccttcaggacgggttcacagcgtctcttgactgaaagacacatgccgccgcatgggccaatggggatgttgatcttctctgtgcacattggcacataaacagaacaaaggaagaactggaaaagtaacaaaatgaacacacacaaaaaaaacaatgacttggaagtttgaccaaatgctcccacaaagctgagttgaatgcttccaggcaatctaggtatctacttttaaaccaacctatcgggagtctgtctgtttactctgacctcaaacaagggcgcctgataatccatcacttacatacttttcttagtttggctttagtaatcctttccagaagaatgtacataaataaataaataaaataaatagggtctgaagaattgcataagccctctttgcacaacacttgaaataaatcttaaaaaactg

SEQ ID NO: 362720 - DNA, 507 bp, Homo Sapiens
atgggacctaaccactcataactggaaattcatgtgttctacaaccatgtagcaaagggccagcgtctccaccaactcctgagaactcgtttcaaggaactcgatgtttccggggaccaagcccgcccagggttcagaccgtgactccgcccccgggagaggcggaggagggaggtccgggccccggctcgcgccaactccgcccacgcagcccccggcgcggcccaagacgccgccgggccccgggtccgagcgctttccctcttccgggccatccgcccgcccctgcgccggctccggccctggccctggccctggcagcgcgcgagcggccccggggcggcgccaaagtcgacccaacaaactcccgcaaactccagcgcgagtggcagcgccaggcccggcccgcgaacgcagcggcgacagtccgcgggccgcaccagccccgacccgggccaggccgccgcccctccccccgccgcgtggcgccaacaaaaggcggccccg

SEQ ID NO: 362721 - DNA, 495 bp, Homo Sapiens
  misc_feature (395)..(395): n is a, c, g, or t
gcggccgccgaggagggcctgcgcgagctgcagcgcagccggcggctctgccacgaggacgtggaggcgctggccgccatctacgaggagaaggaggcctggtaccgcgaggagagcgacagcctgggccaggacctgcggaggctacggcaggagctgctcaagaccgaggcgctcaagcggcaggcgcaggaggaggccaagggcgcgctgctggggaccagcggcctcaagcgccgcttcagccgcctggagaaccgctacgaggcgctggccaagcaagtagcctccgagatgcgcttcgtgcaggacctcgtgcgcgccctggagcaggagaagctgcagggcgtggagtgcgggctgcgctaggcgcagtggggtgggccaggccccangacagccggagctcggcctgcggtgggggggcttttctgtgtgaacttttgcctttcctatcgcccggttgcctgtcccttgcccagcgccccccaggct

SEQ ID NO: 362722 - DNA, 975 bp, Homo Sapiens
ggagcgaggcctgggtggcgaattcggcacgaggcatgaatggggggtgacctgaagttccacatctacaacatgggcaaccctggcttcgaggaggagcgggccttgttttatgcggcagagatcctctgcggcttagaagacctccaccgtgagaacaccgtctaccgagatctgaaacctgaaaacatcctgttagatgattatggccacattaggatctcagacctgggcttggctgtgaagatccccgagggagacctgatccgcggccgggtgggcactgttggctacatggctccagaggtcctgaacaaccagaggtacggcctgagccccgactactggggccttggctgcctcatctatgagatgatcgagggccagtcgccgttccgcggccgcaaggagaaggtgaagcgggaggaggtggaccgccgggtcctggagacggaggaggtgtactcccacaagttctccgaggaggccaagtccatctgcaagatgctgctcacgaaagatgcgaagcagaggctgggctgccaggaggagggggctgcagaggtcaagagacaccccttcttcaggaacatgaacttcaagcgcttagaagccgggatgttggaccctcccttcgttccagacccccgcgctgtgtactgtaaggacgtgctggacatcgagcagttctccactgtgaagggcgtcaatctggaccacacagacgacgacttctactccaagttctccacgggctctgtgtccatcccatggcaaaacgagatgatagaaacagaatgctttaagggaactgaacgtgtttggaccctaatggtaccctcccgcccagatctgaacagaaaacaccctccggaaccgcccaagaaagggctgctccagagactctccagcggcagcatcagaacaattccagagttcgccagctcccagacagtttacccccccctaactcaa

SEQ ID NO: 362723 - DNA, 1183 bp, Homo Sapiens
  misc_feature (950)..(950): n is a, c, g, or t
  misc_feature (1098)..(1098): n is a, c, g, or t
aaagagcgaggcctgggtggcgaattcggcacgaggtgaagacctccgaaggaccatagacagagattactgcagtttatgtgacaagcagccaatcgggaggctgcttttccggcagttttgtgaaaccaggcctgggctggagtgttacattcagttcctggactccgtggcagaatatgaagttactccagatgaaaaactgggagagaaagggaaggaaattatgaccaagtacctcaccccaaagtcccctgttttcatagcccaagttggccaagacctggtctcccagacggaggagaagctcctacagaagccgtgcaaagaactcttttctgcctgtgcacagtctgtccacgagtacctgaggggagaaccattccacgaatatctggacagcatgttttttgaccgctttctccagtggaagtggttggaaaggcaaccggtgaccaaaaacactttcaggcagtatcgagtgctaggaaaagggggcttcggggaggtctgtgcctgccaggttcgggccacgggtaaaatgtatgcctgcaagcgcttggagaagaagaggatcaaaaagaggaaaggggagtccatggccctcaatgagaagcagatcctcgagaaggtcaacagtcagtttgtggtcaacctggcctatgcctacgagaccaaggatgcactgtgcttggtcctgaccatcatgaatgggggtgacctgaagttccacatctacaacatgggcaaccctggcttcgaggaggagcgggccttgttttatgcggcagagatcctctgcggctttagaagacctccaccgtgagaacaccgtctaccgagatctgaaacctgaaaacatcctggttagatgattatggccacattaggatctcagacctgggcttggctgtgaagatccccgagggagacctgatccgcggccgggntgggcactgttggctacatggctccagaggtccctgaacaaccagaggtaacggcctgagcccccgactactggggccttgggctgccctcatctatgagatgatcgagggccagtcgccgttccgcggccgcaaggagaaagtgaanccgggaggaggtgggaccgcccgggtctggggaaaaacggagggaggtgtacttcccacaagttcttccgaagagggcaaagtcc

SEQ ID NO: 362724 - DNA, 494 bp, Homo Sapiens
tgcataacagtggattccatgaaaggagtcattttagtgatgagctgccagtccattcccaggccaggctgtcgctggccatccattcagtcgattcagtcataggcgaatctgttctgcccgaggcttgtggtcaagcaaaaattcagccctgaaatcaggcacatctgttcgttggactaaacccacaggttagttcagtcaaagcaggcaacccccttgtgggcactgaccctgccactggggtcatggcggttgtggcagctggggaggtttggccccaacagccctcctgtgcctgcttccctgtgtgtcggggtcctccagggagctgacccagaggtggaggccacggaggcagggtctctggggactgtcggggggtacagagggagaaggctctgcaagagctccctggcaatacccccttgtgtaattgctttgtgtgcgacagggaggaagtttcaataaagcagcaacaagcttcaaaaaaa

SEQ ID NO: 362725 - DNA, 752 bp, Homo Sapiens
atcagatgaattgataaaagagttccctgcaaccaattgaaaagtgttctgtgcgtctgttttgtgtctggtgcagaatatgacaatctaccaactgtccctttgtttgaagttggtttagctttggaaagttactgtaaatgccttgcttgtatgatcgtccctggtcacccgactgtggaatttgcaccatcatgtttcagtgaagatgctgtaaataggttcagattttactgtctatggatttggggtgttacagtagccttattcacctttttaataaaaatacacatgaaaacaagaaagaaatggcttgtcttacccagattgtgtacatagagcaatgttggttttttataaagtctaagcaagatgttttgtataaaatctgaattttgcaatgtatttagctacagcttgtttaacggcagtgtcattcccctttgcactgtaatgaggaaaaaatggtataaaaggttgcccaaaatgctgcatatttgtgccgtaaatatgtaccatgaatatttatttaaaatttcgttgtccaatttgtaagtaacacagtattatgcctgagttataaatatttttttctttctttgttttattttaatagcctgtcataggttttaaatctgctttagtttcacattgcagttagccccagaaaatgaaatccgtgaagtcacattccacatctgtttcaaactgaatttgttcttaaaaaaataaaatatttttttcctatggaa

SEQ ID NO: 362726 - DNA, 850 bp, Homo Sapiens
gcggccgcgccagtctcgcttcaagacgcagccggtgaccttcgacgagatccaggaggtggaggaggagggggtgtcccccatggaggaggagaaggccaagaagtcgttcctgcagagcctggagtgcctgcgccgcagcacgcagagcctgtcgctgcagcgggagcagctcagcagctgcaaactgaggaacagcctggactccagcgactccgactcggccctgtaaggggcgccgcccgcggggcggacgcgcgcgtccgcggtccgcgcggggaccggcgtgtgaaccccgagagtgcccgcgccctgctcccgggggacccgcaaggacccgggaccgccgctcctcgcgcgctcggactcccgccccgctgcgaaccggtcggtgcgcccctcgccgcgctcgccctggcccgggagcgccgggagcggggccgctttcctcgtccttgtaaatgtttattttttaactcttcccagtgcgaactctgctgtgagtgtgtgcggggaggcgcgcccgcgctgagtcggcggcgggtagccactccatgcccttgtccgatggtttgcaactccgattttgcacaccgctccaccgtgccccccagcgcacacccattcacactcacgccaacactctcgctgaacacttttataattgttaggcgtggccgttgggactttgggcgcagcgcggctgctactgcgtctggaggattgatatttatttttgcattgcgatggctgaaggcatttatttaacgatctttttacctggatatgtctgtgaggctcctgaaaggagacaaataaagtcatatacgtcggacgtatattcgcacgg

SEQ ID NO: 362727 - DNA, 571 bp, Homo Sapiens
  misc_feature (233)..(287): n is a, c, g, or t
gcggccgcgccagtctcgcttcaagacgcagccggtgaccttcgacgagatccaggaggtggaggaggagggggtgtcccccatggaggaggagaaggccaagaagtcgttcctgcagagcctggagtgcctgcgccgcagcacgcagagcctgtcgctgcagcgggagcagctcagcagctgcaaactgaggaacagcctggactccagcgactccgactcggccctgtaannnnnnnnnnnnnnnnnnnnnnnnnnnnnnnnnnnnnnnnnnnnnnnnnnnnnnntgtgaaccccgagagtgcccgcgccctgctcccgggggacccgcaaggacccgggaccgccgctcctcgcgcgctcggactcccgccccgctgcgaaccggtcggtgcgcccctcgccgcgctcgccctggcccgggagcgccgggagcggggccgctttcctcgtccttgtaaatgtttattttttaactcttcccagtgcgaactctgctgtgagtgtgtgcggggaggcgcgcccgcgctgagtcggcggcgggtagccactccatgcccttgtccgatgg

SEQ ID NO: 362728 - DNA, 437 bp, Homo Sapiens
  misc_feature (202)..(364): n is a, c, g, or t
tttagtgtacacatgtatctcctggagtggcattgcctcggcagtgagcacttatggttttataactctcttcacagactcaaatgactccagaaagctacacttcctgttgtgagtatatgatatccatttccctacatagccactaacatcaggtttttacaattttatttatttcttgctactttaagaaatttttgtnnnnnnnnnnnnnnnnnnnnnnnnnnnnnnnnnnnnnnnnnnnnnnnnnnnnnnnnnnnnnnnnnnnnnnnnnnnnnnnnnnnnnnnnnnnnnnnnnnnnnnnnnnnnnnnnnnnnnnnnnnnnnnnnnnnnnnnnnnnnnnnnnnnnnnnnnnnnnnnnnnncagcctcagcaaccccattttactttctgttcctgtaagtttgctattaaaatacattaaactataaaaaaaa

SEQ ID NO: 362729 - DNA, 475 bp, Homo Sapiens
tggtagttgcacctctggacacttatcccaaagcaatgaaaacttaggtctgcacagaaacccttacataattgttcatagcagctttatttgcaatagtggaaaactggaaagagcccagatgtccttcaacaggtgagttgttaaacaagccagtacatccacaccatggaatactactcagcaacaagaaggaataaactcttgataaacccaacaacttggatggatctcaagggcattatgctgagtgaaaaagcccattttgacctaaagggtgtaattgcctttatataacattcttgaaaggacaaaatttttggagaccagattagtggttgccaggaattagggatggtagggagaagagggtgtaggtgtgactataaaggcattgctcaagggagatctttgaccacagttgtggtcaccctgatctacctacgtgatgaaatgacattgaactatacacact

SEQ ID NO: 362730 - DNA, 1251 bp, Homo Sapiens
  misc_feature (1177)..(1185): n is a, c, g, or t
ccatacggctaggtacgaggctgggtgtgtaattcggcacgaggcaggcacaacacagcttaacacaaggccccgcaggcaggactctgggacagacgcaggccagctgcccagagcccagaccaagcatggacgccgtggatgccaccatggagaaactccgggcacagtgcctgtcccgcggggcctcgggcatccagggcctggccaggtttttccgccaactagaccgggacgggagcagatccctggacgctgatgagttccggcagggtctggccaaactcgggctggtgctggaccaggcggaggcagagggtgtgtgcaggaagtgggaccgcaatggcagcgggacgctggatctggaggagttccttcgggcgctgcggccccccatgtcccaggcccgggaggctgtcatcgcagctgcatttgccaagctggaccgcagtggggacggcgtcgtgacggtggacgacctccgcggggtgtacagtggccgtgcccaccccaaggtgcgcagtggggagtggaccgaggacgaggtgctgcgccgcttcctggacaacttcgactcctctgagaaggacgggcaggtcacactggcggaattccaggactactacagcggcgtgagtgcctccatgaacacggatgaggagttcgtggccatgatgaccagtgcctggcagctgtgagcagctccggctcagccctgctgccctggcctgtcactccccaaccctgccggagacctcccttccctgggccccttctctcctgggcagccacaccacagagcggggaggggcaggtgggggaatggaggctgcaggactggctagaccaggtccctgccggtccaccaggcggaggtgggacaaaggtcctaacaggagtcactggctcaggaccccagggagaaacgctctccccacccacgccatgctgaccagaggtcttgcagcccctgtggatgcccccgccgaggtcccccgatccccgcacccggactgctgctccctgcccctcccttgcgggtcccccaggaagccaggtgaccccaggtgggaggctgtgtgtggaggccatcctggaaggaagtttagacctgcccaggtgtggagcgaggggcacaggggcatcctaacctcagaaactgaaataaagcctttgnnnnnnnnntctgtaaaacatcaacccccaatcagaagatggcaaatggggaataaaaatagcaggtaacacgtc

SEQ ID NO: 362731 - DNA, 434 bp, Homo Sapiens
gaagccatattccacacataaaaagttgtatcccccttaatacaaactgttttgaggctcttaccgtagtcgaaggtatccttagatcttcccttagtgatctcattaagaatatccgaaagtgtataaccctcttcaacaatctgaaacaaagatcagatccttaagagctgagcagctgtgtaacaacagcataagaatttctttgttgtaaatttaccttttcaattgtctttgcatcagctccttgcagccgcaaccagtctataagctctttatctgttctctgccgtaggggcctgctgggttctctgtaatacctgtaacgattggcaatttgttatatattagtctaaccataaaactcttcaaaagtaacccagttggattaataaatgatttccagaatgtaaatgtgatgtgaaaaagagatg

SEQ ID NO: 362732 - DNA, 228 bp, Homo Sapiens
ccagaaataatgttttttaaaagacaaaaacaaagggaagaatatttaattactgagcagaagtaaatactgttggtattttgtacataatctaatttttatatgcatgttcatgctttttaatttttttatcaaaaattaagtcatctacctactacttgtaaccagcttgtttcatagacatgttattttcctgtgtcattaaataattacttcaatgttgtaaaa

SEQ ID NO: 362733 - DNA, 351 bp, Homo Sapiens
  misc_feature (31)..(31): n is a, c, g, or t
gctcccagcctctgcccatgcaggtgccctntgccctcagcactgcctttctctacttcatttatagactgctgtccgtcagatctcggttgaagtgtcacttccttggggaagctggcttacactctcaggactcggttaggttcccccgtcaggctcttctatgtcaccatgtttctatttttcacagcacttacctgttttaattacgttgcaaatagtttttgtttgggtctaaagaagcatgtattcactagtacattttatttgtgttctctaattattttttctgcagctaaattagaaatttgtagttttccccctaaaaatgcaatgatgttttctctgaaa

SEQ ID NO: 362734 - DNA, 693 bp, Homo Sapiens
gcactctaccccttctgttcggctatcccctagctcaactcttcagaactacccttcctcatctgtgcctgtctgtccaacccctcccccacgtctctctgcctgctgggctcttaactgttgctcgaagactgtgacatcagaagtaactcccactcctaatcaagagtctctccagcctcacagatgctggcctcttggcacctgcctagctcttgggcctgacctccagtcctgctggcctgctcttacttcccccaccctgggtttggcccctggaacctttcccttgtgtgtaccacaccctgcctgctgtggagcccattgtggaggcggtgggggggagaaggcctcccctgaggatcccctgtcccctggggctggtggattgggcagaatcctgggcccccagagacctttgcccacacacactccttccccttgtccctggggcactcccccaggattgtgcaatagtcagagtgtccctttttgcaggggactgggccatgggtcctcggcccatctgtccatcctcctctccatgcaagtgctgtttgggcaggagtcaccatgcaagggtgacatcgacaaccacgtaccaagccaccgcagctgctgccactctgctgcctgtacagaagaaactgaatctttttcatattctaataaatcaatgtgagtttttaatag

SEQ ID NO: 362735 - DNA, 590 bp, Homo Sapiens
tcctactacgttgccctgggtgctgtagagccccatctgactcaccagatttacactctagacatccacagacctgaggattgttggaataaatttatctccaaccgaacactgggactaatagtttttttagggattgtccttgggaatttgtggaaagaaaagaagacagacaaaacaaagaagggtatagagaataaaatagaaaattaatgaatgaaatttatctaggaatttttaaaacattttttacaaaatataattagatttgaatacaaaatctgatacaatatgttaaagaattaagaacctgaagatgaagatttagagcatatttacctggattttacttatttgctagcaaaattcccccttgtcacagaaaccagggactcttcaggatttgagatggccttgagtattttagttgatacattcttctgcccattataattctcacctgaagttatggggattgcacgggttttggcactttagaaaaagcctgatgtgggtcttacataaatgaatgtctgtataagaaaatggactcttttttttagggaaaaataaaagcaactatggcaaaa

SEQ ID NO: 362736 - DNA, 951 bp, Homo Sapiens
tacactactcccccacgaatgagacggcagcgttctgcccctgacctcaaggagagtggggcagctgtgtgagtcccacatcctgggcagagggcctggttggggccccttgctaggagaagggaagacgcccgagacgctgcttccccagaagtgctggggcagggaggcccaggagatgagagagaaggtccgagtaggtgatagaagacaagggggagaccgagccggaggctgaggaaaggaagagggcacggagttgccaggagcaaaccaaagtgaagagagagataggaagctgcctcggggccaccccttgcaaagggggtgtgtcccacaaacgctgctatgggtggggtggggggctggggtgctgcgtagccagtgtttgactttcttttcaagtgggggaaagtgggagaggactgagagtgaggcaagttctccccagcccctgtccgtctgtctgtctctgtctgtggtggtttctgtttcttgggaggcatggtaggatcataagtcattcccctccccttccaggcctcctgctatatttgggggacctgactggtttggctggagtcccatgaggatgtgggccctttaataaaggatagcaaacagggagcttgtggactgtgttagggttacatggaggtgtaggttatataaggcaatggcacaggtcttaagcatacttatcagtgcaagtatgtatgtgtgctctgtgcaggcaccacccagatctggatataacaatgtttccatcttgtcttcctgaacttcaccctcctgtctctttccttcagggtgcgcagcccgatctttcccccgctcttatcttggaagacagggctatatgcttagttgcccaccgctgagaggtacagtcttggctccaaccgcagcctccgcctacctgagtactgggcataacaaggcatgtgcacc

SEQ ID NO: 362737 - DNA, 886 bp, Homo Sapiens
ggggagggcgggactggactcggcttgggcgtgagatggcggcggcagcggtgagcagcgccaagcggagcctgcggggagagctgaagcagcgtctgcgggcgatgagtgccgaggagcggctacgccagtcccgcgtactgagccagaaggtgattgcccacagtgagtatcaaaagtccaaaagaatttccatctttctgagcatgcaagatgaaattgagacagaagagatcatcaaggacattttccaacgaggcaaaatctgcttcatccctcggtaccggttccagagcaatcacatggatatggtgagaatagaatcaccagaggaaatttctttacttcccaaaacatcctggaatatccctcagcctggtgagggtgatgttcgggaggaggccttgtccacagggggacttgatctcatcttcatgccaggccttgggtttgacaaacatggcaaccgactggggaggggcaagggctactatgatgcctatctgaagcgctgtttgcagcatcaggaagtgaagccctacaccctggcgttggctttcaaagaacagatttgcctccaggtcccagtgaatgaaaacgacatgaaggtagatgaagtcctttacgaagactcgtcaacagcttaaatctggattactacagccaaataatcagtgttttatatgagagtaaagcaaagtatgtgtatttttcccttgtcaaaaattagttgaaattgttcattaatgtgaatacagactgcattttaaaattgtaattatgaaataccttatataaaaccatctttaaaaaccaatagaagtgtgaatagtagaatattaattaaaatggagctatcagcctgtgattttcagcttaaaaaaaa

SEQ ID NO: 362738 - DNA, 840 bp, Homo Sapiens
  misc_feature (45)..(45): n is a, c, g, or t
tcctggctcctgagccatttcctgaaacccctgtaagaaggtggnattggcgtgacttgcttgagcaagagccctggggagagattttgaggtttaatttaacggtatacccagagctaacagtgactcaactcgtctagttctgcaagtcagatgtacacttagagtctctctgtgaagggtttgggtctgagctgtatagtatgtcaaactgccagtaagccagcccctcaccctctgatagatattcctttaatgcaccagacttcatgtttgataaatgattaatggttgaaattgtttctcttcttttgtgttttcccagttaatagatggtcactgtttccacaatgttttatactttcagctttttgtaacttaactataattacttaattttatttttttaaagcttgttgtggtctaatgagaagtatttttcagtgcataatgtttttctgagcttctgtaaatgccatcccaatgtggtttggttttgttgaacagaaaccaaaataaatttcaaaatgttaaagcaagaccaaccacctttccatccaccaaaccttgtcgggcccgcctcggcccctccaaaaactttctagacccatttcgttttggccgcgcgggccccattaggtaacctggaccttggcccttacctgttttcctagggagatccctggccttggccaaagggctttggatttctcccccactaaaaaaacgcccgggcggcaaaccgaggggtttcctgaacaattccccaaaaggggttttcgaagggccctttccggggcacttaccccaacgggaaatccaaatccgacctctaattat

SEQ ID NO: 362739 - DNA, 980 bp, Homo Sapiens
caggaggagggagaggacagagccactgcagaggaccagactgggaaaacaacgatatggcaggagccagtcttggggcccgcttctaccggcagatcaaaagacatccggggatcatcccgatgatcggcttaatctgcctgggcatgggcagcgctgcgctttacttgctgcgactcgcccttcgcagccccgacgtctgctgggacagaaagaacaacccggagccctggaaccgcctgagccccaatgaccaatacaagttccttgcagtttccactgactataagaagctgaagaaggaccggccagacttctaagccaggctgggctgccagtgccatgcaagccacagccagccagcccatccacttcttccactcctccccgcaggccccaaggcatcactccggccaccctgtcccgctactgcttacacaggccgggttcccacgcagaggggaggctgctccacccctactctcctcccttgctcccagcagcggaagcgcctctgacccttggcttgagtcccacgtgggggaggaggaggcaggcagcaccagcaggggtccaccaagagcccagaccagcccctctgccctcctacccgggcctcgaagggtgtggcacaggctacgtgttgagcgtggcctacgtgagccaacaagaagcaggggcctctgagtgccaagcgacgtggcgggctccacgttagcccaggctctgagagccagccaggggcggcgctgctcagcttgggctggtccagggcctgcccaggctggggcacctttgcctcctgaggcgcagcgcactcctcccctgcccaagcctactgcctcccgctgccgccagtaccccctccagccccacacctgggcctccccctgccactcccctcccttgctcccctctgtccccagggatcaaacagaagcagccgtgggcaaaatacaatttcatttaacaaattgaaa

SEQ ID NO: 362740 - DNA, 818 bp, Homo Sapiens
aatgttgaaccaaacctccctgctaatctccatgcccacgttcttgcccaccctgttcccagtcttctgacaaactgtgtacatagcggactcctcctttctcctccgaggtggttttaaaggctttttggtgtatagaagtttgtccatttgtaaaactccggattgcgttcctccccgccttccgccccttcccttccctaaagtgatgggctttctcttttctctttttagtttacccggtttctttttaagtaatgtggaagaaaatggtttattttgtattgtggtattgaatattgtgttcctttttatgaggcaacctgattgtaaacttcatgtaactatagactggaaaaaatgagccgtgccaaagtctcccttctgtttcttcagcacattgacccatagcacacacatacacaccaccaccaacaacgcttgtgaatgtatttttctgttagctgggtttacatgtgatgttttagtgcttttgcaagttcaatttgttaggtcctgtatgaaagattgtgggggaaaaataaacgtcgtgccgttagctttttccgtaataacacccttccttctgtaaatacccgttaccatatttatccatttgtaattaaattatggtattaacttgctacagaggaaacaatatttataaagaatgtttcttaactataaatatgtacaattgtgggcataaactgtttcagattttttatttgaaggttttaagtggtttgatcatttcttgtgatgttttgagagtaatgcatacagaaatataataaaatgtgttgaaactgaaaaaa

SEQ ID NO: 362741 - DNA, 442 bp, Homo Sapiens
  misc_feature (19)..(19): n is a, c, g, or t
ccagcacatggaccccaangcacacacatacacacccacccacccaacaacgcctgtgaaatgtatttttcctgttaagcctgggtttaacatgtggatgttttagtgcttttgccaagttccaatttgttagttccctgtatgaaagattgtgggggaaaaataaacgtcgtgccgttagctttttccgtaataacacccttccttctgtaaatacccgttaccatatttatccatttgtaattaaattatggtattaacttgctacagaggaaacaatatttataaagaatgtttcttaactataaatatgtacaattgtgggcataaactgtttcagattttttatttgaaggttttaagtggtttgatcatttcttgtgatgttttgagagtaatgcatacagaaatataataaaatgtgttgaaactgcaaaaaaaa

SEQ ID NO: 362742 - DNA, 562 bp, Homo Sapiens
actcctggatttcagcagaaagtgttccatatcaatcagccagctgaattcattgaggaccagtcaattctaaacttgaccttcagtgactgtaagggaaacgacaagctacgctatgaggtctcaagcccatacttcaaggtgaacagcgatggcggcttagttgctctgagaaacataactgcagtgggcaaaactctgttcgtccatgcacggaccccccatgcggaagatatggcagaactcgtgattgtcggggggaaagacatccagggctccttgcaggatatatttaaatttgcaagaacttctcctgtcccaagacaaaagaggtccattgtggtatctcccattttaattccagagaatcagagacagcctttcccaagagatgttggcaagagaacccacaatcctattaacagcgaacttctcttgaatgaaggcattacagcagatttaaatccatgcattacaattttagcaatttaatgaacatcctatttggcgacattattgctttaaaggaataaatcacaaacattttacttcccactaaaaa

SEQ ID NO: 362743 - DNA, 978 bp, Homo Sapiens
  misc_feature (887)..(923): n is a, c, g, or t
tttagggcctttcccgaagatccggtcggttgtcattcctgatcatcacaaggacttcccagaggcaccggcccttcgagatttttgccattgacatcagtggtctccaccaaatagttgataaacagcgattacttctctgtccaaggtccgtgtcacggagacgctccctgtgttctcattgattctgaaaagttcctttaggctctttgatccactccctttccagtgagccggaacttggacctttctggcctgtcactatcgactaccttgccaacatctcttgggaaaggctgtctctgattctctggaattaaaatgggagataccacaatggacctcttttgtcttgggacaggagaagttcttgcaaatttaaatatatcctgcaaggagccctggatgtctttccccccgacaatcacgagttctgccatatcttccgcatggggggtccgtgcatggacgaacagagttttgcccactgcagttatgtttctcagagcaactaagccgccatcgctgttcaccttgaagtatgggctcgagacctcatagcgtagcttgtcgtttcccttacagtcactgaaggtcaagtttagaattgactggtcctcaatgaattcagctggctgattgatatggaacactttctgctgaaatccaggagtgcagtccaaatcttctgcagatgttagcagcagcacctgggacaggagaacgcacagaacgagcggagttctcggctgcattttgtccgactagaagcgcccggcggcgttttcattcatgcacgcggctgcactgagcatattttccgtgggagccaggctttgaggagagccgctctcgacgaattcgagctcggccgatttggcctgatnnnnnnnnnnnnnnnnnnnnnnnnnnnnnnnnnnnnncgccgccccgcgtaagctccattcgcccatagtgatgaatactgccagttgtggg

SEQ ID NO: 362744 - DNA, 916 bp, Homo Sapiens
agcagagctgccaaccagagcctctgatcaacacaggataaccagcaggagagttggtggaattccagacagtgtgaccttcagtgactgtaagggaaacgacaagctacgctatgaggtctcaagcccatacttcaaggtgaacagcgatggcggcttagttgctctgagaaacataactgcagtgggcaaaactctgttcgtccatgcacggaccccccatgcggaagatatggcagaactcgtgattgtcggggggaaagacatccagggctccttgcaggatatatttaaatttgcaagaacttctcctgtcccaagacaaaagaggtccattgtggtatctcccattttaattccagagaatcagagacagcctttcccaagagatgttggcaaggtagtcgatagtgacaggccagaaaggtccaagttccggctcactggaaagggagtggatcaagagcctaaaggaattttcagaatcaatgagaacacagggagcgtctccgtgacacggaccttggacagagaagtaatcgctgtttatcaactatttgtggagaccactgatgtcaatggcaaaactctcgaggggccggtgcctctggaagtcattgtgattgatcagaatgacaaccgaccgatctttcgggaaggcccctacatcggccacgtcatggaagggtcacccacaggcaccacagtgatgcggatgacagctttgatgcgatgaaccagcaccgataatgccctcctggggtataatatccgtcagcagacgcctgacaagcatcttccaacatgttctacatcgatcctgagaaagggacatggtcctggtggtgtcacctggctgctggaccgagagcggaaagattctaattttcaccggacccggttcattctattggac

SEQ ID NO: 362745 - DNA, 839 bp, Homo Sapiens
  misc_feature (755)..(755): n is a, c, g, or t
cactggttctggcctcatttaatgaaattaataacacatgcccctatttctcttttggatgatgtgtgggtgggtgggtactgaggtttcctggccagctgtaaggcagattttgacattcttgtgccagaaacagaaattagagtagtccagttacccagagagctcacttaacattgcctctttacttccccagtactgaaacatttcttcaagtataacataaaattaccgtaacaagcagacccagaatactgaaaataactccatttgttcattataggtatctttatttgaaaagtgaaaaatgctttgacacattacagatctgggtatttggattttgcctatggagtgcatatatgatttcaatgatttacaggctaaatagattttagaaataatcatcttaaaattgaaaacaaaggtaggtcctggtataatattaaacataaagttattaaacattttaagcattgttttttggttctctttcttttgatttctccagatttatgcagttggagtgctttctgctgaggctttagctagagggccacaaaacccaaaaactatatggttaacattttaggtatataacaagcaaggaatgcaaggatgagaaaaaatggagaacatgccgtgatttgcagactctattatatctaaattaagtagctgaatgtcaggcagaaattggtggataaattatttcctgatattggcactatctgctcttttctgtggccttgcantaggtataggccttcttgctttagaaaagccccttttctttcttcatttggaggctgtttccagccaggcagagctgcaaattg

SEQ ID NO: 362746 - DNA, 759 bp, Homo Sapiens
  misc_feature (652)..(652): n is a, c, g, or t
tcgtattaatattgtcacttttgcacactgatgtacatttcctgttgaccaggctcattctttaagcattctccatgcttaaaccagttccataatccctaggcctgtactccagggattgagactgaaaggatcatttatgccatgtttctctaaaagcatcattgctggaagacttttgataagtctgatgtgtctcaagctattctcaggccttttttgtagagtttagaaatgaagtatttgaatcaatttagtatctcctttactatgtttctccttttaatctcagccaaccccctacctgcaggtaaacccagcattcattaagagctgggttggggtactctattcctgtatgcatccataatagccttaacattatttagtagctgtaacttacaggtttaatgctagatgaggatgtctcaagccgtgagtgtgcttgtgtaaaaatggtggcaacatcatctcgttggtaggaattttttacttgaattgttattttgggaaaatgttaacagatttcttctggataaagaaaataaattggatgatgtatattttatgtttcctttttagcttctcttaaaatcagaatattgaacagaattctgatatgctgaatatatatagtgcatggctgaaactnccagcaccaactgggtgcttcaaatgaagtcatagaataattccatctagagctgacagaaatctttcagagccttcattattaaatttgttatagatttagttatc

SEQ ID NO: 362747 - DNA, 556 bp, Homo Sapiens
tttgttgttgttgaagatgaagtgtgttaggtgaaaccaaaaagccaaaaaaagtaatttcatatatagcatctatttgaatataatctttctttaaaatttcttttagcatagcattttcagtgctaagaaagaatctctatgttatattttgttaaaataatggctttctaacaaagcaaatggtaaagtacaaagttggaagatgtcaagttaacgagacttgctgcaaagccttgcagaacggaggaggctctgcctgctggctgtctctccctccaacctctctacaatcatgcctgctttgaggtgttctgttgcagcaagctgcaccttgggtcactcttttggaatattttgactataggctgcgtcacaggcagaaaaggagttgatggaaaatggactaaaaaactgacatgtttgaatcagtgctagagggaacagattgtgaattttgtttacagcatccaatatttggatttttttgtaaataaaaaagttatttttttctattgcaaactcccccccctaaacaataaaaacataccatgtc

SEQ ID NO: 362748 - DNA, 496 bp, Homo Sapiens
tcgaagggatggaaagttcaatgacaatttgtttgccgggggcatttcattaaagcttgataaaaggtgtcaaaatggaatgatacaacatagctcaaaagggtcaggtcagagatactgataagaaaacagtctccagtactgcatataaccaatgccaaagagcactgcacataaccaaagccaaacttaggaagacaatacacacacacactcagtaatctaatgcatgatctgtaaataaatcagccctagaaaactcctcagatgacccccataattaacatttaacaaactaaataatgtttatgattttcctagagtagatatagcttttctttgcaaataacaaactagtatacagcaataattaggcagaaatcatattatgaagatggaaaagcacgaaatcaatgcacttaagatgcacatatagtcgaatattataatacataaaggaaaaatacataggcatgtaatttttattaaagtcatt

SEQ ID NO: 362749 - DNA, 476 bp, Homo Sapiens
ttcatgctcaacccttctgtgccagggatactacccagctattcactcccattctcacagccactcctgtccgagccgaggatgtatgcgccttttccttcccctgtcttgcccagcaacctttcgcggggcatgtctatctatccaggctacatgtccccacatgcaggctacccagctggtggcctcctacggtcccaggtgcctccatttgactctcatgaggttaccgaggttgggttcagctccaatgatgatgaggataaagacgatgatgtgatagaggtcactgggaaatagctagggagcccctccccacctcacttggggcccccagcaggttgcccaccaagctggaaggcagtgatttagaccttttgagaataggacacttggcaggagggaaaaggaagaggacaaaggagggtggttggccaaagtggcagagctctgttgctgtttaacaaaagaggcaa

SEQ ID NO: 362750 - DNA, 518 bp, Homo Sapiens
aatgcagacttgctcttgatagaaatgcttagaaacactctgggggggaaaaaagctccttccatatactgtgagacatttgttaagtgacatctattgtttatcagcttttaaggataaaaaaggtattttaaaagttggatatttaggatatttgaggatattcctttatgagctctccatatccttcttgagaaactggttaaaaaaggaataggggttgagtgttacagagagtagtctgaagattcctgtgtaaaagcaaagctaacaagcaatgaagacatgaagcaaaatactaatctaattgtgtaaagaaaggatattttaataagttctttctgcttgctgctaagagtttgctaaactgtcatgaattattctggttattactaaagtttctatgaaacacttaagtagattttaagaataaatgtttctggaaaagaactatgttatgattttgtagaaatgtaaagattacttgaggtgtttaaaataaatttttcattcagact

SEQ ID NO: 362751 - DNA, 786 bp, Homo Sapiens
  misc_feature (515)..(515): n is a, c, g, or t
  misc_feature (523)..(523): n is a, c, g, or t
  misc_feature (622)..(639): n is a, c, g, or t
caattttgtaagaaacaatatattttatttttctgacaccacagctctggcgagtggttttgtaccaaatttaatggaggttacacagaacgtcttacgcatgggagggggaggaaagggaaggaaccacaaaatttaaaacaaacagaaacaaaatcctggatagcttttagcatctgttccactcccacattaataaaattcacttgggaattcctaataaaaggagaacagaaaacaaggtgggcagggaagggtatgatgggaaagagaaagacttagggggaaaaaagaccagagagcatcccaaggacagacctttccctctcagagccaagaggacgctcggcatggaaggcgaggctttgctagatttatttccccaaaataacactgtgtattgcagctgccaaagggaaagagagagggaagcagagggtcaccagcggggggcacaaaggaaggaaacacttaactgaggagacagagcaaaatcggagagagaaaacaaaaanaaaatgtnccagtgggttggtatattgggagacaagacagtgctgaagagcacttgaactgaaaaacaaatgtcctaagagtcattatttttcaaaagaaaaatctnnnnnnnnnnnnnnnnnntcgctgaacttagttcctttttttgtgcttttcattaatactctgctctgaggtcgtagtttggtttttctatacactgcagttgaaagaaaatagtccaaaggtctgaagatgggttctccacctaaagtaaacagcccaattctc

SEQ ID NO: 362752 - DNA, 1697 bp, Homo Sapiens
  misc_feature (142)..(142): n is a, c, g, or t
  misc_feature (256)..(256): n is a, c, g, or t
  misc_feature (494)..(506): n is a, c, g, or t
  misc_feature (625)..(648): n is a, c, g, or t
  misc_feature (1034)..(1066): n is a, c, g, or t
  misc_feature (1657)..(1657): n is a, c, g, or t
  misc_feature (1668)..(1668): n is a, c, g, or t
  misc_feature (1674)..(1674): n is a, c, g, or t
ccgtgtgcattgtcgtacaaagaaccgtcgctgatgagaacaataatataggggttgtggcgcgagaatgaagacgcgccgtgttgcacgatcgggccggtcttattgcggggtaatcaatctttgtgccacccccgcgctntgccacccgccggcgagtgttccccaccgccccgacatcacggcgatacacaaaagtctcgtttttcggcgggggttcttgcatggtagttcggggcgggctccccgtgttaantcaacatactttcacgctaacgcaagatattttgcatgacccacctattgtggtttttttcaccccccacgacagatagtgggcgaccgttggttatgagcggtgtgggaagagataatcgtatagcgcgccttcgtatttgatccatccgcaaaggagcgcgggttgtttatttgtggaaggagactgtggagttgtcgtagctgggttgggtggaaaacacactaaatgcctcatnnnnnnnnnnnnntttttctcaacccaagttggtgacaatttttaaaccgggggggagacgagtatgtggaaaagaggggtggtgtgggccccgggtttttttctacccagggggaaaggagggagatagcnnnnnnnnnnnnnnnnnnnnnnnnagaatactcctatgggggattccggggttggttcatccccattttttgaggggtctgcggggtcggacataaattcctttattatatgtcggacagttcctggggaaaagtggcaggggcggggggctaacgtaatatcgagattcgtgtggactccctgtttatagatcccagggagggcctcaggactcgcatttggagttgttcgaggaccctgggttgtggcgcgaggcgttttttggttgtgcgggattcaaaccgctggtcatggccaggatttcctagggagcgaggtgtgggccattttccctttccttcgggggcgcgggggccaaatagaatggttttgaaagcttttttgaggtctcgagagcggccgagcaagnnnnnnnnnnnnnnnnnnnnnnnnnnnnnnnnngcgaattgcaaaatctggtttaattaagatctggggaggggagcacatagtgaaaatacatatgcacaggaaccaaatcaatgctagacaatgtattagtttacaatataataggataactacaagtttgaaggctcaaattgagtccatcagctgtaaatacaattttatatttggctcaagtggctgttgaatatcaagtggtgccgagtccctccagagcacctactgaccccctcagccttggaaggagtttcaccacagtctcagaagaaatcccagtcgtgcctttaactcttttggcccttgggagtcattgcaaccccaatacaaatgccggcccagggatttccagtggccacaagttattgcacagagaggtctgttctaagccagactcttacagctaaggaggtgtgagattagcccttaaatactggtctagcattagcatggtctataaaagcatgttaagaaatagcccctcagtgattatggtaccagctactagttatcctactaagagaaaaggcaacatggcagctttcacatttcacatggaaagactagcattactggggcctggcgttnggggcttaatntttggnataaactagggggtatttccccg

SEQ ID NO: 362753 - DNA, 1202 bp, Homo Sapiens
gatgtggttggcaccatgtgaatctcattgtttgggggcagggtgtgaggctggttgccttaaggcaagtccattagttcatgcattagttcttcacaaatacatattgaacacctactatgtgccacagttacacaagtgaacaaaacagacaaaaaccccttccttgctgtcatctgtctctccatgctgagtgtagagacagataatgagcagatagtaactgacagaggaggttggaaggtgataagtgccttggacaaaaatggagcagggtgtgggacctggcatgctgcagagagggctgggtgggtggttacagctgtaaataggttggcctaggtgggccttgttggcaaggtggcttttgagcaaagacctgcaggaagagagggagcaagtgttgtgcagatccagggaaagagcacccctagaggactgtcactctagcatctttgaggactgcgacaggaccgggacagcaggccccttgacagcccctcccacaggatgtgggctctgaggcctaaaccatttccagctgagtttccttcccagactcctcctaccccctaggtgtgcccccttagcctccggaggcgggggctgggcctgtatctcagaagggaggggcacagctacacactcaccaaaggcccccctgcacattgtatctctgatcttgggctgtctgcactgtcacaggtgcacacactcgctcatgctcacactgcccctgctgagatcttccctgggcctctgccctggcctgcttcccagcacacacttctttggcctaagggcttctctctcaggacctctaatttgaccacaaccaacctgggcttcagccacatcagtgggcactggagctggggtgcacatggggcctgctcaccttgcccacacatctccagccagccagggccctgcccagcttcaatttacagacctgactctcctcaccttcccccctgctgtccagagctgaacatagacttgcacttggatgtcacctggagtgtcacatgggagtgttatggcagcatcataccaaggcctactgttgcacatggggccaaaaccagtaaacagcccccttcttggaaagggaatgcaaaggctttgggggtgatggaaaagaccttttacaaatgataccaattaaactgccctggaaagggcataggtgggcaaaaaaa

SEQ ID NO: 362754 - DNA, 435 bp, Homo Sapiens
aaaagtgtgtgcagtgaaacattgtattgtactgagacccagaaattttgttgataggaatattagaaatgctaacatttttctaaccttaaaggaaagaaagaaaataaagtgttcccaaccattggctgttaccagtgcattcacaggaattaatgacaaattttccaaaggctaataagtagttctaaaagcaaaggatttatttcttcaattcatttcatacctaattaaagcataatagtgcccctttatatgaagtatgtttcctacggaaagatcgggcaatgtgctaaaagcatttcattttctagcatgagatgttcttgttttcatggcctgccctttcaaatatggccagaattaaatattgtttaccttgcattttataattatttcctgtacttgatggaataaaactaaaaataaaacatt

SEQ ID NO: 362755 - DNA, 470 bp, Homo Sapiens
  misc_feature (122)..(122): n is a, c, g, or t
  misc_feature (150)..(150): n is a, c, g, or t
  misc_feature (153)..(153): n is a, c, g, or t
  misc_feature (162)..(163): n is a, c, g, or t
  misc_feature (165)..(167): n is a, c, g, or t
ggaccctgacctggccatcttgaggggttatataacccccaggtctcccaggccgaaggtcagccttgagtcccgtttaacagcagatccagaagaccttgagagtaggcgtcctctacccncgggggagagtggctgtgcagggctggnggntggtctgtnnannnacccttcctcaccaccaccccatgcatactcttgggaagcagcttcctgggagattagaaattctacttccctgactggagctaaatcccaccagccaggacccaaactctccttaccgagaaggaccccagctcttgaagggctgagtggcctgctgggggtgggagggtgtctttactatgtcctaggtttcgtagatgcccctctctggggttcccctcctccagcccagcggccctctttcctgtctgtgtaaattgttccgtgaagccgcgctctgttttgggaataaacttctatag

SEQ ID NO: 362756 - DNA, 494 bp, Homo Sapiens
  misc_feature (185)..(235): n is a, c, g, or t
gaaagggttccccaggtccgcgccctcccccctggggcccccggggaaacgcggcagcaagggacctggtctcactgcccccatgtccttgggaggagggacgagaggagagggggagctcacggcaaaggggctggggggcgccccgcccccgcccgctgggctcgggcctggcggtgtccgannnnnnnnnnnnnnnnnnnnnnnnnnnnnnnnnnnnnnnnnnnnnnnnnnntcactcgcccgtgtgggtccgcaggtggtacttgagcgactgcttgtagcggaagcacttggcgcagtgcgtgcaggggtagggccgctcgcccgtgtgcgcgcgctggtgctccagcaggtgatgcttctgcgtgaagcgcttgccgcactcggcgcagtggtagggccgctcgcctgtgtggatgcgccggtgttccaggaggtggtgcttgcggatgaagctcttgccgcactcggggcaggcgtgcggccgcaag

SEQ ID NO: 362757 - DNA, 562 bp, Homo Sapiens
taagcttgcggccgcacgcctgccccgagtgcggcaagagcttcatccgcaagcaccacctcctggaacaccggcgcatccacacaggcgagcggccctaccactgcgccgagtgcggcaagcgcttcacgcagaagcatcacctgctggagcaccagcgcgcgcacacgggcgagcggccctacccctgcacgcactgcgccaagtgcttccgctacaagcagtcgctcaagtaccacctgcggacccacacgggcgagtgagcgcgcgccccgccgccgccgcccggccaggtgcgcgggccgtgccccccctcggacaccgccaggcccgagcccagcgggcgggggcggggcgccccccagcccctttgccgtgagctccccctctcctctcgtccctcctcccaaggacatgggggcagtgagaccaggtcccttgctgccgcgtttccccgggggccccaagggggagggcgcggacctggggaaccctttcgggctgttaatttccttgacaataaaatggatgaaaccaatcagcacggggggcgtgatttggc

SEQ ID NO: 362758 - DNA, 357 bp, Homo Sapiens
gttggttggtttgtttttttgctttaagttgcatgatctttctgcaggaaatagtcactcatcccactccacataaggggtttagtaagagaagtctgtctgtctgatgatggatagggggcaaatctttttcccctttctgttaatagtcatcacatttctatgccaaacaggaacgatccataactttagttttaatgtacacattgcattttgataaaattaattttgttgtttcctttgaggttgatcgttgtgttgttgttttgctgcactttttacttttttgcgtgtggagctgtattcccgagaccaacgaagcgttgaaatacttcattaaatgtagcgactgtcaaa

SEQ ID NO: 362759 - DNA, 324 bp, Homo Sapiens
gtatcaatttaaatgaacattattcagagtgtgcaaggtaagctgtcaaaaactgttacctctttttaagtacttgtctttgtgaatcaaaacgtttttcacactgtgacagctaaacaatgacacagaatttattcagatgttgaaacactgaacgactacaatggcaatctagaatattctgattacgattttctggttaaaacacctcattgtacccttgactaactttacattaggaaaagttttacattataacttacaattataaaaatgcccctttcatatacattggagtttaatgcagcttaaataaaacaaaca

SEQ ID NO: 362760 - DNA, 356 bp, Homo Sapiens
accagctggttgaggatcttggtgtagcttgattaaaagaaaaaaacattgtttttgtttaaactggtagtagaataatgtatggttccctatggaaaacactaaaagaaaatagaagcatctctaatcccaccacctagaaataaccattgcttcacgtttgagagtatgtccttccaggttgtgtccgagctcatcttttacataattaggaatctatactatatatgcaatttttgtatcctgtttgttttcccccactctgtattacattgggaacattgtcccaagtcatgaaacgattttcacaaatgtttttaacggaaggatatttcattaaataagtaaatagcttt

SEQ ID NO: 362761 - DNA, 497 bp, Homo Sapiens
aagtatacaaatacacctgaccagaaactttgtctcccacataagtctcttctaggcactgtcggggtacacactgagctgctgctttgactgtattttctgtgcctcaaaataaccattgtcctggtgttcatatccttagagttcagtacaaaatgttggatatccatttaataggttccaggttatcttagttggagtttggggtatttgaaaacgtcatgccttcaggctatcatttccctcagaaagctaagtaaatttactgcattcatttctcaaagagtaaaagtgcaggttgtatgtgtctatgaacatttaaacatgttaaaatgttaaatttaacattttaaatttaaacatttaaatatgtctgtaacttgaacagtgtagtttcagaaaggaccactgggctagtgtaatgcagaaaatgctgggtctaggattaggagaaaattgtgtttagtgtgtatcaataaacagcccgtggacccaaa

SEQ ID NO: 362762 - DNA, 363 bp, Homo Sapiens
aactgtatgggaccattccctggcctccacctgccccagcactctccaggccagcacagtctggcactacagactacagggccggagacaccaggcttggaagtgaccactggccaagagctgacataaaagccaacttccccaaacaggaagggcctgttcttcacaaagataaagaaaactgccagcattttgctggccttaagaagccatgcaaaattaaccagtacatcatgaattaacttcttttactctgctgtgcactgaataccattatgaagcaatatacttttggattaaaaataagcatttttgtggaaaatctgctacatgttttcataaaataaagtgctatgatgtcct

SEQ ID NO: 362763 - DNA, 881 bp, Homo Sapiens
gggctctttgtagttctggcgctgtggggccccctgctcctatcagtggtcatcgttccctgatgggccagtctggttggcccgagcttggaccggtgctccgaggaccccgttggtcttgccggctttatcctggaacgttctctggctcttctatttgctccgcttgggcgtctctcagtcttctcctgctttgtcttctttggccctgcatacctggggcaaagtcaatgccagaaggatgggttcctcccagacttggattgggcttgtgaataggaatctcgctcacttagtcttgtcttgggtctaccagccacacccatgctccctttccggacaatgaagaagcctttgcaaccctggtgaagaaggaccaccccgggccctctatgcctggccagcctccagctcctcagacctccatgggtggggtttggcttcagggtggggtttggaagcttctggaagtcgtgctggtctcccaggtgaggcaaaccatggttgctgggctgtagggtgagtggcttgcttggtgggacctgacgagttggtggcatgggaaggatgtgggtctctagtgccttgccctggcttagctgcaggagaagatggctgctttcacttccccccattgagctctgctccctctgagcctggtcttttgtccttttttattttggtctccaagatgaatgctcatctttggagggtgccaggtagaagctagggaggggagtgtcttctctctccaggtttcaccttccagtgtgcagaagttagaagggtctggcgggggcagtgccttacacatgcttgattcccacgctaccccctgccttgggaggtgtgtggaataaattatttttgttaaggcaaaa

SEQ ID NO: 362764 - DNA, 405 bp, Homo Sapiens
catgagcagtgggctaccattattaagcacttagtgtttgcccagcatggtacaacaatctggtaggtgggtagtttatctccaatgacacatggggacaagaggataagttatcttgcccaaagtcacacagccagtgagtgttggaagctggattcaaacccagacgtcagattccagagtccattctcttcaaggctggacttgaccccaccctgacccagggcccagatttgagggctctctctgagcccacctgactttcctccagggtcaaggctggctgggtcccctggagccctctcctccacccccacacccagaggacaggctgcatcaggggtcttcccacccccacccaggaggtctgaggagctggaggctggccaggcatagagggcccgg

SEQ ID NO: 362765 - DNA, 666 bp, Homo Sapiens
ctatggataggggcctgttttcacttttagatcaaaatgggtttttaagtagaacctagggtttctaattgacttgatttctggaaatgaaaacccgcgcttttattatgggaagcttcttgaactgcatttactattgtgaagtttcaagtcccgctgtaaagatcatgttgttttgttttccccagggctttcactgtgatttactgcattgcaggctgtatgataaaacacacataatttaaagagagaaggctcttgattccttatgcaagtggaagagttgaaacttgattgaaggacttaaaacattcacaaccttaagccgaggtggggggatatggggattcaggcaattgtttacacactttgaataactgcaaaggatttacggtttgtgaaaaatgtgtactgtggaaaagataataaattgaagacattattgtgtgggattgtgctgatttttgttgataacacaaaaaacactatgttttctggagagctgtgtaagctgtcttgttgcttagttgcaatataagaaatagtgatgttttggacgtaagttgtcaacaaatttctattttatattgttatatttttatgtagtttgaaatgtaaaaatgttctaatatcaagattaacaaatataaatttatggtgcattta

SEQ ID NO: 362766 - DNA, 566 bp, Homo Sapiens
  misc_feature (552)..(552): n is a, c, g, or t
gaattcccttgcggccgcctgcagccagccccctctttcactcccacctggagaccctgcagctgctgaggactgcacagctcccagaacaggtcaccctcagctacggtgtctttgaggggaaactcaacgtcattaagctacagggccccttctccccggaggaggacccctccagatttcgctccctccattgtctgctctatccagatacaccctggtgtccccagctgggtgcccgatgaatcctgaactgctgggcaaaggttgggcagagacttctgggtgtgccttggctcccaaggtggcactgtgggtccctggcaagtgtcttgtgataggcagtccctggcagggccttcgggtggttggcaagcccaggatctgagtggcaattggcactgaaggcaccccaggcccctgggaggtgagttagacagcccaggggaccaggtggaccaggtggtggccagagaggctccaggggctagactccctcaggaggctgaattgaaaaagggcagggggcacttgacctgggctggggctcangggtcctaaccctt

SEQ ID NO: 362767 - DNA, 411 bp, Homo Sapiens
ctatgttttcttttatgagttttacagttatagctcttatatttaggtctttaatccactttaatttttttgtatatgatgtaaggggccaacttcattctttcgcatgtgggtatacagttgtccaagtaccatgagacactattctctcatgaaatagttttggcactcttgtagaaaatcagtaagccacagatgtatgagtttatttctagactcttaattctattccattgatctatatatttatccttctgacacagccactctatttttattactgtaactctaaagtagtatgttttgaagttggaaagtgtgagccttctaactttcctcttctttttcaagactgttttggctactctggatccttgaatttccatatgattttaggatcagcttatcaat

SEQ ID NO: 362768 - DNA, 553 bp, Homo Sapiens; identical to SEQ ID NO: 208558

SEQ ID NO: 362769 - DNA, 379 bp, Homo Sapiens
aaccctaagattagcatagagcccactcatctctcctcccctccccaccccttcttccccctgcttccattccccatggctctctcctctgactgtgaaacacttcctctccagcagtgttgggaaagttctggacctctactggatctagccataaatggtggtcttcagaaaaatggagattgtggctgccagcacccacaagacagcagcctcatgccatgcaggcagcaagccatcctgaacagcgttcctcccagagtctgtttcctcacctgctgttcactggtgagaggaaaagggacttgttctcccttgaccagttttctagttttcctgttcccaccctggtctttgcctgatgacagagaaactttct

SEQ ID NO: 362770 - DNA, 620 bp, Homo Sapiens
gaaagaccaaaagtgtgccctcatcctggctgtggcaagaagttctatttatccaaccacctgcggcggcacatgatcatccattcaggtgtccgtgaattcacctgcgagacctgcggcaagtccttcaagaggaagaaccacctggaggtacatcggcgcacccacaccggcgagacccccctgcagtgcgagatctgtggctaccagtgccggcagcgcgcgtcgctcaactggcacatgaagaagcacactgcggaggtgcagtacaactccacgtgcgatcgctgcgggaagcgcttcgagaagctggacagcgtcaagttccacacgctcaaaagccacccggatcacaagcccacctgacccacctgaccactgaccgcccctatttattcgtccgctcggacaccacgcccgggcttgccggggcctggacagctgcgagggccgcccggaccgcgggccggaaggaggcgcccccgccccgccccagagctgggccccctgggcaggttccccaccccgccccaccgcatccttctcggagctggtgcctggggctgcattgctggaactgtgtcaagagagcagagtgagattaaagagcgagaaaggaa

SEQ ID NO: 362771 - DNA, 600 bp, Homo Sapiens
  misc_feature (23)..(23): n is a, c, g, or t
  misc_feature (39)..(39): n is a, c, g, or t
  misc_feature (80)..(80): n is a, c, g, or t
cgggaatatgtttataaaatttngcccagggggtgagancaggggaccaagggtggagtggttatttaagggccaatccngaaatgaacttaaaagctgcccctgcaaaacccaatccctttccctatccatggaagagtccctccatattttctagagattgtctctgaaccgttgctacatagccataaatttctgtaaatcatgttggctatcagttcttgctattctcagagcactctatcatgtttttaggtgtatattgtgtattcaggatagcattaaaaagaactgatggcaaatgtattgactcacagtggaaacattcatttggatgaagaattagtggtttagcctttgaaatgaataccttgaatcatttcttctgattttctagtagtttattatctcaaatgattattatccccttcaaaaatactggtctgtactttggtgttgtggtttcatttttctggcattgatcaaatagcaaatacaaaataaagcatttctacatgtttgaggtggttgtttttaaaggggatatgtgtaatgcagattttctttattaataaaattttcataatctctgaaaaaaaa

SEQ ID NO: 362772 - DNA, 1283 bp, Homo Sapiens
ctaaaagcccctgggtgggggtgttccaggacacctggccctgtgtgagctgcctcctctcaccccaacccctcggatcctgggaaagagacagccatggctcaagggccagggacccctgggctgagcccagaaatggctttccattctcgcctgggccggggtgggggtggaggccagagccttgacccaggcagatgaagcccccagctttcaagggggaaactgaggctgtgtgagggacacagctgtgcagggcccacaaacacggtcctttctctaggttagcggatgcagatgcctgatgagttgccatgccctctgtggacacctggggaggggggtcacctccagcgccgccctgggacttccactgcacgtgcaagagacttaccctttcacacagatcacctgcctgccgcagggctgatgaggatgggtgaggagcgcagccactgggtgtcatgcactgtgggggttctcccaccttctgcccctcctcaggttccttgctgcttctctcctctcccaactgtggcacgctgagggctcaggcacaggaccgctcctctggggcagcctccaataacccttggacaacctccactttttcatcttcagccctgaccactccctggggcccatagccttacatccatctgcccccagcccaaacacttctgcaaacactagaaaaggaggtagcccgtgtgccctcctgcaccgcctcctccactcctgtcttggagaggctttcccgtgggccgagcaaaccccccttacctttggcaacttgccctgattctctggccagcttcctacaacctctccttttcagacacacccaagtccacctgttcacaaacaccctgggctgggccctggccgaaccctggcttctacctacctgtctcaggaagtgcctgagccttgcacctacagaccctcccagagaaagccctggctttgcaaccagctgtcttctcatgagacacagggccacaggagcaccacggtgcccaaatgggtcttggagcattagaccaggggcttcatgcctgccctggggacaggtggccaaagtggcatgggagatagggagacagtgtgggtgagcaggtgggcaggagctacaggagcctggggcctgtggatcacagacaccgccaggcaagtgccagttcacacaggtacaggtggctgcagagtgcccaaaggccaagcagcagagtgcctggtgtggacgggagaggagtggggaggttgggcgcagtggctcacac

SEQ ID NO: 362773 - DNA, 578 bp, Homo Sapiens
taatcgctgaacagtcactaaaagacagagaaagggttaaatatagacaagaattattggaaaggcgtttgatggagaaaaaggaagtggcccttcaagaagctcatgaagacaaagagagagcacggcggctagaagcccttaggaaacaggttgctgttgttgctcaatttgatcctgttagaatgatgtcagatacaatggcatcaaaagctagaatgggcattgaaattgaagaagaatttattcttcaaaagccactcttcacattgaatacatacaatgaacagcagataatttctgaccctagacttcgcttcgagttagcacttcgagaagctggacttcatagaacactttatgctaaagagatattaccaaaaattagtcctcaaaaacctccaagaaaggacatggagtctactgtatttaaaatatagagctcatcctcaaattctatatgtaaagagcatttttctttgaaaacatgtatatggataataataattactactttctaaaatgtttgaaatatcagacatagaaatcatagcatctattaaaacaactttgccttt

SEQ ID NO: 362774 - DNA, 581 bp, Homo Sapiens
  misc_feature (412)..(475): n is a, c, g, or t
aacacagtattgaaatcttcattatctccaaatattctatctatgtttgctactaaatgtacatgtagtagtgctattgcccaatatgatttctgaatggattaataataatatcaattttatatttccaggtacacaactcacaggattcttaaagtatctcaatagtagaatacgaatatgtaaagaaatcactgtgctatgattcatatctgaaggactgtgatcccacataggaacatgtaaataatcaagggcttaggcaaatgatataaacacatttgcacaagcctgaatgtataaacttcatacatgcaaagatataaaaatatacgcattacatgagttatttgcaattatgtcttaaaacactcagggtatttctgagtgttcaagttaatgaagttcttgnnnnnnnnnnnnnnnnnnnnnnnnnnnnnnnnnnnnnnnnnnnnnnnnnnnnnnnnnnnnnnnntgtgcatgcacgcactatatatggctaataactggcaaaaaaccatggctaccctagtggcttttgtctttatataatagtcactccaataatgactagtatacat

SEQ ID NO: 362775 - DNA, 461 bp, Homo Sapiens
  misc_feature (26)..(26): n is a, c, g, or t
caattaatttttaggccccatacacngttaatccacattacacattccttaagtgttaagattccatggcccattcctaggtattttccttacttaacaaaataacctgaaacagtatagatttggtaacacttaatttgagcagcttttttattacattgaattatataaagtgcatgttaccttagaaaaattaatatttgctgctttactcttttgcaaaacatttgctgtaatgaatggatttgtatttccaatatgtatcttgactgcattttgtaatatttactgctttattcctaattctgctttaaagtactgaactgggcatgaaacattaaaatattaatccagaaactgtataaactggatgttgcttaaaatctgtatcactgccatgttgaaaactcagactgcttttgtgatgtttcaaatgaataaaactatcctccccttcggtt

SEQ ID NO: 362776 - DNA, 802 bp, Homo Sapiens
  misc_feature (549)..(549): n is a, c, g, or t
  misc_feature (588)..(589): n is a, c, g, or t
gcggccgccgccgcctcctcagtctcctcgtccgccgccttggggactctgcaccaagggactgccctgtccagtgtcgagaactttactgctaggatttccaattgttaataacgctatgttagcgcgctcgaggaagaaggtaggaatcccggctccttttctcgtcttggtggttcggtgttttgttcgctcctccaggcgcggcccctctcgacctcgcgcgcccattttcgccgctgcgaattctcggacaaaactgtcaacagcccgggcgcgccttttggctctgcgggtccctctatttatgcaaagccgacctatgctacagccccccaacccccgacctggggtagggaggaagagggtgccggggaagggagtccgccctgtccaggcactagaggctcccttgacgtttggcagatgaaaaacaactaagcctttttgaggtgtagagattctcaggtccaggcgttaaaaaataatggtcaaaagaataatacaaaaatagtaaaggtcttgaagaatgccagcgaagcaattctnttttatttgaggacacttgtctggtgtactttttcatgnnaaggaaaaatggttaacatgtttacacaagaaaaaaagtcaaaattatcatttatttcaacctgtgttttgtatcataacagacgtgtggatttttttgtacttactgcgtattctttacaaggagtattgtaaattttactggcaattattattgtactattctaaatgtaagatttttacactttttcagaaataaaaatgcttaattttc

SEQ ID NO: 362777 - DNA, 508 bp, Homo Sapiens
atgtgctctagcaaggataccaaggcaagcatacatgtagctggcttgagtttgtaccaaaacagtccttcaactttgcactgtgccttaagtaattactaacaaaaggtactaggattagctgcaatctctactttcgatgaggaaatcccagtaagctttctgattcaagtacaatgctgccattttttaaagggccacaactatagaattaccactgttggaatttggtacaaaatatgttttgtctattgaaaacatacacggtaaatggtgttgttaggtaggttctgtccagttcttagggacttttttcacattatagcatttttaccctaaacatgatgttgagattattatatactgtattttcttctaaattaaccctaatgtttaaaaactcactttccccctttaattgaaggcattgttttgttagatgcagtaatgatgtttaccagagattattgtttcctatgcaaaataaattttcatattttgaaaaaaa

SEQ ID NO: 362778 - DNA, 612 bp, Homo Sapiens; identical to SEQ ID NO: 60005

SEQ ID NO: 362779 - DNA, 527 bp, Homo Sapiens
gggaccccctatataaggaggcgctgcaaatgctgcgggatgctggggcccaagtctccatcatgacctacgatgagtttgagtactgctgggacacctttgtggaccaccagggatgtcccttccagccctgggatggactagatgagcacagccaagacctgagtgggaggctgcgggccattctccagaatcaggaaaactgaaggatgggcctcagtctctaaggaaggcagagacctgggttgagcctcagaataaaagatcttcttccaagaaatgcaaacaggctgttcaccaccatctccagctgatcacagacaccagcaaagcaatgcactcctgaccaagtagattcttttaaaaattagagtgcattactttgaatcaaaaatttatttatatttcaagaataaagtactaagattgtgctcaatacacagaaaagtttcaaacctactaatccagcgacaatttgaatcggttttgtaggtagaggaataaaatgaaatactaaatcttaaaaa

SEQ ID NO: 362780 - DNA, 530 bp, Homo Sapiens
tacgttaatagtaagtgtatttgtagaaagtttttcataaagaagagattaactttccatataaataaataccaggtatgaaattactgattttagtgcaatatctgtatgattatccagaactatcacttcagatgtttctattttgggcaccataactatttgagctcatatttttataattctgattgagaatttaggggcatggtaatttttaccaaaactgaagctggtaattttaagtaaagcaactaaatttaccctttacttattagttaaaaggaaaccaaggcatgtaggaaaatattggtacgttggaaaatgtgaaaagagctttactttcaaaatgtatgtttaatgaattgaattttagggaccgtttcccataatttgggcctatgctatcctgttgatttttatgtctagcttaaaaggtatttgaaaatgttccatttgtgttttattattttctgtcctatgacagttctatgctaaatgtattttaaaataaaagccaaattgaagattaa

SEQ ID NO: 362781 - DNA, 1008 bp, Homo Sapiens
  misc_feature (477)..(594): n is a, c, g, or t
tttggtgatgtgccctggccctgccctgggggaggggacccagaggccatggctgcagccctggtggccaggggcccccctttggaggaacagggggctctgaggaggtacttgagggtccagcaggtccgctggcaccctgaccgcttcctgcagcgattccgaagccagattgagacctgggagctgggccgtgtgatgggagcagtgacagccctttctcaggccctgaatcgccatgcagaggccctcaagtgaccctagggaagaagcaagaaacttcggggctgcagcctcaggatgaggcagaaggaagggtaagggaaaggatggggaccacaaggaagagccaggtgctgctcagcagaggatatgggtgggagcgaaagttgtaacaagtgggggtggggggtgcgggccgccaccactgctccttgactctgccgtttcctaataagacctggttccacatctctnnnnnnnnnnnnnnnnnnnnnnnnnnnnnnnnnnnnnnnnnnnnnnnnnnnnnnnnnnnnnnnnnnnnnnnnnnnnnnnnnnnnnnnnnnnnnnnnnnnnnnnnnnnnnnnnnnnnnnaccgcggggggcaccccaaatgaccacacacagacttgatacgacagggggccacaaaaaagcgggagggacatataaaagaaccgaggcacgagcggcgcgaccgataccaaacagcgcgtgcgcagcgagaacaacagtgcgaaacaaggagagattgaagagaaagaagacgaccaacacacggggaggggaacacacacaaggggcgcacaagcccgcagaagggagaaacaaacggccccccgagggaggaagaaaaataacaaaagagagtggaagagcaggaggggaagaacaaaaaacgacagatagtacgggcgcgaggagagagaagacgagcgcccaagggcagcagactagaagcgggaacattaaacgccgaggggggaacgaaagaaagggggcggcggc

SEQ ID NO: 362782 - DNA, 1789 bp, Homo Sapiens
  misc_feature (279)..(291): n is a, c, g, or t
  misc_feature (434)..(444): n is a, c, g, or t
  misc_feature (605)..(622): n is a, c, g, or t
  misc_feature (664)..(725): n is a, c, g, or t
taagagggtggtggcccaaaaatagtgagggcacatattatttttttgtggcccgcgccgtttttgttcccccgcgtgtggggcccaaattttagttataccccacagagggggcgaccaaaagtgtgcgtggtatttcccccctggggcggattttacaggggttcccccacaaacccgcttttgtggaggggggggcttcccccttatcggcgaaaagaatattcgttaaaagaaaattttccccccccgtttttttctgggaaacaaatgtccccnnnnnnnnnnnnntgtataatttttaatatttggggggccgtcccctggggacccccccttgtgtggatgagacccccccgaaagaccccctccgagaaacgccccgtttgggagtttttttcaaaaaaccgcccggtgttccccccccggggggnnnnnnnnnnnggggggggaacgcccaaccccctttttgcctatgccccggttttttcttttggaaacccaggttttgccctgttttcactttcttatgcggggggccccgcgccccaaacgaaaagttttttaaaagtttttttagggggcggggcggcccgcacaagcannnnnnnnnnnnnnnnnnccgttttgggggcgtttcctccgttggtttgttttgttgtgnnnnnnnnnnnnnnnnnnnnnnnnnnnnnnnnnnnnnnnnnnnnnnnnnnnnnnnnnnnnnngcaaacaattaaactttatttgaaccttaaaaatttgcagagtggaacattattgtaagatctaatggcaatagagtacaaattcagtacagagcaaataatcaagcaaaatgctatataaaatatgacttacaatcacctttgaaaaaaattagctctctaactgttcacagaaaaacaaataaaagctaagcaaacataatgagaccatagcaattagcatattttctaacaagccatgttgtttaaatttatattaatgatattattatgatcttgaagagtatgtgatatattgtcaagggtgtaaagaaaactctccctggtttgtatacaaatgatttcatcaaatgaatataaagcagtcatgaattgaaagtaatgattatttgtcctgtcactccagttttaagtcttttctttcctttcttatgtctcccacctatattcaagttttaaaagaacaaaggccggtggagatctgaacagaaataacaccttatatctgtattgtcactgttcacgagactatcgtggcttggaacatgtaggtcatcagttggcaaaggactccctctcctggattaactgtaaaaggaggcagaaatctagatgcttgccatcatgggcgagtttgtgccatgggggaagggttcaagaggtattgtctgcaatgaaacagctgctgccatctactgggcctagactagatacctgctttttcaacccaaagcacaaaccaaatccacaaggctaccttgtcatgggaaacacggcttatgcatatgcagcctgactccagtttggaaaaccagtccaccttagggcgactagggttgtgtacttttgaccagagtaattgcgtactattcaaggcaacagtttgaggaaaggtgactggcgcgatgataatctgcaactttactccacagtctctgagtataagtttcacagtctgacgaatcttgattacgattacatgatagaaaaggaaggacaactacgaagatggataaatgggagtgatcccaccgttgatagcagtgagtaagagtataagttgt

SEQ ID NO: 362783 - DNA, 1326 bp, Homo Sapiens
  misc_feature (311)..(336): n is a, c, g, or t
atgtagagctaacgtttacttcagaataaaacattgacaaacagggaaggaagagaatcagaactttcacagagctgtacttgaccatatcttatagacaaagcagaattacaatgcatgtaacaaaaacgttaaaagttttaaaagttgatagttacaaatatggtacgtaacaattttctactttatttcagtacaattttcaacatacagtctactatttctcaagatatttgaagacttaaaacaaaatttctatagactacttgcaaacagtaaaatttaagtaaaatgcttacattcttatttgnnnnnnnnnnnnnnnnnnnnnnnnnnggtgggtgcaagttctgctctgttgtaatcttacttcatatttattattccttttcttccttgcgtctgtccttcttttcttcattattttccatggtctcttcttcatcttcaacaatcccatccccttggtatttgtcatgagtccatttaggactgctacctgattttttgaagttaaagcgccctctgccacgttgaaaagtaccacgacctcttcctcttttggcccaataatccacaccatcatctctgtcgtcatgcaagaagtacttcttgctctttggggtatattctggatcccattcctcttccttcggtctcttttgaaaagtagtatttgagttgtttggaccagtatttgtcccagcaaaaactcctctggctcttcctctgcctctaattcgaaaaaaaggttcctcgtggtcggctaactcctgcaaagcctgagtattctttcatttcatggtgagttttaaattcttcttctctttccttcttactctccttttcttctcgagaactgggagaagaaggtgatgctgaagaggatgaagatcgagaatgatcttgctctcttttatgtttactgtcatctttgtaagatttgtattccttgtaatcttttggagtttttttctgctttcttgatccactggattccctggagcccttggaatctccccgttctttacttctttcttttctacggcgatcaatgtcatgccgaaggtcagcagagtcacaccttaattttttatctcccttttgattttcttctttaaaaactctctcttcccctgctaaacgggtatgcttcctcagggtacttggtgagatgtcaattctcctgtgtatttcagggctcttttgccgagtactatgttcttcagtggctttctgatacgaagtgaccgctcgtttagggtcattgcagctgacttgaagtattgctctttaacacctcgtgccgaattcgccacccaggcc

SEQ ID NO: 362784 - DNA, 515 bp, Homo Sapiens
agaaggactaccctgcactgctttccttggatgagaatgaactcgaagagcagtttgtgaaaggacacggtccagggggccaggcaaccaacaaaaccagcaactgcgtggtgctgaagcacatcccctcaggcatcgttgtaaaggtagatcacagaaggccgctgaggggagaggccccgcccaagggttccacagcctccagagatttctcccaagtgtgaatgggatcagccgaagtgcattatttttctggcttgggccaccctctaccagccaggcagtagagagcaccgcagatctcgtcccatccctgagccgttcctccctaaggcagaacctcctacaacagcctgggaagcctgtttccaggatcttttggagccaggtgccatcagacaagatcagttgatcagaacagaaagctagctcggaaaatcctacaagagaaagtagatgttttctacaatggtgaaaacagtcctgttcacaaagaaaaacgagaagcggcgaag

SEQ ID NO: 362785 - DNA, 750 bp, Homo Sapiens
agcggagtttctcgcatgcgcagtgagtaaacatgagcctctggtagataagagaaaccgcgatcggagtacggcgcgtgcgcagatcagggatcgcgattgcgaatcctccgctgaggtgatttggatatccctagaacgttgagggcacgagtcgggtcctgagaccaggtcctcagccagcagagccacgttccttatgagcaccgtgggtttatttcattttcctacaccactgacccgaatatgcccggcgccatggggactccggctttgggagaagctgacgttgttatccccaggaatagctgtcactccggtccagatggcaggcaagaaggactaccctgcactgctttccttggatgagaatgaactcgaagagcagtttgtgaaaggacacggtccagggggccaggcaaccaacaaaaccagcaactgcgtggtgctgaagcacatcccctcaggcatcgttgtaaagtgccatcagacaagatcagttgatcagaacagaaagctagctcggaaaatcctacaagagaaagtagatgttttctacaatggtgaaaacagtcctgttcacaaagaaaaacgagaagcggcgaagaaaaaacaagaaagcgacccacaagagcaaaggaaacccctggaaaacaaagaagctacttaaagaactggtgggagtcaagtaaaaaggtccactgagaccagacttacagattccaactgacagaatctgccagaagctcc

SEQ ID NO: 362786 - DNA, 707 bp, Homo Sapiens
  misc_feature (72)..(72): n is a, c, g, or t
  misc_feature (622)..(622): n is a, c, g, or t
caggctggctgatggagagctggggcctgtgaatacagtaagggtggggtccacactgccaccgctcccctncagatgccgcttctctggactcagcagcactgggcagtctgcccagttctgcccgtggcttctgctccagagaagcccagtggggacagtcagagtggaggagtgaggggctgtcccagcagaagccctggctgctgccttgggtggcactgtcaaaggctctggaggtcccagagggccaagggtctgaagactcgggtttgaatgtagttgagagattcttggagcaatgatgcttgttacggaaggaattattgggaattgaaaaggtggcattagtctgggatgataaggagttttaaccatttgagtccatggtatgggaaaaattgcccgacgggaacatattttgtatggttttgccttatttagtaaatgtttgtaaaagccctatatctgtgccttttaatgggtttgggtattttagggtgtggaatagatttcccaggacttccctgatttataccatcatgctgtggaaaagaaggtttgacctcctccattgttcaggaccaactgggaagggacttggggatgcctttgtttaaanactccctctcacttttcccatttgaattctgttacactggggttccaaaaaaaattattaaacgttttgcctttgaaaacaaaaa

SEQ ID NO: 362787 - DNA, 540 bp, Homo Sapiens
cagtggaaactctgtgatggtgacaaacatgggaatcactctgatgtgacgcagttaaatttacaccttaaaaaatggatgccaagacaacataaacaagacccagggacaccaacagggtatggtgctgtgccccagagtcagggtcctgggttcttacccagggaagtgagaaataaagataacttttccctgctccctctctcctcccctgacactgatcttcccaccctgtacctccctcttctgctcccaaacccccacccagtgctcagtcgcagacatcactgcctgcagggcatgcacagtgcagcccattgcacacaaactacaaactcacagaaggtgatgacaatttgtgtttgggacgtctgattgtgaaaaagggaggacagcgtacttgcagccacaaagactgaaactggaacgtgatggaacggggctggaacgtgatggagctctgacataacaaacgtgtgactttgtgtgaaatgtgcagatccatgtggaataaaacacagcctagcctgtgaaaaaaaa

SEQ ID NO: 362788 - DNA, 559 bp, Homo Sapiens
ggagctgtggggaccacgttccagcctcagaatcctctcttagggagagcctgtgagagctgctatgctacacagtctcaccagtggtattcttggggcccacctaatatgcagtgtagattatgtgcaatttgttggctttattggaaaaaatatggaggcttgaaaatgcccacccagtcagaagaagagaagttatctcctagcccaactacagaggaccctcgtgttagaagtcacgtgtcccgccaggccatgcagggaatgccagtccgaaacactgggagtccaaagtctgcagtgaagacccgccaagctttcttccttcatactacatatttcacaaaatttgctcgtcaggtctgcaaaaataccctccggctgcggcaggcagcaagacggccgtttgttgctattaattatgctgccattagggcagaatgtagtgccacaatgtaacccctaaggatgctgttataatgagactccataatcgagacagtacagtccagtcttacatggattcattaggtttaaataaaatttgccaatttacact

SEQ ID NO: 362789 - DNA, 413 bp, Homo Sapiens
ctgttcctcttcacagcaaaaactgttcaaaagagttgttgattactttcatttccactttctcacccccattctcccctcaattaactctccttcatccccatgatgccattatgtggcttttattagagtcaccaaccttattctccaaaacaaaagcaacaaggactttgacttctcagcagcactcagctctggttcttgaaacacccccgttacttgctattcctcctacctcataacaatctccttcccagcctctactgctgccttctctgagttcttcccagggtcctaggctcagatgtagtgtagctcaaccctgctacacaaagaatctcctgaaagcctgtaaaaatgtccatgcatgttctgtgagtgatctaccaagaaaataaaaaattttaaaaatc

SEQ ID NO: 362790 - DNA, 310 bp, Homo Sapiens
gtagtgacaagttttgtttctattctcatttccttttgtgtatattctatgtagatttcgtttttggttactatgaaaattacatataacatcctggagttataacattctgatttgaatttatttcaacttaacttcaatcacataccaaaattctactgctatataggtctactctttttaggttattgatgtaacaaattgtatctttattcattgtacaccacctaacagatttataattacattttatgcatttgtcttttaaatcctgtagaaaataaaaagcggagttacaaaccaaaattac

SEQ ID NO: 362791 - DNA, 816 bp, Homo Sapiens
tactaggtaggaggctgggcggcgaattcggcagcgagcgagttgccgagcgcgccccgtccctcgcgcgcgatgctcccctggacggcgctcggcctggccctgagcttgcggctggcgctggcgcggagcggcgcggagcgcggtccaccagcatcagccccccgaggggacctgatgttcctgctggacagctcagccagcgtctctcactacgagttctcccgggttcgggagtttgtggggcagctggtggctccactgcccctgggcaccggggccctgcgtgccagtctggtgcacgtgggcagtcggccatacaccgagttccccttcggccagcacagctcgggtgaggctgcccaggatgcggtgcgtgcttctgcccagcgcatgggtgacacccacactggcctggcgctggtctatgccaaggaacagctgtttgctgaagcatcaggtgcccggccaggggtgcccaaagtgctggtgtgggtgacagatggcggctccagcgaccctgtgggcccccccatgcaggagctcaaggacctgggcgtcaccgtgttcattgtcagcaccggccgaggcaacttcctggagctgtcagccgctgcctcagcccctgccgagaagcacctgcactttgtggacgtggatgacctgcacatcattgtccaagagctgaggggctccattctcgacgcgatgcggccgcagcagctccatgccacggagatcacgtccagcggcttccgcctggcctggccaccctgctgaccgcaactcgggctactatgtgcttgagctgttgcc

SEQ ID NO: 362792 - DNA, 880 bp, Homo Sapiens
atcaggccaaatcggccgagctcgaattcgtcgagagcggggcgggcgagcgagttgccgagcgcgccccgtccctcgcgcgcgatgctcccctggacggcgctcggcctggccctgagcttgcggctggcgctggcgcggagcggcgcggagcgcggagctcaaggacctgggcgtcaccgtgttcattgtcagcaccggccgaggcaacttcctggagctgtcagcagctgcctcagcccctgccgagaagcacctgcactttgtggacgtggatgacctgcacatcattgtccaagagctgaggggctccattctcgacgcgatgcggccgcagcagctccatgccacggagatcacgtccagcggcttccgccgggcctggccacccctgctgaccgcagactcgggctactatgtgctggagctggtgcccagcgcccagccgggggctgcaagacgccagcagctgccagggaacgccacggactggatctgggccggcctcgacccggacacggactacgacgtggcgctagtgcctgagtccaacgtgcgcctcctgaggccccagatcctgcgggtgcgcacgcggcccggcgaggcagggccgggggcttcgggcccggagtcgggggctgggccggcccccacgcagctcgccgccctccccgccccagaggaggccgggccagagcgcatcgtcatctcccacgcgcggcctcgcagcctccgcgtgagttgggccccagcgctgggctcagccgcggcgctcggctaccacgtgcagttggggccgctgcggggcggggaggcgcacgggtggatgtgcccgcgggcgcaactgaccagctgcaggcctgggcgggcacggctactg

SEQ ID NO: 362793 - DNA, 190 bp, Homo Sapiens
agtgttaagaacaaactatataaatgtaaaaaaaagttttagagttctgttttcaaacattgctagtggtttagttaactttagctgctttatatttgaaaagcttttatttagatcttgctccatttacagtacattcttaggatgtatgtagtaaataaagctttctttaaagcaatcgcaagacctt

SEQ ID NO: 362794 - DNA, 952 bp, Homo Sapiens; identical to SEQ ID NO: 15293
  misc_feature (545)..(560): n is a, c, g, or t

SEQ ID NO: 362795 - DNA, 546 bp, Homo Sapiens; identical to SEQ ID NO: 85157

SEQ ID NO: 362796 - DNA, 436 bp, Homo Sapiens
atgtcagcattgacctgggaatgaagtcaggatagagaaattccacttgcctgtgatgggtccttagaagtatcagctaaggagtgaccctgtcctatacacagggctctttattacgttccataccctgggcctacccaaggtgacattcctgctgtttacatggcataggcacctgtgagatcagtgtcccaatttcatcttagaaaaaggtaggtatggctgctttgtcggttgaaagttaaggggagccatgatctcccatatttaggaaaaagttatttaaaaaagagcagatggtggaaaaagaatgtaagacccagaatttatccctttgacaatgaatctggcctttttaatagcaggatggaattgattcactagtttttgctaactttccctttcagtaaaggttgaggtgttgtttttccaaaaa

SEQ ID NO: 362797 - DNA, 343 bp, Homo Sapiens
gcggccgccttctcgtccccaggggtgggcgcgcgacgcgggcagggaccgggcgcccggaggaccaagcgagcgcatcccgcctactcgtgctgggacatcacccagcctggacgccgctcctcgcctttcttccccgcgcatcgccagcgccaaccaaagatccccgccgggaaagcctctctgccaagctggaaagcgctgaaggcggatcgtctctcagacttgggtttgcaggttcacaaggcccgggaggcttacggtgggcgcctgcctaacagagggtccttgcggagaagcgcagaacgacaaatgccagaggcggtgaccgcgtcctctggat

SEQ ID NO: 362798 - DNA, 475 bp, Homo Sapiens
aggggtcctcagggtcagggagcccccctcacccttttggcccgttaccctttgtgactttccaccatggtgtcgtgtgaccctcagtcaggttggtgggggctgagtcctcactgagcagccactttccacatttgctagaggaacagtgacatggacacctgtgacagagagaggacagttagtgaggagggacagacagctcttcctttcggagcctggctagtctaggacatcaccttgctgtgtcttctcaagcttttaaaattgaccctgaacgtgtgacagggtcctatggtgttactcaaagctgtgcagggtaaatgatgacatatttattctttttccatttgttctagaaacagggcctttttcatcagttgcattttccaggctgagagctgtataaaacattttggactgtgaccatgtaccttcctttttaagaaaaataaactgctttatggtagttggt

SEQ ID NO: 362799 - DNA, 1142 bp, Homo Sapiens
gattcttaaagtattctttattaagatcattaaaagttgtagaaacaactttatattataaaggcacagggagacagttcaataaaatattcaaattaacagtaacttacagtacaaaagacaattttaatgcacatacaaaccccaaatgtctgattcaaaaatattttactgcgtctattaatgggcaatgattaaaaatataaattgctgccatataataaatatctgatagtgaacatcttgatagcaaagtgaacaaaatatttattgcttttcacttacatatttttccctgtaattttaaattcctaattcttttactatcttctcaacttttcccaaagataaaataaatttcacataatttcatggaggggaaatggtagttgtaaaaaactacctcaagtagcaatcaccgctggcagtgttttctcactttctgttctgcaattgcaatcacacttccaaaaagaaaagcaaatgtttgctaaaccatagacagacaacctctttgtgactggtattataaggtttataatgaaaacttatcaaatataaaaggtgctccctcttgaaaatgtgtattttatttgaagttttgagtaagaggtgagtgtttggcaattttcaacactcccctcaaaaatctcccaaagttgcaaaaaagtcagtttagtaaaattccaagcacttaaatgcttcattgagggccagttgatatacgcaatgcactaatgtgtaaaaattaaccgaatgcaactattttataatggagagctcttaccttttccttccagtttttaaactggcataaactttattgacttcatcctcctatttttatagcaacctagttttagatggtacaagttgaatttctatcacaagacaataaaataacatgaaagcattatcctagttaatgctatttcaactgaagaaatatctacattgaagtatttgataataattgtaaagttacttaaccgtatgtcatgttcagacagtatgtagcagctagtaacgtgcctggcacagagttgatgcttaataaatagttgctgaataaatgaaaaagaaaaacctgcctttggttgtgcatactttaatcactttctgatttagaaaaagatcagtcc

SEQ ID NO: 362800 - DNA, 1496 bp, Homo Sapiens
  misc_feature (89)..(123): n is a, c, g, or t
  misc_feature (163)..(174): n is a, c, g, or t
  misc_feature (1070)..(1079): n is a, c, g, or t
agcagagcgaaacgttgaataattcatatagggcgtagctcgctgaccgaagaacgagcgcaggagtcagtgagcgaggaagcggccgnnnnnnnnnnnnnnnnnnnnnnnnnnnnnnnnnnncagtcgacggtaccggacatatgcccgggaattcggccannnnnnnnnnnnaatttaaaaatcttaagttttttttagtaagcttaagatgtccagtagtttatttgcagacagcatttttaaaaagtgaatagatgtttaactgaagttaaatacaaatttatgtctgtgtaactcttggtaagatataacaaaacctagacatctaaattttttggaaatttttattttaaaagtttgttgggaggtaaaattgtgtgactttaccttctggttaatagttttatagttaagaagaaagtccagcgaagtttacttgatctcagttgcactcaagaataggggatttagttccactttggttattttcacttctaccctaaattcatagtccctgatacttaagctttaccctggggcttaccagttttcattgcagcgagtaaatgggggagtagcagagcctttggttaatgtaaattgacaaaaagtatgtccttttctagcaggagcagataaactgataatggtcttagaaatgtagaaaatgattttttgtagacaggatgatctgtctagattgtagcaaatgatggtacatattcacaacaaagttgtgccactacatttaataaacagccacaaacaacaaaaggacaactggtccccgatataaatggactagctacctggacataatatccttgtgaggcatccttaaaggacaaattgcagctggtatttgggtgaatgttgttgctctgtgcctgttgaatgtccatgctacaagaagttatgagccttgttctaagtacagatgaaccttgtatttgtgtaatctcccaagggagagctatggtttacattcaattttttggtctttctgctatgaaacgtgtttattttgcctctgtcaatgtgtttgcaaccttaagtaaggaaagggnnnnnnnnnntagccctctgaactctgatcttttgccgcttctgtagattttgattgtgaagttgggagtgaggacattcaaaagcccatggtgaatgcatatgcctttagaatattgtgcctgttttaaaatgtttgagcttttaaaatactttgttaaaacatgaatccatttttgtaattgtataaatactcataactaattttgaatgctactgattgtgtaactgaatttttgtatccaaaaatacattcttgagtactacttttcctaccttgaaaatctatttcatttactaaatattgttttctttatgctaacttaactttaaaaggaatgttgccaagctgtctctcctcccccatcacaattgttagttttttttgctttctttcttcaataaatgatagcattatgatctttaat

SEQ ID NO: 362801 - DNA, 384 bp, Homo Sapiens
cttactaatcagaagagagctggggtagaagccccatgtttgtattccatgaaacacgtcgggttggagtaaaggcaaaaacagctagacacaccaggtgtgtctgtttgacatttataagctggcactcatcaacactcctgtttctcctttctctgggacgtgtggattaaggggtgtgagttgtgggaagaattgccctcgtacctcctggatttattatttttctcaaataccaaccagtaagatcccaaataacttgagaaaaattgtttcctgatctgtccacttctggtgtcaaagattttactcatcttcttagtacattctatgtattttatatgtataattttatacaattaaaaatagatttttgtctagtga

SEQ ID NO: 362802 - DNA, 929 bp, Homo Sapiens
gctgggtggcgaattcggcacgaggcttcattaggcctaggatgggagttgagaatcttcatttttatagctccacagttacttaatatactttaaaatttgagaagcgttgagttgaatgacagctgacttcatggctgtctgcgaagtggggaagcctgaacacagtcctataaactaaaggccactgcagacttttagcacaaggagatccttacagggaacatgtgccatcagctctttggagtgaacaaggaattagacccccatcatgccaaaaaactaggatttttaggtggtctttccatcccttcagatttaagtattcaaagaaagagagacagacctacattccaagggtcttctgagtgcaaggccttgtgttgtttgtttatttaggggagggcctggtgctcttctctgttttatgctttaccttcttttatttctcagatctcatgttagcactatgttctgaattccctaataatggctcttgagaactgatttacattttgttggtttgtttacttcttgagcacataaaaggaccccaaattagagatactatcccttgggcttctgaaaaatgaatcaaccaaaactggttgactctaaccttgccttgctgagtaaaaattctgctttggatgagaacctgtcttgattattttagtggacaacagataagccacatggaagtacacatggcctcctgatctgtcttttttatttacagaaatcattcttaaatctcctacctgagatggccctgttatttcccttccctttttctacccctggcacaagcaaaactccacaagttttcctgggaactaactttcctaattacaccccccaacaacaacattccagtaccctcttccttctccttcaacactttccaagcctgggttaaggtgggattt

SEQ ID NO: 362803 - DNA, 562 bp, Homo Sapiens
accccttcactatgactacacagaatctcctgatagtacagggggctggaggcaaggataagttatagagcagttggaggaagcatccaaagattgcaacccagggcaaatggaaaacaggagatcctaatatgaaagaaaaatggatcccaatctgagaaaaggcaaaagaatggctacttttttctatgctggagtattttctaataatcctgcttgacccttatctgacctctttggaaactataacatagctgtcacagtatagtcacaatccacaaatgatgcaggtgcaaatggtttatagccctgtgaagttcttaaagtttagaggctaacttacagaaatgaataagttgttttgttttatagcccggtagaggagttaaccccaaaggtgatatggttttatttcctgttatgtttaacttaataatcttattttggcattcttttcccattgactatatacatctctatttctcaaatgttcatggaactagctcttttattttcctgctggtttcttcagtaatgagttaaataaaacattgacacatac

SEQ ID NO: 362804 - DNA, 434 bp, Homo Sapiens
tcatttctttcacacaaggagatgctttatacgtgtcattgttttgtagcctaattagagttttcctattcaatcatctcaaacttttatcacagcttcttacaacggacttcacgaaattaaattttaaggtttagatactgtaaacgctcgaggaaagacattagtattctcactattacatattaaggattctctagcttgcagttaggtgattttataatacatgtaaatgcatataatacacttaaggtgcattatatacatgaaacgaagtgttcgttttattttataaactttctttattttataatacacgtaaatgcctcgagtgtattattatgtattacatgaaataaagtgttcacttgaattttgcctcccttcagtctatctctcttcagtcgaaagagataagtaggcctttattgtcc

SEQ ID NO: 362805 - DNA, 473 bp, Homo Sapiens
  misc_feature (78)..(78): n is a, c, g, or t
cagatgatctacagtgcagccagagcgatagcgggcatgtataaacagcgcctgccacccaggacagtgtgagaggangacctacccgggagactgagactttcccccacttttagcttgatgttaaagaagtggttgtaccttccctaaatcgaatagtctaaatgaatcccagtagtttttatcattttcctgtagcctgcaatttttctttctctagaaaggcatcatgtcattcccaggagacaaaaagaaacaaatcctttttatagtcataccatttcacctatcatagtactcaaaaaagaaaatatacaaatctatttacagcacaatttaatataccagatttataaggtggaaattcatgtgcagagacatttaacttaatgccatgtacttgattattttgttctttaaagaagagattattaaagaacatgttggttgaatgtttataaaagcaaaaaaaa

SEQ ID NO: 362806 - DNA, 470 bp, Homo Sapiens
gaaagcaagccaggaatctgcctatgtggtagacccaaccattactacttgaacccccttagaaaagcttttccagcattccataactcaggttcctcatttataaagtgggaaactcataattgtcctacctacctcacaggggtgttgtgaggatcaaaggaacagatgaatgtatgagcactttcagacatgtaaggcactgtcatgtaacaagtaggggaaagactctggagcacattagtgctggtgtgtgccaagcccgtgggctgttgaccgtaagggatattcaagtaggaggaggaagagaagatggcattgctaataaaggttgtgatacacaaccataggattaactgcctcctcaagtccatcatgtaaataaggtgctatgtataccaacttctcaccacctttgtttttctgttcggtaatcctggtgtggacaaataaagttttcacttgtatgt

SEQ ID NO: 362807 - DNA, 476 bp, Homo Sapiens
agtttagggtattactggctttttcccaggtgacacactaaggactgtttacatggcaattccagcagcaacagcctctggaatgagacaaggaaagctcatttgtttctttaatgaaggttaagaagtctacagcttgggctggccggtatttattaatctgtggcccagaggattttaaattaatgtaaattttttaaacaaaataagcagttttccttccctgttggagtaaaaaaatttttttccctttgttgttttacgtttttgttcatagtcttctttattccacgctcctcttccccttctcccagtgctgacttgggacaaaacagttcagcctttgtctcgacgcagataaaagcacctgtaagcaatgctgtccagtcattttatgtgctgatttctcaaatctgcaataatccatcaggttaatgtttttacctgaaaataaagaaagtttgcttcaaaaaaaa

SEQ ID NO: 362808 - DNA, 459 bp, Homo Sapiens
  misc_feature (26)..(26): n is a, c, g, or t
atctccatattttcataatttcttgngtttcaaatagggaaacatcttcctcaaagtctgcctagtgagatatggcctactggttgcctcatagctttgtacagattatgaggactgaaaataattgggcatttacccatcttggtatctgttgtatcctttatctgtgtgtgctgatttgatcttttttcagtttcacataccttatctaaggtttcccaggatttaaacagaaaactacttctatgatttcagctggagtctgaagatacttgtttctgttcaagtcccactttaaattatgtcttaggagactgaaagtggaatcttctgagcattcctgaatatctgcttagaaatatcatgtgataaagagggaccttcttaatacactgatgttcttcactaaatggatggccacaagaaaaataaagtaaatgtcttaaataatttaaccat

SEQ ID NO: 362809 - DNA, 1130 bp, Homo Sapiens
ggggcggacggtcatgggacttcagcatggcggtgtttgcagatttggacctgcgagcgggttctgacctgaaggctctgcgcggacttgtggagacagccgctcaccttggctattcagttgttgctatcaatcatatcgttgactttaaggaaaagaaacaggaaattgaaaaaccagtagctgtttctgaactcttcacaactttgccaattgtacagggaaaatcaagaccaattaaaattttaactagattaacaattattgtctcggatccatctcactgcaatgttttgagagcaacttcttcaagggcccggctctatgatgttgttgcagtttttccaaagacagaaaagctttttcatattgcttgcacacatttagatgtggatttagtctgcataactgtaacagagaaactaccattttacttcaaaagacctcctattaatgtggcgattgaccgaggcctggcttttgaacttgtctatagccctgctatcaaagactccacaatgagaaggtatacaatttccagtgccctcaatttgatgcaaatctgcaaaggaaagaatgtaattatatctagtgctgcagaaaggcctttagaaataagagggccatatgacgtggcaaatctaggcttgctgtttgggctctctgaaagtgacgccaaggctgcggtgtccaccaactgccgagcagcgcttctccatggagaaactagaaaaactgcttttggaattatctctacagtgaagaaacctcggccatcagaaggagatgaagattgtcttccagcttccaagaaagccaagtgtgagggctgaaaagaatgccccagtctctgtcagcactcccttcttcccttttatagttcatcagccacaacaaaaataaaacctttgtgtgatttactgttttcatttggagctagaaatcaatagtctataaaaacagttttacttgcaatccattaaaacaacaaacgaaacctagtgaagcatctttttaaaaggctgccagcttaatgaatttagatgtactttaagaaagaaagactggttatttctcctttgtgtaagtgataaacaacagcaaatatacttgaataaaatgtttcaggt

SEQ ID NO: 362810 - DNA, 632 bp, Homo Sapiens
  misc_feature (33)..(33): n is a, c, g, or t
  misc_feature (44)..(44): n is a, c, g, or t
  misc_feature (64)..(64): n is a, c, g, or t
  misc_feature (72)..(72): n is a, c, g, or t
ttctggcatttctctctggaactcctgaggggnccttgggcacntcctggtatgtgcacacccnacttgganccccttgctttagggcaattcagcacgcctaaatagcatcccaaaccactgtgcgacattgggcctgcagaataggaaagtcctagggcagaatccccaggaacttcaaatctgggagatgaggaaagaaaactcactcacaaacaacataaatgtaaataattcaaaaccctaaaggagagctgtccctagacagtagtggctacaggtgctaagcaaaagtcaggtacactggacagagccatgcgattgattgttcatcttccctctctgggtctccagaaaaggacactggcaatatccccagctctctcctgattggaattctttgaaccctcgaagtgctccagcagtactaccccccacgtagcagtgggcccatgtcgcttgaatattatttttgatttgaccaccaagatgtaatgatgattctattccattttgaaaagggtctgagaaagtgtacaggtctaattatatatacatatttatacatgtgtatttttgtttattgttacattttgacattggactttctattaaataatttttaagagttg

SEQ ID NO: 362811 - DNA, 570 bp, Homo Sapiens
acacacatgcttcataggctatccagccaagtgatgggaagaggcagagatttggatctttttgttaccgtcagacaagtgactgtttctccccaaagtcaaactggcaggttgtaattcacagaggacagcaggaaccacgggcagccaggtctccaggctgagtggccgggccccgcgatgggctgctgatctccgccttcgccccacatgcgacctgtccagccgcaggagcctggagccccgcgaggccttcccgaagcacctgcaggcccagcgcagatgagccgcagtctcctgccgcttcctgggcagcagcccggccacagcagcgagggggcggcagcaggccggcccatccggaatccatgtgtcactggcctaggcctccctccgactcgctggctgtttgatctgccaaaatgggaccagtgaaggtcagagggaaaagaaatgcttaatcagaacaggaaaggtttaaaataaaagattcctccccacctcccttcttccacctgcttccaatagccagctccgtgggtgagaataaatgacttactgcttgacccc

SEQ ID NO: 362812 - DNA, 775 bp, Homo Sapiens
  misc_feature (295)..(316): n is a, c, g, or t
tatgcagccaatttcttggcatttgcttctctttctcctcaactcgactgaccttggtggaatgcagataatgcctctttgttgaaataactttgtgggaatgtacaattttctatatctcttagctttccgtggttctcaaggatatgtacagttttcattttcctccaaagttgaattttgctacatttttcttttaggtaatgataagcattttttaaaaaatcatttttaggtaatggtaagcattttatgccaaatgtggcataacagagtttgaattgaagggcaaagnnnnnnnnnnnnnnnnnnnnnngggccccttgaatggtataatacagtcctctccggtggaaagaagagaagagaaggtggacagccctgctcttagtaggtgctgcagatccaaggacatcttttgtccagcttggattaacttgacgtgtatccctgcctgacaaggttgaactgaaagatctatatgttaagctaacatgaaaattcatattctgcaacatagtagatttttctaatgcatgaaataagtacccagcacagtaaaaatactctgacttatgtccctaaatggttgttttgatacaactatatagaaaagagccacaaaataaagataaaagttattgtggccatctctgaaaaaaatatataaaatatttaagaagaattatatcttaggaaattatttttacagtgtgtttgaggctacaaacataactcccccattaatacaaattaaatgtgagagctcattctc

SEQ ID NO: 362813 - DNA, 289 bp, Homo Sapiens
ggtgtgcaaaagtattgcctatgttgttttacacaccactgcattaactagaactgctgagaggactgtatatatgattttaaacctaagttgattttttttctcactcttgaaaggagtacttctttgtgaaagcagttcttacagctttgttttcaaccagctaaaaatgttttatatattactctaacctgttgtcctccacattctattgtcctaattgtactgttttctgatttgtatttatgtcttgagacagtaactttttgaataaaaataaacctacagt

SEQ ID NO: 362814 - DNA, 229 bp, Homo Sapiens
gggtttgggattttttttaccccccccacaaaagagttcacaaaaacaaaaacggggggccatttatacccaaggccaaatccccaacacccaagaaattaaagttgggtctggtatgggcaaagaaaattatttcatatttactggggagggaaagcaaaggccaggcccaagggacaaaaatcattaaacccaaattatgtttaaaaaaaggcggggggaaaaaggg

SEQ ID NO: 362815 - DNA, 547 bp, Homo Sapiens
acgatatcagggaacctaggaggcttcctggccttgtgaccttttccttgaatctcttataattctttctacctgtgttgcatggcagattctcagattgaggctaaagaaaagaagggtggggacaaagcatacagaatgtgtgtatctgtttttatgtgggtgttggctgtttttcgtcactgctttttaagctgaatcttagctggttttcttgaactttgactttaggtgtaaaaattcaaccagacattctctccttactgtggtcagctgacatcataaccactaaggcttaatgagcttaacttgcactttcatcactagcaaaggtcttgaagttatttctcttactgattcataatgggtgtgtgtatgaatcactctcacataatttagatataaaaacctatgaggatgagggagggaggggaagaaaaaaaaggactcctttcattttcatccgtacttcccagatgggctgaatctccgattatttgacccatcattgttattaatatggttaataaactacctatttattgaa

SEQ ID NO: 362816 - DNA, 1229 bp, Homo Sapiens
agcgggagcccagagagccgcggggaccatggagccggtgccgctgcaggacttcgtgcgcgccttggaccccgcctccctccccgcgtgctgcgggtctgctcgggggtctacttcgagggctccatctatgagatctctgggaatgagtgctgcctctccacgggggacctgatcaaggtcacccaggtccgcctccagaaggtggtctgtgagaacccgaagaccagccagaccatggagctcgcccccaacttccaggtcttctcaagtcttaggattgcagcaacacgctcggctgcccaaacccaaggcgaagaccttgccagagttcatcaaggatggctccagtacgtacagcaagattcctgcccacaggaagggccacaggcccgctaagccccaaaggcaggatctagatgatgatgaacatgattatgaagaaatacttgagcaatttcagaaaaccatctaagtgctggaggaaccacgcttcctaactgctgcttctcagggaatccgacaccagccaaccattttaagcctctaaaagacctcgggcaagtctcacagaaactgagctgcagacggggagtagctttgtggaaactgatttgatggacactgcaccagcttccttcaggttctagattcttgctacttagggcgggctggtttggacctaacatctcgcacgtgactccctcagcctcagagccttgggatgcagagcagctggcagggttcctctcaatcctgcaaccccagctgtcccaccggtggatgcagaggggaatccgaggccatcaaccttggtgacagcagcgcagtgccaatgctgatcacactgcatgggagattttgttaacgtctgccacccccactctcacccccaagctctaagcccccgggaggcctggactgtcttcctcatctctgtagcaccaagcctgatagatctgtatatggtaaacaggggtttaaccacatgtggttaacatggattaatgtgggaatttggcttcaagaacacaaccttaggaccttgggccccaaaagctggtggtgaaatgagaggagccaatttaagaagacccttatggagacctgaggctgcagaaactggtaggtttcatcaggtggttaaagtcgtcaaagttgtaagtgactaaccaagattatttcattttaaaaccacagaataaaaatgacacctgagcttctctatg

SEQ ID NO: 362817 - DNA, 925 bp, Homo Sapiens
gtgggaccggtcccgaattcccgggatcagagagccgcggggaccatggagccggtgccgctgcaggacttcgtgcgcgccttggaccccgcctccctcccgcgcgtgctgcgggtctgctcgggggtctacttcgagggctccatctatgagatctctgggaatgagtgctgcctctccacgggggacctgatcaaggtcacccaggtccgcctccagaaggtggtctgtgagaacccgaagaccagccagaccatggagctcgcccccaacttccagggctacttcacccccctcaacaccccacagagctatgaaaccctggaggagctggtctctgccacaactcagagctccaagcagctgcccacttgcttcatgtcgacccacaggattgtcacagagggcagggtggtgactgaggaccagctcctcatgcttgaggctgtggtgatgcacctcgggatccgctctgcccgctgtgtcctgggcatggagggtcagcaggtcatcctgcacctgcccctatcccagaaggggcccttctggacatgggagcctagtgcccctcgaactctgctccaggtcctacaggatccagccctgaaagacctcgtcctcacctgccccaccctgccctggcattccctgatcctgcggccccagtatgagatccaagccatcatgcacatcttctcaagtcttaggattgcagcaacacgctcggctgcccaaacccaaggcgaagaccttgccagaagttcatcaaggatggctccaagtacggtaccagcaagattcctgccccacagggaagggccacaggcccgctaagccccaaaggcaggatctagatgattgatgacctgttttggaagaactacttgaggcaatttcaggaaaaccatctaagtgctggaggaac

SEQ ID NO: 362818 - DNA, 479 bp, Homo Sapiens
tcctagagtatacccgtattacgctcctagacggcagggcacaggctgaccagcacttgtgcccttgtccaatggggaaatggagtccttgtctccgcaggctccatctatgagatctctgggaatgagtgctgcctctccacgggggacctgatcaaggtcacccaggtccgactccagaaggtggtctgtgagaacccgaagaccagccagaccatggagctcgcccccaacttccaggataaggtgggcacctctgcctccccatgtgccctggcactctcctggcacacccgcaggctgctcgtgggcttgccacgtccagcagtcactccctcccctcggggtttgctcccaaggccctcacattcaccacaacccagcctcaagggtggggatgtcctcagagggtcggcaatgccctggactcagagaggttgcaccctctccctctcagtctctggtcacacctgcctctg

SEQ ID NO: 362819 - DNA, 482 bp, Homo Sapiens
atgtaattatgttctaagtgcctccaagttcataacttattggaatgttgagagtgtggttacgaaatacgcttaggaggacaaaaaggaatgtgtaagtctttaatgccgatatcttcagaaaacctaagcaaacttacaggtcctgctgaaactgcccactctgcaagaagaaatcatgatatagctttgccatgtggcagatctacatgtctagagaacactgtgctctattaccattatggataaagatgagatggtttctagagatggtttctactggctgccagaatctagagcaaagccatccccgctcctggttggtcacagaatgactgacaaagacatcgattgatatgcttctttgtgttatttccctcccaagtaaatgtttgtccttgggtccattttctatgcttgtaactgtcttctagcagtgagccaaatgtaaaatagtgaataaagtcattattaggaagttc

SEQ ID NO: 362820 - DNA, 2515 bp, Homo Sapiens
  misc_feature (50)..(87): n is a, c, g, or t
  misc_feature (1933)..(2069): n is a, c, g, or t
  misc_feature (2077)..(2090): n is a, c, g, or t
  misc_feature (2108)..(2184): n is a, c, g, or t
  misc_feature (2195)..(2293): n is a, c, g, or t
  misc_feature (2310)..(2319): n is a, c, g, or t
aggatgatacgatcactatagggcgacccggatgtcaccgcggtggcggnnnnnnnnnnnnnnnnnnnnnnnnnnnnnnnnnnnnnnatcaggccaaatcggccgagctcgaattcgtcgagagcggaactgaaaatccacaagacagaatagccagatctcagaggagcctggctaagcaaaaccctgcagaacggctgcctaatttacagcaaccatgagtacaaatggtgatgatcatcaggtcaaggatagtctggagcaattgagatgtcactttacatgggagttatccattgatgacgatgaaatgcctgatttagaaaacagagtcttggatcagattgaattcctagacaccaaatacagtgtgggaatacacaacctactagcctatgtgaaacacctgaaaggccagaatgaggaagccctgaagagcttaaaagaagctgaaaacttaatgcaggaagaacatgacaaccaagcaaatgtgaggagtctggtgacctggggcaactttgcctggatgtattaccacatgggcagactggcagaagcccagacttacctggacaaggtggagaacatttgcaagaagctttcaaatcccttccgctatagaatggagtgtccagaaatagactgtgaggaaggatgggccttgctgaagtgtggaggaaagaattatgaacgggccaaggcctgctttgaaaaggtgcttgaagtggaccctgaaaaccctgaatccagcgctgggtatgcgatctctgcctatcgcctggatggctttaaattagccacaaaaaatcacaagccattttctttgcttcccctaaggcaggctgtccgcttaaatccagataatggatatattaaggttctccttgccctgaagcttcaggatgaaggacaggaagctgaaggagaaaaagtacattgaagaagctcttagccaacatgtcctcccagaacctatgtctttcgatatgcagccaagcttttaccgaaagaaaaggctctgtgggataaagctcttgagttattaaaaaagggccttgcaggaaacacccacttctgtcttactgcatcaccagatagggctttgctacaaggcacaaatgatccaaatcaaggaaggctacaaaagggcagcctagagggcagaacagagaaaagctagacaaaatgataagatcagccatatttcattttgaatctgcagtggaaaaaaagcccacatttgaggtggctcatctagacctggcaagaatgtatatagaagcaggcaatcacagaaaagctgaagagaattttcaaaaattgttatgcatgaaaccagtggtagaagaaacaatgcaagacatacatttccactatggtcggtttcaggaatttcaaaagaaatctgacgtcaatgcaattatccattatttaaaagctataaaaatagaacaggcatcattaacaagggataaaagtatcaattctttgaagaaattggttttaaggaaacttcggagaaaggcattagatctggaaagcttgagcctccttgggttcgtctacaaattggaaggaaatatgaatgaagccctggagtactatgagcgggccctgagactggctgctgactttgagaactctgtgagacaaggtccttaggcacccagatatcagccactttcacatttcatttcattttatgctaacatttactaatcatcttttctgcttactgttttcagaaacattataattcactgtaatgatgtaattcttgaataataaatctgacaaaatattagttgtgttcaacaattagtgaaacagaatgtgtgtatgcatgtaagaaagagaaatcatttgtatgagtgctatgtagtagagaaaaaatgttagttaactttgtaggaaataaaacattggacttacnnnnnnnnnnnnnnnnnnnnnnnnnnnnnnnnnnnnnnnnnnnnnnnnnnnnnnnnnnnnnnnnnnnnnnnnnnnnnnnnnnnnnnnnnnnnnnnnnnnnnnnnnnnnnnnnnnnnnnnnnnnnnnnnnnnnnnnnnttgggggnnnnnnnnnnnnnnaaaaaattttttaaaacnnnnnnnnnnnnnnnnnnnnnnnnnnnnnnnnnnnnnnnnnnnnnnnnnnnnnnnnnnnnnnnnnnnnnnnnnnnnngggttggattnnnnnnnnnnnnnnnnnnnnnnnnnnnnnnnnnnnnnnnnnnnnnnnnnnnnnnnnnnnnnnnnnnnnnnnnnnnnnnnnnnnnnnnnnnnnnnnnnnntcttcttttaaaatttnnnnnnnnnngggcattttttaaaaagtggggggaattttttaaccttcccgcccccatgggaccccctccaaccgggtggtggtaaccctaattcccccgggggtatccccccttggccctggggaaaaaattttcccccgggacggaaagcttgctaaatgacccgtgaatcactgactcactatagagtaattaggcttccaa

SEQ ID NO: 362821 - DNA, 303 bp, Homo Sapiens
agtagtcaaaaaaaatctgacgtcatgcaattatccattatttaaaagctataaaaatagaacaggcatcattaacaagggataaaagtatcaattctttgaagaaattggttttaacggaaacttcgggagaaaggcattagatctggaaagcttgagcctccttgggttcgtctacaaattggaaggaaatatgaatgaaaacaactcaatattacgcaggcgaaaataacacatcgatttagttttattataggaaatgtacatgtatctcgatgttgattttcttcacagaggacaaag

SEQ ID NO: 362822 - DNA, 563 bp, Homo Sapiens
cctctgattcccacccctacccaccaaaaaatggtagacatgaaaggcaggtgaggaaacagaaaaaggtctctttgcagatatatattttttaaatggcactatgtagtaattaagagctaaggagacagaaagacagtagatgagaatagaagagtacctgtacctacaaggggaaaaatgaatgcaattctttatttgataagagtgaactgaaagagaatattattttccctacaataaagcaagctgtcctctcacaggataaagtggaattctgacatggattatggacttcttctaactcccattgacattgcttcttaccagacatggggaaaagctacctttcctgaaaggggaggagggcactgtcctttcagacaaagcttgtacaaattcctgaaccgcaaatttgctgaagtgaccgtatatattatattcataatttaaatgattatttatggtcagatacatattgttaaacttgaaaatgttttattacattacatcaaataaagtttatttgtagctgaaataaagcaacgtaagtaacaattttt

SEQ ID NO: 362823 - DNA, 1148 bp, Homo Sapiens
  misc_feature (960)..(1009): n is a, c, g, or t
agtcgacggtacgggacatatgcccgggaattcggccattacggccgggtatgtctaaatttcagtacttaagcaaatactgagtagtgttttaaattcagaaatagagcttctattatgaacacatgagaatgatttttttctcttaatcattattaaggaaatattttaatttcatggtcatataatggtgataagtaatacctgattgtttccttttctgttctagtaactcagaggagatacgtgttttatttgtgatagcaaattcctaaatgaacattaggcaagtggtatcattatcaggccagctgcagcctcttgccttgacctgcattcctagaatttctttgttgctgtaattcttgattaagtgaccttgactttcattttgtaattttgctaatcatcagcaaattcacttgcatgacgttactgccaaatatgaaggcagttgaattattatgagtgattgtggcagaggtttgtgccatggtgaaaactttgatgtttgtctgtgttcattggatccatctttttaaatgacattaccatgagtctgttgtcaaacctaaatatctttgtttgaatttaaaatgggactctatattgttgtagttcaggtcttcattgactaagagattgagagaaatctgacataagaaaatattgttttcactgcaggaataaagaggaagtaacagtgaatccaatataggtcatattgttattgtccaatcatcaagttaactaagcattatcagattacgtttatttctcatacatatggatattaacttaaggtaaaaaagctagatgtgaaggatctgaaaaggcattaatttatgtactaattctataaacatgtattaataattgcagtattattaaatacagatggactcaatgtacctttgaaaagaccactaatttagaaaacaaagctaagtgcagtcattnnnnnnnnnnnnnnnnnnnnnnnnnnnnnnnnnnnnnnnnnnnnnnnnnnggtctaagttttcttcatgctggaacaaatgttaaagaagcagtgattgcttacaatgtatgtgataaaataatacctttcacaatcaaaattttaatagtaaatataagataaaatttatattaaataatgaaaacgt

SEQ ID NO: 362824 - DNA, 561 bp, Homo Sapiens
gcggagaggaaaacaaggccgggttgctggacctgcctgacgcatctgtgaatggctgaagctccgataaggaaaaggcagggggcctggatgatgaagaggaggccgagctcgtcccctccgaggtgctcatgcaccaggccatccacaccatcgagttctgcctgggctgcgtctccaacaccgcctcctacctgcgcctgtgggccctgagcctggcccacgcccagctgtccgaggttctgtgggccatggtgatgcgcataggcctgggcctgggccgggaggtgggcgtggcggctgtggtgctggtccccatctttgccgcctttgccgtgatgaccgtggctatcctgctggtgatggagggactctcagccttcctgcacgccctgcggctgcactgggtggaattccagaacaagttctactcaggcacgggctacaagctgagtcccttcaccttcgctgccacagatgactagggcccactgcaggtcctgccagacctccttcctgacctttgaggcaggagaggaataaagacggtccgccctggca

SEQ ID NO: 362825 - DNA, 625 bp, Homo Sapiens
gggggcctcaggctttcagatgaaatggctcctcctactcacccactttattcctctccatgtaattcaggacaagctgcaacttcccccagcttaacacaatgcccatacctcatacgatatgcgccctcccgttccatccctggccccctcaaacgagacttctcacaaggctgattacagatggtcaaacctggcttccaaggacagaattgcctctcggaagccagctgtggatctgagtccagagttggccacttgtgtgggtcctcacaagcaaagagagcactaaacttgacattgggggtccaccactccaactttgctttctgaaggttttggtgtacattgagccccagaaggaaaggagagtatctgtgagtgggggcctcccttgaccccagtacgaagtctatgccctgaatccccagagtagcccttcctggtgcccaactggcctggggacaaacagcgtccactacatctaggactgccggctaagtggacacacttcttgacctcctaccaggaactttggtaaaagctagctttggggaaggggttgggtgtaaatatgagagggtggagggagaccagctggtagcaataaacatgggtagaacta

SEQ ID NO: 362826 - DNA, 387 bp, Homo Sapiens
ttgcaaagctagttagaaacatgctccataaaggcaatacttttcacaaatttgcttttcactagctacaagctaaaccgtaaccatcgtccatgatgagaatgtgagtacatttttatttacgcataattttaatataattttaaaaaataacaggcaaatgaatgtggctgacatctgggaagtattaatatagttgaatgctaagttaggtctgaacatcctgacagctaggacaaaaatatataggatttgttttgatcttatccaatgagaccaattttcctataaacaagacaagttttatccttaaattcaagggagaactgattgtgtaagctcctaaaacaatgtaaaataaaacaaaacgaagttaaaacaatgaaa

SEQ ID NO: 362827 - DNA, 468 bp, Homo Sapiens
  misc_feature (441)..(442): n is a, c, g, or t
atttgtatatgggctgcactcacgcatatacgagttggtttatctttgtgtacatgactataacccagtgatgctgaggtcatgtgctggaatgctgtatttggaccacacatttcaaagttgccctatggaaatgaatcctacttagtgacaagtcatcaaatgtttgtcacatgtgatgaagacaaatatgtatacctggcatagagaaaaatatatacctggtacattggagaaaaataattacactttcaaagagaattccctttgcaattttatgtttggatcaccactgtaagcacactttatttgcatttgatctgtatttgtatatgctgatgcaatgataaaaatcactgtaatacttcattgtgttgtactggatgcaaagctagaaaatattgcaataaatgagaccgatgaaagacttctccaaaaccnnaacccctctccaacccctaatcttgt

SEQ ID NO: 362828 - DNA, 446 bp, Homo Sapiens
ggcaatgccaagctgcttcatcaactgttaatacttcttccagcccgcaacccaggatatctgcaggtgtctctccctctggtttggtcatggctctctctgttctagaatgtatgggttaaagtcggctgccacaccatgccctcggcagtgtggtccaaggacccctgagggtcctcaaggtccttcctttcccaaccccacgtggttttcttcagtcaggataccatactgcaacagaccgaaggcggaagcagctatgaggatgcagcagccttctgttaagccaggctttaaggatctgcaaaaatgtaaaacgatgccactcctactgatgaaatatattgttttggaaaatataggtttaaaaatttttttaaggtaacatgtaatggatgtatagtcttcaaatggatgaataaatgtttttcagagttattggcttt

SEQ ID NO: 362829 - DNA, 782 bp, Homo Sapiens
gaagaggaggaagagggatccggctcagaggagcagccctttgcactcttcctgccccgggccacgtttgtgagcagcgtgagacccgagagctctcggctgccagagggtagctcaggcctgtccagctacaccccgaagcactctgtggccttcagcaagtggcaggagcaggcgctggagcaggccccgagggaggcagagccccgcccgtggaggccatgctcacacccgccagtcagaatgacctctcggacttccgcagcgagccagccctgtatttctgagcccagcactgccaggaccaaggctgagcccagctgtgggagtcccggaagctgggcagtagccagggactactgcacccgcttttgccttgtttggcctcactgtatcccacccacccctcctggccctggaagcagctagggtgcctcctgccatcggggccaggtttgggtctcactccccggccctgatttgggagggtccaagggggaagtggggtggggaactgcctgtgggtgagtgccaggggcctgctgggtggtggccatctgcgacccggcagggggctgtgcagattctgcacctggccattccctgtcctgtctcctcagcctgcctcacagtggccatggggtgtcggggtgaagggctgtcccagctacttgtcctctgcaggaccctaagcccctgcccgcagcccacatgccctctgtgatgagtggggtctttcctgcctctgatgatggactcaataaacagcactggacaaggaa

SEQ ID NO: 362830 - DNA, 472 bp, Homo Sapiens
tttttagaaataagtatatatctttattttgaaacacaattttattttagggaatgatgccattttaggctctagggataaaaagaaactggtatcttggccctgaaacaagtagttacaatcctgctatgaaaacgagtaacaaataaagcatatacaacaactataagaactactatttattgagtgccttctttgtgccaggcatcattcacagcactttattaactcgtttaatcttcacaacaatcttatgaggtgtagactattaatattcctactattttagagatgaggaaactgagatacagaaaagttaagaacgttacccaagaacacgtgactactgagggcagttaggatttgaactcaggtagtctagctgtgggacctaaccatgacacttttaaaagcttgtattaagcataccacaagcaccctgactctggaaaacttacatctaggtttgaat

SEQ ID NO: 362831 - DNA, 777 bp, Homo Sapiens
gcggccgctgcgccgcaaactcgtgtgggacgcaccgctccagccgcccgcgggccagcgcaccggtcccccagcggcagccgagcccgcccgcgcgccgttcgtgccctcgtgaggctggcatgcaggatggcaggacagcccggccacatgccccatggagggagttccaacaacctctgccacaccctggggcctgtgcatcctcctgacccacagaggcatcccaacacgctgtcttttcgctgctcgctggcggacttccagatcgaaaagaagataggccgaggacagttcagcgaggtgtacaaggccacctgcctgctggacaggaagacagtggctctgaagaaggtgcagatctttgagatgatggacgccaaggcgaggcaggactgtgtcaaggagatcggcctcttgaagcaactgaaccacccaaatatcatcaagtatttggactcgtttatcgaagacaacgagctgaacattgtgctggagttggctgacgcaggggacctctcgcagatgatcaagtactttaagaagcagaagcggctcatcccggagaggacagtcatgaagtactttgtgcagctgtgcagcgccgtggagcacatgcattcacgccgggtgatgcaccgagacatcaagcctggcaacgtgttcatcacagccaacggcgtcgtggaactcggtgaccctggtctgggccgctcttcagctctgagacaccgcagccacttccttatgggacgccctactactgtcacccgagag

SEQ ID NO: 362832 - DNA, 352 bp, Homo Sapiens
agcggaccccagggacacgggagagggtgcggttcagtgacaaagtgctctaccatgctctgtgctgtgacgatgaggagggggacggtgagcaggaggtggaggaggaagaagtgggcttgccccctgagcctgcccatacagaggcccatgcaggcccccacaagccctccccagccccctacaagtcacggcgctctccactgaccagccgccactcaggctctaccttggcccctgaacagactcgaagggtcacgaggaacagcagcacccagacagtgtcagacaagagcacgcagacggttctgccctacacagccactagacagaaagccagggggaaaaacta

SEQ ID NO: 362833 - DNA, 506 bp, Homo Sapiens
ctccttcctgactcttaacccatagctgcttccttccgtgtttctttactgtcttctgttttcacatcatacaccaaaatgatttctcatgaggaagggcaaggtcccccgttctcctaaaatacagtctaaacttactaatgtggactgcacggccattgaagatggtaactgcaccagacagagatgggctggatgcttttaacctcagcaatataccttattttctcttgtaagctgtgtttggacttatttttattttgttaattctaaccttcacttttcattgtgagccccacctgaactcatattctactgactttcccgtgtctaacttctgcttacacattttatcttagtatacctgttacttcttccaggaatcatcacttcttcctctgagaggtctgcctttctctgtcagttgtagactgtgctgagccctcacaaggccctgggttcaatccccggaagccagaagaacactcaaacatggtgaggtatgt

SEQ ID NO: 362834 - DNA, 679 bp, Homo Sapiens
  misc_feature (605)..(617): n is a, c, g, or t
gaccaggccagggccggcatgcagagaaagcgcagcgtggggcaacggcaagtgcctggtgtgggccgaccaagccccagcctcggacacatggtcccaggtgccgggccctataccagtacgtgggccaagatgtggacgagctgagcttcaacgtgaacgaggtcattgagatcctcatggaagatccctcgggctggtggaagggccggcttcacggccaggagggccttttcccaggaaactacgtggagaagatctgagctgggccctgggatactgccttctctttcgcccgcctatctgcctgccggcctggtggggagccaggccctgccaatgagagcctcgtttacctgggctgcaatagcctaaaagtccagtcctttggcctccagtcctgcccaggcccttgggtcacaaggtcaatgctgcagcccccgcccctgggccctggtcttcctccaacatcacacctgctgcccattttccatttctgtgtgtgtcaaaggggactaacagcagaatctacctcccaactgccatgtgattaaaaaatgggtcttgagtcctgtgctgttggcaaaagtgccaacgcacagttnnnnnnnnnnnnntccttaacaagcgtgactttgctcattctgtcatcactaaggcaataaacctttgccaggtg

SEQ ID NO: 362835 - DNA, 229 bp, Homo Sapiens
tggtttgttttaatatcaggtggatttttgtttctaagcaatatatacataaaatcaaccaacatatctgaaaaggatcatgaaacctgagaaatgctaatggagatttgctggtacataggaatctagcaaattcaggaaccaaggggaaatgttgtgagataacatttacattgtcaacctttattgactttgtttttacaataaaaaatattttacaacttaaaaa

SEQ ID NO: 362836 - DNA, 543 bp, Homo Sapiens
  misc_feature (428)..(461): n is a, c, g, or t
gtttctcagctggaaaagaagccacacaggaaatgacaacgacgctgaatcccagcctccctccccagagcagaagtcccgcaggacagacagacacagacagcgctagtgaccagcacggttctcatgtaaattacaagccccagccgccagccccgccttctcttcctcctcctccgtcttcttccctggccctggtcaggcctgtggagccccagctctgggtccctagcccgggtccaggcagccaggctccctcctgagctgagaaacggaacctcgcgaaccactggtggcacatccttctcctcccccgcccctgatcacccgcccccggatcagaaatatatctatattctcgactaaagtctcatcaggaaatatttcctgtcttttattttaagcatcaaattgttttagttgatttnnnnnnnnnnnnnnnnnnnnnnnnnnnnnnnnnngccaagggtgttgttggggcgtctgtctaatgtggtgggtctttttttgaggggtctcctaaaataaaatattttgataagc

SEQ ID NO: 362837 - DNA, 431 bp, Homo Sapiens
gcactcattggagaaatagtgagtgtaaaaagagatttattttgtacagacagcaaagtatcctgtgtaatgttgctgacataaagcactttgggggaaaaaagtggaaatctgttttccataaatcacacagactcttgtacatagttatatacactcacgtagagaaatgaactgcatatatcatactggatatggggccgattttactctagaggcacatctggtgcttattgtcataaatcttttaaagaattaggtacacttttttctattaatatgtatagttttgtgatttgtcacagttatgtttcatataatcataagttattttgtcttgttcatgaagtcctttttttatgtcaaaagtaaaatgaagggattgtgcacttggtacagaataaaactggaaatagagaagacgcaaaaaa

SEQ ID NO: 362838 - DNA, 440 bp, Homo Sapiens
gtgggcccagggtctggcaggcaacggcgcggcccctgacaacgtggagatggccctgctcccctcctaaggaggtgcttccccatgctctttgtaaatggcactacttggtccccaaactgaaccccactgcttgctcacatccatatcagaaggggatttttaaaaaactgttatcttcttggcccaggggaaaggaccacaaggcaatctggggtgtggacagacccagtagacaatggaagccccagccagcagggccaggtgacagtgaagctcaccagtgggctcctttatggtactctatgcagttaacatgtatctagctgcatagggacacccagcgcagcagtgcaccactgggaagtggcctccagtgcagcctctggccttattttatatatttaaatttttgataaagtttttcttactaaaaaaaa

SEQ ID NO: 362839 - DNA, 578 bp, Homo Sapiens
cgagttatggcaaagcccacgagtcttatggacgtgttccccaccatggtacggctggcgggcaccgaggtgccccaggacagagtgattgacggccaagaccttctgcccttgctcatggggacagcccaacactcagaccacgagttcctgatgcattattgtgagaggtttctgcacgcagccaggtggcatcaacgggacagaggaacaatgtggaaagtccactttgtgacgcctgtgttccagccagagggagccggtgcctgctatggaagaaaggtctgcccgtgctttggggaaaaagtagtccaccacgatccacctttgctctttgacctctcaagagacccttctgagacccacatcctcacaccagcctcagagcccgtgttctatcaggtgatggaacgagtccagcaggcggtgtgggaacaccagcggacactcagcccagttcctctgcagctggacaggctgggcaatatctggagaccgtggctgcagccctgctgtggcccgttccccctctgctggtgccttagggaagatgacccacaataaatgtctgcagtgaa

SEQ ID NO: 362840 - DNA, 470 bp, Homo Sapiens
aattggggcggccttttttaagtggcgcccatagcgaaaagggctcaggtcgcatgtggaaaactttccccttttttgtcgcgccccccgggggggcagtcagcatgttgtaatgggtccctgaatgtcgcaccccggagagcccaagagacccgggtttttcccctccccccctttccgcatcagggccaaaccgtttccctggggagatggtacccatacttttttccataaccctcatgtgaatccccttccccctggcttcgaaaatgaataaaaaaaatttgggccccttcccgggccccaggggccccacccctggtttgggccgtttctttgcccatgggcccaaaaaagtatttgggcccttaagctccccttttttacttgtatcaaatgatggctggtatactggtttcccccccctttgcttggggccggggagggctttaataaattactttaccttt

SEQ ID NO: 362841 - DNA, 863 bp, Homo Sapiens
  misc_feature (586)..(598): n is a, c, g, or t
atagaataaaaaaaagagttaaaaagtggggaagtggatctaccgttttagaaattgaggacgccacacctatatttggccctcttaatgttgccgccaaattctccccttgggcgccaaagaggccacaccgtgaaagttctgcggaagaggtaagaagcaccaaaagtggaagaagtttctcctgtgtacgctgtgacctaaatcttcaggagtggattagaggagttccaagacgtcccgcagagaggaggagaaaataaaggtcctgtgtcctttaggaggtccttttctcttctccagtgaaaaaggcgccactctaattctccccccgtggacctggcacacaattatagcgcaataatgtgaaactccaccttccccctggggggtgaacgccatttaagaagagaacacatttctccggccccaaaagaggaggtgtgtaaggatttcttttcttctacttaaaggaataatacattcacaccaaataattgggcccagggtccggaagccatttcaggaacaaaccaccaatattggcaaagccaccagtttaagtaccagcgccttttattagcannnnnnnnnnnnnaaataaaagggatgcgtatcagagtgtaagaactggaaattacttccacagtttaaagaattaataagagaatgctggttcaatttcttaaagatggaaagcttaccaaaatgccatcagagtctgtgaactacttataataaacagcaggatccccactggctaggctgccgtgcacacagcacccacccgccacccccaggttaccattttaagatattctgtcaatgcttagttaaaaataagacttacttaagagaccaac

SEQ ID NO: 362842 - DNA, 449 bp, Homo Sapiens
cttaacagtcaaggggaagagtgattcctcacactgctttcaagctggactgagccagtctcattctgggaaagaaacgctgtgtccagaactcagcagctccatctattttttccagtcgaaagaaactgacctttaggcagtttttacttggcccagaaagcagtgcctgaatacttgaaactgtgtgctctgttcctacttaatgttctgtcagaatgttccttttgtaggcagtatgtcatgatgtaatcatctatctccttgtctgtttcccaagttacactgtgaagtctgcgacccttttgaggtggtcatcaaagacacagattccttgtttaaccaagtgtcccaaagcatgtacctgaagttatatcattttttattctaaaaagctatgcagcttatattctgaaaactattaaaacatataccactgttgttgatgt

SEQ ID NO: 362843 - DNA, 1174 bp, Homo Sapiens
ccatgaacatcagctgtcatttattatgatatatatatattttttaccatatttcatggactctaaagtgctaccaatggagagaagcatcctgattgagatgtgagaacgctctgcgtcttaaaaccagtggaacagagtaagtacaatcaaacccacgggccgtgctcccctgtccgctcagtcagtgcctggtggatgcttcccctagcaccgggctcctgcgtggactatccttagcatagggatgaagcctagggtccgcaagcagcgttgctccagggacctctctgggcctatttaggtgggcgtgaaggacatggaggacaatgggtgagctgagcggatctgagcgagaacagtccgcgaggccctgttcctctccgtagtatggtcacatgcaaaacagttggacgtgaaagcatgacaatagcgctcaagcgcgccagggtgccaggggctaggtatggttggcctcgcgcatcgtagtgctagggcctcgcatcagcgaggcatactgttctagcagcaaagagcccgcggctcagagcttgcgaaggactagggatctaagagatcgagattgatagcggctgtacgataacgagttagaacccagcccaaaacgctggctcaaggcccagtaggaaccagagtgggatatccacaatcaatagcgggacctcggagcacaagtacgttaggggctcggggcctattccggcgaaagagcccaatggtccccttatatctagggtctccgcaggtaggcaaactccagtcgacaaccgccaaagtgagttggaccacactggtagcggggacccggaaactccgacacccgggatatggtgggtcacacccgttggcgcattggatatacacaggcgaccgaagggagtccaccaattacgtcgggatgtcgtatatatccctggacgccgacacaggagggggttgagacacacattggtgataatacaggccgatagtaccatcccacggtcggggaaacctcacatgcgcagtaggcgcgcacctttggtggccaacggtctttcccggggcaattggcaacaggaccccatccagagccctatgtggaagcaatggagaaaccacgggcaccacaggtcatgcgacggcaatacatgcacgaagccagggggtcaca

SEQ ID NO: 362844 - DNA, 652 bp, Homo Sapiens
acgttgtaacagagctttattgcaattcatttcaaataaggttatgtttacagacttgtggtagacatgtgaattgttcattccaatataatgtgaattgcagtggtagtagcggtatacacagtgctatgggggcacagaggaaggtggggatgtcagagaaggcagtcgtgaatcagataacttcccaaaggaagagatgatgcctaaactctagaaaataggaattagtcacaagggagaacagttgttccaggtgcacaagacagactgaaccaaagtggggaggcaggaatctgcagattacatgaggcaattgtgaacagcagagtagcattggtacgtaaaagttgaggtatgcagagactaggtcgaaggaggctaaggagcttcaacttaatcatactggtctctaaattttgtaaccctaatcaaaaagggaaaaaattacacctgcacaaccaatagacatacaaagttatgaaacatgtaactgtcaattcaaatatttaaaagttttgcttgtgtaaatatataaaaagggctagtattcctcctccctccctcccacacacaccagtggtatatattaaatgcccaagtgcatgtactccatattggagacttctgcagaaggtgaggggaaccactg

SEQ ID NO: 362845 - DNA, 485 bp, Homo Sapiens
  misc_feature (56)..(227): n is a, c, g, or t
agagctcaatgcttgagaaaaggaattctgtcctttgaaaggtctctagaacaaannnnnnnnnnnnnnnnnnnnnnnnnnnnnnnnnnnnnnnnnnnnnnnnnnnnnnnnnnnnnnnnnnnnnnnnnnnnnnnnnnnnnnnnnnnnnnnnnnnnnnnnnnnnnnnnnnnnnnnnnnnnnnnnnnnnnnnnnnnnnnnnnnnnnnnnnnnnnnnnnnnnnnnnnnnngcagacatcatgcaacatgctcaagggctattcattttaagctgaaacatacatgtgtagaaagcatccttgtacttataatcccaatgactatgaagaaaaataatttagccaaatagttcctagaacaggaaaaataaggaattatattttgagataagaagttaagctctagtagaacatatgatatgggtcaaagaaaaatgaaaacaaattttaaaaacgttgcaacatgaataaaagtttcaccaaatcggg

SEQ ID NO: 362846 - DNA, 711 bp, Homo Sapiens
  misc_feature (290)..(392): n is a, c, g, or t
gctgttgagactccggggtgttcggggctgggagcctgctgagtgttccctgttcccacctccaatctgctccatcctccagctgcatttcattccggatctaccaggatccaactttactactgtcatggagggaattacagtaattctaccaacttttgaggcaaccttcttctgacactgtgtgaaacagactgaaaagactctaaagatggagagagctcaatgcttgagaaaaggaattctgtcctttgaaaggtctctagaacaaaggagtcttattctgtcannnnnnnnnnnnnnnnnnnnnnnnnnnnnnnnnnnnnnnnnnnnnnnnnnnnnnnnnnnnnnnnnnnnnnnnnnnnnnnnnnnnnnnnnnnnnnnnnnnnnnnatacagaagatgagagagagaaaaagagagaaattacagagtgacggagaaggcagacatcatgcaacatgctcaagggctattcattttaagctgaaacatacatgtgtagaaagcatccttgtacttataatcccaatgactatgaagaaaaataatttagccaaatagttcctagaacaggaaaaataaggaattatattttgagataagaagttaagctctagtataacaatgatatgggtcaaagaaaaatgaaaacaaattttaaaaacgttgcaacatgaataaaagcttcaccaaatcgggagtctattat

SEQ ID NO: 362847 - DNA, 567 bp, Homo Sapiens
gcaaaaaacattagttgagtgccactgagaggtaaaagatggaaaatgaacttagaaattgacactattataatacttagatccgggcatcgtaaaactttatcagtacatcatcacacaattctagaaatatgaaatgagttctagacctgactatgctagttctaacctgtgccactttagtcagattcctttccttcagttttatcacccttcaaatggcagtgataatcccagcacatctgctccccatgtgttgggagagactttgctgtgtgtgactgattattacttcaaaataaacctctaaatttagggcagtttggagaggaaaaaaacaggagatgtaaaggggtaggaaaaaggtcatctatagagaggtaaaggccatggattccactgaattctacagtttgaggggtaaagtgtaacctgtaatcccgaatgaaggactcagtggtgttaatatctgcccttaaacgtcttcattcactatggctcccacttctttctaccactccatcagcttcaaccttttatctgtcctcagaataaaaccacaatggg

SEQ ID NO: 362848 - DNA, 435 bp, Homo Sapiens
actaagcccaacacagtgcgtggcatgcagtaactgttcaaataatgtttgtttaattgacggggtttaagctcgataacttagctaagccctttgcacagtctaagcctaatttggaatgctttcagtcttacccaggccaataaaattttcttgcctcatctgaatttcctgcaaatgtgattaattaataagaatcatcaagattaattaataagaaattgatagcaggatgagtaacaggcccagacagtcccacagatcacaccttccaccctccatttccgcttagcttctcttgaatctattgggcatgattgcctctgtgggggctacagccagcacgggtgactgttcatgacctaccctctcttgcagtctgactgtggacaaatgccgagtccttaagagatggtgaagtaggcatagtagata

SEQ ID NO: 362849 - DNA, 393 bp, Homo Sapiens
tcctctacaaatccaaggcaggaaaagtggtggcagagtgactcattctcctgtccctcccatcaggtcaaatccaggaggctgccagtgaatgcctgttctttgaatgtgtagcagttgttcctgtaactctttaaaacttggctataggctgtttagcacagtacagattaaagatacagttacgtaaacagcaaagtaattttatagtgcttcatccatttatcatgctttggtttgctaattttttcacatacctttttctatcacagtctgttgcttttgtacacatttctcatattggggttcgacaggtaaacacaaactgctatttcagtagaaaaagttattgttatgaatattaaacccaataaattgtataaaggtaaaaaa

SEQ ID NO: 362850 - DNA, 738 bp, Homo Sapiens
ggaacagttaatgtttcagtcaatgtattatctgtagcatttcacaaataatgtttgctttgaaccaaaatgctcagtgcctatcaacatttggactcaagcatcaacaccaaattattcctcccttctcgtataaagtagagtgactatccacaggagaaaagtgtgtgctttagtattagaggagataggcagagaagtcttgcttagttccttcgtgcagcttcttgcccctgttgacgtggaatgctgtgtctgctttagcacgcacgctccgaatgactcctggtgctaggccatgctggctgctgtcactgagcgggactcaggccaagaggcgtgacctcgggccagcctgtctgttgtgcagacgcctcctctgcagaacgcatcagtttctattctgcagttgcagagccagccccgcgtgagaacgtgcataatgagtgcacaccatcatgtcaaggtgcatacttagtgagcgccatcctgctgaacgtgtatttcagtgtttcacttactggacggataacaagaaaaaaatcctaacacaggcagtcaccagaaataaatgtctcagcactttacagatgactaaaaatgttaattttatgacttagccaaatatgttctaggttgcatatatcccccatgtgaaagtgatttcttcccaagcttctcaaactgttagctgctgtctgacttcatcaataaagtatttttattttaaaatgcaaa

SEQ ID NO: 362851 - DNA, 297 bp, Homo Sapiens
gagttaataattacctaatattttcacatatctagctttttactaacccatggccagcctttttttcaagtaccccaacgtttttgccacatgcctaacgataccgttttccaaaggctcaaacacatccgttgtgtctaactgattctcctgttccgacctagaccgatcacttcctgacccggctgcacagctcttatctcgagcttttctctgctctcatccttgagactcactttgtctgtctcctttcttggattccctgtgtaaacgaaaaataaaatcctaagctctcta

SEQ ID NO: 362852 - DNA, 608 bp, Homo Sapiens
tgtgctggccaaaacagaatgttggagacacacactgaatttacttggaaggctgattgttttcccacgccctccctaggagggtgagctgggtgttgggaccttaactctgcccataagatgttcaggccaggagagatgccctttaccccttgggttacaagggtttccactccctttctgcttgattgaggcttgccctcagttctttgtatccctgctctgctctgcttgtttcaaacaacacatttttgcactgtgtcatgaacagctcatcttcagagagtctgtttttgctggtgttttccgggatctgcatgtgcctcttcccatgtaactttggtaggccttgtgcaggtcttggagtttccagtgtctttttgtcttctagtttcgttgaatatgggatttctgcctcattcccccgctcaccaccatatctccctatcactttgcataatttctaggaggaggaaggggacaattcagtcaaaatattgccacagttcttatactataatcatatcgctttgtaatataaatttctcccactttttccattataagattaaaaatagctcacaccaaaatcccatcgcttgaaccca

SEQ ID NO: 362853 - DNA, 1109 bp, Homo Sapiens
  misc_feature (446)..(446): n is a, c, g, or t
  misc_feature (450)..(614): n is a, c, g, or t
tttcactgcaaacacaccttggagaagtggcatcagtcaacagagaggggcagggaaggagacaccaagctcacccttcgtcatggaccgaggttcccactctgggcaaagcccctcacactgcaagggattgtagataacactgacttgtttgttttaaccaataactagcttcttataatgatttttttactaatgatacttacaagtttctagctctcacagacatatagaataagggtttttgcataataagcaggttgttatttaggttaacaatattaattcaggttttttagttggaaaaacaattcctgtaaccttctattttctataattgtagtaattgctctacagataatgtctatatattggccaaactggtgcatgacaagtactgtatttttttatacctaaataaagaaaaatctttaggccctggcgcnaacnnnnnnnnnnnnnnnnnnnnnnnnnnnnnnnnnnnnnnnnnnnnnnnnnnnnnnnnnnnnnnnnnnnnnnnnnnnnnnnnnnnnnnnnnnnnnnnnnnnnnnnnnnnnnnnnnnnnnnnnnnnnnnnnnnnnnnnnnnnnnnnnnnnnnnnnnnnnnnnnnnnnncaaatagcccagacgcaagaggagagaggaacagaatcgtgacaggcgcgatgtgagtataaaaaagcaatcggaacagcagccacggacactctacagctaagaatccgaagcaataaaagataggctaagagataaaggaagacgcgacaacgtaatagacgtaacacacagagaacacaaagagcagaacaaaggcctacagacagcggaggataagagaacgagacgagtggaggacgaaggaatgtctggatttgagatatcgacgtggagagcgagcgaagcgcgacgcgaagaagcgactcgcagagcgacgcaaaccgaatgggcggctgcgacggtcggggagaagcgagccgggacggaccgccgcgcagggaaaagagcgaggcaccacggacgagagcgtgcaaagcgagagagtgagagaggcaagcaaggaaggatgggtgatcagagaacgagatgagatcaagcacgcacagccccgga

SEQ ID NO: 362854 - DNA, 910 bp, Homo Sapiens
  misc_feature (36)..(36): n is a, c, g, or t
  misc_feature (43)..(43): n is a, c, g, or t
  misc_feature (84)..(84): n is a, c, g, or t
  misc_feature (105)..(105): n is a, c, g, or t
  misc_feature (449)..(457): n is a, c, g, or t
  misc_feature (606)..(620): n is a, c, g, or t
catctgctaaacatctgaccccagactcttcaaaantgaggantaaagataaagtagtcaatgcccgggcccagtgagattgcncccattgcattccagcctggntgacagagcgagactccgtatcagaaagaaaaagaggaactgaatgaaatctcagatggctgaaatgttagagaaacagagcaccaagtcccctgctctgtgactcgttgttcctttcctctgtcttcaagcaccacgcagaaatacactggatgttctctctttgcttcaatggagaccctaaggagctgggaggtctcttaagagactctctgattctccgtggctgggtgtgatgctcatgcccataatcccgagccctttgggaagctgaggcaggaggattgagaccaggagttcgagaagagcctgggcaacatagtgagaccccatctctacaaagnnnnnnnnnttagctggacatggtaatgaatgcctgtagtcccagctactccggacactgatgtgagaggatcacttgagccagggaggtcatggctacagtgacccctcattgcaccactttacttagcctgggtgacagagtgagaccctatctcnnnnnnnnnnnnnnntctatgcattgtatgggactttcctttggatcccccaatcaaaggataagcaatgcgtaagcctgtgtccttcctgaagcttctcgactgcccagatagggaggtgagtcctctctatctcctctggctctggaagcaccttgaaaatgtgcattttcaaggacacttgctgggttgtgcattaagggccagtttacttgtctgcctctttgaccacctgtgaactctgttgggtgtactctgctaagttctggggatgaggaaattaataaaggtacagtcttgccttc

SEQ ID NO: 362855 - DNA, 533 bp, Homo Sapiens
  misc_feature (469)..(483): n is a, c, g, or t
caggaaaccattaagccccaatagctacaaggagggtggttaatctgctatatcaaactccttccctgaaaccagcaaacaccgggaaacattttggctcattataatccggtgaacaatgcagtcaggcctgttataaccgctgagcagccacactcgcacctcctgggtgctgtagtctgtgttggtacaggcttctgcatgcctggtaaagtccagccaaggctggtcaaggcaacatctccacacagaaaatctgcaccagttatgtaagctaaaaagctgtgtgaacccaggtgtcccggaaaggggctgcaggacacagcaaaatgccagcagcatgccggacccctcccttccatcctcctctccaaagaagagaggtcaggaaaaacactggctgggacgctagaagggtcatgtgttaactataatcacatttatggtttggaaccatcaccccaaggtnnnnnnnnnnnnnnnggtattcccaggtatgtttggcaaaataaaataaaggtaattaaaaccct

SEQ ID NO: 362856 - DNA, 365 bp, Homo Sapiens
attcctttctacactacaaccaaattgctccaaaagacttactgatcatgtcactgcattgctttcaccattgctcttagggtacaatacaaatttatcttcatctttaaggtctcagtatgccacttcatctaggaaaccttcattgatgccctctagattaggtgcccttactatccattccctatacaccctgttctttcccagacatacacttggcacactttattgttactgcttattgatcactgctagactgtaagctttgtaagggcagggaccatataagccttgttcactgttatatctctagtgcttagcacaatgcctggcatttcaataaatgtttggacaaacgaaaaaaa

SEQ ID NO: 362857 - DNA, 599 bp, Homo Sapiens
  misc_feature (118)..(118): n is a, c, g, or t
cccctggtgggaatatgtcactagtggtgtcttatcctcttttaagtgacactgcttcattgccaagggagcagccttatgaggaccaaaccttgcccctttccagcccttccccaantgatgggatcagtgttgggcctctgagccaaagcaggccaggctgtaggctggccagcaaagtggctggcaggaagagatgagatgtcagcttccatgttgagaatttagggaacagaaagattgaacacatagaattaaggtcatgagattgaggccagaggaatggcaatggctgtgagagagatgggagaataacagtcaggcttttctttgagtccagggagcaggccaccgtcctgaggcataagactaagccaggggctcactccatcccctggccagtggggccttggccctgagttcagcaggagcagagctgccactgaacctcagaacgtctcggcttgtctcctcatctgattacatcgagtgtcatgttcctggaagaactccactatgaaataagtgattttatgatgaatggaaataccacttgccatggcaattattaaacacaaggaacttattatctcccaaaa

SEQ ID NO: 362858 - DNA, 255 bp, Homo Sapiens
ggccccgcgggttttaaattgggtcccaaaaggttccgcaagggtttccggcagttccgctaccagaatggggggggtccccgggaggctttccggcaattgggggagttttccccccaggggttggggcttaacatccgccccaaggaccagtttgtgaaaatgttggtccaaaaccagttgttccccttcctgcccaggggggttggggcccgggggttccccccccgcaggaatgtgggcttcattggttaa

SEQ ID NO: 362859 - DNA, 550 bp, Homo Sapiens
tcatccgtaaaatggggtcaataataactcctgccctgcctacctcacagggttgttgtgaggatcacgtagttcatagatgtgaaagggtttaaaagtttaaaagcactgtacacatttaagttattaattcatatggccttggctgaggtaaggcagattggtttacaagatacagaagtatggatatatactgtgacttcattgcttgaatctttcctttgctggtctaacttgactgcttcatggagtttgaaatcttaatttttaaaatccctgtgtggctcattagacgactataagcacaacctgtatttgtaccttaatctcttacatttccactgctgtgtatctgacatatctactagtaagcactgttttgtcaaaccgtctttctctccttcattttactggttcttagtctcctatcaatataaggaaataagaagtgccagggagccgccattgtgtgttacggtttatatcgataatcttcaatataaaatactggccattttataaaatattaaatatatgtaaattctttgca

SEQ ID NO: 362860 - DNA, 354 bp, Homo Sapiens
ctcctacctatggggaccaaagtgctttttccttcaggaagtggagatgcatggccatctccccctccctttttccttctcctgcttttctttccccatagaaagtaccttgaagtagcacagtccgtccttgcatgtgcacgagctatcatttgagtaaaagtatacatggagtaaaaatcatattaagcatcagattcaacttatattttctatttcatcttcttcctttcccttctcccaccttctactgggcataattatatcttaatcatatatggaaatgtgcaacatatggtatttgttaaatacgtttgtttttattgcagagcaaaaataaatcaaattagaagc

SEQ ID NO: 362861 - DNA, 837 bp, Homo Sapiens
aactccgcctgaggaactgcataccaattctgcagaaggagagtacagtgcactctgtagctatctatctttacctacaaatttgttcctgctcttccaggaatattgggatactgtaaggcccttgctccagaggtggtgtgcagatcctgccttactaaactgtttgaagcaaaaaaacaccgtggtcaggtaccctagaaaaagaaatagtttgatagagcttcctgatgactatagctgcctcctgaatcaagcttctcatttcaggtgcccacggtctgcagatgatgagcgaaagcatcctgtcctctgccttttctgtggggctatactatgttctcagaacatttgctgccaggaaattgtgaacggggaagaggttggagcttgcatttttcacgcacttcactgtggagccggagtctgcattttcctaaaaatcagagaatgccgagtggtcctggttgaaggtaaagccagaggctgtgcctatccagctccttacttggatgaatatggagaaacagaccctggcctgaagaggggcaacccccttcatttatctcgtgagcggtatcggaagctccatttggtctggcaacaacactgcattatagaagagattgctaggagccaagagactaatcagatgttattgggattcaactggcagttactgtgagctccaactctgcctcaagacaatcacaaatgacgacagtagtaaaggctgattcaaaattatggaaaactttctgagggctgggaaagtattggagggtcttttgctccatgtccaggttcacttacatcaataaaatatttcttaatgga

SEQ ID NO: 362862 - DNA, 1373 bp, Homo Sapiens
  misc_feature (526)..(542): n is a, c, g, or t
ctaatgtaacttcctgttacataattaaactatttctgactattatttttaaagcagtattattttataaccaattctaaaattcagctttaaaaatattgaacataccttcctaccacttacgcttcaagtttcatttattgaataccagggtcatatcttagaattgtatataaaacaacatgtaacccattcatgaaaaacgtttttaagtattgctttttgctgctatgttctgcattgagcctagttttgccattgtcccctgaatgtagtattatctatagattatacataactacatctattgcttttggtggtaaatcaagatttagttgtaattttccagctgtgaaaatgttgccttgtatttaaaagggtttcatgaatggaaacctaagtaaaactaagctcattagtgacagacttgttttcttcttgttattcctccagcaactccctcaccaccacgcctccctgcctaccatccccggaagggtgcttattctttaacaaagagaatctnnnnnnnnnnnnnnnnnctgttgtctaatatatctacagtaaatgttacactagagcttttattttcctctgtagcttttcagaagaagccatttaccttggatttgtaaatcaagctgaaacttttttgatgttcatgtactcatatgtcttgtaggtggtaggtgtcacttgtgtgtatgtgtaagtgaagtatgatgcatgctcattcacttggtccctttgaaataagggaaaggatcacagtgctgctgggccatgatggtatgtagaagggtctgtcagcacacatggaaagcccccatttgcacagatgtagaactttaacaatccagatgcaatcattggaagtatttaatatgcaattggtagcaccttagctaattaatctgcatatgaagcattttctgatatatttaataagaggtatagaagctcttcaagcattaaaatagagttgatgtttcattccatttgttttatccatcaaaaaatgcactctcacagtggagttgaagtctaatacatgatacatgtgggcctgttagtcttcgaagcttccagatggtttgtgttttgaggtacaaaaaaatgctgcagatctagaaatgcatatatttagcgggtatttgaaagatagaagcattatttataactgaagagtataacacttatcttcttaagtaaatgctctcataacttgtatacatttttgcaggtacaaattcaaaagtatgtaagcattgtataatgtgacaattgtataatttatgtaatctgatgcatgaatcagaagtgttatataatatatgattattgacttatagttgattaaagtgtttaaactt

SEQ ID NO: 362863 - DNA, 462 bp, Homo Sapiens
tttccagaattcccaaaatgaaccagatatcccctagaaaattatactattgagaaatctatggggaggatatgagaaaataaattccttctaaaccacattggaactgacctgaagaagcaaactcggaaaatataataacatccctgaattcaggacttccacaagatgcagaacaaaatggataaaaggtatttcactggagaagttttaatttctaagtaaaatttaaatcctaacacttcactaatttataactaaaatttctcatcttcgtacttgatgctcacagaggaagaaaatgatgatggtttttattcctggcatccagagtgacagtgaacttaagcaaattaccctcctacccaattctatggaatattttatacgtctccttgtttaaaatgtcactgctttactttgatgtatcatatttttaaataaaaataaaccttcctctag

SEQ ID NO: 362864 - DNA, 855 bp, Homo Sapiens
tcggatctcggctgctatgagttggcttatggccgagtctacttcttcaagggcaaagtctactggcgcctcaaccagcagcttcgagtagagaaaggctatcccagaaatatttcccacaactggatgcactgtcgtccccggactatagacactaccccatcaggtgggaataccactccctcaggtacgggcataaccttggataccactctctcagccacagaaaccacgtttgaatactgactgctcacccacagacacaatcttggacattaacccctgaggctccaccacccaccctttcatttcccccccagaagcctaaggcctaatagctgaatgaaatacctgtctgctcagtagaaccttgcaggtgctgtagcaggcgcaagaccgtagatctcaggcctctaacacttccaactccagccaccactttcctgtgcattttcactcctgagaagtgctcccctaactcagatcccctaacttagatttggcccccaactccatttcctgtctgtcttagacagcccttccaactgtgtcatctcttctctggaggtcaatggtggagggagatgccctgggtcctgttcttcctacataaaatgcaagaaaacagcatggccagtaaactgagcaagggccttggaatccttgagaatcacatttatgtgcttatgattacgggcaagctaattaaccttgttgaatctcagattccccatttgcaacattaggttaagaccagtactgcaggattgttgcactaaatgaaatactgtatgtgaagtgcctggcacagtgtctggtacatttgtgtttaataaaagctaactccatgttcat

SEQ ID NO: 362865 - DNA, 553 bp, Homo Sapiens
gagggaaagattgtttggtgctggaacattccagggaaaaggagactggaatgaaaggtctgaaattatcttctcaattggactccttccagaaaggtggccgtgcctctaagcatgtttttcccagtatgccctaggcctccccccatggtgttttcatatgaggtaccactgtgaaggatctggttcctcattcactgtttgacaagtctttcatgtgtggagttactcttctcatgcccaattttcatttgagtttagtggcttaaccaaacaatgactcctcattccagcggtgacagaagagaaagggtcatttacatcaggaaagaggtcttgtatctgggagtagagagctaaccatggagcacagtggctggtgggtgacttagtctgatggtttgtggaccatagaagtcttcacctctggtttgaggtgcagggctgtcttttgtactggagggtgtggggatattttctgatagttgccatttcttgaaaaattcccttgatgtaccttacacagagcagaaataacattaacatggatcag

SEQ ID NO: 362866 - DNA, 847 bp, Homo Sapiens; identical to SEQ ID NO: 15048
  misc_feature (731)..(735): n is a, c, g, or t
  misc_feature (737)..(745): n is a, c, g, or t
  misc_feature (748)..(751): n is a, c, g, or t

SEQ ID NO: 362867 - DNA, 801 bp, Homo Sapiens; identical to SEQ ID NO: 74066

SEQ ID NO: 362868 - DNA, 558 bp, Homo Sapiens
acaaagtccactaaatgtagtaacgaaatgtctccccaataaaaaattaagattccctttggagcttaggcatgtggccttataaagagcttaactggactgctacctgttggtatgttcagggcttcattaggttcatgcttaagtataatgcctgtgcctcacagaacaatttaaatttagcttaacaccccacccatacttaaagagcaaataaattatatttcgaaaagattttaaaataatctcaatataaaaaccaacagtgggaactgagtctggaataaatgtgtgcagaatcctaattcttttctgagctccactcagtgaggatatgcaccctctactgtccagcctgtggtttgcagtaagctcactcttctgttcagaatgaccacaggagggcctttacctaggaatagcaggaaaagctaagtaagtactcaaacttccctcccagtaagcatgaattgcttcagatgtaaagcttacatgtgatgagtaatactataatatcatacattaatatatcctaataaactttaattttcaaacatt

SEQ ID NO: 362869 - DNA, 1215 bp, Homo Sapiens
  misc_feature (41)..(41): n is a, c, g, or t
gtgcgaggcctgggtggcgaattcggcacgaggctcacccnttttctccccatatctgtttggacatgagctgagggcacggtcgcgggcggtcagccctgttcgcagctacggcgaggaggggcgcgattgttccttgttgccgctccgcttagtggccgcgtccattccgcgcggtgtcccgattttaggggtagggagaagtgtcagcttcaggcatcgcgaggcgtggcggccccatggccccgctgggaggcgccccgcggctggtactgctgttcagcggcaagaggaaatccgggaaggacttcgtgaccgaggcgctgcagagcagacttggagctgatgtctgtgctgtcctccggctctctggtccactcaaggaacagtatgctcaggagcatggcttgaacttccagagactcctggacaccagcacctacaaggaggcctttcggaaggacatgatccgctggggagaggagaaacgccaggctgacccaggcttcttttgcaggaagattgtggagggcatctcccagcccatctggctaggtgagtgacacacggagagtgtctgacatccagtggtttcgggaggcctatggggccgtgacgcagacggtccgcgttgtagcgttggagcagagccgacagcagcggggctgggtgttcacgccaggggtggacgatgctgagtcagaatgtggcctggacaacttcggggactttgactgggtcatcgagaaccatggagttgaacagcgcctggaggagcagttggagaacctgatagaatttatccgctccagactttagtcactaggttctaggagtgagctggggcctgctgaggtgggggtggggctgactctgcaaaatgggggtgtcccccgatcctggccgaggtgaggaacagacagggggggtctagattctgagggggttggtggatattgggcaaggcaggaaacctctggagacctcattttctccatggggaagacagccatgctcttcaggaggagactccaagggcaaaggagggtgtcttggctgtgcttgaaggcgaaaccctgccatatccccagtgccagtcccctcagcctgtggtggccttgcatcctgactggatgttctcagccccttgttctgggcaagaacccagagctccccagtgtggatactaataaacctcttggagcacactctcag

SEQ ID NO: 362870 - DNA, 909 bp, Homo Sapiens
cctaggtacgaggctgggtgttgaatcggcacgaggagcttcacgaggggaggctgctctgtgaaggaaccgcctttctctccgcgtgtctcacccttttctccccatatctgtttggacatgagctgagggcacggtcgcgggcggtcagccctgttcgcagctacggcgaggaggggcgcgattgttccttgttgccgctccgcttagtggccgcgtccattccgcgcggtgtcccgattttaggggtagggagaagtgtcagcttcaggcatcgcgaggcgtggcggccccatggccccgctgggaggcgccccgcggctggtactgctgttcagcggcaagaggaaatccgggaaggacttcgtgaccgaggcgctgcagagcagacttggagctgatgtctgtgctgtcctccggctctctggtccactcaaggaacagtatgctcaggagcatggcttgaacttccagagactcctggacaccagcacctacaaggaggcctttcggaaggacatgatccgctggggagaggagaaacgccaggctgacccaggcttcttttgcaggaagattgtggagggcatctcccagcccatctggctggtgagtgacacacggagagtgtctgacatccagtggtttcgggaggcctatggggccgtgacgcagacggtccgcgttgtagcgttggagcagagccgacagcagcggggctgggtgttcacgccaggggtggacgatgctgagtcagaatgtggcctggacaacttcgggggactttgactgggtcatcgagaaccatggagtttgaacagcgcctggagggagcagtttggagaaaccctgatagaattttatccggctcccagacttttagtcaactagggtttctaagggagtgga

SEQ ID NO: 362871 - DNA, 963 bp, Homo Sapiens
agcgggctgcctattgcggcctgcggtgatcaacgaggcccggggagcgcgtccccagtctgcgcgccggtcctgcggcagctggcccaagacccggagccgaaaggaagtgttggagcctgaggtcgctccgcgccgctaggaggacgctgtgcctggcctgggacctccgctcccgcccaccgccctggagccgctgagggacgtccacgtgggcctgtccccgccgagccgcggccctgtccgcctggcgctgctctcgggccactacctctactaccactacggctgcgacggcctggacgaccgcggctggggctgcggctaccgcactctgcagacgctgtgctcgtggccagagggccagcccgcgggcgtacctggactggccgccgtacaggcggccctggaggacatgggcgacaagccccccggcttccggggctcccgggactggatcggctgcgtggaggccagcctctgcctcgctcacttcgaagggcccaaggaacgcctctgccacgaacccaggggagtggggctgcacggggaggtggagaggctttactcgcacttcgcagggggtgggggcccagtcatggttgggggggacgcagatgccaggtccaaggccttgctgggagtctgcgtcgggtcaggcacggaagcctatgtcctggtattggaccctcactactggggcactccaaaaagccccagtgaactacaggctgctgggtgggtgggctggcaagaggtgagtgcagcctttgaccccaactccttctacaacctgtgcttgaccagccttagctcccaacagcagcagcgcaccttggactgaggacgaagttacagaactgagattctcgggtcccagacacgcacctatgtacctcccactggtgtccctgcaaagcctggcgcttttgacatcaataataaaagtggcagggctgagcc

SEQ ID NO: 362872 - DNA, 822 bp, Homo Sapiens
  misc_feature (178)..(194): n is a, c, g, or t
ttttcagacaaggtaccattttattccttataaaatatatttcatattgttgctgtaaaaacattacatttcacatttttaaaaaattttttaacagtaaaaataatacttggaagacagctgaggaaaaaggcgccaataagacaaactcacagatgggatttatctccctcttgcnnnnnnnnnnnnnnnnngcccctggtaaaagtcagaacctgggatgaccagaaagtaacaggacagatttctcccagcaaatcagtctccacaaccaaatgaatattgttctccaaggagtcaagctatagactcacaatgacaacgtggccatggctcaaaacactctctgaaattacaaaattgctttctgagccaatttaaaagtcacatgattgaatccaagctattttactttaaatggtccttttgctttgcacctgagacctcgcttggccacagacgtcattcgctggactccctgggcactaaatgagtgtctagcatccttaaggctgctcaacacacagccccagactctgaatatgattccaagaaatattctgaaaaaagtcacatcgctggaataaacagtttcccaagataactgctttgaaaaccagtcccgttagtttctaaaagcccacctacggcaccttccttccatcagagtctgctgcccgggtgggctgggaaggagggagatacaaagaagaaagtaggcatgatcactgggtcggttcccaagccaccctcaccctccaagaaggcatgaatggaacaacccgagaacagagcacgtgtgaagaccaacacgccacacat

SEQ ID NO: 362873 - DNA, 317 bp, Homo Sapiens
aggggaattttaaaaccatcttatttgaactgagagcatccagagcagttaaccttaaggaaacaatgaaaaactccctttgtatgcctgggcatcatggcagatagaggaagagtgttagaggagaaaactgctgctgagagtattggcaggcttggcctcagtttggactctgtaattttctttggacccaagtctgtaacctctgcgtacttcttctctcttaccttctataaaaatgaggattactgttggtgagggaataaggaatgtaagtaaaggaaatctgaaaaaataaaagtaaagcaagtataaaa

SEQ ID NO: 362874 - DNA, 595 bp, Homo Sapiens
caaaaattttagagtttgagaaggtcacagaaatcctctagttggtgcctccacagtcttcattttacagaggaactcagggctaatggagttaatgcaactagatcagggttttgggtctgtgttctttctaccgtcagcacctgtgtggtcaattctggacacttcccagagaagtctttgagtagagaatcctactcaaatttcactgtatattttaagcattcctctcctttccctttgcctcccctgttgccttttcttcccctgatttctcctctggtcatctcctctcccttctgcgtgtaagccatgggaaagggatgagggaggacagcttctggttaaacacaggtccctcttccacatcaaatgaacattggcttcctgggacagaaggccttcaaaggagggattgcaaagcaaggcaaagcgttctgtcttcattttccccatccccatgagacaagactgatggaaagggtggtggggcaacactgcttaatggatgccttttcacatcatttcagtttttagccctcatgactgtattttctaatcagagacaataacattttaaataaaacaacgacaa

SEQ ID NO: 362875 - DNA, 815 bp, Homo Sapiens
acctcggcctactgtttgagattctcctgcctaagcctgattgggagcacacagttgtcctgggagtaggttgcatcttgtaggccatctgacttcctgtttttaaaacgggggtctggtcttgctaaacactacaggtaggttggtctttgaagtccactagtggagaatgtcaagacaagatacttattaccatgacatctgatgcatgtgcagcagtggggagttctagatggatctctgaatgtgatcgacgcccagcaaggacaagctttaaaatgtctgcggtctgcccttttgaagcaggactggctcactctgtcatggggagctgtcagctgcgactgcaggttctctaggaggcattccagaatagagtagcacactgtgtctgcagttctcgatgaccgaaagttatcaaaaatatttaaaatatttaaattgtgaacctattgataaagaatatttataaaaactgatctgtaggcctgtactaatctctacgcattagcaatattgactgtaaaccccacattaaggaaaccactacgggtcctggcagtgccgtgtcccgtggggtgtgcattttaaaactcgattcatagacacaggtaccatgttccatttccgtcatggtgaagcaaatgaattggcctggctaccactgtggtcgcgtgctacaggtttgacaaaaagatatcatgtttcgatttttttgtgtgtggacaacaatatggaagctaaaattgacatatttttatgtaaagtttttctattctttgatttttaataaactttggaaaccagaaaaaaaa

SEQ ID NO: 362876 - DNA, 718 bp, Homo Sapiens
  misc_feature (602)..(602): n is a, c, g, or t
ggggctgtcagaacggccgatctccagcccaagatgattccagcagtggtcttgctcttactccttttggttgaacaagcagcggccctgggagagcctcagctctgctatatcctggatgccatcctgtttctgtatggaattgtcctcaccctcctctactgtcgactgaagatccaagtgcgaaaggcagctataaccagctatgagaaatcagatggtgtttacacgggcctgagcaccaggaaccaggagacttacgagactctgaagcatgagaaaccaccacagtagctttagaatagatgcggtcatattcttctttggcttctggttcttccagccctcatggttggcatcacatatgcctgcatgccattaacaccagctggccctacccctataatgatcctgtgtcctaaattaatatacaccagtggttcctcctccctgttaaagactaatgctcagatgctgtttacggatatttatattctagtctcactctcttgtcccacccttcttctcttccccattcccaactccagctaaaatatgggaagggagaacccccaataaaactgccatggactggaaaaatncccctccaacgctactatcatacttagttctcaatattggaagctatttgcatgtatcatccacattgtccgcgcgacaccggagaaaaaattttgggggcgctctctgggccctt

SEQ ID NO: 362877 - DNA, 397 bp, Homo Sapiens; identical to SEQ ID NO: 264681

SEQ ID NO: 362878 - DNA, 491 bp, Homo Sapiens
agatataatacgttttattcatctagtggtacttggtgctcacagggcactgtacaacaaattttaaaaatacaatatgaaaaaaatcaaacagccagagatcaattccattagagggcgatggcccacagaaaaaccaacaaaggcccacagaaaaacccaccctgtctccttaagaacatttctttgtttggctttaagaaacaccaaaagaaaatacaaaagaaaaggtctttgagaagataggtaaaacttcacatagcgtcttccacatatcacaaaatgctttccttatttaataataagcacataaaataatccaaatatctgtgagcctctatttggtcccaatgttttaggtcatagctttcactacttccctcctctctatcctcaaattatttgcatcagtaaaaaaagttaattaaggtgtaacagtctcctttgctccacaatgccactacaaagcctattttccataaagaaccaga

SEQ ID NO: 362879 - DNA, 845 bp, Homo Sapiens
ctcaacattggttataactgaatgcttgggaagggaggggcagcccttcaacaggaaaaggggactgcccaaatcttaaatgcacagtcaagattctcttggagctagcaatggttctcaggttagtgagcatttagcttgcctgctgcagaatttgacccagatgggggtgttttttaggtctctcacaaatgagacaagcgaaacaattgtctccttttattctctttggtgcattggtgctggggaaacatgaactagcggcagtgtaactgcagaacatagacccagttctaccaggccaggccagcgttgggaaccaccagacagggctgctttgggctttgcttacagtatttccatgtgtagcctggcgtgtgagaaagtattaggtgaaatgccagtttcatggttcaggtgaaagtctgtgatcattcccctcgtggctcgtccttcacatcacttttgcccttcaaggagttgccgcgtccccgctcagtgccgcctgagccctcagagctcccctgtgcttttctggatggggactggcggggtcacctagcctcaccgtggagccaccgtgcaatgcccatctctgagaggcccacgcggtattcctcgtgccctgtgttagtgctttctgtataagggacagacagaactgggtttttttcctctgtctggttttagagtaaatgtaactaacttttattttccctttatgaaagatagaaattatttttatgtagtttccagactttatacaaaatttttgtaaaatgttctctggaaagttaactacaagaatgtaaatatgcttctaataaaataacaaggttatttgc

SEQ ID NO: 362880 - DNA, 724 bp, Homo Sapiens
cctacagccgcccgggaaaagatggccgcgcctgcagcgtccggactgtctcgacaggttcggagcttcagtacatctgtggtcaggccctttgccaagcttgtaaggccccctgttcaggtctacggcatcgaaggccgctatgcaaccgccctgtactctgctgcatctaaggagaagaagctggaccaggtggagaaggagctgctgcgcgtagggaactcctgaaggaccccaaagtgtctctggctgttctgaatccctacatcaagcgcaccgtcaaagtgaaaagcctaaatgacatcaccgaaaagggaaaagttctccccgctgacggccaacctcatgaatttacttgctgaaaatggtcgcctaggcaacacccagggtatcatctctgccttttccaccatcatgagtgtccaccgcggagaagtgccatgcacagtgaccacagcatctcctctaaatgacgctgttctctctgagttaaaaacggtgctgaagagcttcctgagtccaaaccaaatactgaaactggagatcaagactgacccgtcaatcatgggcgggatgattgtccgaattggggaaaagtacgttgatatgtctgcaaagagcaagattcagaagctcagcaaggccatgcgggagatgctctgagagactgtcacctgtgtgagctcttgtccttggagcaacaataaaatgcttcctgaaaaaa

SEQ ID NO: 362881 - DNA, 436 bp, Homo Sapiens
ccccgtgggcttttaagtgaagctgcaggattttatctttcaatctgccctttctacccttgtcctattgaaaggatgccctcttcccttgcttttttggtctagggcctgtttggagctaactaggcttggctgagtccgggcaagaccttcttccgaggcatggacaagccccagagaacatgcagaacattgacctttccattgactgtctttcaagcagccagtgaaatcactaagtggggttcttccatgacatattttgttaatatgggtttcactttttccaagaatagtcccttgttgccacaatgttgatttactttacacaatgacagtatgtattaatttgtaattaaacccatccagattgttttagccttttcccaatggggtgggggagggaagaaggatattaaaataagttttaagaagc

SEQ ID NO: 362882 - DNA, 462 bp, Homo Sapiens
ttttttttgcttcttaaaacttattttaatatccttcttccctcccccaccccattgggaaaaggctaaaacaatctggatgggtttaattacaaattaatacatactgtcattgtgtaaagtaaatcaacattgtggcaacaagggactattcttggaaaaagtgaaacccatattaacaaaatatgtcatggaagaaccccacttagtgatttcactgggctgcttgaaagacagtcaatggaaaggtcaatgttctgcatgttctctggggcttgtccatgcctcggaagaaggtcttgcccggactcagccaagcctagttaggctccaaacagggccctaggaccaaaaaaggcaaggggaagaggggcatccttttcaatagggacaaggggtaggaaaggggcaggtttgaaaggttaaaatccctggcagctttcactttaaaagcccacgggg

SEQ ID NO: 362883 - DNA, 497 bp, Homo Sapiens
agcagcctcatccctgccattcagggctgttccagagattcgatcctcttaaggcattatcagtgagcaaatgtgaaggaaatggtgtctggaagaaagttctggttcacatgccttgtagctaagtctttctgcaaacaacctcccttccccccgtcgagtcatttggtgactttgatggggggatttctggttatgtcaaggctctggagacaggaagggcctttggccgccttgggtagttgacctgccttttctgactccgggacgagccagtcctaggctgcctccgggagcacttgaggtatcccgcaggccatgaggacccactgggcagctcctggacagcctcttggctccagcccccacccgaaagtggacactggctccgccctggccacctggggactggcactgtggtgcacagtggcccaatgtggccaacggaagttttataaaagacaaaatgtatatcaataaacattttataacttgca

SEQ ID NO: 362884 - DNA, 1109 bp, Homo Sapiens
  misc_feature (1049)..(1058): n is a, c, g, or t
tttcctatatccagatttgttttgacaatgtagtttggaagaactaagattctaatctctgaagaaccttatagggccttctaaaacataagagtttcctttgttgcttcaaatatttgaacattatgttaaagatcaagtattaattttagttgtactctagaaagctaaagtgccacattcggggctatttttatgattcagcaatcttttctaaattgtgtagcatgtgtatgagactatttatacccaaggatatgaaggaacataagtgactacaaggctctaataagccacggtggcaggaggttcaagcggttctgttcactaaatttttctcctgtaagctttgaatggaaacttctgtatcacatgatgtgtttcacttatgctgttgtgtatatacctaatatttctatttttgattttattttaatacacctcgtccaataacatctcaagctttttatttgcatttacattttcagctgtggtcagtgtaaaaattggtcatcagctgggggcggggtggttagaagtgattcaacagagctacatgctttaaacttgcccaagttctacctccttcctttgaacatttcagattggagaaccaaggagttgattgcctgaacacctgaacatccgtttatgggggccagatagaatttgttttcaaataggcttaacaggcatcattaaaatttcattctgtgtgttttgtttaggcttgaggtgcttagaagatgggataaaatattctacttttttctaaattttaactttgtttcctatgtgatttttttaaatgtcctttctaaaatattctaaaattattgattcacaagtgccatgttcagaactatagaatattactgttacataatgtctgcacagctggtcccttgattcagtggtaaagtttttgtgtacacccccctgcttgcattttatttcagaaccacaagtattacccaatatgtttacatggagaggaactataaagaatccctaaggcaaaaagaagtctctagaaaatgactagaggnnnnnnnnnnagcataacaaatttatttaaagaaaattattaaatttatcttcgccttgta

SEQ ID NO: 362885 - DNA, 497 bp, Homo Sapiens
atggtggttgaaagggcctattaagtcccccagctaaaggggttaccaactgggccattggattaagtgtggctggtcctattgaatccctggtggaaaatcctccccggattcatcccggggcaaccatggtaaaagggaagtatggccctgaaaaaaaagtcttccttagccttccctggatccccaatggccgggggtttaaccgcgttttccaccccaagctaaaggatgatgaggttgctccgctccaaaaaagggccaataccctgtggggcctcccaaaggaccttaaaaacccggggctagtgagctttaggcgggaaaaattttaaaacccccatgtgattaaccccagccctttgttttcctccctggacatgggtccccggttgctttggtttttttccaaatgggaatttggggcccccaaatccaagcccatgcttggtttaatgcctcccatttgggctctttaaccaataaaatttactttt

SEQ ID NO: 362886 - DNA, 385 bp, Homo Sapiens
ctagcaaacatttatagaacgctcaacccaacaatagcaaaatattcttctcaagtgcatataaaactttctccaggatagatcatatgctaggtctttaaaaaagatattgaaaccctcatacattgctggtggaaatgtaaaatggtgcagccattttgcaggacagtttgagggttcctcaaaatgttaaacatagacttaccctgacccatcatttcaacagctggatgtatactcaagaaaaataaaaacctgtgtccacacaaaaacatatacaaagatgttcatggaagtgtatttataataccaaaaagtggaaataacccaaatgtcaatctactgatgaataaacaaaatctatcaataaatttattccaaccaa

SEQ ID NO: 362887 - DNA, 534 bp, Homo Sapiens
  misc_feature (492)..(492): n is a, c, g, or t
gaagggggtggtgtgggagtggccctttaactctatttggctatctgaggatgtacaaaattctcatttaattttctggtcagcaagttccccacacagaaatcactctgaggtttacagaagaactgtaatattattttaaaatgcgattttctgtcattagttctagatatgtacttcatggttaaattctaaatctgaaaatgctagtgggagatatcaagaaattttctttttgattactagtacctgtattctaacagagagtttgaattttttgcccgtgttatcagaatgatggaaattgatcattttcagttgttcattgtgtattcaatccagcgaactgctgtatgtatagaggagctgaggtgctgtctaatgggaaatgtgatttgattgatttatttgcttagagtaataaaagcattttgtgcattcaatcttacaatagattttagctgatctttcactgtaaggcttatgtgtatnttccatatatgtaaaacatacacatgtaaaatatatgtggcc

SEQ ID NO: 362888 - DNA, 352 bp, Homo Sapiens
tcttgggtagattatcttttagaaaacagcaagatattatataatttactttatattctctttccaaatgattaaagtaataattaaaaatttttgatatgtgtgtatgcaaggataggaatcctcttgtaagtggaagaactctaccacatgcatgagtcattagtgtgttaaacactgggaagtggctttaggtccagctgggtgctctgaagaaggtaggtttcttcagttctttatgttaactgtctccttaccttaaaaaaggagtgaagaatactgactgcagaggttttgtgaggattccggtaacacagaagcatagaactggaaaagaatattaatatttgcc

SEQ ID NO: 362889 - DNA, 451 bp, Homo Sapiens
tgatggaatctgaagccactgaaaatcctacttgaaaagccatgtctaactcacctattgaatttttagttaacagcaactatttttcatacagtaaaatgttactaatttagattaagggagtgctgggggaagacactgatgccgaaactgaacaaatgttttaaaagaaatgcaggtttattatccagcactgagagagttaacaaggactggaaaaataaggctaacaaagaataggatgtgaatgttttcaagggccaaattaatgtatttataggtaaccagagcatatgttgcaaaaagacacattttaagaatcaaaatcaattctccaaaatgttttaaactttactgtatattctcgctagcaacagtaattctgtaaataccttttccccccataaacactgcaagggtaaacaataaatcttctttcctaattatctcg

SEQ ID NO: 362890 - DNA, 746 bp, Homo Sapiens
gttggattagcatctatcaagggagcaccatcatgtacggggcgctgctgctgattgagtcggagttcggcacatcgtggccatctccttcacctcgctgatcctcaccgagctgctcatggtggcgctgaccatccagacctggcactggctcatgacagtggcggagctgctcagcctggcctgctacatcgcctccctggtgttcttacacgagttcatcgatgtgtacttcatcgccaccttgtcattcttgtggaaagtctccgtcatcactctggtcagctgcctccccctctatgtcctcaagtacctgcgaagacggttctctccccccagctactcaaagctcacatcataggccgtgcgttcgctggagggggccctggtcttggcgcttccctgatggacagagctcaagttccatttatattaaccgccacctgtggattttgcagtaattgctaacacatgcagttttaatgggaagcggctctgcgcctaaacggagtcctaacgctgcatcaacgggagggagggtcctgaaagagacccatctgggcctgtctgaacccctcgttcttcatgtttaggtgaatatgaatatgttaaagctggtggctcagctgggagatttatatgggtcactgtgcgagcttccttatgacttgaattttgttgtcacatgataaacagtttctgtgtagctgaaggtcgtagaaggctagtgtgtgtgtgagtgtgag

SEQ ID NO: 362891 - DNA, 1670 bp, Homo Sapiens
  misc_feature (117)..(128): n is a, c, g, or t
  misc_feature (974)..(974): n is a, c, g, or t
  misc_feature (979)..(979): n is a, c, g, or t
  misc_feature (983)..(983): n is a, c, g, or t
  misc_feature (1086)..(1086): n is a, c, g, or t
  misc_feature (1093)..(1094): n is a, c, g, or t
  misc_feature (1111)..(1111): n is a, c, g, or t
  misc_feature (1120)..(1120): n is a, c, g, or t
  misc_feature (1146)..(1146): n is a, c, g, or t
  misc_feature (1225)..(1227): n is a, c, g, or t
  misc_feature (1318)..(1318): n is a, c, g, or t
  misc_feature (1427)..(1427): n is a, c, g, or t
  misc_feature (1458)..(1458): n is a, c, g, or t
  misc_feature (1474)..(1488): n is a, c, g, or t
  misc_feature (1569)..(1569): n is a, c, g, or t
  misc_feature (1597)..(1597): n is a, c, g, or t
  misc_feature (1610)..(1610): n is a, c, g, or t
gcgccacgcgggaggcatattatctacctctaaaacagctggtccggtccggaattctcgggatgggaaatcaaggaaagaccagtttccatttatgcgaaatctgtggttgtaaannnnnnnnnnnnacttgaaattaaatttggctctaaagttggtgtagcagcagttgatcagactgaaaaacggtttttagtctctggaaaaagactgattttgctttttttataaatattattagatttattaatttttctgtgctcaatgtgtaaattgtattataattcattgtgatttatttcacttttaatttgctggtgttttaataaatgggggtgttactgaatctttcttcccacttccatttcttttgaccaccccttaaccctcaactgtgacggtagtagtattatcatttataccaaagttttgcatagtccctgttgactttgtaatgttaacggagtcataaaagcactaggcaacagaaagatagaaatttgcttttaatctttttgccttttattttgcacccttatgccacaggaaaaacattaaacaacactccattttcacgttgactgaacatcctgggaccaacctaccttcgcttttcggtacattacccaaaacaacatcgacaccctcttcagcaccggatcttccctcgtcgctcactcgacacaccgcggcgcgacagctatcccggacccccccttacaaccacgccattaagacccgctctaccaccccctgtttgcgtaacctgcaaccacccctacacctgtacaacaaccaaatgaccaccttcgcgttgtataccaagcctcgcccccgtctaacccagcctactagcatgcgccactatcccgcatcctacgtcacggcttgttcctacaacgcagccgtgccacgcgcttagtatgccctatcctaacgcattctcgagaggccaaaagacgagcgccaaaaanaggangttntcgtcacatcccacgggccaccccgccaaattctgccgaccacccctgtttgttccctaccacaaaagcaacgcgccccgtacattaaacacaactccaccgncccaccnntgcctaaaataaggcanaaccgccgnggtgtgttttccgcgatcctcccagntaatggcccactaccaggcccatacaaaaacacgcatcaatttcaacaaatttaagggattggaaccatccggcgcccnnngccacggcgacccccacaccccgcccctacccaatatacatcccatacacaaaagcctatcattaatctacgaaatcaaaacctggacctnctaccgaaccaacaccccccacacaaccctggccgcaacccaccaccccgacgccccccagccatggaaacaccgccaacaccaacactcgacgccccccggcggggcngaaagcttcatgacgcgctccgtgcaaaccngagcgtaaagtcctannnnnnnnnnnnnnntatcgcggacaacaccccaacaccctcctccaacctacaccctccactcaaatacccgtgcccagcccaaccccccacccntaatcatcaggccgactcacgacctcantctctagcgctcnacacccagatcctcctccttactgatgtaaacccggtgtaagtgttggttacccacaact

SEQ ID NO: 362892 - DNA, 1120 bp, Homo Sapiens
  misc_feature (179)..(191): n is a, c, g, or t
  misc_feature (210)..(210): n is a, c, g, or t
  misc_feature (242)..(242): n is a, c, g, or t
  misc_feature (898)..(926): n is a, c, g, or t
gggaccagagtacagagcctgctctttcacagatcgttatggctccttcctcccagtcacagccctcaggaagttgattaaaaacctgcagtacaacagttttagatactcattagtgacttcaaagggaaatcaaggaaagaccagtttccatttatgcgaaatctgtggttgtaaannnnnnnnnnnnnacttgaaattaaatttggnctctaaagctggtgtagcagcagttgatcagnactgaaaaacggtttttagtctctggaaaaagactgattttgctttttttataaatattattagatttattaatttttctgtgctcaatgtgtaaattgtattataattcattgtgatttatttcacttttaatctgctggtgttttaataaatgggggtgttactgaatctttcttcccacttccatttcttttgaccaccccttaaccctcaactgggacggtagtagtattatcatttataccaaagttttgcatagtccctgttgactttgtaatgttaacggagtcataaaagcactaggcaagagaaagatagaaatttgcttttaatctttttgccttttattttgcacattatgcaaaaggaaaaacattaaagaacacttttttttaagtgagtgaaaacatgggaaagacatacagtgcttttatgcacattgttaagctaaatcaaggtcatttataatcattttccttttttatttaagattttaagtaaacaaattttagaattttcagcatttcaaaaatgattttatttttcaagtcttaaattcaatattttacacctatgttttgaggctaaaaatatgaaattatataatgtatgatacagggttatcaaatatctaataatttttgaaattagctcnnnnnnnnnnnnnnnnnnnnnnnnnnnnnacagatttcaggttacaaactgcaaagtttatgcataattaagtatggtatggttgccagaaaagcctaaaattactacttagaaaatttaagactgtttacccccattgtcttgtacttgcgagctaacttgtactattcttgtgaaagcactgtcatcttttagtagcaaattttgataatgtttctcgtgg

SEQ ID NO: 362893 - DNA, 422 bp, Homo Sapiens
caggtgaaaatatggagtaactttgttttgtatggtaaggtttaggaatggtggatgaagggtatctctatataaataaagtgctcaacaatgtgcaatgattgtaaatttagtaagatattacagccatttcatgaatgctttaccattcaacatagtatctattacaaaacacctttcttgtatccatatacttcaggtgttgctgttaacatttactatgatatttattttaaccaaaatgttactcacattaaatgtttattctttaaaatgaatgtattatgtttttaacccacaaatgcatacttaccctgtgcctcatatttcaatagtactgtaatatggacatcttttgtgaaatacttttattttgttatgctttaaatatacatacaaaaagatttctgttattagctttg

SEQ ID NO: 362894 - DNA, 513 bp, Homo Sapiens
  misc_feature (129)..(159): n is a, c, g, or t
ctcccctcccctacgtcctgcactttctcggaccagtccccccactcccgacccgaccccagccccacctgagggtgagcaactcctgtactgtaggggaagaagtgggaactgaaatggtattttgtnnnnnnnnnnnnnnnnnnnnnnnnnnnnnnnggttttaaagaaagaactatgaggaaaaggaaccccgtccttcccagccccggccaactttaaaaaacacagaccttcacccccacccccttttctttttaagtgtgaaacaacccagggccagggcctcactggggcagggacaccccggggtgagtttctctggggctttattttcgttttgttggttgttttttctccacgctggggctgcggaggggtggggggtttacagtcccgcaccctcgcactgcactgtctctctgccccaggggcagaggggtcttcccaaccctacccctattttcggtgatttttgtgtgagaatattaatattaaaaataaacggagaaa

SEQ ID NO: 362895 - DNA, 921 bp, Homo Sapiens
  misc_feature (578)..(616): n is a, c, g, or t
ttagtgatgtctttaaaaaatattctgttacactacagataccaaaacactgacaaagatttaggcactccaagagagtatgacttcgtgtttaattggggagcttgttttcaacattgcttatatttgaatagtagaaaacccgacattgatgtttcttcctgttgcaaggtggggctttaaactttcaaggtacaaaagtatgtcttttaaaatggaagtaacgtttgtttagctagtgaatgtgacaatatattttatgtatataatgagtctaatgtaattttgatcaacttggtaatgatgttattaaatagcaaaacaagtgcagtgtattaaagctaaacactacattgaaacgcaaacaaaattctggtgaaataactgggctgttgatgcaggtcaggtggaagctgagaaataaatgtatataaatatgtagctgaggatattaattcccattatataaccataattctgtgacttgtaataaaccaagctgtacaatttagtttataatagcagtatctgagctgctccaaaatatatatatcaacagtggtaaatactgtagattnnnnnnnnnnnnnnnnnnnnnnnnnnnnnnnnnnnnnnncacacaagcactatatttcttatgtcatttatgcacattttattatctgtatacttttgtagatgtgattgtaataaaaacatgctaacaagtaataagtatattgagtgtctatagatgatgcatctatgacatcacggcaaacatggtgcaccccctgaatgcttcagaaggctaattctccttctaatcgaagtagctgaagccataaatattccacctgtgataactacagtctatcgccacagttctatgttcaaatgctctcactaattcaccagaagactatttcaaaactaaaaaaa

SEQ ID NO: 362896 - DNA, 928 bp, Homo Sapiens
cggcaacaagggccacactggacaggcagctgctgggttgctactctcgcctccgccatgattccgcccgcagactctttgctcaagtacgacaccccagtgctggtgagccggaacacggagaaacggagccccaaggctcggctactgaaagtcagcccccagcagcctggaccttcaggttcagccccacagccacccaagaccaagctcccctcaactccctgtgtcccagatcctacaaagcaggcagaagaaatcttgaatgccatactacccccaagggagtgggtggaagacacgcagctatggatccagcaggtgtccagcacccctagcaccaggatggacgtggtgcacctccaggagcagttagacttaaagctgcagcagcggcaggccagggaaacaggcatctgccctgtccgcagggaactctactcacagtgttttgatgagttgatccgggaggtcaccatcaactgtgcggagagggggctgctgctgctgcgagtccgggacgagatccgcatgaccatcgctgcctaccagaccctgtacgagagcagcgtggcgtttggcatgaggaaggcactgcaggctgagcaggggaagtcagacatggagaggaaaatcgcagaattggagacggaaaagagagacctggagaggcaagtgaacgagcagaaggcaaaatgtgaagccactgagaagcgggagagcgagaggcggcaggtggaggagaagaagcacaatgaggagattcagttcctgaagcgaacaaatcagcagctgaaggcccaactggaaggcattattgcaccaaagaagtgataatttccacatgattaatttccaacaagacacctgggagttatttactgtgttcctctggcagccaataaaatcatcataagccctttgtaat

SEQ ID NO: 362897 - DNA, 349 bp, Homo Sapiens
  misc_feature (58)..(58): n is a, c, g, or t
  misc_feature (72)..(148): n is a, c, g, or t
gccatccataggtggtcccaagggcccataggtttaccattaggggttaactcttggnggttttacatgctnnnnnnnnnnnnnnnnnnnnnnnnnnnnnnnnnnnnnnnnnnnnnnnnnnnnnnnnnnnnnnnnnnnnnnnnnnnnnatccctgctcttcctgtttattacatatcatccccttaaccctgcaaaccatctccatcatttcgcatgttacatagttgcagttatatagtaagtagccttttcagactgccttcttttacttagtaatatgcttttaagtttcctcatcttttgaggacaagatagcccatttctttttagtgctgaattatgttctat

SEQ ID NO: 362898 - DNA, 453 bp, Homo Sapiens
ttgccagagtgtgccagatactggggtcgtccttaaagcaactttccctttcttatagtcatcaatttttagttggccacatgtagacattctggaccacataaataaagacaacaccctagagatggtgaagtaagttgtaaacttaaaatcctaagccccctaattgactgaatggaacccctcttgaccaaagtgaccccagaaaaaccttaaaactgagttcctggccatgacgggatgggaggtcagacacgcttcattatatctccgtctcttttatggtttagacacagcaactgaccagcattaatgtcaaaataaagatcataaggctgacagaatagaccctttgtggcaataacaaattattcgtaagatctaaggtcatgccaggcaagtgttatgtcatgcactcctacacttaaagaataaactatgttctaactgcca

SEQ ID NO: 362899 - DNA, 416 bp, Homo Sapiens
  misc_feature (15)..(15): n is a, c, g, or t
  misc_feature (277)..(285): n is a, c, g, or t
ttggcccaaggcaanttcgttgggtcaaacaaaccaacccccagaaaaaggccagtgtggtaacctttcctgtttacctgaaattcacccgggcagacctcattttccccgtgggctttgaaaatgctacaaaagaggatccttccagctttttcgaacggggggttgcagttttgtgcccaaagtaaacttttttaactgcccccttttgtaaaaatgaaaggtgggatttaacctttattccttttttaaaaatttggaaggtttgagcctgttnnnnnnnnntggttggttttaggttggaggaaactgaaaggaattttacggttgggagtggtggaaattggaaggaaacccggagggatttgggaaggccaaaggggggggtccttttaggaaataaaacccttagcatt

SEQ ID NO: 362900 - DNA, 450 bp, Homo Sapiens
gcggccgctgaccctgctccagcgggcggggctgctgctactcttgggactgctgggcttcctggccctccttgccctcatgtctcgcctaggccgggccgcagctgacagcgatcccaacctggacccactcatgaaccctcacatccgcgtgggcccctcctgagcccccttgcttgtggctaggccagcctaggatgtgggttctgtggaggagaggcggggtaatggggaggctgagggcacctcttcactgcccctctccctcaagcctaagacactaagaccccagacccaaagccaagtccaccagagtggctgcaggccaggcctggagtccccgtgggtcaagcatttgtcttgacttgctttcctcccgggtctccagcctccgacccctcgccccatgaaggagctggcaggtggaaataaacaacaactttattaaaa

SEQ ID NO: 362901 - DNA, 234 bp, Homo Sapiens
  misc_feature (44)..(52): n is a, c, g, or t
ccagaatgagtgctccctttatgagctgcagtgcagcagaaccnnnnnnnnngtttgctgcaattatatagcatcacagtgctctgctaacagccagcatagaagagatttacctacagctttttgcaccactgttctagcctttaatgccttctacttaatattaagctgaccgcaatactaacgtgcccctatatttggcagccaaataaagaagaatcgtgggtaaataga

SEQ ID NO: 362902 - DNA, 608 bp, Homo Sapiens
  misc_feature (142)..(168): n is a, c, g, or t
  misc_feature (170)..(265): n is a, c, g, or t
  misc_feature (501)..(501): n is a, c, g, or t
  misc_feature (543)..(543): n is a, c, g, or t
ctgacatagggtctcgctctgttgcccaggctggagtacagatctccatttactgccgccttgacttgctaggttcaagcgatcctcccatctcagcctccctagtagctgggactacaggcacacaccaacacccccggcnnnnnnnnnnnnnnnnnnnnnnnnnnnannnnnnnnnnnnnnnnnnnnnnnnnnnnnnnnnnnnnnnnnnnnnnnnnnnnnnnnnnnnnnnnnnnnnnnnnnnnnnnnnnnnnnnnnnnnnnnnatgagccgccacacccagcagaattttaatttaaaagctcagcttaaacacctcatgatgcttacacatttggtacatttttaacaatcgttgattgttcaactccatccgtctcagagttaaagacacaggataaggaaaacatctccttatccaagtgatttggggtggtattcccagctgtctgaggctgtacattgaccaattattttggccatgactcagagttcccctancctgctatcctgagatcatgagaggccatcacagagtccacntttatcatctctatgccaataagggctctaaatagggtggtgtgacagcccatgtgccctacgtt

SEQ ID NO: 362903 - DNA, 493 bp, Homo Sapiens
aatgttaataaagaatggcagttatatttatgctcacttcctggagtaattgggtaatattcagaaaggcacaccgtggtagtttaaagtgtaccaaggccttagggcagtatctagcccagtattattccagattctcctgagctctatataaagggcattttggaggaactcttctgggcaatatctttcccaatctcatctaaattctgggaaatattttccatagcagacaacccagctctgaaactaagcacctggtgatctttagtttgagatgtctatatggtacttttgagttatatcaattaagatacaagctatagacatgataaaaatatgaaatcaagatatagctcagtgggattggattaagacataataatagttctaagaattcacttttgattgtatgttttaccaattcaataattccactaatcaagtattcacattttgacttttgattaaataaaaatttgaattaaaatta

SEQ ID NO: 362904 - DNA, 579 bp, Homo Sapiens
gcggccgctccggacgccgcgggtgccggggcacggacgttctgggtccgggctgagcgcgtcctgggcgcccggcggtgccagctcactccgggcggggtagggcagggcagaccccagcggagcacggacccggccgatctggactggacagagcgaatcccggacggtgcagagcccggggaatgccgggcgtgggctgaggggatcccggcgccctcccagccctccgactttggctcacgcgctgggacctgcccggcgtctcctcggcctccccgcgccccggtcacctgtggcctcggagccccaaatctgccggaccctcgctcattcccgaccccgagcctggagaggcttgagaaagaattttcctgcccccttccctggagcgcggaggccccgccccctcccaccgcccagatgtctccggtcacggctcggaggacctccctgaggcccggggccgaagggtccagagagagaagcccgccctagggagccttgggggccccccaactccgtcttggggcttggcccccgacgctgcttggagggaaggccggtgcccccaccctc

SEQ ID NO: 362905 - DNA, 411 bp, Homo Sapiens
ctagatttaatgactccgtatttgaacacctctaacagagaagtaaaggtatacgtttgtaaatctggaagactgactgctattccattttggtatcatatgtaccttgatgaagagattaggttggatacttcaagtgaagcctcccactggaaacaagctgcagttgttttagataatcccatccaggttgaaatgggagaggaacttgtactcagcattcagcatcacaaaagcaatgtcagcatcacagtaaagcaatgaagagcagttttccaatgaaaactgtgtaaatagagcatcaacaagtacaaaattcttgtcttaattagtgggggtatataaaaattccttgtaatggtcaaatattttttaaaattgacattaataaagcatattttaaaagattct

SEQ ID NO: 362906 - DNA, 1100 bp, Homo Sapiens
  misc_feature (471)..(471): n is a, c, g, or t
  misc_feature (483)..(483): n is a, c, g, or t
  misc_feature (603)..(603): n is a, c, g, or t
gaagatgaactcattgaagaagcgaaagtcatgatgaatctttcccatgagaagctggtgcagttgtatggcgtctgcaccaagcagcgccccatcttcatcatcactgagtacatggccaatggctgcctcctgaactacctgagggagatgcgcctccgcttccagactcagcagctgctagagatgtgcaaggatgtctgtgaagccatggaatacctggagtcaaagcagttccttcgccgagacctggcagctcgaaactgtttcgtaaacgatcaaggagttgttaaagtatctgatttcggcctgtccaggtatgtcctggatgatgaatacacaagctcagtaggctccaaatttccagtccggtggtccccaccggaagtcctgatgtatagcaagttcagcagcaaatctgacatttgggctttggggttttgatgtgggaaatttactccctggggaagnatgccatatgangagatttactaacagtgagactgctgaacacatgccccaaggcctacgtctctacaggcctcatctggcttcagagaaggtatataccatcatgtacagtgctgggcatgagaaagcagnatgagcgtcccactttcaaaattcttctgagcaatattctagatgtcatggatgaagaatcctgagctcgccaataagcttctgggttctacttctcttctccacaagccccaatttcactttctcagaggaaatcccaagcttaggagccctggagcctttgtgctcccactcaatacaaaaaggcccctctctacatctgggaatgcacctcttctttgattccctgggatagtggcttctgagcaaaggccaagaaattattgtgcctgaaatttcccgagagaattaagacagactgaatttgcgatgaaaatattttttaggagggaggatgtaaatagccgcacaaaggggtccaacagctctttgagtaggcatttggtagagcttgggggtgtgtgtgtgggggtggaccgaatttggcaagaatgaaatggtgtcataaagataggaggggagggtgttttgataaaataaaattactagaaagcttg

SEQ ID NO: 362907 - DNA, 630 bp, Homo Sapiens
gcggccgccatgcccgcagtaggttctagggggcggtgctggccgcagtggactggcctgcaggtgagcactgccctgggctctggctggttccgtctgctctgctgccagcaggggagaggggccatctgatgcttcccctgggaatctaaactgggaatggccgaggaggaaggggctccgtgcacttgcaggccacgtcaggagagccagcggtgcctgtcggggagggttccaaggtgctccgtgaagagcatgggcaagttgtctgacacttggtggattcttgggtccctgtgggaccttgtgcatgcatggtcctctctgagccttggtttcttcagcagtgagatgctcagaataactgctgtctcccatgatggtgtggtacagcgagctgttgtctggctatggcatggctgtgccgggggtgtttgctgagggcttcctgtgccagagcccagccagagagcaggtgcaggtgtcatcctgagttcaggctctgcacggcatggagtgggaaccccaccagctgctgctacaggacctgggattgcctgggactcccaccttcctatcaattctcatggtagtccaaactgcagactctcaaacttgctcatttaaaag

SEQ ID NO: 362908 - DNA, 928 bp, Homo Sapiens
gcatcctgtacgcagcttgcagttttccagttttctctttgtgggcgttatttccataagagtgcagacttctgggatgcaggtcagggctgtgacttccctgggtttctctggagtgagatcagtgtggagtggagaggtgtgtgctggaggaagaggccttggcctgtgctccgcattgcctactcctctcacctggaaacaccggacttcaggagtcactcggctgtggcagaaaataaagttcttgaaaggaaagcagaggcgctcactcacatcgatgccctaaacatcaataccacatcaatgtcccaagtggcgggctggtccgagtctctgttttggaagctcaaccagtggctgatgattcacatgtttcactgccgcatggttctaacctaccacatgtggtgggtgtgtttctggcactgggacggcctggtcagcagcctgtatctgcctcatttgacactgttccttgtcggactggctctgcttacgctaatcattaatccatattggacccataagaagactcagcagcttctcaatccggtggactggaacttcgcacagccagaagccaagaagcaggccagaaggcaacgggcagctgctgcggaagaagaggccatagctgctccagccggggctccgggggcggcagcagagctggcacaccgagttctgggaaagcccccgcgaatgatggcttgtgaacttcatgaggccagtgaactgtacacgaggttataccttctagaggggaaattactaaccattcttatcgcattaattattacacttcggaaagtacctaccaaagtctttccaagcacattattactcttattgactgttcccacaaacaataccacacacacatctccacccacccacccaaacctccatacacaccacgacctac

SEQ ID NO: 362909 - DNA, 362 bp, Homo Sapiens
tgcctctgactgtgtgcgtgtgtgtttatctaagtgtgagatgcatccgggcatgtcagggtgtgtacatgttgggaagactgtgtagatttcttgtgtgccgctctctgaatggaggagaggggaagcgtcttacctcgctgaatccctttccattgctggaaagaacacctgggcaggagcggccccaagaccccgcccaggccctcggaagggagcctgaagggttaatccgtaccctgtattaaccagggtcaacccagcggctgacccgcctcttccctgctcctttgccgtttctagcacctggcttacttcctggcacacagtgagcactcaataaatgtatgctgagaatgaca

SEQ ID NO: 362910 - DNA, 1597 bp, Homo Sapiens
  misc_feature (586)..(617): n is a, c, g, or t
  misc_feature (729)..(729): n is a, c, g, or t
  misc_feature (874)..(874): n is a, c, g, or t
  misc_feature (1369)..(1377): n is a, c, g, or t
agagtggatgaagtctaaggaaaagtcctcttcatatatttccatttataagcgtctgtttttgaaagtgatcacagcatgaaaatgactgtgctgctttttagtgtctggctgcataatgtacaagtcacaatttgctgtttttttcaggaggagaaagggaacctcctttactattctatatcctaaaatctacttctaatcagctttatactgttgcctgtacagctcagtgaatgtactttcatctttaagagttcagatatatgccagtgaatatttttgctgtagaggagaaagtaaaaactccacagcggggatctttttctttgcttttgaaaccaccattgaatcactatcgttttgcagactttgcacaactgtacaggagagtggcctttctacagcacattttcagtaatcctatatttagtcaaaatggatgagaaatcatgtattaatgtttgtatggaattttgggtccagtgtaatatttttatcatttaaaaagaactctatttgtaaaaacatttatttactgcatggatattgacgcacattaaatttgtgggattttgtatatgtnnnnnnnnnnnnnnnnnnnnnnnnnnnnnnnncctctcttgtgttccttaaaagtgaagtgtggtgctgtgtgttaacacgggtgtgttttagaactttttggaatgttttcacttagaaccaactgtgtgtgtcttgtgttcncactttaaaaattatttgtgttccctgtgattggcagtggtgtctaagtggtctcaccagtgggcccagggtctgtggtgcgcctgtgttaaaacaacgcaaagccagttctgaacggggcaagaacttacgcctcgtgttggcnatacataaagcaagctttataaccgtttgtgggtaaaggctcaagcccatgtgcgtgggcttctcacaacggtgggtacacaaccatcttcaaacgcttaactggggaacttttggcacacaaagcactctcggggggctattcgctctatagtcatttgaaacaagagaccccttcttgcaccactttattttataacctaccctccgggtacccattgtgttaatttgggcaactcccgggctttccaacgaaacctccctaaggggaaccgaacaacagcgcggcgcagcccccctgttggctaaccacctggggagcaggtccccacaaactctacaaccttctcacgacggctgtgggcttcacaacgtggcaaaccaacatacgacaagcacacaaaaacagctctcctacacaagagcgcgcgttggagaaatcgccgacggccaaacatgagagggagccacgagaccaacacattctaccgaagcnnnnnnnnnaggaccgccgcgagatacacaccaccagcagttgattggtggttcccccatcttatagggagcgagcgcggcgcgtatcaacaatcacccaccgaaagccatgagatgggcagggagaaaaacacaagtggagtcacgaagagcagcgcagggctgccccgtcggggcggctagaaccaagctgtgagtaacataccgcggaccaccagcaatgtcccca

SEQ ID NO: 362911 - DNA, 133 bp, Homo Sapiens
gcagcctgcatctggccatcccacaggctggaaagtgtaacctctggcagaagccaagaacaggcacctcctggaattataattttgttttgttttttgagacggagtatcgctctgttgcctaggctggagt

SEQ ID NO: 362912 - DNA, 419 bp, Homo Sapiens
ccattccagatggtgatctacccttccccccaattatcacaaaaggagctataatcactaacttattcttaataataatggttactggtacccttacaataatgtacaatccaatgtttaaaaattataccacttgagtttggtttgatcctataaattttcaacaaatgtcttaaaatttaaaagcaggctgattagtttggaaccagactgcaagtagagctaacatttggtgaataagaaaacatcacattacattttggatgtatgaaagaaaacttgaccatttaaagaaatatgaataaagaaatgaactatagatactactttaggaaaacaatgtttgattaagtgttccagtctgatattttaagtgtgtacttcctagacttgtataaaaatctttgatgtttgcagac

SEQ ID NO: 362913 - DNA, 1166 bp, Homo Sapiens
  misc_feature (1086)..(1086): n is a, c, g, or t
  misc_feature (1090)..(1090): n is a, c, g, or t
  misc_feature (1094)..(1094): n is a, c, g, or t
  misc_feature (1106)..(1106): n is a, c, g, or t
ggtccggaattcccgggatgtacactctgtctttggagacactggctaagattctctgctccatgtttggacagggtcgtgcctgatctgagataaatggacaagaacaactgaagcctgtcttctggtgcatgtgtcacctgccgataactgcatcttgtgataaagttgggtgatttacagtctccaccaaatgctaaactctggggtcttacgcctttataactccatgggccccagcaaaggttcaggctcaaaacaggtgtcaaatagataactgttgaatgattgttccccagttgcaggctctgccacctggcgttcatactgtctgtgaaaggacccagctcacctttccctctttatctcccagtccttcccaacagcgccgacacctcatggaaactgattgcaaatgtgctacttctcacttctgtgtggcccgaggaggctgggttaatgctgggcttggtaccttaagcaccctttctcccttccccatcttcattctcagaattacacctgtctgaagcaggcattttccaatgccctagatgggaatataagtgtaaggagatgtgaagcatttgcctgtgtgtcagaacattcactgaggatcctcataggcacttctagaaaccaatccttgaagatgactaaccagaaatgcccgtcatagcactgtttacagttgcaaaaactgaagccaattgaaatgtccatcaggaggggattaaatgaattatggtacagttacaccgttgaatatttttacagccattggaagatgatatataggctatattcatttgacaaggaaaactcatattttttttagtgaaaaaagcaggggtataggaattgcatgataattcacatttatataaaacttttttttgggaaaggatggttgaattggaattggtaaataacctaatggcccctccaaaaaatgggaaagtttgcatatacctttaaattttataaccaattttggattggttaaaaaattggggaaggaattaaaccggttaaaataagaaaaaattcccataaagcatttttttcctttaatgggggaaaaanaaancacnatcacatctacnaaaacgaaaacccgatgaactggcgcccccccaacgaggtaccccctcagacagagcccc

SEQ ID NO: 362914 - DNA, 834 bp, Homo Sapiens
gcggccgcagggcttccccgcctggcgcctgccctccagggctggggcctcgcctggcgggaccccgcagcagccccggccccatccccgcccagagccgggcgtcgtgtgggtccgtgggtgataattgagagcgtcagacccaggactgttcagggaggagccccggtcagactcccacgtgtgaagaccgggccccaagtggcaagggctggcctggggcgggcagcttgggtcctggacgttgataggaagcggaaggggaatcgcgggaagctggcccaggtcaggtccgcaaaggcttctgaagaagaggaagggcgagtaggggcacctggacgctgatggtggccaggatgctcagctggccaggagggcagcacctgctggggacggtggccctgccttcatgcccaggacaccagctgggtccagctagcagccactgggaatcagaggaatggggcagagctgggcattcaggaccttgaggacacgtgaccccacccgcccaccgccactatcaggccccgggaccgcactgacaggaaaccttccgtcgtgagggagcacttcccaggggccgcagggacgacactctccagggaggccccagcaaccacaccatcttcttgctgtgagaggtctcaccccgggctacctcctgtcactactcactgccctggggtccgtgggcaagttgcccagggtgggggtgcctagccaggtgcagtccccgccccgcctagtcctcggcgtcacgcaatgctcacctcgcctcttccccactaacatcccagactttaaaattcagtaaatcagatgtacaccgaa

SEQ ID NO: 362915 - DNA, 474 bp, Homo Sapiens
cacccctgacgcctggcgcgtcctccctgagccaactgggtgcatacctggacagtgacgacagcaacggcagcaactgagccctcccaggaccccctcacggggtcaaagtcacacgtccagcttcagccacattgaggccagcattgctggtggtcagggcaggaggccttggcgtgactggaggccggacagacaagcgccagcgtgctccaacacatagggccaccaagggcctcagccccaggaggtcccttctctgtgccctcaccagcctctcaacacctcggggacccctgctgctcctgcccccacctgtcactgtgcttagggctgcaacatccctggagcagcttccaacactacttcagggtggcagtgtttggggcactgggcgacctgccggcctctagatggcctcatctcttccttccacaaactgtctagaaccaataaaaggaaacctgccaaaaa

SEQ ID NO: 362916 - DNA, 559 bp, Homo Sapiens
agatcctagaacagatagacaagagtggcgagctcataagcccttagagaggaggtgaccccaccttacccgctcacttcggcgtgcggagacagagacccaaagtgctccaggaggccctggccaggccagctggactccaactgcccagcctatggccaccaattggatccaggagaaagtgtggctctctcaggaggtggacaaactgagagtgatgttcctggagatgaaaaatgagaaggaaaaactcatgatcaagttccagagccatagaaatatcctagaggagaaccttcggcgctctgacaaggagttagaaaaactagatgacattgttcagcatatttataagaccctgctctctattccagaggtggtgaggggatgcaaagaactacagggattgctggaatttctgagctaagaaactgaaagccagaatctgcttcacctctttttacctgcaatacccccttaccccaataccaagaccaactggcatagagccaactgagataaatgctatttaaataaagtgtatttaatgaatttctcc

SEQ ID NO: 362917 - DNA, 508 bp, Homo Sapiens
cgacccgcctgcgacgctgatgagacctgcacgcagtggctcacagcagcacgatttgtgacagcccgaggcggagaacaccgaacacccagtgaaggtgaggggatcagcacggcgcggccacccacgcacccacgcgctggaacgagactcagccacaaggaggtgcgaagctctgacccaggccacagtgcggatgcaccttgaggatgtcacgctcagtgagagacaccagacacagaagggtacgctgtgatcccacttctatgaaatgtccaggacagaccaatccacagaatcagggagaggattcgtgggtgccgggactggggagggggacctgggggtgactaggtgacataatggggacagggctgccttctgggtgatgagaatgttctggaatcagatgggatggctgcacggcgtggtgaaggtactgaacgccacctcactgtaagacggtagattttgtattttaccacaataaacaaaacaaaccaaaacc

SEQ ID NO: 362918 - DNA, 573 bp, Homo Sapiens
ttaagaaagttggaaaggtctctcctcccaaggacagtggctggaagagttggggcacagccagttctgaatgttggtggagggtgtagtggctttttggctcagcatccagaaacaccaaaccaggctggctaaacaagtggccgcgtgtaaaaacagacagctctgagtcaaatctgggcccttccacaagggtcctctgaaccaagccccactcccttgctaggggtgaaagcattacagagagatggagccatctatccaagaagccttcactcaccttcactgctgctgttgcaactcggctgttctggactctgatgtgtgtggagggatggggaatagaacattgactgtgttgattaccttcactattcggccagcctgaccttttaataactttgtaaaaagcatgtatgtatttatagtgttttagatttttctaacttttatatcttaaaagcagagcacctgtttaagcattgtacccctattgttaaagatttgtgtcctctcattccctctcttcctcttgtaagtgcccttctaataaacttttcatggaaaagctcc

SEQ ID NO: 362919 - DNA, 206 bp, Homo Sapiens
  misc_feature (137)..(149): n is a, c, g, or t
cctttggcctgggaatttttcccatttttatgaaggggttttaaattgtttcattttgtgtgctgtgcttcaaagccttaactgtcaaatcttgcattatcttgtttgtacagaaatatactggcctagcagaggcnnnnnnnnnnnnntgaattttattttacttgtcacacctgtcttaataaactggagttttgctgctaaag

SEQ ID NO: 362920 - DNA, 441 bp, Homo Sapiens
  misc_feature (123)..(235): n is a, c, g, or t
  misc_feature (263)..(360): n is a, c, g, or t
tttttttagcaaggtctcaccctgttacccaggctggagtggtgcaatcatggctcactgcagcctcgacctctcaggttcagtcgatcctcctgggactacaggcgcatgccaccatgccgnnnnnnnnnnnnnnnnnnnnnnnnnnnnnnnnnnnnnnnnnnnnnnnnnnnnnnnnnnnnnnnnnnnnnnnnnnnnnnnnnnnnnnnnnnnnnnnnnnnnnnnnnnnnnnnnnataagcataagctactgtgcccagcccnnnnnnnnnnnnnnnnnnnnnnnnnnnnnnnnnnnnnnnnnnnnnnnnnnnnnnnnnnnnnnnnnnnnnnnnnnnnnnnnnnnnnnnnnnnnnnnnnnaagcaaaagaaacccaaaagccaacaattgccaagttcagcaggtggatatataggacagtattatgccattcttttaatt

SEQ ID NO: 362921 - DNA, 344 bp, Homo Sapiens
  misc_feature (12)..(12): n is a, c, g, or t
  misc_feature (344)..(344): n is a, c, g, or t
tcttgtattccncagtgtctgttgttcccagacattgatctttttcctctatgttgctaagctggtagaaaggctggagttgctggcaaccatctttgcaaccatgcagggagaactactttggaaatgaagcaagacaaagaagaaaacagataaaaggagacaaatgtttgactttgtacagctggaaaccagcaatgctggaaatgagcactgaaggcagtttaatgggtttgtcacttgtaaccaagtgacccatggcaagctcacagatttgtattggcagaattcctccttttctttatttaaaatggtacttttggccaggcaaggtggttcacacn

SEQ ID NO: 362922 - DNA, 538 bp, Homo Sapiens
tttctcagtgaaacctgtaaatatctgtatctgctgtttgataaagacaatccgagtacacaagtctggaaccagatacatgttcccaacaaagggacacattgtatctgtggatgagcatcttcgggaattcccatggaagaaattcttctctaaaaagggagggcaggaccaagggggaaagtctgtgcacaggccgaaacctcatgagttaaaagtcatcaactccagctccaactgcaatcgtgtacctgaagagaggagggtactccctgcccttaaagagcatttacatgcgacagattgaccagatggttggtttgatttgatctgctctctgtgaggcctcatcttgaaccagaccttaacgaccaaacccagaccatgccaaagtccagtttgaaatgaaaggggacagaagtcttgctgtccatggtggtgtaggaatttttgtgcaacccctccccacgtctggttaatccttgcacacttcagtgtttttttcctgttcaataaaatgccctgttaaggaaaaaaa

SEQ ID NO: 362923 - DNA, 754 bp, Homo Sapiens
aagtctctgctgtatccctatatatctttctccagagaacatatattgtcaaatagatacacattttctaataggtatttagaagcacttgaaataatctctgcatgtgttacaattcagttatttctgtagtttgtaaactctaaagtgacattactattattttagagatgtctaagttgtaattttgatttttgtggaaccatttgtttgttaatgttgggattctctgcacttttgaatgtgaaagcttatatccctgaattctgatacttaagagttttctatttcagacatctctgtgtggaagttgagactaagaataatcctagggatgtcatgaatttaggcaatgtttctcatttggaaaatgaaatgagaaataatttccttctttaaagcaagtatatatagtatgagaaacttggaggcatttcatacacacgtttcttaggaaaatggacacattgaaaatgtcctcttttttatattagagattctgcagctctttgctcttaagagcaaatcacaacaggattcttaatgtatgatttctttgttcatatattatgaatgtattattttatttgcttcgtaataaagtttataaggaagagcatctcatacatatcattatcgtggaacacgttgaatgtttgtgattctgtgtggcctttttggggctggaaaatgtatgaattcttcaactgtcttacaagagatctgctaataaattttattattaaataagaaa

SEQ ID NO: 362924 - DNA, 504 bp, Homo Sapiens
  misc_feature (15)..(15): n is a, c, g, or t
gcagagcagagaganatttgtagcaatgttgctaatatgtgttatcagatctgcgggaaaactatttctattcataatacatcatgggaaccatactattctggtaaaaatcagttattagcataacagcctgagcacttatgtctctcgtttcatcctgcaggaggatgtagcgcctcagtttattttaatgttcataagattatggtgtctaatttaataaattacaggattggaactgcgatccttggtaccacagtcacagaactgggggtcattttctagatgaaacaaacggaacaagttctcttccaacaaagaaactgtactgtagaaattaatttcctccatgaattttatatattgtgtacaaatataaggtatgtatctgaatacaaagaaaagcctatcatcatatagatatcagtattctctgttactgcacagaagtaattttctcatgatgaaataaagttcacacacatactatatccataaaaaaaa

SEQ ID NO: 362925 - DNA, 404 bp, Homo Sapiens
  misc_feature (82)..(106): n is a, c, g, or t
atttaaacaaacatacacttctcctggcaaggttatagatgattaacctctgttcatagacttatatataaaactagagggnnnnnnnnnnnnnnnnnnnnnnnnncaagtgcaattgtttcttacacagacattattactattaaattatcatttagccagttatctgcaaatatatagtatgtattgtctcttcttgtgacgtttagtttaattgcttattttaaagcagaaacattagttacaagtgtcttacaatatttttaccaacagtaaagtagagacttaatgaaaataccttagtgtgattttaatataatttgcatattttagttgtataaagttttaatgtaaaatgtccattattgaagggaaaagatctttcaataaaaaatacccacgag

SEQ ID NO: 362926 - DNA, 425 bp, Homo Sapiens
cttgatgcctgattgcctttgaaacaactttttgttggcttttgctgttatgaatagctagcctcttaaatccaggtgtattacattttgttgctgctcatcttatcttacaattgcagagttgttcctaagacaagttaatactatatgaaataaatactcctttttgagtatgtatttaaaatattttatatcaaaattatacgtggcattataaaatgtttcatccggtagaatgctaactttgaatagattttatttcttatactttattataattataaaacaagctatactgttactattttgccttttactcaagaaagcacaaataaatatttagtaatttaaagataccaaagactacaaaatataatttaaatactttttttaactattattttaggttcaggggtacacatgaa

SEQ ID NO: 362927 - DNA, 556 bp, Homo Sapiens
  misc_feature (94)..(118): n is a, c, g, or t
atactttatcaaagattggccatgttccacttggaaatggcatgcaaaagccatcatagagaaacctgcgtaactccatctgacaaattcaaannnnnnnnnnnnnnnnnnnnnnnnnaatgctgttcgttcaaaagtggagttgttttaacagatgccaattacggtgtacagtttaacagagttttctgttgcattaggataaacattaattggagtgcagctaacatgagtatcatcagactagtatcaagtgttctaaaatgaaatatgagaagatcctgtcacaattcttagatctggtgtccagcatggatgaaacctttgagtttggtccctaaatttgcatgaaagcacaaggtaaatattcatttgcttcaggagtttcatgttggatctgtcattatcaaaagtgatcagcaatgaagaactggtcggacaaaatttaacgttgatgtaatgaaattccagatgtaggcattccccccaggtcttttcatgtgcagattgcagttctgattcatttgaataaaaaggaacttggaaaacaaaaaaa

SEQ ID NO: 362928 - DNA, 553 bp, Homo Sapiens
  misc_feature (104)..(104): n is a, c, g, or t
aggagcggcaatgaacatcacggggaggtgctggttccatcctgctctcgaggcacagtgggttcaggcccatcagctacccctgcagctggggaagacttatncatcccggcagcgaggctgggctggccagccaccactgactataccaactgggcctctgatgttcttccagtgaggcatctctctgggatgcagaacttccctccatccacccctctggcacctgggttggtctaatcctagtttgctgtggccttcccggttgtgagagcctgtgatccttagatgtgtctcctgtttcagaccagccccaccatgcaacttcctttgactttctgtggaccactgggataaaggaatcaaaaggacaatctagctctccatactttgaacaaccaaatgtgcattgaatactctgaaacccaagggactggatctgcaggtgggatgagggagacagaccacttttctatattgcagtgtgaatgctgggcccctgctcaagtctaccctgatcaccccagggcataaagcatgtttcattctctga

SEQ ID NO: 362929 - DNA, 442 bp, Homo Sapiens
ccccacaagcagaagcacagaggggtcacaagcaccttgtgtgaaggagtgagcgcgcacgtgtgtgtaggtgggtatgtgttgtttaaaaatatatattattttgtataatattgcaaatgtaaaatgacaatttgggtctatttttttatatggattgtagatcaatccatacgtgtatgtgctggtctcatcctccccagtttatatttttgtgcaaatgaacttctccttttgaccagtaaccaccttccttcaagccttcagcccctccagctccaagtctcagatctcgaccattgaaaaggtttcttcatctgggtcttgcaggaggcaggcaacaccaggagcagaaatgaaagaggcaagaaagaagtgctatgtggcgagaaaaaaagttttaatgtattggagaagttttaaaaaacccagaaaaacgccc

SEQ ID NO: 362930 - DNA, 328 bp, Homo Sapiens
tgctgcccctgctgccactgctgccactgcccccccttttgccgctgccacaaatgctgctgctgtgtcatttcctagcccagcccaccctgccagggccaggacccagacttcagcaaatgtggctcacacagtgccgggacatgccgggacatgcggggtggctgttgtcatgggggtttgccccttcacaccaggcactgggggtcagaccccccaggaaggtggccgttcagcccgagctcctgaaacggaatcccaggtcctggctggagagggacacccctgattaccttaaggcccaggcaataaagcagggtgatcctcc

SEQ ID NO: 362931 - DNA, 1602 bp, Homo Sapiens
  misc_feature (883)..(958): n is a, c, g, or t
cgaaaacgccgctgagacctcagccttgacctccctcagcgtggccgggaccctgagcctctgcgcagagccacccgccccgacgtacttaggcggcatagccctgagacctctggccagcgccaggcaggcagcgggggcggcagaggcctgggcctgagtcttctggctctgcctctccctggggacaggagggagcctgggggtgtgggtggggagccggccggccgtgacccagcgcctggctctgcccgcaggagtggacagtgcaatgaaggaagaagtgcagaggctgcagtccaggtggacctgctggaggagaagctgcagctggtgctggccccactgcacagcctggcctcgcaggcactggagcatgggctcccggaccccggcagcctcctggtgcactccttccagcagctcggccgcatcgactccctgagcgagcagatttccttcctggaggagcagctggggtcctgctcctgcaagaaagactcgtgactgcccagcgccccaggctggactgagcccctcacgccgccctgcagcccccatgcccctgcccaacatgctgggggtccagaagccacctcggggtgactgagcggaaggccaggcagggccttcctcctcttcctcctccccttcctcgggaggctccccagaccctggcatgggatgggctgggatcttctctgtgaatccacccctggctacccccaccctggctaccccaacggcatcccaaggccaggtgggccctcagctgagggaaggtacgagctccctgctggagcctgggaccccatggcacaggccaggcagcccggaggctgggtggggcctcagtgggggctgcttgccttgagccccagcnnnnnnnnnnnnnnnnnnnnnnnnnnnnnnnnnnnnnnnnnnnnnnnnnnnnnnnnnnnnnnnnnnnnnnnnnnnngatacatcgaggcgcgtagtatggagaaagaattcactcaccggggaggacgcgcgaagatggacaagcgcgcgctagaccacacgattggggaagagcagacgaaagtccggccaccccaataattagagagaggggccccttcctgaatgatgcaccccgcaatacgccgccgaagcagaccggacgctggatgcagacacgccatgttggagaaacggcaagagccatgagaacgggccgaaccacgcggagggcgatcccacttctgacgagaagggaaggaacagcaaccaattttgctctatgggcggcggtacggttgtgcgcaaacaaggaataatgtctggagggcgaaggacatggttaccgaccagtatagatagacattcgattttaagcattaagttcgctggtgtagaggggagaagacaatattatgatacacacattgtgtgaaagaactgggtgggggaaattagaacgtagtgggtttagtatgaaaccatacaaaaaggagtgtgccaaatataaatcgtgttcagtgcgtgaggtagcgaaaaagaggaaggttcgcgcccatgtagagggacaggggatatcgtaatcattttgtgggacaaaggcctatgtatttacttgta

SEQ ID NO: 362932 - DNA, 941 bp, Homo Sapiens
tcgagccctgcagcccggcgaaatggctcccggcggggccggtttgcgcatgcccagtcatgacggttgtcggcgcgggccctagcgtggcggcgctgcagtctgggcagtgggttggttcctcctcggtcctctgtcgagtggcgacagggcctagccacctggcgggggtgaccttcggacgtgcgacccgctcggagaagggagggaactgtggcccgcaacaaagcagtgacaggcccgacatcccctgcagggcgatctttccctcagctgcctgccggaggaagggcctttctgtttcacagggctaaagatggggcgcggttcctccacggggcggctgccgggtgaacggaacggggatggaggcgctgccagaagagcccgagctcgagcccgccctgccctcggcctccccgccgcgccgctccgcaggagccacgctcctctcctgctcgctccggagaaccccagtccggcctgacctcggccctcgcggtcaggcgctccaaccagagcgactccagctcgaacagcgctgggtaaactgaggctgaaccccgctggctgcatccccaggagtcgggcgtttacggtcacgggaacaggttaataaacttttacgcagcagacccggaacttaggtcccgatgtccgggtatcttaagaacaagaagcattcttagttgaagtttcgctttaaagataatgatacagatgcttgcggaggacaggcgttgatgcaaagattggcaatcctttgacgagcccaggtagtacagcacgtcttcccccgtgatgtttttgggcttatatccttacatataaacaaagcgtacccaggtggacgccttcctcctcgtgcttttgggaacaccctgctctatgggagtagccattctttatttcttcactgccttataaactgctttcccttt

SEQ ID NO: 362933 - DNA, 329 bp, Homo Sapiens
gtttcctgaggcctccccagccatgcagagctttccttcccacgctcacactctctcctactgccttgtgaagaaggtgactgcttccccttctgccatgattgtaactttgctgaggcctccccagctatgcagaactgtgcctgaactctggcaatgacctgaagggccctcacacagattcttctccagtgcctccagaaaacaacgcagctctgcgacccctgatctcagcctcatggaatactgggcagagaatccagtcacagcttgcctacacttctgccctacaaactggaagctgataaatttgtttcattttaaactgt

SEQ ID NO: 362934 - DNA, 472 bp, Homo Sapiens
cacaaatcagcattcaacagccatcagagaattcataggagaggcaatatgaatgtaatagatgtgggaaggcttctctgaagtcagacctcattttatatcagagaaccctttcagtatagtgaatcagaaactcctgcctgaagtcaaacaccttgtacatcagagagttcacacaggttagtgtggacatccccttgtgtgttggactcataatctgaagactcacagaatggaaaccatgattataacaagaccacatggtataacaatactagactatagacaagtaaaaatttataaatattaagaatgtatatacatgtcaccatggattggaactgttttgcatatcagggaaatcatagccaaggggaaatctatcagtataaggaatgtggaagacataatcctttggaaactgttaatactaaaagatatgtttctgatacaatagcaaacttgaaaaaaa

SEQ ID NO: 362935 - DNA, 705 bp, Homo Sapiens
atcaggccaaatcggtcgagctcgaattcgtcgatgagcgggctgcacgccacagttctgggaggccatgttctatggggatgtgcagactcacatccgggccctctacctggagcccacggaggacctggcccccgcccaggaggttggggaggcaccttcccaggaggacgagcgctctgccctagacgtggcttctgagcagcggcgcttgtggccaactctgagtcgtgagaagcagcaggagctggtgcagaaggaggagagcacggtgttcagccaggccatccactatgccaaccgcatgagctacctcctcctgcccctggacagcagcaagagccgcctacttcgggagcgtgccgggctgggcgacctggagagcgccagcaacagcctggtcaccaacagcatggctggcagtgtggccgagagctatgacacggagagcggcttcgaggatgcagagacctgcgacgtagctggggctgtggtccgcttcatcaaccgctttgtggacaaggtctgcacggagagtggggtcaccagcgaccacctcaaggggctgcatgtcatggtgccagacattgtccagatgcacatcgagaccctggaggccgtgcagcgggagagccggaggctgccgcccatccagaagcccaaagctgctgcaggcgcggcctgctgccgggtgaggagtgagag

SEQ ID NO: 362936 - DNA, 562 bp, Homo Sapiens
ctcaagcatctctttattttgatgatatatttttgtaaggaaaatattcagatgatcaggaatgtatataactgaaatcaagaaaaagaacagtatgcatttaaaaagacagaattatgaaattatatgagtgcttagaatggggctaagggaagtgctgaaatagagcaaaggatggaagataatatagactaccacccactgtaaatgtttgcaagtggctgtgttttaaatgggattattacagttgatctctatgaatgtcagagccctaactttcaggctttgcattttgtatatgggaagaaatatgacaatcctaggtaattaaaccatagacccaaagcccttacgtttgatgcaatttatttttaaaataggccttgtttttcagcttcatctgcagttctatgtgaagattgataaatcagtttttacttgttttattaataaaacgtaatttggatatcttgagttgatggttttgtgatttagctgggtaaactatctttgtaacagataagttatttataaaaattaaaaaacttatattctaatgtgg

SEQ ID NO: 362937 - DNA, 467 bp, Homo Sapiens
  misc_feature (19)..(19): n is a, c, g, or t
catttatccatatgactcngcaactccacacttaggtatttacccctagatgaaagaaaaattctgtttaccatgaaaacctatactcagatgttcacagcaattgtataattgccccaaattaggaagtaacacaaatgtacatcagtggatgagtgattaaacaaattgtgtacaccaatactatggagggctgctcagacataaagaaatgatttattgacacttactacaacatggatgaatctcaaaagtgctgttgtattttaggtaaaccatgtgataacttgaattacatttgataaaagatttataagtgtaaaaactagatttatatattttaattttatatgtgcctgtcattacatactatagaaaattgtgtctacagtatgttatatagcatattgtaatatttattactgtatattccttgtgacaataaaatagtttgtattttatataat

SEQ ID NO: 362938 - DNA, 503 bp, Homo Sapiens
gcggccgctccaacatcagaatggtaacaccactagagagcaaagcgtctctggagtctgcagcagcaggtctgacgaacgaacaagggaaggagagagcctgcaccgccaccactccctcaggggagcttgcctaaagtttgctactgagcatccggacagaagccactggccagcactgacgttccacgaggagcccagaggatgcgacgatcatctgcccattatttttactctcggaccccccacctccggagtctgggggtccctctgtgtcagtgggaaccgggaggagctcgagcctgagtgctagctgcgtttgcgagatttcagggggtttgagctaagccagaggtggtccacgtcggccctcctccctccccaaccccccgccgcttgttatttttctttgggcggttggttgggcaattatgctctgcgaccgtaagatctgagtgccaaggcgcccgcccctccgtgctaacctagtaagagtgtgggct

SEQ ID NO: 362939 - DNA, 231 bp, Homo Sapiens
gtcctttttcccttcgtcccatttaggaaagttttaaattattaaccaatccagttaagtttagagtgtgaggtcccatcccagccaatgggaacgggacccagccataggggattgcatcaggatgtaaaggttataaatgtccccgtttcctttgtttggtgggctttcgtgggtggactgctggtgagggcccccttttggcagaaagtaaaccagccttgttaagag

SEQ ID NO: 362940 - DNA, 499 bp, Homo Sapiens
  misc_feature (100)..(148): n is a, c, g, or t
  misc_feature (410)..(410): n is a, c, g, or t
  misc_feature (447)..(447): n is a, c, g, or t
  misc_feature (482)..(482): n is a, c, g, or t
agaagcagtacctgctcaagcaccagcgcgtgcaccgcgcggcccctgcgtgcagccccaaggaggaggcgcgctagtggactggacctcagcggacccnnnnnnnnnnnnnnnnnnnnnnnnnnnnnnnnnnnnnnnnnnnnnnnnnccaggattgctggctcctagaaccccttagagcgggaccggtggattccttaaggctctgaagggctgagaacagttctagaagcgtcccaaagggtgctgggaaaggtcccagcgtgggttgagggaggagggaagatccgagttcctcaccgcgggccgggatgtgaccaccctcttcagaggttggaccccaggcttcaagcaccgagtgaggggtctgtttggggacgctgggagagtctcttggtgtgaaagttgcnttaggtcttggatttgtcaagttttggcaccagcccnttcctgcccacgttttaaggattggccccgggttnccctttttggaagaatt

SEQ ID NO: 362941 - DNA, 865 bp, Homo Sapiens
gtggacatgcgggcctcgtttgtccttgtcgagccgcgccagttcatctgctacgatgtgcggcaagagcttctgcgtggtgatcggcgctcactcatccaccagcgcatccacacgggttgagcggccttacctgtgccccgagtgcgtccgccgcttcagccagaagcccaacctgacgcggcaccggcgcaaccacacaggcgagcggccctacctgtgtcccgcctgcggccgcggcttcagccagaagcagcacctgctcaagcaccagcgcgtgcaccgcgcggcccctgcgtgcagccccaaggaggaggcgcgctagtggactggacctcagcggacccgtggtggtgcgggggatgtttgcggggtgtgtgtggggagtgggggtggccaggattgctggctcctagaaccccttagagcgggaccggtggattccttaaggctctgaagggctgagaacagttctagaagcgtcccaaagggtgctgggaaaggtcccagcgtgggttgagggaggagggaagatccgagttcctcaccgcgggccgggatgtgaccaccctcttcagaggttggaccccaggcttcaagcaccgagtgaggggtctgttggggacgctgggagagtctctggtgtgaagtggcttaggtctggactggtcagctgtggcaccagccggtcctgcccacgcttcaggatggccgggggctgcccctgtgggagagttgccaagactcggcgataccaaggatggaagccagaggctgtggcgagggagagccaagcatattcccagcaccagggccactgctggcacgtcgtagacatccaataaatatttttggaaggagtaaa

SEQ ID NO: 362942 - DNA, 494 bp, Homo Sapiens
gcatgcagtggtaattattttagaaatattgttccttggtgtcagcgtagctgtctgtcttaggagctgggtcggcgttccgacagcacttcctgtccgcccttctcctctgccatccagaaccgtccagaactgttgcctgagacccctcctctctcacacagccctgccatgctgactcggtttcccctcagagtcattgttgtctgggctcgagtttctgccccaggttgtgtgctggaatcggggggtggctctcctgccacccatggggagcgccaggagaggagggtcatggaggatgttggggctctgaccccaggagtggggtggagggcggagcctgctggaggccctgccttcacagagatgccgcgtgctgggaaggctcttggggtcccctgagcgtcttccagggtggctggagagcacagacgcgccagggagccccctctgtgctcctcagagttcaataaatgtcgtggcccctcctc

SEQ ID NO: 362943 - DNA, 275 bp, Homo Sapiens
aattcccagttcaccgacaccagcctggggatcacctccttgtcagaagttggaaagaggaaaaactcagccaacctgggaaggactttatcgggtgctcctgacccccgagatgacggtcggaaagggccccatccctggagggattttggaccttcactccaggatcaacgccttccaaattaacattcaaaaaggtttaatctgttttttccttctccctgtagccgcccaaggacgttttattatcaatataaggtgatccccctttcccc

SEQ ID NO: 362944 - DNA, 475 bp, Homo Sapiens
tttctggagtctcaacccatcaggttcagaccagtaggaaccaggctgggtcaggctcttaatttcactacggtgggggaccaaaatgaaccactggcttttgttcactttgcccctgagagatctagtcctgtcctgtgatggcttccacaaaccctgttggaagtttgggttattcctataactgtatgtgttgagtggccgtgaggctatggacctagcctggaatttagatgtgtagctattttttaatcttgttggtaaatgctcagaggtctgtgctacctctgtgaggtatatactaaaatgaatgtaaaataaggatcgtattccctgctttaaggaactggtagtcttgtttgggtgatgagacaaagttcttgagacatttaaactgtatttaccagtgtgaaaaatgtcatttatggagattaattcattatggaaataaaacattgcctaagcccttaaaaaa

SEQ ID NO: 362945 - DNA, 538 bp, Homo Sapiens
ccttcctgctatttaaaggaatggttagagctccagcagcgccccccaggctgtgaggtgagtttgaggatgtaagccaagtgttgcagagcaaagttaaggaagctgagtgtctattaactttgtggcactaccattcctgctgtggattgcttacctccaggcctcctttaggtgaaagaataaacccttgtgtggtgatgccactgatgtcaggactgttactcaccgctaaatgtattcctaagtgactcagggaccaactctaagcaaagaaaaatgaatattctaaggtagtagaggataagggtcatatttatgtttctgatatattctttataagttgagtttaatgcttcttataagcattataagattgagtatttaaccttttcagataaaaaaagtgcatcatccagacagatgaaaatggtctcattgtccttatatatcattattatacccaatttttggtatttaccaacccaatccttaaataaagaaaagaaggacaccaagtctaaatgagagggaacct

SEQ ID NO: 362946 - DNA, 550 bp, Homo Sapiens
aggcgggatgtagctcattttgggatacgagtctccatcgtggagcctggcttcttccgaacccctgtgaccaacctggagagtctggagaaaaccctgcaggcctgctgggcacggctgcctcctgccacacaggcccactatgggggggccttcctcaccaagtacctgaaaatgcaacagcgcatcatgaacctgatctgtgacccggacctaaccaaggtgagccgatgcctggagcatgccctgactgctcgacacccccgaacccgctacagcccaggttgggatgccaagctgctctggctgcctgcctcctacctgccagccagcctggtggatgctgtgctcacctgggtccttcccaagcctgcccaagcagtctactgaatccagccttccagcaagagattgtttttcaaggacaaggactttgatttatttctgcccccaccctggtactgcctggtgcctgccacaaaataagcactaacaaaagtgtattgtttaaaaaataaaaagaaggtgggcagaaatgtgcccagtggaa

SEQ ID NO: 362947 - DNA, 1401 bp, Homo Sapiens
tcgcatcaagatccaaatcttgatttcatattaacgcctaaggattgcctgtgtgctggaaatatatttgaaactcaaccagtatgcccagcctattgcatatcattgtcagaccatttttgctgctgtggtcacccacgatttcatttgtcttatacccaggtgaaaggggaagggtgaatgggactggctggttcctttaaatgttaacttatggaaatgctagttcaaatggtaatgtcacagtgttttgtatgcagagagcaagagttcaaccaacagctgtttattcatgtgtgtgtgtctttgctgctttgagttctctgtatctactgtgtatgtgaatggtcatgtgggactcagtggtggtgttgtgactttgacctagggtccgagtgtcacagctgatcttggcactcggcactcattggcacagtggtagttagaggtgaaaagtagagctgtcaagcccaagggcttagctttagggctcctcctgagttcggcccacagtagaagcaagattttaactagccccttttcctcttcaccctcccatgatgcgcagtgttcagaaagctggtaagtcctagggatttccagaagtagcctgcagaagaaggtaagtttgaaagccactccaggggtcctgatgctgtcatgctcagtgagccattttacagttctccaaagtctagccctgtttcggacctgcacttcacctctaagttatgtacaactcaacctgcatccctctaaaagtcctatatccatattcaccattggctaatttgaggccctgagtgggccttgaatgctaaaaagaagcagggtacggagggctacatgtagataccacaccaaggctggaggctgctctgtcgtaagacagaaagaaagacgctgggcccaattttgacttggccaggggacaccttggtgtgtttgttatctttatctgtgggtaggctagctgacccatctccttgagtcattccctttgggaaaccccactgccagtattgatctcctttttgccttgtactgaatgacacattacctccacactctcccggactaggtggtcaacagggccacagggttgctttctgtctttggtggggcaggggagttgacagggatgagggtccaaggaataagcatgaatgacaagaaaacaagggaaagagttaacctgtcacatagcaggttaactttttcagggtttgcagttagaggtattcgaccattcactggctgagccagatcacgggaacttgagagcttttactgtgattcttcaatgtaaaaaataaacaacaatgtcaaactgtgtttatatgatttgtataaagcctttttaagattactatttaaataaacattataccagagaaaaaa

SEQ ID NO: 362948 - DNA, 540 bp, Homo Sapiens
  misc_feature (25)..(25): n is a, c, g, or t
  misc_feature (36)..(36): n is a, c, g, or t
  misc_feature (44)..(44): n is a, c, g, or t
  misc_feature (54)..(54): n is a, c, g, or t
  misc_feature (60)..(60): n is a, c, g, or t
  misc_feature (118)..(118): n is a, c, g, or t
aaaaaacgctgggccccaaaatttnaacttgccccnagggaaancctggtgtgnttggtnaacctttaacctgtggggtaaggcctaacctggaccccacctcccttgaagtccaatncccctttgggaaaaccccccactgcccagtaattggatcctccctttttgccccttgtacctgaaatgaacacattaccctcccacactctccccggacctaggtggtccaacagggcccacagggttgcctttcctgtctttggtggggcaggggagttgacagggatgagggtcccaaggaataagcatgaatgacaagaaaacaagggaaagagttaacctgtcacatagcaggttaactttttcagggtttgcagttagaggtattcgaccattcactggctgagccagatcacgggaacttgagagcttttactgtgattcttcaatgtaaaaaataaacaacaatgtcaaactgtgtttatatgatttgtataaagcctttttaagattactatttaaataaacattataccagag

SEQ ID NO: 362949 - DNA, 525 bp, Homo Sapiens
  misc_feature (468)..(468): n is a, c, g, or t
  misc_feature (484)..(484): n is a, c, g, or t
gaatgaaactgtgtgaaggataagattgttcgcatcaagatccaaatcttgatttcatattaacgcctaaggattgcctgtgtgctggaaatatatttgaaactcaaccagtatgcccagcctattgcatatcattgtcagaccatttttgctgctgtggtcacccacgatttcatttgtcttatacccaggtgaaaggggaagggtgaatgggactggctggttcctttaaatgttaacttatgggaaatgctagttcaaatggtaatgtcacagtgttttgtatgcagagagcaagagttcaaccaacagctgtttattcatgtgtgtgtgtctttgctgctttgagttctctgtatctactgtgtatgtgaatgggtcatgtggggacttcagtgggtgggtgttgtggactttgaccccaggggtcccgagtgttcacagctgatccttgggcactcgggcaantcattggcacagtggntagttagagggtgaaaagttgggggccttcaagcccaaggg

SEQ ID NO: 362950 - DNA, 1046 bp, Homo Sapiens
tttggagaggatacataaatttaattcaggcaaggaattcagactgcatctgcatgatatcaccgttttatatgaaactcctatgttagatacagggtaggaaaattgaagaaccaggctttgtgcagtatcacctgttggggtctctgagtaagtcctctcccagttcacccttgtcgctttcctgggctcagccagagtcacagccctgctccccacagccttgttgaaatgtctggcctgacgactcagggaacccagcatagtgtctagattccaactgcctcattctcagccctcagctgcctgagccctcccttcaatgtgcatcctggggaacactcatcaggactcagaacttaaatagaacatggtttctgagaggcctcttcctctgggaagccacttctatgaagaagccaaatggatttctaacaatgcgtcttcataaatcaaacatcataccatggacaaagctggtctcaacaccccagttatcaggtcagcatgtgctattgaaggaagggctgtggttcctcttcctgcatccaaacttactggaaggctgaattaatgaatataatgtatatgcaggttcttgtgacgtgggagcagaagagtgatttctcctggttttcagatccttgacatcttcgtaaattgtcaaaaattccttgggactggtctcaaagctcgttgaggaaaaggagatgctgtgctcccagacacatcccactggacgcaggacaaagtcacaggatccaaggcctcaggcaggagcaccaccctaaggaccttccactcacctgactgcttctccttcctctttctcctccacacacagaagcaggcaagggtgccaaggaacagtgcgcttagaatcacgatgatcaccaaaaacggccaaaatctgaattctgaggaatacagaaggcgtgagaactgagctgtcagctcgctctcttcttccttccacctgcctgctgcaggggctgcctcaaaacccacttttctctgtgttgtggctgattgatcccgggaattcc

SEQ ID NO: 362951 - DNA, 188 bp, Homo Sapiens
gtaactaagtgctcattatttaagaaaaaacaactatctgccctagaatgtgaaagtttcctgtactcccttttccagaaataactattatttctcatactttaaacaaaatgtgttcatattataaattgttttgtaaattactgtttgtgggcagtgagttaaaatacataaatataagttactac

SEQ ID NO: 362952 - DNA, 1166 bp, Homo Sapiens
  misc_feature (185)..(203): n is a, c, g, or t
  misc_feature (494)..(494): n is a, c, g, or t
  misc_feature (1088)..(1099): n is a, c, g, or t
ggcaggtttcactgctatttatatatttctcctttcccaaatgatttttctaaagctgggagtggaggcaggagggagaaacagaaggtgagcagggaggctatttagatgtgtcaaacccgggtgatcattaataatttgggcatatatatgctcccaaacttactctgcccccttccttcccnnnnnnnnnnnnnnnnnnnggtatgggccttttaggcttgggccagccagctttcttgagatgagtgaataaaagcgtattgtaatttcatgtctgcttcagatcatggggacagtgccacccaggaactgctgctgaggcctgggaagctcccttgccttcgggtttggagcagtggcatcatcccaccaacctgagccatgaaagggctgagcagaaagttaaatggtagtttcctgactggaagccacacgtaggtcacttgagtagtcaggaagcacagtgggtgtggagccatcatctgtctttngggctggttcctcccaatctttgtccagtggtataaatggactgtctgctgatggccatacgcagcactggctgttaagatggggaaggggtacatcaggattccactcatagccctggttcgttattgttactcatggctctgacgtccccaagccctcttgaatgttgcaagcaatgttaaatatcacacctcggtctccttttgagcagcccaggtacctaaagcaaggtcaccaaacttgggtttaaacttcagttgccatcacagcagggttcaggttatgcagtttttgcagtgtggagttgaacgctgggtaaagaagggagagctgactctccattgcttttctagtggaaaccagccagtttgacggcacggtgcggatacaggactccatcaggctagtgttggggaaccagcccggcagccttccatgtgaattccaaagctgtttcaacactggctgataggcagacaaaaggttacttgtgtgtttctctgagaagcggtgtaaatgaagtcaccttagaatatattctgtgcggatgcttatattttgttaacttcacgacttatggcatgtcttatttnnnnnnnnnnnngtactaggtgcaaataacattatgaagtggtatttaattaaaaatccatgcagtgacagctgaaaaa

SEQ ID NO: 362953 - DNA, 449 bp, Homo Sapiens
gcggccgccgatccgacggagaaggggggacccaggccagcaggagacaggacccccgaagctgaggccttgggatggagcagaagccggagtggcggggcacgctgccgccttccccatcacggagggtccagactgtccactcgggggtggagtgagactgactgcaagccccaccctccttgagactggagctggcgtctgcatacgagagacttggttgaacttggttggtccttgtctgcaccctcgacaagaccacactttgggacttgggagctggggctgaagttgctctgtacccatgaactcccagtttgcgaattatagagacaatctattttgttacttgcacttgttattcgaaccactgagagcgagatgggaagcatagatatctatatttttatttctactatgagggccttgtaataaatttctaaagcctc

SEQ ID NO: 362954 - DNA, 520 bp, Homo Sapiens
atggccaattttagttaggccataatattgtggttggtaatttttaaaacttagtgttttgtctgattaaagcaggcactgatcagggtatctcctaagaggtaattcacttccttattcctttcccaataattattacattcctaaattttcatcctatgagaaataacaaacaagaagggaatagaattaaattggggtataatctaatcttcattgtttaaatggtttgccttctcaccattgaagccatttttttatagcctcagaaagaggaaataatgcctccaccattttctacctggtgacttgaaaattgaacttttaagttaggaagaagttagagtcagggaacttgtataccactatctatgcagcattgttatagtctgattatttctgtgttttgaatatgattttcctaatgctctaaataaaattttgttaaaaattaattttttatttaatgatgggcaaatattgaatattttagtatatttattaaaagtggtagtccttt

SEQ ID NO: 362955 - DNA, 902 bp, Homo Sapiens
  misc_feature (530)..(549): n is a, c, g, or t
  misc_feature (552)..(552): n is a, c, g, or t
aatggtgttttgttggcacagggcctgtcctgtgttttcacacaggcctgtggctcctgctgtacaaatggagtggggaggagttgagatggagacgccttggccctggacacttacctgtccctctactggcccagctcatctcctcctgtgggcaatcacgcgtgcactggccaccctcccaccccacagcacacaccacgaggggatggcacagggggaagatgaggctggaccgtgatgttatcaataggctagaacgtccttcaaacactgaacctgcatctttcctcctcttactactgaacactttgtgagctctggtggtccagggtgcagcgtttgtccctggggcatgtgatggggagtcctggggcacatcaagatgctttacttctttctttcgacctcttaaaaaactaaaccaagccaaaccacaaaggaaatctgcacaacttaagagaaacttgaaagggatcgtgtaactactagtttgtactaagtttttttcaagaaagggaaacaaattnnnnnnnnnnnnnnnnnnnnatnatgtgccaatatatttttaacactgtgtgattaacattagggagtactgagtgcatcactttatcagtgtgacgggtgatgtccacgtcatggctgttctgactctgaaagccacttctgctgatgtctaaaccgcactacaaccggacgtccgcggggtggggtggccctgctgttcctcctgcaggtgagaggtgtggtgttgcctgttggacttgctgttgagcctggcttgcaaacctgtagtgaaacagctcgtgtctgtgtgcacactgctcctgtgtctgctgtcgttaacattgtgtgtcaagttggtaaagtgacaaataaaggtgttaaaacatggaaaa

SEQ ID NO: 362956 - DNA, 619 bp, Homo Sapiens
  misc_feature (90)..(90): n is a, c, g, or t
  misc_feature (116)..(117): n is a, c, g, or t
  misc_feature (126)..(126): n is a, c, g, or t
  misc_feature (144)..(144): n is a, c, g, or t
gatggtaagaaaatgttaaggagtcatcaagttagtgtgactctgatccagatacagctcatcacgaactaatcttctctgaggatcgangacaagtgactcgtggatacaccagnnagaatcagnacacatcttcaggagatntactgcttccccctgtgtcttgggttgtgaaggcttcacctcaaggaagacgttactttgaagtagatgttggcaaaggaaccggatggaatttaggagtttgtatgaaaaatgtgcagaggggcactggcatgaagcaagagcctcagtctggattctggaccctcaggctgtgcaaaaagaaaggctatgtagcacttacttctcccccaacttcccttcatctgcatgagcagcccctgcttgtgggaatttttctggactatgaggccggagttgtatccttttataacgggaatactggctgccacatctttactttcccgaaggcttccttctctgatactctccggccctatttccaggtttatcaatattctccagttgtttctgcctcccccaggtgactaaggaaaagagcagaagctccttggtttaaccagcacagagaaaataatataaatcccataagggc

SEQ ID NO: 362957 - DNA, 499 bp, Homo Sapiens
atagtgcatgtatagcatttacactatcgtgtatatacaaatatatagcatatgtatagaatatactgtattattgtacatatacatatgtacaagtatatatgtaagctcagtgtcttatgatttcattctgacctattgccaacttcattacacacaactcctttcataaatgtatccttcatgaacatttcatgatctgcacagaccttcagtgacatgcttaaactttctgctttgttttatacttccccttaaacaactggtcatcctgctttaggataaaaagttactatgcaagactcatacagaattattctgttaattttgtaaccatccttaccaaaggtacattctcacacccattaacttccttcatatttctctcctcctcctacttagtggttcctttctgtcttgtttccatatttgaaacaacctctaataaactctgaatttaaacaacttttttcccaataaaaagcaatttttatgcctt

SEQ ID NO: 362958 - DNA, 833 bp, Homo Sapiens
ttgtatttaaatttgactgaatatctggatggctaagaacagacatttatcttacacatggaaaactgacgaaacctataagcctatgtgtttgacagtgaagtatgttttatggacttaaatgccacaaacagttaagtccattggcttggagatgacaagcacgagtttctggtatgtctagtgttctcattcactgattcagtcagtacacagataatcactatagagaacttaagaggctggcttatgttatacctaaatttttactttcttgtatacaacaatgcctaaaattgagcagattgataactgccagcaaaccatagatttaagataaatgaatgatttacccaaccctaaaattccatgggtaaaaattttgattcctttattttcaatactgcgttccttataggtcttacatgcatatgcaaggatattttatcttattcattcatttcatactctcaaaacaccaaacttcaaaaagttaattattgtcataatgcattattccatgtgtggtgtcaatacattttagcggacaaagaagaaacatgccagttaaaacatttctgctactgggattctttattaattatttgagaatgttattttgctagttcttaaggttaagtttttcatcaaagactcaggtacctattattgttccctggtgaaactgaggagaaaagttaatcaaccaggttactcccacagtttgcccgtgtgttatgtatcagttatacaggtatcccaccaagttcaagtcaaaagaaattcctaactttgtatatttctggagctataaaacccctgatttaagacag

SEQ ID NO: 362959 - DNA, 640 bp, Homo Sapiens
  misc_feature (12)..(12): n is a, c, g, or t
gatatggatgcntgcagcagaagctgtatgtagcacatctggtccagctgcagccttgcacagagccatcacctgtgttggcatctggagctgcctgccctctgcagcagctagcctgtctggctgtgcgcaatggctgggccccattctcactcatttacacacctctcaccactctgtgcctggctcgcccttggcaggtgtgggatctgggctggtaacaagacctgagcacagcctgctgggccgagtgggtggaacaagcccagtgggcatgagcaatacttaggcagaaggcgccaccagccacagaggtttccagctggtgaagtgacacctcaaggatcctgtgacacagagaaacagcagtcgaatctcactgggaacataaggaatgcttcagtgagtgactcctgccagagttagatttcgagaagcataggagatggttagacggagaggggttaatttcctagcaaagagtgctagcagtatatgaaaagtaggagaataggaaacaattctagaaacagtaggatgtgttgagaggtggaaaacaaggaccaatattgggagccacctaaaaatgggatgaattccctattaaccaagtgtgaaataaattcactttgaaatgaca

SEQ ID NO: 362960 - DNA, 732 bp, Homo Sapiens
  misc_feature (17)..(17): n is a, c, g, or t
  misc_feature (65)..(65): n is a, c, g, or t
  misc_feature (113)..(113): n is a, c, g, or t
aagcgagacggggtcanacgcaagatccagaaggccgtggttgaggagcgtacacctcgagatcnccttctgaaggcccagaggagaaacctgctcctgaccgtggtgaattntgatagtttctcccgccactgtgtcattggaaaagtttctgtgccttggtgtgaagttgacctggtcaagggcgggcactggtggaaggcgctgattcccagttctcagaatgaagtggagctgggggagctgcttctgtcactgaattatctcccaagtgctggcagactgaatgttgatgtcattcgagccaagcaacttcttcagacagatgtgagccaaggttcagacccctttgtgaaaatccagctggtgcatggactcaaacttgtgaaaaccaagaagacgtccttcttaaggggcacaattgatcctttctacaatgaatccttcagcttcaaagttccccaagaagaactggaaaatgccagcctagtgtttacagttttcggccacaacatgaagagcagcaatgacttcatcgggaggatcgtcattggccagtactcttcaggcccctctgagaccaaccactggaggcgcatgctcaacacgcaccgcacagccgtggagcagtggcatagcctgaggtcccgagctgagtgtgaccgcgtgtctcctgcctccctggaggtgacctgagggctgcagggaaggcagctttcatttgtttaaaaa

SEQ ID NO: 362961 - DNA, 579 bp, Homo Sapiens
acgcgtccgggggactctatcagaactggaccatctccaagtatataacgatgagtcctcttaatgctaggagtagaaaatggtcctaggaaggggactgaggattgcggtggggggtggggtggaaaagaaagtacagaaccaaacccctgtgtcactgtcccaagttgctaagtgaacagaactatctcagcatcagaatgagaaagcctgagaagaaagaaccaaccacaagcacacaggaaggaaagcgcaggaggtgaaaatgctttcttggccagggtagtaagaattagaggttaatgcagggactgtaaaaccaccttttctgcttcaatatctaattcctgtgtagctttgttcattgcatttattaaacaaatgttgtataaccaatactaaatgtactactgagcttcgctgagttaagttatgaaactttcaaatccttcatcatgtcagttccaatgaggtggggatggagaagacaattgttgcttatgaaagaaagctttagctgtctctgttttgtaagctttaagcgcaacatttcttggttccaataaagcattttacaag

SEQ ID NO: 362962 - DNA, 403 bp, Homo Sapiens
aagggaggtgttcccatctgagcccagagataagggtgtcttcctagaacattagccgtagtggaattaacaggaaatcatgagggtgacgtagaattgagtcttccaggggactctatcagaactggaccatctccaagtatataacgatgagtcctcttaatgctaggagtagaaaatggtcctaggaaggggactgaggattgcggtggggggtggggtggaaaagaaagtacagaacaaaccctgtgtcactgtcccaagttgctaagtgaacagaactatctcagcatcagaatgagaaagcctgagaagaaagaaccaacctacaagcacacaggaaggaaagcgcaggagatgaaatgtttcttgccagggttaaggctaaacgggggatcctcta

SEQ ID NO: 362963 - DNA, 492 bp, Homo Sapiens
  misc_feature (23)..(23): n is a, c, g, or t
  misc_feature (29)..(29): n is a, c, g, or t
  misc_feature (39)..(39): n is a, c, g, or t
  misc_feature (83)..(83): n is a, c, g, or t
  misc_feature (189)..(189): n is a, c, g, or t
  misc_feature (329)..(329): n is a, c, g, or t
gtggggggtggggtggaaaaagnaaggtncgggaaaaanccctgtgtccactgtcccccaagttgcctaagtgaaacagaacntatccccagccatccaggaatggagaaaagccctgagaagaaagaaaccaacccacaagccacacaggaaggaaaccgccaggaggtgaaaatgcctttccttggnccagggtagtaagaattagaggttaatgccagggactgtaaaaccaccttttctgccttcaatatcctaattccctgtgtagctttgttcattgcatttattaaacaaatgttgtataaccaatactaaatgtactactngacttcgctgagttaagttatgaaactttcaaatccttcatcatgtcagttccaatgaggtggggatggagaagacaattgttgcttatgaaagaaagctttagctgtctctgttttgtaagctttaagcgcaacatttcttggttccaataaagcattttac

SEQ ID NO: 362964 - DNA, 805 bp, Homo Sapiens
gggattatttttcattatttttaaatggttgtttttgttttaatttgcacagctacacagaggaaataacttaggcactttctgtttttttaaaaaaaataataaggtctcatggcttcattcagagaccacagtaacaacagcagcccaccaatcagagaagctggttgttattaaccaagctacagattcacactttctggcctaaaccctaatgggatgaggcttttcaccccaggccatgctggtggtgattttttagcccctaaataaaacactggactatttcctgtttacttccattgattgcaactaccaaaggtggactcaaagcaaagcacaatcatgccagccaacattccagaattctgctgagaactccaagtctgtgaggggagaggttttacaagccagacaggcctgggggactgcagtccccaaggagaccctgccacatgctggccctttgagtgagaatgctgcatctttctacatatcttcatgagaatactgagaattggattttccttttcaaaatgcactttgctttttttgtatgttttgttatgttgagatgtttctaaagaaaagattttatgtaattataagatgaagcgtagtgaattgtacagctgttgtaataatgacctatttctatataaaataaaattgtatggcttatgtgtaaattattttgtatctgagataccagttccttttcccaaatataaaagtataaaagttttcttgtgtttttctgtgagtgaaaattttgtaataaattaacaaatttgtacaaaaaaaa

SEQ ID NO: 362965 - DNA, 400 bp, Homo Sapiens
  misc_feature (211)..(224): n is a, c, g, or t
  misc_feature (231)..(231): n is a, c, g, or t
  misc_feature (375)..(375): n is a, c, g, or t
atgagccattccatctggctgaaaattcttctatagacttctctttttattgcttctgaattttcagtcctaggaaagtttttctcactgtcagattatacaataattcatctatgttttcttctagttagaaagagggtttcattttaaaaattgggtctttgttctattcagattttatcctgtgtatcctgtgagaaatcgattcaannnnnnnnnnnnnnccaaatnggttaaccacacttctctcaacaccatttttaaagcctttttctctgaatgagatgctttatcatgtactaaattcctagactttctcatattgtaaacattatgttataatatttaataggggtatccctccttccacattgntcttttctaggcatcttctggctat

SEQ ID NO: 362966 - DNA, 451 bp, Homo Sapiens
ttgtttttaattactctgtaccccatccgaatcagggcttctaccactgctgatgcaaaaccacaaagggacctacctgagccaccgtcctagccaagcgagcaaacctgcagggggtttggaagtggacttggtcaccgcagaagcgtgtgcgccgttgggggaagagctgcgtcacagccagagggacaaagtgtgggtgatcctggagacgccagtttccgagattgttctgcatattcatttgcacattgttgtctgggttggacatgcgtgtgggcttcagtgtgaggcttttaatatgtatatcctgttatcaataaaacaattatccaagtggttgaatcctgtgagacttggcaagtgtgtgcaaatcaagtatacttgacttttcaacctcttctttcaatgtaacttttatatgaaataaagtaatcaattaacagttctc

SEQ ID NO: 362967 - DNA, 577 bp, Homo Sapiens
acattttctatgaaagccgaatctatacataacttatgactcagcaataccatttctaggtacatacttagtgttcagtagcattattcatactagctacagagtaaaaacaaccaaatgtgcatcatagtaaaactgattaaatatatttaggcatctggaatatgatgcaatcatacggatgactgatttatggctacacataaaaacacagatgattcttacagtgttgagccaaagaagtcaaatactaaagaatgaatattgtgtaattgcattcatataaattttttaaggcagaaaaaggatagtttttagagatggatgcttatgcagtaaaacttatgagaagtaaagaagtgttaccatatatggacggcagttacctttcttggggttggagggtgtcctgattggaaggggacactaatgggatttctagggtcttgctactattctgtctctttgcctgagtggtgaatgggtgtatttcatttatgagaattcattatctgtacatttgttttctgtacttcactgtattttatacttcggaataaaaaggattcaaaataaa

SEQ ID NO: 362968 - DNA, 764 bp, Homo Sapiens
gcggccgcttctgctgctcgtgctgctggcgggcgcggcgcagggcggcctctacttccgccggggacagacctgctaccggcctctgcggggggacgggctggctccgctggggcgcagcacatacccccggcctcatgagtacctgtccccagcggatctgcccaagagctgggactggcgcaatgtggatggtgtcaactatgccagcatcacccggaaccagcacatcccccaatactgcggctcctgctgggcccacgccagcaccagcgctatggcggatcggatcaacatcaagaggaagggagcgtggccctccaccctcctgtccgtgcagaacgtcatcgactgcggtaacgctggctcctgtgaagggggtaatgacctgtccgtgtgggactacgcccaccagcacggcatccctgacgagacctgcaacaactaccaggccaaggaccaggagtgtgacaagtttaaccaatgtgggacatgcaatgaattcaaagagtgccacgccatccggaactacaccctctggagggtgggagactacggctccctctctgggagggagaagatgatggcagaaatctacgcaaatggtcccatcagctgtggaataatggcaacagaaagactggctaactacaccggaggcatctatgccgaataccaggacaccacatatataaaccatgtcgtttccgtggctgggtggggcatcagtgatgggactgagtactggattgtccggggttgtt

SEQ ID NO: 362969 - DNA, 358 bp, Homo Sapiens
cgcgccgcctgcacgactggactggagcggccgggtgccctggaggcccctgggaattgcagtccttgcgcagatgagaaaactcaagactcagaaacaataaaggttacagagatgaaattgacagagcctgaatttcaggttatgattctgtatggtttctttggtgctgcattagacttgagctctgattgaaaattcttccacgctcgctacattccaaaactttatctccaatatgaatttccagatgcctcacaaggtttgagctccatctgaaggctttcccatgcttgtcacattcatagggcttttctccactatgaattctatgatgtcgaataaagtgtgagctctg

SEQ ID NO: 362970 - DNA, 885 bp, Homo Sapiens; identical to SEQ ID NO: 84552
  misc_feature (479)..(482): n is a, c, g, or t
  misc_feature (484)..(485): n is a, c, g, or t
  misc_feature (488)..(491): n is a, c, g, or t
  misc_feature (545)..(605): n is a, c, g, or t
  misc_feature (637)..(655): n is a, c, g, or t

SEQ ID NO: 362971 - DNA, 631 bp, Homo Sapiens
tacctgccctattgacatccaccctagagttcaggatatcatacccattttactgttcccctggcacaattcatagtaaggaaaaacagacaaggggaaagctattagattctcggtgctgctaaacaggacacacaaggacaccattttgtgatgatgatggtgctttatgcagctgccaccatttacaagattttcctgtggtgtggaacctctcatgataaagcaaaggaactagaagcttattccagtcaagatttctgatttatcttgtggtaagcatttgggaaggacatatctgcacatgacctgagactaagtactatacactgaatcagatgaaaattgctcttaggaagcttacaattttccaaatagttaggacaaaaacaaactctccttctctcttcctatatgtacatactgacatctttatcattactgtcttcctagggttatgattcatgtatggtttctttggtgctgcattagacctgagctctgattgaaaattcttccacgctcgctacattccaaaactttatctacaatatgaattctcagatgcctcacaaggtctgagctccatctgaaggctttcccatgcttgtcacattcatagggcgttttc

SEQ ID NO: 362972 - DNA, 1558 bp, Homo Sapiens
  misc_feature (1320)..(1323): n is a, c, g, or t
  misc_feature (1325)..(1326): n is a, c, g, or t
  misc_feature (1328)..(1368): n is a, c, g, or t
ggtccggaattccctgcatgagcgggcggggctcagccggtctgggctgggctccgcggctggagccgggctctacccagagcaagaccctgatggctgcggtgtttctggtaacgctttatgaatactcgccgcttttctacatcgcggtggtctttacctgcttcatcgtgaccaccggcctggtattgggatggtttggttgggatgttccagtaattctgagaaattcagaagagacccagttcagcacaagagttttcaaaaagcaaatgagacaagtcaagaatccttttggcttagagatcactaatccatcttcagcttcaattacaactggcataaccttgacaacagattgccttgaagatagcctccttacatgctactgggggtgcagtgttcaaaaattatatgaagctctgcagaagcatgtttattgcttcagaataagcactccccaagcattagaagatgctctgtatagtgaatatctctatcaggaacagtattttattaaaaaggatagcaaagaagaaatatattgccagttaccaagagatactaaaattgaagactttggtacagtacccagatctcgctatccattggtagcgctattgaccttagctgatgaggatgaccgggaaatttatgatattatttccatggtgtcagtgattcatattcctgataggacttataaactatcctgcagaatattgtatcaatatttactcttggctcaaggtcaatttcatgatcttaagcaacttttcatgtctgcaaataataatttcactccctccaacaattcctcttcagaagaaaaaaacacagacagaagtttgtttggaaaaggtgggactctctgaaagtgaagttgagccatcggaagagaacagcaaggactgtgttgtttgccagaatgggactgtgaactgggtactcttaccatgcagacacacatgcctgtgtgatggctgtgtgaagtattttcagcagtgcccaatgtgcaggcagtttgttcaggaatcttttgcactttgcagtcaaaaagagcaagataaagacaaaccgaagactctttgaagacatcgtaacactgaaaagtacactttctactaaagatgcagaaattgatgatcttggaattcatcataacatggaatctacagtactgaccatcaatgaaaattatattttaacttcatatttgtatggtacttggatgataaaaattaattattcctttctgcttagtgaatgaatactggaatccatctgtgttgatacataaaaattcattcaactctttannnnannannnnnnnnnnnnnnnnnnnnnnnnnnnnnnnnnnnnnnnnnaagggggggccgcctctaaagattcccccccagggggccccaagtttacccgtaccccacttttctttgggacaagggggccccccaaaaggggagccctaattttaaacctaggcccctgggccgctcttttttaaaacctccgggaacggggaaaaacggcataccttggggaaaattttgtggaagg

SEQ ID NO: 362973 - DNA, 879 bp, Homo Sapiens
  misc_feature (46)..(78): n is a, c, g, or t
ggataatcactatagggggactggagtcacgcggtggcggcgcatnnnnnnnnnnnnnnnnnnnnnnnnnnnnnnnnnatcaggccaaatcggccgagctcgaattcgtcgagagcggcagtgagaacccctaggcaagtgcggacctacaaatgtttgtccgctccgtgggcactgtagtggcttttaccctggccgggcgggcggggctcagccggggctgggctgggctccgcggctggagccgggctctacccagagcaagaccctgatggctgcggtgtttcatggtaacgcgtttatgaagtactcgaccgcatttggctacatcgctggtggtctattacctgcattcagtcgtgaccaccgtgcctgggtattgggactggtttggtatgggagtgttccaagtaattctgagaaattgcagaagagacccagttcagcacaagagtatttcaaaaagcaatatgagacaagtcaagaatccttttggacttagagatcactaatccatcttcagcttcaattacgaaagtttccatgggtgtcagtgattcgagtattcctgataggacttataaagctatcctgcagaaatattgtatcaatatttactcttggcatcaaggtcaatttacatgatcgttaagcaacgttttcagtgtctgcgaaataataatttcacttccctccaacaattcctcttcagaagaaagaaatacacagacagaagttagtgggaaacaggtgggactctctgaaagtgaagttgagccatcggaagagaacagcaagggctgtgttgtatgccagaatgggactgtgaactgggtactcttaccatgcagacacacatgcctgtgtgatggctgtgtg

SEQ ID NO: 362974 - DNA, 540 bp, Homo Sapiens
gagccgccaagcggctacgttcttctcggcccgccgagatggcgctcgaccccgcagaccagcatctcagacatgtcgaaaaagatgttttgatccctaaaataatgagagaaaaggccaaagagaggtgttctgaacaagttcaagattttaccaaatgttgcaagaactctggagttcttatggtagtaaaatgccggaaagaaaattctgcattgaaagaatgtctaactgcttactataatgatccagccttttatgaagaatgcaaaatggaatacctgaaggaaagggaagaattcagaaaaactggaattcctacaaagaaaaggctacagaagcttccaacaagcatgtaggcagatactcaaatgacattcaggaactctaatattcatggaagtcattttatagtccttaaataatggactcaagcatatatgtttgctttaccttaattatggaaatattaactttatctgaaataaatattttatttccaaaaaaaccggtgggagtcgcagcgcccgcgcgcctgaa

SEQ ID NO: 362975 - DNA, 612 bp, Homo Sapiens
  misc_feature (549)..(549): n is a, c, g, or t
  misc_feature (552)..(553): n is a, c, g, or t
  misc_feature (558)..(558): n is a, c, g, or t
  misc_feature (560)..(561): n is a, c, g, or t
  misc_feature (565)..(565): n is a, c, g, or t
  misc_feature (567)..(567): n is a, c, g, or t
  misc_feature (598)..(598): n is a, c, g, or t
gagcctgggaaggaagagggaacgggtcctggcggtgctttgcaaagggcccgtgtttctgttgcgggaagctcccgggggtcgcacgtgcgtccgagcccaagcccctcccctccactccccttcctgcgtgccccggagccgccaagcggctacgttcttctcggcccgccgagatggcgctcgaccccgcagattttaccaaatgttgcaagaactctggagttcttatggtagtaaaatgccggaaagaaaattctgcattgaaagaatgtctaactgcttactataatgatccagccttttatgaagaatgcaaaatggaatacctgaaggaaagggaagaattcagaaaaactggaattcctacaaagaaaaggctacagaagcttccaacaagcatgtaggcagatactcaaatgacattcaggaactctaatattcatggaagtcattttatagtccttaaataatggactcaagcatatatgtttgctttaccttaattatggaaatattaactttatctgaaataaatattttatttcnggnnctagngnnccgntngaatattccactttgaaacacttaaagattnttttaaaattgtcg

SEQ ID NO: 362976 - DNA, 791 bp, Homo Sapiens
  misc_feature (286)..(335): n is a, c, g, or t
  misc_feature (342)..(352): n is a, c, g, or t
  misc_feature (643)..(643): n is a, c, g, or t
ctttggaccacgatgaaattgccaaatgatgcatttctcagaatgtatcctcattgttaagcagcccatgattgtactgtttctctactagaaatcctatctctacatcctgtctctatgaagtctccttgcccttcatctcagaagtcctctctccctcttctcaaatcacatttatttatacaaagtgaatatcactcatcttattctgccttttactggtgtacatgtcttttgttgagcacggtaccatgtgccaagcacaatgtacataatagatgttcannnnnnnnnnnnnnnnnnnnnnnnnnnnnnnnnnnnnnnnnnnnnnnnnngctttcnnnnnnnnnnnctaaaaagaagaaaattgtgtgtgtgggtatttatatagatataattacaaggtaattttttccttccaaatttatttccagattttacccaaatgttgccaagaactctggagttcttatggtagtaaaatgccggaaaaaaaattcggcattgaaagaatgtctaactgcttactataatgatccagccttttatgaagaatgcaaaatggaatacctgaaggaaagggaagaattcagaaaaactggaattcctacaaagaaaaggctacagaagcttccaacaagcnatgtaggcagatactcaaatgacattcaggaactctaatattcatggaagtcattttatagtccttaaataatggactcaagcatatatgtttgctttaccttaattatggaaatattaactttatctgaaataaatattttatttcg

SEQ ID NO: 362977 - DNA, 683 bp, Homo Sapiens
  misc_feature (96)..(104): n is a, c, g, or t
  misc_feature (456)..(458): n is a, c, g, or t
  misc_feature (460)..(499): n is a, c, g, or t
  misc_feature (502)..(502): n is a, c, g, or t
  misc_feature (523)..(525): n is a, c, g, or t
cctttttaatttaaggggatctttctaattcgaaagctgtgttctttttgaataccgtgcatgggggttaagctgatgttaaaacagtttgcaatnnnnnnnnntgaatcagcttaagtcatttaatcatttcaagtgcattctgcatcctttaaaaataagtttaagaaatttaagagaattgtgttttcattaagttttgcatatcttttgttatgccatgtaaattccctttttcgtatgattaaaggaaggttatgataaaatgattagttcatttacattcacttgtagcaattacatgagaatttgaattttgtcgtgtttgggtttgttcattcctgtgaatgatggtacagttaggtgagattttctgttatggtacccaaactcaccatttggtcctctttaatctttgagggtttcaataaaaattgttcactcataaaaaaaaannnannnnnnnnnnnnnnnnnnnnnnnnnnnnnnnnnnnnnnnncanaacaaccaccacaacccaaannnccctttgtgggccccgcctccgccccccaaaaaatctttctaaaaaccatttcctttgggccccgcgggcccccctggggaaagggaacctgggcccaaaacttgttcccccaagaaaaaaccggggccaggaaataagggtctgggaactccccacc

SEQ ID NO: 362978 - DNA, 620 bp, Homo Sapiens
  misc_feature (39)..(39): n is a, c, g, or t
  misc_feature (63)..(63): n is a, c, g, or t
  misc_feature (86)..(86): n is a, c, g, or t
  misc_feature (95)..(95): n is a, c, g, or t
  misc_feature (106)..(106): n is a, c, g, or t
  misc_feature (120)..(120): n is a, c, g, or t
aaaggcaaattgatgagtaccttaaccccctcatataanccggtataaaaattaccaacaaancccaataaatttccaagcacccnaattcaaanaacctaaaacntaactggtaattanaattcctccctattactgaagggaacaaattatgatgaaggcttagctgaaattagcccaggtaattattacagtttagtttttaaaggcatgtggttttcccttcccattcacttgaatcctcaaacatttgagaatgtttaggctagtaaaggactccttggaggaatccatcatttctgagtattgaaggttttaatatacattgaaagctctttaacaaaccaatgctctcttagttctaggataaaacagagttgcacacaagaaattaagggactgttcctcattatgacttagaaaaggcagcacctctctagtagactaagagcatgtctggacatccactggtagtgtaagaaaacggcattttttaaagaaggcaacaccattgcacttggcaaaactgaagtttttcttaattaaaaattttccattacacatttggggtgagagggtatctcagtaagagtacatttttttctggtttctttttcagg

SEQ ID NO: 362979 - DNA, 436 bp, Homo Sapiens
ataatttcaaacgttagaggctggtctctgtggtttcctactggttcctgtggggagctcccgctttctttctccatagagcttagggtatttctcatatgccccattggctacctagtgtctcaggtaataaacgtatccgaagataaagcaaagattgctatgggagagtgttgtctcctaaaataggactgtcttgccaggccaggcctcaagaaccagagagaataataaacagcacaggatgaaatcagcatgattgcaaaaggactggactcaggaaaaacaagtttgtttgcccagaacaaattaccagaagggatcaaaaacatcttgtttttctttggtgataaccatatgctaccggattggaatgtttaccagaaaatggaataaagaccttcccactggcaaaatagagccagggttcacccag

SEQ ID NO: 362980 - DNA, 1063 bp, Homo Sapiens
  misc_feature (1005)..(1005): n is a, c, g, or t
gggtcccggccccaggcacactgcatcggagcggacgctccggccccggcgaggtggctgcaaactcgcgggcacgcacggcgcccggggagccgagggactcgggggaggggacgcgcgcggaaggcgccagcttcctcccgcccgcccctggcagccgcgagccgaggttggaggcgcccggggccccagccgggcagagccgagcgccggcggcggcggcggcttcccttttctccccgagccgagccccggagcggcgcggggaccggccctaaaaagagcaggaaatcttgtttaccgcccgcggagagaagccgatcgagcctttgtctggaaagtcagcatctccggctccggctgcaatgtgttcctggtgacattagcatcgggcagacccgccggaggaggggggtcgccaggttcccgtctgctttcggaggcggatcgagcgggtgacttttgtgcattcgttttaatttttggaaatctctcttttttcctccctcgctcgctgccgggcatgtcctgatctggcggccgctcctaccaccctgggcagccgagcagagtcgtccccagcgggtctccctccctgcctccctgactttgcaacaccgcgttccgggaggaccggcctcggcgagggaggaggcgggggagctgcgaacacccagacccaaaccctgacatgctctggggcggagaggaggaagccaggagctgagcgcgccgcgggggctgcttcgccctccggctccgagcgccgggctccgggcgccctgccctgcgcctgggcagcagccttgctggtcttgggggcgccccccgcttcccgccccgggggtccgcggccggcaggaccatgctgctgaaagagaaccggatctgcatgccgctcaccgtagaccgagtacaaaattggacagctgtacatgatcagcaaacacagccatgaacagagtgaccggggagaaggggtgaggtcgtccagaatgagccctntgaggaccctcaccatggcaatgggcagttcaccgagaagcgggtgtatctcaacagc

SEQ ID NO: 362981 - DNA, 1514 bp, Homo Sapiens
aaaaagagtccgagggggggaccagaacgaagatttttatcttgtcgatatgacgttgacgtaggttgcgaccgcgcgaaaatcatagaaaacccccagggagggatattttaatattaaaggttttcctcccgagtttggggcccggaccaggggccttatttgtgaaaggagtggcatggcccgggggaaaatttccaggggggggctttttttccccagggtttttggaaagtgtgaagaggtttgcggggggcagatcttgttcccggggcccgatttttggggagagggaccggaaattgcgggggccttctgtggagagagggggtggatggagccactagaagggcgccctgcggacggaaagaaggcagcagggggatgctggagattaggaaattgcaggtgggaaaatgccgattttcttgttggtggcttcctgagtggctcgttcaaattctcggacttcatccattgtcatgtacttgtttgggcatgactctctatgtcatccacaggggaggaatgctgattgcaaacttttatgttggtttgttcatgcatgtttttctcgtattcccgaacatcatccattgtcatatcataccactcatcaacccatgcaaaagcctgtctatgtccaatcagcagaatgtctcggaccaccttgtgtacaaattgttccactctggtctgaagcccccagacctcaaacttcacagtcaccagcttgtaggagcacatgataggctgatgactatctctccagccttccctcaactgtccccgtcctgtcttctctgacttgaagtgcttaggatcctcagattctttgtagtagcgctctggaatttcatcgcaggcaatatcaataaagcaaacttctctctccacgtctttggcttcattgtcgaaaatggtgtcattgcttcctttgttgtcctcatacttggtttctatatgaatggagaatttcggcagaaaggaacatgtgtattctgtaattgtgtagggataatagttccaagccttctctgtcacataaaatattttggggacaacagctctagcccaactaggcagtttgctgttgagatacacccgcttctcggtgaactgcccattgccatggtgagggtcctcaaagggctcattctggacgacctccaccccttctccccggtcactctgttcatggctgtgtttgctgatcatgtacagctgtccaattttgtacgtctcaacaagatctcgaaatcttcgcttttctgataacgggtaagtttatgggcttcactgatgacacagcatagaaagtgatgcccggagaaccttgatgtccagaactcaatgtggtaaatgggattccagaattgtaaaagtcatgaattctccgtgtaaagaataccaagttctaagcagaataaattaaaaatgaatccatgcacacaggactgaggctccagaatttcaaagacaaagaggaagcctaaagaacagccagatagcca

SEQ ID NO: 362982 - DNA, 507 bp, Homo Sapiens
  misc_feature (16)..(16): n is a, c, g, or t
  misc_feature (25)..(25): n is a, c, g, or t
  misc_feature (76)..(84): n is a, c, g, or t
acatgcacactgaaangtccaaggnaacatgtttgaatgacaaagcagtctttttcccctatcagaagattccttnnnnnnnnncaacaacaacaaatgaaaatataaaaccccatgagatatttatataaagttactcagatttgggccgacatggcttatctgaagagtgcatgccgggtaaattcagggtggcttttttctcagggtctggaagtgtgagagtttctggggcagactttttccggggccgatctttgggaacggacagaaattcgggtgcgtctgtggagagaggggtggatggagcactagaaggcgcactgcggacggaagaaggcagcagggggatgctggagatagaaattgcaggtgggaaaatgccgattttcttgttggtggcttcctgagtggctcgttcaaattctcggacttcatccattgtcatgtcataccactcatcaacccatgcaaaagcctgtctatgtccaatcagcagaatgtctc

SEQ ID NO: 362983 - DNA, 469 bp, Homo Sapiens
  misc_feature (325)..(337): n is a, c, g, or t
cctggtgactgctctcccaacagacgggcagggctggggctaggggctgtccagaagtgtactgaactgtcccttcgccacaattcccacagactgctcaggaacaaggctaaaacggacgaccagaacgggattgtatggctgcaggaggctacacagtcccaggaggctgcttctaagaggcccacgtggcctgcatggggatgcgcctggctgtccagcatgtggtcatttgaattgtacatgtttcactgggatgcctacagaaaagtagacagaagatgtggaaaaagtttttgaaatgttgcaaacttagctacttttnnnnnnnnnnnnntagctttataattataaaagcaatatgtaaatcttaaaataatttgctacattctagtaagcatcttatgatctctatgtgccctataacattatgttgtatagtttaaatatatacaataaaatctatttt

SEQ ID NO: 362984 - DNA, 910 bp, Homo Sapiens
ggagtccagccctaggttctcctgaatccctgcggtcccagcgtcgctccggacgctgccaacctgttctccaccgtcgctcgacttccacctctaagactcccacgaaactcaggttgaataattcgtcaaattacacaactgaactcaagacatggctgcccagtgtgtcacaaaggtggcgctgaatgtttcctgtgccaatcttttggataaagatatagggtcaaagtcagaccctttatgtgtgttgtttttgaatacaagtggtcaacagtggtatgaggttgagcgcacagaaaggattaagaattgcttgaatccccaattttccaagacatttattattgattactactttgaagtggttcagaaattgaaatttggggtttatgacatcgacaacaaaactattgagctgagtgatgatgacttcttaggggaatgtgaatgtacccttggacaaattgtttccagcaagaagctaactcgaccactggtgatgaaaactggcagacctgcaggaaaagggagcattacgatttcagctgaagaaataaaagataatagagtggtcttgtttgaaatggaagccagaaaactggataataaggatctatttggaaagtcagacccatacctggaattccacaagcagacatctgatggaaactggctaatggttcatcggacagaggttgttaaaaacaacttgaatcctgtttggaggcctttcaagatctctcttaactcactgtgttacggagatatggacaaaaccattaaggtggagtgttatgattatgacaatgatgggtcacatgatctcattggaacatttcagaccaccatgacaaaactgaaagaagcctccagaagctcacctgttgaatttgaatgaataaatgag

SEQ ID NO: 362985 - DNA, 906 bp, Homo Sapiens
caaccaggtcagccgaaggtccggtgagccctggtagccccgggcaattctgtacatgaggtcgatgagcatctcagggtcctcctggtgttccttcatcttcaccgtgtccgtcaggatcatgtgcaggttgaacatcaggtcctggacctgctctgcgaaggtgctgtcccgcagccccatgtcctcctcagcataggtgaggatggttttgagtgaacgtcgcaggtgctcttcactgaagttctgcgtcgtccccaccagggacgagagagacatggtgacctgcatcttcacacgggcaaagttgtggccgatctcgaagttctgtcgcatgagcaggtacagcgaggcgctggcgtgcgtgcggatggtgctgatgcggctgccacagtgtcgtaggagcctcaggcacaggtcggcacacagctccgtgtcctcctcgaacagcagctccgggaacttggacacaagggccctctgggtggccaggccatgctgcaagaagagggcactctgggcactgcccaggctgtacagcacaaccttcagcactgcccccaagacgctctcccgggcttctgaaagcatcaccgtctgcacgatgatctccagtgtgtccagaaccactaggcttgcctcggttgccaggttcccttccaccaaggcctcgtgttccatttcatccttggtcttgtccacgcggtctgaggtttgcttccagtgtgtgacgctcttccgccagcgcacattctccggattcccaacgggctcctctcacgacttcgccgaaccatttcttgtcgagctccgatggtacccagaatggcttcctctagccgcgccttcatatccagaaattttttgaatgtgaggctgttgatgcgttcaaaggcctttttcccc

SEQ ID NO: 362986 - DNA, 667 bp, Homo Sapiens
gtggtttgagaggctgggagggttgaggggaagataaacttttaaaaagctcttatctttcatttcaatcagttaaaaatacttgctcagtgtaacaattttgcttctcagcttccactctaatattgttgtgccattaagcaatttagctaatcctgacatttcttagattcataatgttaggagcatttaatctgtattttacaagttaggaagcagaggatcagagatgggaaaggactagcccaaggccaacattaacaagccctctaacaaaaactttacaatacatttatgttgaatggaactccaagatctcacctctccatccaggaatggagtccatgtaatcaaagtgaacttaaaaataggacagtttcaacaagtcaggagattcacagcaactgatcaaagggagtccagtcaacgtgagcaagcgtgattatgatgaggaagccccctctgctttaatccacacaaggaacgtaacctgaagtaacctgatgttaaccaatctgctgtgtctactatgctgtttccttgttcctgctagtgctgctttacaaatgcagaccattctatcatacctggcggggcttctgttttattttgtaggctggatgctacccagttcatgaatcgctaataaaagccaattagatcttta

SEQ ID NO: 362987 - DNA, 464 bp, Homo Sapiens
agtgggaaagggacttacccaaggcccaacattaaacaaacccctcctaacaaaaaactttaacaaatacatttaatggttgaaatggaaactcccaagatctcaccctctcccatccccggaatggagtcccatgtaatcaaagtgaacttaaaaataggacagtttcaacaagtcaggagattcacagcaactgatcaaagggagtcccagtcaacgtgagcaagcgtgattatgatgaggaagccccctctgctttaatcccacacaaggaacgtaacctgaagtaacctgatgttaaccaatctgctgtgtctactatgctgtttccttgttcctgctagtgctgctttacaaatgcagaccattctatcatactggcggggcttctgttttattttgtaggctggatgctacccagttcatgaatcgctaataaaagccaattagatctttaaaaaaaa

SEQ ID NO: 362988 - DNA, 884 bp, Homo Sapiens; identical to SEQ ID NO: 169236
  misc_feature (65)..(125): n is a, c, g, or t
  misc_feature (790)..(793): n is a, c, g, or t
  misc_feature (797)..(798): n is a, c, g, or t
  misc_feature (800)..(802): n is a, c, g, or t
  misc_feature (806)..(807): n is a, c, g, or t
  misc_feature (809)..(814): n is a, c, g, or t

SEQ ID NO: 362989 - DNA, 588 bp, Homo Sapiens
  misc_feature (50)..(60): n is a, c, g, or t
  misc_feature (367)..(367): n is a, c, g, or t
  misc_feature (399)..(399): n is a, c, g, or t
  misc_feature (478)..(478): n is a, c, g, or t
  misc_feature (491)..(491): n is a, c, g, or t
  misc_feature (496)..(506): n is a, c, g, or t
cccacagttcatatatttgaaaggattcatcaaattacacaaagggtacnnnnnnnnnnngacaaaaatgcaaattatgtgatacagcaagagaaggaaaaagcaagcaaacattgggagtacaagaaacattttgacatcccaactctccagggccaccttcttttcatacacgggaccaggcttgtgtctctaatttgaacctctaaaatctggaccaggaattttggctttgtggggagttcaaagaagcccttatagggggtgttataagtccctgtagtcatataagcaagccacgctttacctggttattgtcagtgcaaccattataagaaaggaagtttttaagtctccgggcagaaanaacagaatacataaatttctgccctactaccnaggggaaaaaccactcccggtgtttcaatcagaaagggtgttagcccagtcaatcatttattctacctctgactaaagngggggggcctganagaannnnnnnnnnngaacagctacttgccgctggaggagagatgaaaagagtttgacctaatcctgatcaggaccttcttactcaaaatgacaaaa

SEQ ID NO: 362990 - DNA, 605 bp, Homo Sapiens
gcggccgctccaaaaagctctccaggtaggcctggctgcagtcactgaacatcctggggaaactggagccaatgctgcccgccatgatgcagcggccggcctcgaagcgttcctggcagcggcagccctggacgttctcatcatggtccatgcccaggttgtggcccatctcatgggccatggtacaggccacgcccacggggttcttgctgtggtcctggttcacagcccctgagctgtgggagcacatggcggacaccctggcaaaccccacggtagtcccggtgaagtcgacacccgtgatgagctgtacgttgtcatgcaggtgccgccgtgtccgttgccgtgcctgccaggtcaggaggttctccagtgtgacactggggtcggggctgacgtggaacctgtcctgactattccaaatctccaggcccaccaggaccacacggaagttgagtttctgatatagcttgtccacgtgattcaccacctccagcacccgatgacgcacggctgcttcgctccccagcatctggaactctgcattgtccacgaccacatacagctccacggtagcgggtctctcgggatggcagagagtcccc

SEQ ID NO: 362991 - DNA, 219 bp, Homo Sapiens
caaagattttactaaatcattttttaaacaaaatatacattaaatctcagatttacagaatatagaaataatttatccaaagaaatttgcatttaaaattgttaatattgcacccaacagtatgtctttgacacatttgcattgtcaatctttcccacaatttgcaaaaacaggagagaaatctgaaactaacagaattacacaagctaagttttctgt

SEQ ID NO: 362992 - DNA, 465 bp, Homo Sapiens
tgaacaccagagagtccagcagagaaaggagtcgaagaagccaccagccaagctgcagccccgagctctagcaggctggctccgcccggaagatggaggtcaagcagaaggggcagaggatgaactggaagtccggttcaacgccccctttgatgttggaatcaagctgtcaggggttctgtaccagcagcacagccaggccctggggaagtttcttcaggacatcctctgggaagaggccaaagaggccccagccgacaagtgatcgcccacaagccttactcacctctctctaagtttagaagcgctcatctggcttttcgcttgcttctgcagcaactcccacgactgttgtacaagctcaggaggcgaataaatgttcaaactgtatgctgatgttccaaatgggaatttatttcaaagaggaaaagttaatattttactttaaaaaaatcaaaataatac

SEQ ID NO: 362993 - DNA, 1286 bp, Homo Sapiens
ggggatgcctcttaatcatcctctccctagacaatgacgagtgcgccgatgaggaaccggcctgtgagggcggccgctgtgtcaacactgtgggctcttatcactgtacctgcgagcccccactggtgctggatggctcgcagcgccgctgcgtctccaacgagagccagagcctcgatgacaatctgggagtgtgctggcaggaagtgggggctgacctcgtgtgcagccaccctcggctggaccgtcaggccacctacacagagtgctgctgcctgtatggagaggcctggggcatggactgcgccctctgccctgcgcaggactcagatgacttcgaggccctgtgcaatgtgctacgcccccccgcatatagccccccgcgaccaggtggctttggactcccctacgagtacggcccagacttaggtccaccttaccagggcctcccatatgggcctgagttgtacccaccacctgcgctaccctacgacccctacccaccgccacctgggcccttcgcccgccgggaggctccttatggggcaccccgcttcgacatgccagactttgaggacgatggtggcccctatggcgaatctgaggctcctgcgccacctggcccgggcacccgctggccctatcggtcccgggacacccgccgctccttcccagagcccgaggagcctcctgaaggtggaagctatgctggttccctggctgagccctacgaggagctggaggcggaggagtgcgggatcctggacggctgcaccaacggccgctgcgtgcgcgtccccgaaggcttcacctgccgttgcttcgacggctaccgcctggacatgacccgcatggcctgcgttgacatcaacgagtgtgatgaggccgaggctgcctccccgctgtgcgtcaacgcgcgttgcctcaacacggatggctccttccgctgcatctgccgcccgggattcgcacccacgcaccagccgcaccactgtgcgcccgcacggccccgggcctgagccctggcacccgctggccgcccacccgcgcccgccactcggggcccctgccgcgcatcctgcagcccgcttatgcgtatgtgcacggggccgcccgcctggacctggagaagggacctacggacgcctggaagctgcgacgccctgcactgctcccgcctccaccagcgcctcccactgatgtcgtggtcccgggcctggcccaggggcccctttacatgccctctcccttttataaaattttccattaaaaaccacctattttct

SEQ ID NO: 362994 - DNA, 1233 bp, Homo Sapiens
  misc_feature (52)..(88): n is a, c, g, or t
  misc_feature (147)..(172): n is a, c, g, or t
  misc_feature (1056)..(1058): n is a, c, g, or t
  misc_feature (1070)..(1070): n is a, c, g, or t
  misc_feature (1125)..(1133): n is a, c, g, or t
agaatgatagactcatatagggcgaatcggagcttaatcgcggtggcggcgnnnnnnnnnnnnnnnnnnnnnnnnnnnnnnnnnnnnnatcaggccaaatcggccgagctcgaattcgtcgagagcggaactgccgcctcagcttgnnnnnnnnnnnnnnnnnnnnnnnnnnacgccatgggagccgtgactgacgacgaagttatacggaagcgtctcctcattgatggagatggtgctggagatgatcggagaattaatctgctagtgaagagtttcattaaatggtgcaactctgggtcccaggaagagggatatagccagtaccaacgtatgctgagcacgctgtctcaatgtgaattttcaatgggcaaaactttactagtatatgatatgaatctcagagaaatggaaaattatgaaaaaatttacaaggaaatagaatgtagcatagctggagcacatgaaaaaattgctgagtgcaaaaagcaaattcttcaagcaaaacgaatacgaaaaaatcgccaagaatatgatgctttggcaaaagtgattcagcaccatccagacaggcatgagacattaaaggaactagaggctctgggaaaagaattagagcatctttcacacattaaagaaagtgttgaagataagctggaattgagacggaaacagtttcatgttcttcttagtaccatccatgaacttcagcaaacattggaaaatgatgaaaaactctcagaggtagaagaagctcaggaagcaagcatggaaacagatcctaagccatagacaggctaattgcccaccactcccaggaatattgaaatagctacatgaccataatgtgtttaaaatgtggtatgctcttgagatatttaaagttttggcagtaaaatactctgtttttaagtatgaatgtatttcattcatatttcctctcacaaaggaaaatgacttcagtatagatttgtttttattaaaatgcattttttattcttaagtggtaggaagcaacatccaaaaatgcttaataaaatgctttttaagctgccnnnccaccccacctncgtctacaatactcttttatcacatagcccacgatacagatcccgagagtcgctnnnnnnnnngtagtcctctttgccccatccatgactgggccatgactcatcctgttggagcataagattgcgcccactgaatttccccttctggcgggcccccttcatt

SEQ ID NO: 362995 - DNA, 525 bp, Homo Sapiens
cttttttactttcacagcaatagtgcagaatccagaatggatgtcctctttgtagccatctttgctgtgccacttatcctgggacaagaatatgaggatgaagaaagactgggagaggatgaatattatcaggtggtctattattatacagtcacccccagttatgatgactttagtgcagatttcaccattgattactccatatttgagtcagaggacaggctgaacaggttggataaggacataacagaagcaatagagactaccattagtcttgaaacagcacgtgcagaccatccgaagcctgtaactgtgaaaccagtaacaacggaacctcagagtccagatctgaacgatgccgtgtccagtttgcgaagtcctattcccctcctcctgtcgtgtgcctttgttcaggtggggatgtatttcatgtagaaggtggaagaaggctgctatgactctttggatgggagtctggcaagaggaaattggaagataaaataaataataagtgaaataataaaa

SEQ ID NO: 362996 - DNA, 430 bp, Homo Sapiens
caaaatcagaaaggatgaaaggtgatatttctagcatatcagtttgtggtggtaaattaattaccttatacaaaggcctcagtgactttctgctccttacctaacgaatcatctttaaaataagtaaaataaagaaacaagagcagcagcagatgcttcctaaaaagaagttaccaaatctgttcaccacaaacctgagaattcaactgtggacatttggacaccagcaatgaacatgaaactcagcttatgaggcatatttggctaaaggtcaaggtgacttaaaattcatcataggacatctacaatttgcaaagcaggtgactggatatggactccttccaagtctcatttaattggataatgcctacgttttaagtatcagaagtgagtctttctctattaaatgaagtcagttccactaaaccct

SEQ ID NO: 362997 - DNA, 1193 bp, Homo Sapiens
ggatcttaatcacatccatagaaaatgacttatttccagaagataccgctctaaaaatgaaattgttaggtgaaagtgtttttgagaatttttatatatattactcgctgcagagatcatgttcatttacattcccattagcaatatatccaatgctcagaattgaaaattactacttaaaatctttgcaaattgaataattacagaaaagggctacatttaaaatttgtatttgtttttcttacttagtgaaggttgtgttttttttcatattcattggccatgctatattcattcttttgagaattgctcattcatattttttctgttgcttgcttggagaatttgctctttttttggcatataagttcttaagaatgtccgtcctttgtcatatattgtaactttttttagccttatttgtcatttaacatagtttgtggtatttcagtatagaagttgttttctttaggagtctacctttgtgtatgtgcttgaaagtatttttgtaatccaagaatggataaatgtccttattttcttctagtattttcttatttcacttttacacctatctttaaaaggaatttaaatttctgtttatatacattaactaaatcagtacaagtttggggtgaaaaggaaatttttaatccatctcaaatgtatttggttatattatataaggtagggatttgattttatttcgaagaatttaccaattggttcagtatgtgaaaccaccatttcccctctgattagtaatgctatttttatagaatattaaattcttatgtgtcttttgtgtcttaggccaatttctgggccttctgggttttttctacactgtcaataattatcgctttaattggtgttaatatttggtagtacacaggttctcccttgttcttttaaattttgtgaaatataacttacaaataagtacttaaaacagagcttaatgggtaaagcaacagctgtgtaatcacaaactagatgcagaggaggtcttgccagcactccaaaatctctgtgtgtcccctcttgacactcactgtttcccccagagctaactatcctgacgtatggtaattctccctctgtccttttaagaattattttaccagttatgtgtataacaatatggtttacattttgctcacttttgacttatataaaaatagaataatact

SEQ ID NO: 362998 - DNA, 501 bp, Homo Sapiens; identical to SEQ ID NO: 131701
  misc_feature (350)..(358): n is a, c, g, or t

SEQ ID NO: 362999 - DNA, 427 bp, Homo Sapiens
  misc_feature (28)..(28): n is a, c, g, or t
  misc_feature (55)..(55): n is a, c, g, or t
  misc_feature (78)..(78): n is a, c, g, or t
  misc_feature (140)..(140): n is a, c, g, or t
taaagcccccccctgaagtaaactgggnaacctaaaaggtgtgcggcccacccangcccccgacctaatttttgtaantttgaaagtaagaagaatggggaagtttcaccccatgttggcccccggctggtcctcgaaantccctgacccctggtgatttgccccgcccttggccctccccaaagtgcctgggattaacaggccgtgagtcacccacaccctggccccatggtgggggatatgttttaagacccccagttaatgcctgaaaccgctgctagtaccaaaccctaatgttttttcctgtatgtacgtacatatgataaagttcagtttataagttaggcacagtaagagactaacaacagctcacagcaaaatagagcaattataacaatatattgtaataaaaattatgtgaatgtgg

SEQ ID NO: 363000 - DNA, 470 bp, Homo Sapiens
  misc_feature (160)..(190): n is a, c, g, or t
ccggaacaacaaggaggcgatggcgctctacaccacccatatcctcaagggccccgacgggcgagtgctgtgtcccgtgctgcgccgctacacgtgtcccctgtgcggcgccagcggcgacaacgcgcacaccatcaagtactgcccgctctccaaagtnnnnnnnnnnnnnnnnnnnnnnnnnnnnnnnagcgccagggacggcccgcctggcaagaagctgcgctgaaggcccgggctcccggccgcccagggtcgccgccgcccctcgcaccgctaggtctgcgcaccatctcgcccccgccgtggggaggcgtgcggctcagcggtcggctcgacatgggacgtcgtcctggtggtttttgaaaagcagccgaccgtgtggagtacttccgtgctgaacgattgggactagacgctgaaatccccatttgtcttcagtttctagtttgcacatccagaacggcgaa

SEQ ID NO: 363001 - DNA, 610 bp, Homo Sapiens
  misc_feature (496)..(505): n is a, c, g, or t
acgaggcaacttctcattttgaatagagtttgtgtgtacctctccatatttaatttatatgataaaataggtggggagagtctgaaccttaactgtcatgttttgttgttcatctgtggccacaataaagtttacttgtaaaattttagaggccattactccaattatgttgcacgtacactcattgtacaggcgtggagactcattgtatgtataagaatattctgacagtgagtgacccggagtctctggtgtaccctcttaccagtcagctgcctgcgagcagtcattttttcctaaaggtttacaagtatttagaactcttcagttcagggcaaaatgttcatgaagttattcctcttaaacatggttaggaagctgatgacgttattgattttgtctggattatgtttctggaataattttaccaaaacaagctatttgagttttgacttgacaaggcaaaacatgacagtggattctctttacaaatggnnnnnnnnnntccttattttgtataaaggacttccctttttgtaaactaatcctttttattggtaaaaattgtaaattaaaatgtgcaacttgaaggttgtctgtgttaaaaaaa

SEQ ID NO: 363002 - DNA, 273 bp, Homo Sapiens
cccctcttgaaaccccaatttcagtattttcaaagtggggatattacctacccgataaaaatatctgatgtgtaaattatatttcataattcatataaataacctagccagagactagtacatcactgggaataaatggtagttttgagatcagacacatctctcatccaattttctttttagaggcaggtgagactctaaaatattaaattaaaaataagtagtaaagtataatcacatccctgttataagtgaggaaataaagtatttttg

SEQ ID NO: 363003 - DNA, 511 bp, Homo Sapiens
  misc_feature (365)..(365): n is a, c, g, or t
aggcatttcgcatcgaaatcaggatttctggcttcccttaggcatttgggagcaccagcagaatggggtcactattgttgcatgaagacaacacctctgcacccctggatgtggccacgccagtccctaccccattgacttgcgcccagcccacattacacatcctcatgacctgcgtggcaggagtctcactgacatggctctgtcagcagtggctggtacccttgtctcctggccttgcttagagttggggctcatctctgctgcagtaactgagccaaggggtggttttgtggccacaagaatcatctttatgcaggctcagcaatgcagggccaggaaacttatatctacgccagcctcanaccccaaacccaaggaagagagaaagtgtcatcttttcagatacatccttcttcctgctgggagagagccttgcccaccttcctgttggctctctgtccgcttctcaggtatctgaacaaaatagattgctttgcactctgcgtca

SEQ ID NO: 363004 - DNA, 559 bp, Homo Sapiens
  misc_feature (17)..(17): n is a, c, g, or t
  misc_feature (38)..(38): n is a, c, g, or t
  misc_feature (425)..(472): n is a, c, g, or t
ggagaagggaatcctcntccagggtgattttatgatcngtgttgttgctctaggaagacatttttccgtttgcttttgttccaatgtcaatgtgaacgtccacatgaaacctacacactgtcatgcttcatcattccctctcatctcaggtagaaggttgacacagttgtagggttacagagacctatgtaagaattcagaagacccctgactcatcatttgtggcagtcccttataattggtgcatagcagatggtttccacatttagatcctggtttcataacttcctgtacttgaagtctaaaagcagaaaataaaggaagcaagttttcttccatgattttaaattgtgatcgagttttaaattgataggagggaacatgtcctaattcttctgtcctgagaagcatgtaatgttaatgtnnnnnnnnnnnnnnnnnnnnnnnnnnnnnnnnnnnnnnnnnnnnnnnnaatactggtatttttacttaatctataaaatgtcgttaaaaaggtgtttgttcatatcttttttaataaataaactgttgctcgtta

SEQ ID NO: 363005 - DNA, 478 bp, Homo Sapiens
tactcatgatgccaaccaatgttggaaatggctccaggaaaactctggattttcctaactgtggtcagcccgtggtggaacctcgccgcactcttgttctggataaattgaagcaactggagaaagactcatgacacaagtttggccatggaacatgtttggcgtgtgtggttaggggtcatctgatgcatcctaccaacgtgaccccaaggaaagtgctggaggaattgggctcagatcctagagatgagctcatgtcagactctggcctccagattccattttcctggctgactcccagggcaccatggagcaaatggccagtgggtgtgccatggcaggtgagacccgcccccccaacccggcattctgaagcccttcagctggagaggaggaagagatgtttcatttgttcacaatgtttcctgaagcactggaagcgtaaattcctgagttgatgggtgtgtggggtgcaaag

SEQ ID NO: 363006 - DNA, 452 bp, Homo Sapiens
ccccccctccaccgctgggcccatcagtgtgtgttggggggatgcttggcagctgggggtgaggagacaacaaacctcgggaactggagccagagctgcggcctgactgacgccttttgatgctcacgggaaatttctgcccaggatctcagccccaggctggttgtttctacaaatctctctcaaatgtattattttggtgacaaaaatgaaggagcctttgtaaatttttttaaaattatgaatcatatcaagtagttgtttacatttcttgaaaaaataggaactcgggcagcagaatcagattggcagaatctttagactacacaggcaataatcaagtctgctgttttggcctttcgtagtagaagtggttgtagtgtttagatatctgtttggtcttgcttcttgtattgcatttttttcaataaacaacaacaaaaagaactctc

SEQ ID NO: 363007 - DNA, 776 bp, Homo Sapiens
  misc_feature (72)..(93): n is a, c, g, or t
tgggtgccatgtgccctgagttttcccccccgcctctccaccctgggggcccccgggggacccggctccatnnnnnnnnnnnnnnnnnnnnnngataactagaacttctagaacatcttgtttacagttagccagaaactatacaagtggtttaacatgcattatcttactcaatccatacaaaagtcttatggaggtgttagcactctttctactgatgaagaactgaggtacttcataaaaccacttacccaaggtgtcttgagtctggtacaactggcattcaaatctaggtcagtctgcccccagagccactacccttacccctcactgaatctgcctttatattgttgagcccatgaccccaaactgctctttccaatttgaacttccagggattttattgtgaacttacatagcaacattaaaatgaagttgaattgtttttaatggcaacgccgtctgtctcctctagcttaccgcttctcacctttcaaccccatctgtggcctttgtccaggcccacagcttagccatggcttccctcctgcatccctgccgtgggttgctggcctcacacttgcagcagctggacagtgattttagaaggccaccagtccccatagctatgtgacaatgagaagcaaacttttttgtgacagattgtattggcataggcatgatagatggggattggtacgttttgaatcagcatttgcaaaaaaattgtcttgaattttaaaataaacaacaaagatttgttcattgagtgcaaa

SEQ ID NO: 363008 - DNA, 429 bp, Homo Sapiens
  misc_feature (404)..(404): n is a, c, g, or t
tttaaagacaggttctcactctgttgtcctggctgcagtgcactggctattcataggcaagatcccattactgatcagcctgggagttttggcctgctccatttccaacctgggctgggttcacccctcctgatgcaagtttgtggtttcctgcttcagggacatcaccatattgatgccaaacttacacccaactggcatagtgtaccacagcccagaactcctgggctctagggatcctcctgcttcagcctcctaagtagctggggctgtacgcatgtgccaccaaacctagcaattattatttttaatcttagaaaataaattgtgtatagaaaggaatagttagcacatttatgtctaaagaggaataaaaaaggacaactgggtttacacaaaatgcnattgaagtgactgatttgaagcagc

SEQ ID NO: 363009 - DNA, 905 bp, Homo Sapiens
tcctccaaaacgcctccataacaccagtaaagtccaaaacctctaccgaagacctcatgaatttagaacaaggcatgtccccaattaccatggcaacctttgccagagcacagaccccagagtcttgtggttctctaactccagaaaggacaatgtcccctattcaggttttggctgtgactggttcagctagctctcctgagcagggacgctccccagaaccaacagaaatcagtgccaagcatgcgatattcagagtctccccagaccggcagtcatcatggcagtttcagcgttcaaacagcaatagctcaagtgtgataactactgaggataataaaatccacattcacttaggaagtccttacatgcaagctgtagccagccctgtgagacctgccagcccttcagcaccactgcaggataaccgaactcaaggcttaattaacggggcactaaacaaaacaaccaataaagtcaccagcagtattactatcacaccaacagccacacctcttcctcgacaatcacaaattacagtaagtaatatatataactgaccacgctcaccctcatccagtccatactgatatttttgcaaggaactcaatccttttttaatcatccctccatatcccccaagactgactgaactcgtactttgggaaggtttgtgcatgaactatacaagagtatctgaaactaactgttgcctgcatagtcatatcgagtgtgcacttactgtatatcttttcatttacatacttgtatggaaaatatttagtctgcacttgtataaatacatctttatgtatttcattttccataactcactttaatttgactgcaacttgtcttggtgaaatactttaacattataaaacagtaaataatttgttattttt

SEQ ID NO: 363010 - DNA, 535 bp, Homo Sapiens
gggagggacccgcagctcagctacagcacagatcagcaccatgaagcttctcacgggcctggttttctgctccttggtcctgggtgtcagcagccgaagcttcttttcgttccttggcgaggcttttgatggggctcgggacatgtggagagcctactctgacatgagagaagccaattacatcggctcagacaaatacttccatgctcgggggaactatgatgctgccaaaaggggacctgggggtgcctgggctgcagaagcgatcagcgatgccagagagaatatccagagattctttggccatggtgcggaggactcgctggctgatcaggctgccaatgaatggggcaggagtggcaaagaccccaatcacttccgacctgctggcctgcctgagaaatactgagcttcctcttcactctgctctcaggagatctggctgtgaggccctcagggcagggatacaaagcggggagagggtacacaatgggtatctaataaatacttaagaggtttaaccaaacgaaacacc

SEQ ID NO: 363011 - DNA, 929 bp, Homo Sapiens
  misc_feature (657)..(667): n is a, c, g, or t
gggctacccacctcctgccgtcccccctggaggacagcctcctgtgcccccgcccattcccccacccggcatgcctccagttggggggctggggcgggcagcctggatgagataacgtgagccttttttccctctttgtttttttaacaagattttctaatcgacttgcagagtagttgaagtgggtaagcagcagggtaccttgtataatgcacgacagttgcagtatgggaagaatggaccgggcccctgggataaaatcagagtggtcctcacacctagaggacggggacaaccagctttcagagtagcctcatcagtgcccttgcagtctgactgtgtacacttggttcagctaatgtctgagagtcctgcactgggttactttatactagtgaggacgttaaccagccatattggctcaataaatagcttcggtaaggagttaatttccttctagaaatcagtgcctatttttcctggaaactcaattttaaatagtccaattccatctgaagccaagctgttgtcattttcattcggtgacattctctcccatgacacccagaaggggcagaagaaccacatttttcatttatagatgtttgcatcctttgtattaaaattattttgaaggggttgcctcattggatggcnnnnnnnnnnncctccagggagaaggggagaaatgtacttggaaattaatgtatgtttacatctctttgcaaattcctgtacatagagatatattttttaagtgtgaatgtaacaacatactgtgaattccatcttggttacaaatgagactccttcagtcagttatccaaataaaagcagttctgaaactatccctttctttgttatggggtggaaggtgggctccaggccctttccagtctgtggcttataaaatgtgcagaggccctcct

SEQ ID NO: 363012 - DNA, 738 bp, Homo Sapiens
  misc_feature (182)..(270): n is a, c, g, or t
  misc_feature (327)..(345): n is a, c, g, or t
  misc_feature (375)..(460): n is a, c, g, or t
aaagggggccaaagggtttttaatccccccgggggatttccggtttaataaaacccgttggggaggggttcccctttggggagaatgtttaaggaattccacccttttttcaaaaaaggccagggcgggggttaaattgaaattgagctcggtgggacccccgtggaaaaatcccgtaaagnnnnnnnnnnnnnnnnnnnnnnnnnnnnnnnnnnnnnnnnnnnnnnnnnnnnnnnnnnnnnnnnnnnnnnnnnnnnnnnnnnnnnnnnnggttttctttggaaacagttttggcccttttccttttcctttggggcccccgccccnnnnnnnnnnnnnnnnnnnttttttgggggccgggggggccgccaaggnnnnnnnnnnnnnnnnnnnnnnnnnnnnnnnnnnnnnnnnnnnnnnnnnnnnnnnnnnnnnnnnnnnnnnnnnnnnnnnnnnnnnnactcatatcttgtattttatttcttatgaaaatggctacccaaagaagtcattgtagcaggctactattttaaggcagcaactgtataacttaaatgctaagactcactccataagacagaaaacccttccccagggctgtaatgggcatttaagtttcccaaacccagggacaactaatttttattacctattgaatagaaacaaatggattttaatagttcccctcccctatagctgaaaaactccacaaacaataattgactctatctacatgcc

SEQ ID NO: 363013 - DNA, 327 bp, Homo Sapiens
  misc_feature (236)..(236): n is a, c, g, or t
  misc_feature (271)..(271): n is a, c, g, or t
gcattacttgaaccataaaaactagtttaatagcttattttaaagtaacaatgcagtacatgataatcactatataaaagaattacatgtttataatgtaatgattttgtcctgatcattttcttataatgactgaatgctaaaggcacagtcactgaaaaaacttacctaatatactccccttgacttagtatttagcactgaatacaaaagttccaatagcttccatataattnggggaaaaatttacaaatgcataaaatagaaaccnaggtgaattctcatgctggtaatcaatcaaaggctttttacttaacccaaacaaaa

SEQ ID NO: 363014 - DNA, 629 bp, Homo Sapiens
cctaaggcaactgggtgcaaaatgcattctgttcactcactgtctgggccttccccaccctagtcttggcacattccttcaagaatgtagttaccgtctgcttgggaagatgtcagtgcaaatgtgaagataatgggcatcggactaggctttggtttgccacaagtggcagctgcctgtatcaattacatttattaattttgcttttcatttttcccagttctcctcaccccccctttgttgaaatgttggacttgctgtcagaggcaactgtaatattgccttagggacttgtggagaaggggaattgctcagtgtagtgttttaactttcagaaccaagcaatctatttactcttacaaatatttaagaagtgtgttagtccaactttaagaaaaatccaaactcatcagcttttgatagcatcttggtttttgaaacaacttcaatctgtaattggcattcagaatgcccttggcatgccagtctgtgatggcatttaagacctgtaaaacacttgagcccaactcgattaaccaaaaccgataaccaccacctttatcttctaaataaagtccgctttatttttattttctgggcatagctgtttcctagaaaaaaatcgtgtc

SEQ ID NO: 363015 - DNA, 723 bp, Homo Sapiens
cgcacacatcctttgacgccagctccccaggtgggagtgggcccaaacccagcccctcctgtccacctctccaggtctcactctcttcctgccatctacaagaggagaggacctggctgggccccaagccttggacaaatcctgggaaaacctgagactagaacccttgtcttcctcttacccaaattctaggatagctctaaagcctgctggaaacttggtggcatccaacctgcctcattcggcctgaccggtagaggcaggtggcctgtggacagaagtaatcctctttctgctcaccccagggcagacacaactgcctatgttcccccgatgagaggaaacaggctgagagaagaaaaatgactgctccaggattataccacagtggagagcgggtcacaggacatgatgcagggtccaggtttctgttttgatcaagtcttacatgcccattcagcttctaggcccccctcacctccctgccctcattcacaagtggccctgagacacgtgaacacctccctcctatgcatcacaaaccttctccaccgagctttggtgctttggcctctggcacacctaactagcattggcagaggagagtctacactctcttcctcattcagggaagatgctttaagaaatcctgcctctgtgcagcagaggagctggaggcagctccccaggcatccctccccaaataaaggcttatgtactggc

SEQ ID NO: 363016 - DNA, 3143 bp, Homo Sapiens
  misc_feature (2420)..(2485): n is a, c, g, or t
  misc_feature (2516)..(2648): n is a, c, g, or t
  misc_feature (2651)..(2651): n is a, c, g, or t
  misc_feature (2726)..(2789): n is a, c, g, or t
  misc_feature (2907)..(2918): n is a, c, g, or t
  misc_feature (2982)..(3077): n is a, c, g, or t
gcggacacctggaccgccgcgccgaggctcccggcgctcgctgctcccgcggcccgcgccatgccctcctacacggtcaccgtggccactggcagccagtggttcgccggcactgacgactacatctacctcagcctcgtgggctcggcgggctgcagcgagaagcacctgctggacaagcccttctacaacgacttcgagcgtggcgcggtggattcatacgacgtgactgtggacgaggaactgggcgagatccagctggtcagaatcgagaagcgcaagtactggctgaatgacgactggtacctgaagtacatcacgctgaagacgccccacggggactacatcgagttcccctgctaccgctggatcaccggcgatgtcgaggttgtcctgagggatggacgcgcaaagttggcccgagatgaccaaattcacattctcaagcaacaccgacgtaaagaactggaaacacggcaaaaacaatatcgatggatggagtggaaccctggcttccccttgagcatcgatgccaaatgccacaaggatttaccccgtgatatccagtttgatagtgaaaaaggagtggactttgttctgaattactccaaagcgatggagaacctgttcatcaaccgcttcatgcacatgttccagtcttcttggaatgacttcgccgactttgagaaaatctttgtcaagatcagcaacactatttctgagcgggtcatgaatcactggcaggaagacctgatgtttggctaccagttcctgaatggctgcaaccctgtgttgatccggcgctgcacagagctgcccgagaagctcccggtgaccaacgagatggtagacgtgcagcctggagcggcagctcagcttggagcaggaggtccagcaagggaacattttcatcgtggactttgagctgctggatggcatcgatgccaacaaaacagacccctgcacactccagttcctggccgctcccatctgcttgctgtataagaacctggccaacaagattgtccccattgccatccagctcaaccaaatcccgggagatgagaaccctattttcctcccttcggatgcaaaatacgactggcttttggccaaaatctgggtgcgttccagtgacttccacgtccaccagaccatcacccaccttctgcgaacacatctggtgtctgaggtttttggcattgcaatgtaccgccagctgcctgctgtgcacccccattttcaaagctgctggtggcacacgtgagattcaccattgcaatcaacacccaaggcccgtgagcagctcatctgcgagtgtggcctctttgacaaggccaacgccacagggggcggtgggcacgtgcagatggtgcagagggccatgaaggacctgacctatgcctccctgtgctttcccgaggccatcaaggcccggggcatggagagcaaagaagacatcccctactacttctaccgggacgacgggctcctggtgtgggaagccatcaggacgttcacggccgaggtggtagacatctactacgagggcgaccaggtggtggaggaggacccggagctgcaggacttcgtgaacgatgtctacgtgtacggcatgcggggccgcaagtcctcaggcttccccaagtcggtcaagagccgggagcagctgtcggagtacctgaccgtggtgatcttcaccgcctccgcccagcacgccgcggtcaacttcggccagtacgactggtgctcctggatccccaatgcgcccccaaccatgcgagccccgccaccgactgccaagggcgtggtgaccattgagcagatcgtggacacactgcccgaccgcggccgctcctgctggcatctgggtgcagtgtgggcgctgagccagttccaggaaaacgagctgttcctgggcatgtacccagaagagcattttatcgagaagcctgtgaaggaagccatggcccgattccgcaagaacctcgaggccattgtcagcgtgattgctgagcgcaacaagaagaagcagctgccatattactacttgtccccagaccggattccgaacagtgtggccatctgagcacactgccagtctcactgtgggaaggccagctgccccagccagatggactccagcctgcctggcaggctgtctggccaggcctcttggcagtcacatctcttcctccgaggccagtacctttccatttattctttgatcttcagggaactgcatagattgatcaaagtgtaaacaccatagggacccattctacacagagcaggactgcacagcgtcctgtccacacccagctcagcatttccacaccaagcagcaacagcaaatcacgaccactgatagatgtctattcttgttggagacatgggatgattatgttctgttctatttnnnnnnnnnnnnnnnnnnnnnnnnnnnnnnnnnnnnnnnnnnnnnnnnnnnnnnnnnnnnnnnnnntggttgccataaaaataaatcagttcatttnnnnnnnnnnnnnnnnnnnnnnnnnnnnnnnnnnnnnnnnnnnnnnnnnnnnnnnnnnnnnnnnnnnnnnnnnnnnnnnnnnnnnnnnnnnnnnnnnnnnnnnnnnnnnnnnnnnnnnnnnnnnnnnnnnnnnggngggcgccccaggcccccgaaaaatttttttaaacctttttatttggggcggggcccccagagggaagggcaccgnnnnnnnnnnnnnnnnnnnnnnnnnnnnnnnnnnnnnnnnnnnnnnnnnnnnnnnnnnnnnnnnaaaagacccgggggggaaaccgaagggtgtttgaaaaaacccccagggggggtttctgggggctcttttggggtatttatacacaggggctcccaagggaagtctcaaaataaaattnnnnnnnnnnnngtgacacttttttccaaagaggggtgggaaatttttaaaaagcttttttcccccacatgggggnnnnnnnnnnnnnnnnnnnnnnnnnnnnnnnnnnnnnnnnnnnnnnnnnnnnnnnnnnnnnnnnnnnnnnnnnnnnnnnnnnnnnnnnnnnnnnnnccggggtagaaacaaggggggggagaaaaaaagtgtgttccactatttggcgccccccgttataac

SEQ ID NO: 363017 - DNA, 625 bp, Homo Sapiens
attgagagacaattagaaatgttgtaattgtcatatctttacatgtggattatgaacaaatgaaagtttgctgtgtgattgcagttttaaattataacatttcataaatatgtcaattttagaaactcaaactctttcccatcttttgtatggataaagtttatggtttcatttctgagaatagagttggtctgctgtgctaacttcatgtttcttattccaaaggcttgattatatttttttctccagtgattaaaaatgcagcgaaaatccaatctacaagttcatatattggtatttctagacatagtctagttctaaaagaatgtacttggtgtgcatttttaagtgtttcatgtagacagattaatatatttttgtacaacattgtatttctacatttatttcaagactgtacttttcagtgactttttcaagtgcatgtgttaacagaagattgtttggaacgagagtgcagtggcttctttactagcaaagagaagtgtaatacaagtgatcatagaaggtgagaatgtgtttatactgtatatggaaacctaatgcctcttttctaaagctttgtacatttttttcgtgaaatagattaaatattttctctctaaaa

SEQ ID NO: 363018 - DNA, 1506 bp, Homo Sapiens
cctccaacagtgtcagggttagatgccttttatgggccacttgcattagtgtcctgatagaggcttaatcactgctcagaaactgccttctgcccactggaaagggaggcaggggaaatacatgattctaattaatggtccaggcagagaggacactcagaatttcaggactgaagagtatacatgtgtgtgatggtaaatgggcaaaaatcatcccttggcttctcatgcataatgcatgggcacacagactcaaaccctctctcacacacatacacatatacattgttattccacacacaaggcataatcccagtgtccagtgcacatgcatacacgcacacattcccttcctaggccactgtattgctttcctagggcatcttcttataagacaccagtcgtataaggagcccaccccactcatctgagcttatcaaccaattacattaggaaagactgtatttcctagtaaggtcacattcagtagtactgagggttgggacttcaacacagctttttgggggatcataattcaacccatgacagccactgagattattatatctccagagaataaatgtgtggagttaaaaggaagatacatgtggtacaaggggtggtaaggcaagggtaaaaggggagggaggggattgaactagacacacacagacacatgagcaggactttggggagtgtgttttatatctgtcagatgcctagaacagcacctgaaatatgggactcaatcattttagtccccttctttctataagtgtgtgtgtgcggatatgtgtgctagatgttcttgctgtgttaggaggtgataaacatttgtccatgttatataggtggaaagggtcagactactaaattgtgaagacatcatctgtctgcatttattgagaatgtgaatatgaaacaagctgcaagtattctataaatgttcactgttattagatattgtatgtctttgtgtccttttattcatgaattcttgcacattatgaagaaagagtccatgtggtcagtgtcttacccggtgtagggtaaatgcacctgatagcaataacttaagcacacctttataatgaccctatatggcagatgctcctgaatgtgtgtttcgagctagaaaatccgggagtggccaatcggagattcgtttcttatctataatagacatctgagcccctggcccatcccatgaaacccaggctgtagagaggattgaggccttaagttttgggttaaatgacagttgccaggtgtcgctcattagggaaaggggttaagtgaaaatgctgtataaactgcatgatgtttgcaggcagttgtggttttcctgcccagcctgccaccaccgggccatgcggatatgttgtccagcccaacaccacaggaccatttctgtatgtaagacaattctatccagcccgccacctctggactccctcccctgtatgtaagccctcaataaaaccccacgtctcttttgctggcaaa

SEQ ID NO: 363019 - DNA, 539 bp, Homo Sapiens
cagtcagagcagccccactccccaggcaggcaggcaggcagggagaagactccaggaccttcccacctcttcaccccaccagcaacttcagcgatacttacttacaataactaccacgatgatggcacagatggctcccagcatgatcatcatctgaggaaacatggacaaaaaatgagcccttggatttcaggaatgaggaaaagagccacatctctagtgggaaacagaattccttccatccttgggacaatggaaaaaaccacccatcacccaggagacctgcaggcctcttagagaggccctacccttctgcttcccaggggatcataaccacagtatgtctttagcttttcagattcatcacaggacctgcattgagctcctttttgcttagttcctggtgtcttggggctttagaaggcattccaatagagatacagactctggatatttaaccaattagttcaattttcactgtgaagtgttcagctcattctcaaaagttgcagttatttaaaaatatatatttcaatctg

SEQ ID NO: 363020 - DNA, 1006 bp, Homo Sapiens
cggtggccgcccatttgtccccacgcccctgccatggtctcctaccaagggcccagcgttttttaagaggtcagccatgggcccccgatactcttgtcgtgtccccaagtctgggccagcttccatgggtacttcgcctcagccacctgcgcctccctggcccccttcccttggcctgccaactctttggggctttgggggaacttgagagtacagaaaaagcagccagggaggaggcgccagctgttgctcttcgggtaatgacttagattgtgccacgagcagcatttctagtgttgagggacagagtgcaaatgaacgcaacgaaaaaggaggaatgggtgatggagaagcctgggctggaatggaggacggtgggtggggaagtgtgttgagagagcaaacagagggcagaggacatgaatgtggatggcaatggacaacagggaaggggtggtacattctcaagtaaaaaagtagattacaataactaccacgatgatggcacagatggctcccagcatgatcatcatcttgcagtttttccaccaatacttcctctttagcttggcagcactgctctcaaattgtgatgctcctgcctgcaaggcatcagctcggtcatccagctctgacagcttctggtccctctccaggaccttgtccacgttcacacgtatgatgtccaccacctcctccacttgtgcctgggtttgctgtagtcgtctgttactggtcatgttaggaggagggccagggggacccccacctggggcagtcccttctgtcccttcagcaggtggctgagctggagcagacatttttctgacagagagagtgagggtctgttcctctccggaggctgcggcgagacacccggcgagggacgctgcggctgaagtggacggaactgccaagctccgcctcgcgccgaccaccccgcggtctagctgcgcgacgcgtgggtcgacgatatcccgaaaacgtccggaccgtaccagggcct

SEQ ID NO: 363021 - DNA, 511 bp, Homo Sapiens
caaatgttcgagagtaatacatcacacagacacccagccctgctccagacgaatttcaagttttacaggctgagcgtcaagatggctcttgtggttgttattcgtctcacatccaggctgaaggattattctttctttacaaaatgagttcctcaaattgaccaatagctgctgctttcatattttggataagggtctgtggtcccggcgtgtgctcacgtgtgtatgcacgtgtgtgtgtccattagacacggctgatgtgtgtgcaaagtatccatgcggagttgatgctttgggaattggctcatgaaggttcttctcaagggtgcgagctcatccccctctctccttccttcttattgactgggagactgtgctctcgacagattcttcttgtgtcagaagtctagcctcaggtttctaccctcccttcacattggtggccaagggaggagcatttcatttggagtgattatgaatcttttcaagaccaaaccaagctaggacattt

SEQ ID NO: 363022 - DNA, 1256 bp, Homo Sapiens
  misc_feature (530)..(814): n is a, c, g, or t
  misc_feature (818)..(840): n is a, c, g, or t
  misc_feature (942)..(1025): n is a, c, g, or t
caagtgctgcggcacagtggttctcataatatcccgctcctgcgggattttaagagggttctctccaagaatgcgtgtgtggggagagggcatttcccacggtgttggggcggggaaaggctttggtgtaaatgttacagaccaagttctttggatattgaagtggcgcaaagggcggggacgggtaaatttcagattatagaggcagtcggattggggcggttccccgagggaggaaagaatgcccagtaaaaaggcgccttcaggaaactcccattttgggattttggttccaggaacacgcttcgggtttccgcgccccgggcggtttttttaattgggtggaggaattcaaggcccctagggttcatagtcccagggttttcctttgggaaaccaaggtatgaaaccagtgtccactttcccttattgggggcccgggtctcccaaacggaatggttttgaaaagcgtttttgagggccgaggcggcccgccaaggtgagggtatatgttaggaagggaggggggnnnnnnnnnnnnnnnnnnnnnnnnnnnnnnnnnnnnnnnnnnnnnnnnnnnnnnnnnnnnnnnnnnnnnnnnnnnnnnnnnnnnnnnnnnnnnnnnnnnnnnnnnnnnnnnnnnnnnnnnnnnnnnnnnnnnnnnnnnnnnnnnnnnnnnnnnnnnnnnnnnnnnnnnnnnnnnnnnnnnnnnnnnnnnnnnnnnnnnnnnnnnnnnnnnnnnnnnnnnnnnnnnnnnnnnnnnnnnnnnnnnnnnnnnnnnnnnnnnnnnnnnnnnnnnnnnnnnnnnnnnnnncgannnnnnnnnnnnnnnnnnnnnnnaagaaactgaagcctctacttcggtctcttggtagccttcctcctgggaagctctttcttgaatctagtcaccattccattccaccacgccacatatgtctnnnnnnnnnnnnnnnnnnnnnnnnnnnnnnnnnnnnnnnnnnnnnnnnnnnnnnnnnnnnnnnnnnnnnnnnnnnnnnnnnnnnacatgtgagaggccccatgcagaaccacctagaaccatggagagcagtcaccctgcagaaccatgagtaagttaagcttaggggtggttaattacgcagaaataagtaaacagagcactccaccaggtattaaagattattacaaagattatgtaattaaaacaatacagaacagaccagggttgactacaagatcaatgggacagaataaagttacatatccaatgcctg

SEQ ID NO: 363023 - DNA, 452 bp, Homo Sapiens
tcttataatttgcatgtcttacaaaagtagactacagcaggcatggacaaaaacagaacaaaagtctaactgattgaaagcttattccatagagaagacattgggttctagagacttacaggctatgcttgtagtttctcatatttaccttccttttgttggaaaatatagcagaaaatagagtggaggagggtgagaaggtgaggttatttgtgtgaagaatggttaggatcagtttgtttacctcctccccatccgtaccactttttggaacagttatctgtaaatataaggataaagtagtctgaacctgggtacagaagaggagaacactaacaagacaggcatctgatggtaataccaacagctttttccccaaacctaagttacaactttagtgatcattatgttctaattgttatagaaaaataaaatgtgaaaatactagttac

SEQ ID NO: 363024 - DNA, 513 bp, Homo Sapiens
  misc_feature (25)..(25): n is a, c, g, or t
  misc_feature (91)..(91): n is a, c, g, or t
ctttgtcccagttgtgagctgtccncggtgttacccgaggctgtgccttagagagtggagatttttgatgaaaggtgtgctcgcttcttcngcggttctatctttcttctctcctccttgttcctgcaaaccacaagataaaggtagtggtgtgtctcgaccccatcagcctctcacccactcccagacacacacaagtcctcaaaagtttcagctccgtgtgtgagatgtgcaggttttttctagggggtagggggagactaaaatcgaatataacttaaaatgaaagtatactttttataatttttctttttaaaacttggtgaaattatttcagatacatattttagtgtcaaggcagattagttatttagccaccaaaaaaaagtattgtgtacaatttggggcctcaaatttgactctgcctcaaaaaaaagaaatatatcctatgcagagttacagtcacaaagttgtgtattttatgttacaataaagccttcctctgaagggaaa

SEQ ID NO: 363025 - DNA, 791 bp, Homo Sapiens
  misc_feature (50)..(50): n is a, c, g, or t
  misc_feature (209)..(209): n is a, c, g, or t
tatataacccaaacgtcacttagtagagacatatggcccccttggcaganaggacaggggtgggcttttgttcaaagggtctgccctttccctgcctgagttgctacttctgcacaacccctttatgaaccagttttggaaacaatattctcacattagatactaaatggtttatactgagcttttacttttgtatagcttgatagggngcagggggcaatgggatgtagtttttacccaggttctatccaaatctatgtgggcatgagttgggttataactggatcctactatcattgtggctttggttcaaaaggaaacactacatttgctcacagatgattcttctgaatgctcccgaactactgactttgaagaggtagcctcctgcctgccattaagcaggaatgtcatgttccagttcattacaaaagaaaacaataaaacaatgtgaatttttataataaaatgtgaactgatgtagcaaattacgcaaatgtgaagcctcttctgataacacttgttaggcctcttactgatgtcagtttcagtttgtaaaatatgtttcatgctttcagttcagcattgtgactcagtaattacagaaaatggcacaaatgtgcatgaccaatgtatgtctatgaacactgcattgtttcaggtggacattttatcattttcaaatgtttctcacaatgtatgttatagtattattattatatattgtgttcaaatgcattctaaagagacttttatatgaggtgaataaagaaaagcatgattaaaaaaaa

SEQ ID NO: 363026 - DNA, 928 bp, Homo Sapiens
aaggagcgaggcctgggtggcgaattcggcacgagggaaattgaggactctggatttttgtcactaactctgtgaacatagccatcagatttgatgaggaacttaggagagaggagttttatttcctccttcgatgttttcctctcagttgtaaaagatgaactctttgagatgatttctcacctgctgtggtatcttgcaggaactgtgtgctaaaattgaacaatttttttgagattatggttgcaatacttggcgtggaatcagctttacataaatataccttgtatgcaaacgatgataaactagtcaggatgagcagagctgcctgacctcttgatttctgctgcaaaagacatatacactgtactggggtcactatttatgaaagcaattggttaggacctctttttttcctctcagggaactaatgctctgaaaagggatctgggcacaacagtttcagtgagtgcttttgagcacacttttatttttatatagtaactaatggttaagattgatggtggcctggattagcaaagaggaagacagcttttaacacagttccctgccttcacaagaggtgtcagattaagatgtgaaagctgcaagaatgttgcagtgaacaccatttcagagctctcagtgtgcagttcaggaattaagatacttggaatagctgtggaggaagaacctaaattgcaaagatctgctattgccagctctcaacccaagtcagtgaattgtcaacctgcatatcctaaaaatgtcaaaatgctgcatctggttaaatgtcggggtaggggggaagctgaaggtgctcgcttcatttgccttgtttactcatcctgccctgtaatgtctgtaatcctgaagatggaataaattgtaacatttagtttctatcattaaaacaacaacaaaaaac

SEQ ID NO: 363027 - DNA, 1063 bp, Homo Sapiens
ggcctgggtggcgaattcggcacgaggaccactgtcgccatgaacagtgtgggggaggcatgcacggacatgaagcgcgagtacgaccagtgcttcaatcgctggttcgccgagaaatttctcaagggggacagctccggggacccgtgcaccgacctcttcaagcgctaccagcagtgtgttcagaaagcaataaaggagaaagagattcctattgaaggactggagttcatgggccatggcaaagaaaagcctgaaaattcttcttgaccttgacagtcaccttgaaggatttcgcaagtccagaaattgaggactctggatttttgtcaactaactctgtgaacatagccatcagatttgatgaggaacttaggagagaggagttttatttcctccttcgatgttttcctctcagttgtaaaagatgaactctttgagatgatttctcacctgctgtggtatcttgcaggaactgtgtgctaaaattgaacaatttttttgagattatggttgcaatacttggcgtggaatcagctttacataaatataccttgtatgcaaacgatgataaactagtcaggatgagcagagctgcctgacctcttgatttctgctgcaaaagacatatacactgtactggggtcactatttatgaaagcaattggttaggacctctttttttcctctcagggaactaatgctctgaaaagggatctgggcacaaacagtttcagtgagtgcttttgagcacacttttatttttatatagtaactaatggttaagattgatggtggcctggattagcaaagaggaagacagcttttaacacagttccctgccttcacaagaggtgtcagattaagatgttgaaagctgcaagaaatggttgcagtgaacccccttttcaaagctcctcaggtggcagttcagggatttaagatacttgggaatagctgtgggaggaagaaaccaaaattgccaaagatctggctttgggccagcttctcaacccaagtcaggggaattgtcaaccctgcctatcctaaaaatggcacaagg

SEQ ID NO: 363028 - DNA, 1064 bp, Homo Sapiens
  misc_feature (793)..(793): n is a, c, g, or t
  misc_feature (887)..(887): n is a, c, g, or t
ggcctgggtggcgaattcggcacgagggaacagtgtgtgggggaggcatgcacggacatgaagcgcgagtacagaccagtgcttcaatcgctggttcgccgagaaatttctcaagggggacagctccggggacccgtgcaccgacctcttcaagcgctaccagcagtgtgttcagaaagcaataaaggagaaagagattcctattgaaggactggagttcatgggccatggcaaagaaaagcctgaaaattcttcttgaccttgacagtcaccttgaaggatttcgcaagtccagaaattgaggactctggatttttgtcaactaactctgtgaacatagccatcagatttgatgaggaacttacgagagaggagttttatttcctccttcgatgtcttcctcccagtcgcaaaagacgaactcttcgagatgattcctcacccgctgtggtatcttgcaggaactgtgtgctaaaattgaacaattttttgagattatggttgcaatacttggcgtggaatcagctttacataaatataccttgtatgcaaacgatgataaactagtcaggatgagcagagctgcctgacctcttgatttctgctgcaaaagacatatacactgtactggggtcactatttatgaaagcaattggttaggacctcttttttttcctctcacggaactaatgctctgaaaagggatctgggcacaacagtttcagtgagtgcttttgagcacacttttatttttatatagtaactaatggtttagaattgatggtgggctggnattagccaagaagaagacagctttttaacacaggtcccctgccttcacaagaagggtcagatttaggatgtgaaagctcgcagaatggttgcantgaaacccatttccggacctctccgggtggcagttcaggaattaagatacttgggaatacctggtgggaggaaggacccaaaattgccaagatctggctattggcaagctctcaaacccaaggtcagtgaattggtcaacctgccatatccctaaaaagtccaatcgcctccggggt

SEQ ID NO: 363029 - DNA, 716 bp, Homo Sapiens
gggggggaccttttatttagtcagtcttcatttaaatgtgtgcttttgaaatcactaaatatgaccttttcagaattcaattctcacagtatttacagtgaactttgtgcaaacaaatccccctttgtgcaaagggggagcttcctgctccccctttcacattaataacttacaaattcagatcacaacaaaaccccagactctagttttctgtttgaaaggtactgagctgggataatgggttgctaggaaagagctaatgcaagcccaaaggaaataaaatgttttctttatcagaaaagaataataacaaggcctcactctccaaaggaaaacagacgtcccaagatgttgtggaacagtattaagtaaccaaatacaattccaatggttatttcaccttcattttttatacttacactcatctcttttaattaaataagcgaaaccagaaaagtgcaattcgaagggactctgaactgtcagggaacgttataaaaataatctgacgtcagtgactaaagagtgcgggtcatcaggctgccggccggcctcctgcaagggcactggccagggaggccacagctgccaaagcggggaggtgcgccaggccccacatcacctgcctcggggtccatgccaggcaagaaagaaacatacacctgggcctagccaagggtggtgccctgccaggtaactcttcaggtacaaaatct

SEQ ID NO: 363030 - DNA, 920 bp, Homo Sapiens
ggggccagtttgaacttgggagtctcatgtgtatgaattgctcaggtatccacagcagttttggcacccgcctttcccgtgtgcgatctctggagcctggatgactggccagttgagctcaggaaggttatgtcatctattggcaatgacctagccaacagcatctgggaagggagcagccaggggcagacaaaaccctcaaaaaagtccacgagggaagagaaggaacagatggatccgttccaaatatgaggagaagctctttctggccccactaccctgcactgagctgtccctgggccagcagctgctgcgggccaccgctgatgaggacctgcagacagccatcctgctgctggcacatggctcccgtgaggaggtgaacgagacctgtggggagggagacggctgcacggcgctccatctggcctgccgcaaggggaatgtggtcctggcgcagctcctgatctggtacggggtggacgtcatggcccgagatgcccacgggaacacagcgctgacctacgcccggcaggcctccagccaggagtgcatcaacgtgcttctgcagtacggctgccccgacgagtgcgtgtagtatctgttttatttgactgcagtctccttggtgcaaaaacaaaatgggaaaaataaggataactcagaatttcaaaaggaaatcacaaattcagctaataatagcattttcagtacttttcgtaaactaagtaaatacacaaaatgttgatttttctgaccataagacgtattttatgtccttttgccaaggtggatttgttagtctcaggccctcctggccacattgcccaagtcacacaggcttctgtattatgtatttagataaaatgtgtgaaaatatatttgaaataaagttcataaatatgcattgatttttgtac

SEQ ID NO: 363031 - DNA, 1716 bp, Homo Sapiens
  misc_feature (1457)..(1466): n is a, c, g, or t
  misc_feature (1592)..(1592): n is a, c, g, or t
  misc_feature (1615)..(1615): n is a, c, g, or t
ggagctcgacggcataaatcagaagcaagcacagagtttgtcaggtttgaagcccctatgatggtgtgtgtcaaatcagttgtagctaatctgtccagggagaatactggcttcattacacttgtacagccgagttcttcccgcattactgctgtttaatagaacgtgattagtcatcgccgagaagaaagcatattagccgaggaggtagtcacgcggcacgcgccggtgattgccacgatgtgattgcaatactcttagaagcaccatattatcccagacatgttctttcaagcccttggagccctctctaaattcactgtcatcatttagtatctgtttaatttttcagtccaaagagaggaaatcagtcgctgagtattatttgactccggtctccttggtgcaaaaacaaaatgggaaaaataaataagaataactcagaaactcaaaaggaaaccacaaattcagctaataatagcatttcgagtatatttcgtaaactaaggaaatacacaaaaggctgttttttccgactgtaagagatatttgatgtccttttgccgaggtggatgtgttagtctcaggccctcctggaccacgttgcccaagtcacacaggcttctgtgttatgtatttagataagatgtgtgaaaatatatttgaataaaagaagttcataaatatgcattgatttttgtacagacaaatggcacctctcttaatttataaattgaactggatgtgaactaataatgtgcaactagttgagataagagggttacagatcattgtacatggaaaatattcccagcagtaaacacttccattaatgtgatctacggcttttaaaaaggagcatctcagaataagatggtggtacaatttgcttattaaaattgagaaaaaatagacacattggaatatattagaaagggaaaagaaggaatgtgatttcttctgattgaaagcatgatttagatcagatacagctttttgctaaccaaggaccaagggactctggcaagacagggtggttttccgaatgccagaccgaggtgcctaacgaagacagctgccgatggttctgtggcacagactggctcactgagaacccagacgaccttgacccggcacccccgccctccacgctagtacctcgcctgattcccatcgccacagtatccagctgcttgagacatcagctgccttcagtggtggtagtcaaacatagtcagccaaaccatggcatcccttaggttaaaagaaaacggggcagctttgcccagagcctgttggcactgtgggcgggggagagggttgggggagagagaagggttgtcacgatggaagatgaggacactagtctcatgtagcacagaaacacgaagtcacatgcgctggcagcctccggggtgcgccttgctgtcatatattaaaccttacattttataagnnnnnnnnnngaaggaagataaggtcattgtgtgtgcttaagcctctttgttgattcaaattctttggttattttggtttgtcttgtttctttaattagactgtacattttaaagtacaagtctttatattatacnatgccccctccctattctatatnctctaaactactggttttctgggttttcagggactttataaaatcctggctcaattctacccaaccaaactatacatcccaaataaattctctaatgggcc

SEQ ID NO: 363032 - DNA, 435 bp, Homo Sapiens
caggatagtctcaaagaatagcgttgtaaggtttatttgggtagggaaggggacaagggagggaactgatccttgctttgtaaacagggcaagacaattatttggggggaagggactggatgccaacaaacgttactcatgctttagttaaaactttaagtcacctaaaacaaaaacaattctaaagaacactgggggaaaataaaagtgtaaatgtttcaaacaaaaccaaggcattggcagcacgatgtacattatacgggagataaaacagccacatcctaggccacaaagcaaatcccaagagccccaggcatgcaggagagttttaaaggaacagacggaaattttaactgggaaaaccacgaaatttcatgacttttgtcagctacaaccccaactaatatatgaccattaagaggaaaattctgacct

SEQ ID NO: 363033 - DNA, 453 bp, Homo Sapiens
gctcttgggccctgctcaggccgtttttgctgacttgcctggcttacaataaaagcccaataaatatttgttggccatatgtgttggacactgtggggccctgtccagtcccctttaccaaaatgagacccccatccccaactgctttgagtttggggtgcaagtgctcccagcttttgttttccaaaaaatggaaaattgccctcaggaaatgagagccatctcccctcccccaggagtcacttcctctttacaccccaacacctggttcatttgattaaaacggaaaaaactccagggggctatgactgctttggcccccttgggtcaggccaaagtaaactttttttgagccttcacccggggtaagctctctcccttttttatcctgtttcattccctcccccaaaggggttttccaaataaatccccctgtcaatcccatggttttgg

SEQ ID NO: 363034 - DNA, 344 bp, Homo Sapiens
cacccacctattgttgtcacttgggaagaaaacagacaccttcaaggagagggctcccctggtagcccccaccccaagacagagctggatgcccctcgcttccgtagggaaagcacttctcctgcaggatggcattgctctctccccttccatggcacgtagtatgtgctcagtaaatatgtgttggatgagaaactgaaggtgtccccaggcctacaccactgccatgcccgaacactatccatgctatggtgggcaccatctctctgatgacagttctgtgtccacaacccagacccctccacacaaacccagatggggctgtgccgctgttttccagatgt

SEQ ID NO: 363035 - DNA, 626 bp, Homo Sapiens
  misc_feature (237)..(237): n is a, c, g, or t
  misc_feature (524)..(577): n is a, c, g, or t
gctcccccatctgctgagagctacttccactcaataaaaccttgcactcattctccacgtccacgtgtgacctgattcttctggaatgccaaggcaagaaccctaggatacagaaagccctctgtccttgtgataaggaatgtgtctaattgagctagttaccccaagttgccaataaatggcaaaactaaaagacccacacgacccactggggcttccaggaactgtaaacatccnacccctacacactgcccagtatgagaaaaatttgctgatatgttttctgctgacctgatgacaatgttcctatggtcacactaaccactgctgggtaattttcatcatgactctcgttttcatctgctgaaaccagcctccccaagaaagacaactattttcaaactgaggaaataaagtgttactaaaccacagtgttctctcatggctgttcctggagttcttcaaaacacttgatattataaaatagaattattacagatcactgtatgttatggatttagtcnnnnnnnnnnnnnnnnnnnnnnnnnnnnnnnnnnnnnnnnnnnnnnnnnnnnnnatagttttttaaacaagaatatccaataaagacagtatgaggtcagctg

SEQ ID NO: 363036 - DNA, 459 bp, Homo Sapiens
ttttttagaaatacatcatgatcaagtagagtttatttcaggaatgcaagaatggtttgatattagcaaattcattaaaataattcatcatattaatgtaagaacagttatataataatttctataaaagttgaaaaggattttgataaacatcaacactcatttcaaataaaaaattcttaataaaataggaggatggatatatggttaacataataaaaatacttaagtcaaaagccaactttttatttaattggaaaaaattggtgacattctcactaaagtcagacatatggcaaggatgccaagtatatctactactatttaacacagtatagaaggtatcagccaatgcagttaggcagaaggaagcaatttgaagcataagaattgaaagagcagaagtaaaactatgtacatttccagatgatatggtagtatgcctgtaaaacccaagag

SEQ ID NO: 363037 - DNA, 600 bp, Homo Sapiens
aattaagaatcatttataacaaaaggaatctttaatacaaattctaatgtaaaccattgttctaagaaaggagaacaactcatttgcctggcttttaaaacctgtaatgtttctaataaaacatgtctatttgaactttttcaaaaattttcaatccatgttttgctatctagttgtcccatctgtgccttttaaattatattattctcactatgtaagcctttttttcatcttttcaaatcttatcagtcttttgaagtttagagaccaatctcttttacaaagtctagctaatttcaaaattaattattctgtatatctttctactttatttctcatagtccatttccttcaaatttgacagttatctataccatccggtaacatcttgacctgattttaagcagtttcagggaagaaaccatgcttgattccttgtttttcccagagcacatagtaaatgaacaaaatgctcttattaagaagcgacatgacacaatggtgaatgaatgaactttggaggaaattattatttttggttaacaattttcttcttacctgattcctttgcccaagctcttaaatcctgactggaaagtc

SEQ ID NO: 363038 - DNA, 442 bp, Homo Sapiens
  misc_feature (274)..(290): n is a, c, g, or t
tcccgtgtattctggagatgtgagaattcacccaaaattcttaaaacattggagaatagcttgttataaaataaaagtgggggtaaaaagaaggtggttttccccacatccctttgcattgaataagagacctagttctttgcgtttgtgcaataactctttgctgcttgccttgagagcgggtagcaccacgctcctgtccagactactaacagcacaagacgcactcacagggtggcggaatcttccggaaaactctctataagctcagctnnnnnnnnnnnnnnnnnactctagcgttttgtcacgtcttacattttagcagtattttatattttctgtaacgcaccaagtcttagatctttctagagcttgtttgttcatcctcacaatcacagatttttttctccaatcctcacagagacccaattgaccaaaaaag

SEQ ID NO: 363039 - DNA, 251 bp, Homo Sapiens
gggagccgcggcccgggaatctacgtcacccgaaaagcgactataaacgccggcgcctccgtccccagccgcggctcgggaatccacccgaagagtggctataaacgtccgcgcctccattgcgctctcctcttcacttaggacactggtcctcccacgcctgacaccgacgtcgccaggaccgcggggttgggggaacttggctgtcccacgtctttcaaataaagctgttttgtctaactcaaaaaaaa

SEQ ID NO: 363040 - DNA, 554 bp, Homo Sapiens
atactaccaagagaactggaagatggataccacacaaacttcttgtataaaaatatgaatgctgaaatgtttcagacatttttaatttaataaacctgtaaccacatttaagtgatctaaaacccatagcattgtagtcatggcaacccgctaaactttctcatgcaactaaaatttctgggggaaatgagggtgggggttgtacatttcccattgtaaaataagtgttttaaatgtcctgtactgctaacgaatgactttctatatgtccaggagttctccagtggaataactatgcactactttacatttcatggggatgcacaaaaacaaaaaagtattacatttttagttgctgtttgtaccaaccttaaattacatatgtttaacaacaacaaatcaaaaatcctatttctattgagtttttaatactgactagcaactctgaagtcttaattccttttttgttatgatttatttgtgagtttacatttttaaattgtttaactttcttaatttagtaattaaaaagagagcattttacatttgaaaaa

SEQ ID NO: 363041 - DNA, 130 bp, Homo Sapiens
ttatgcccaaaataggaatcatataagtacctaacctcctaaagttaaatgaaacaatgcttggaaatccttagctccaggcccagagtataaaaggtgatcaataaattatagttttaatagtaaaaaa

SEQ ID NO: 363042 - DNA, 738 bp, Homo Sapiens
gggagagctggcgctctagcccacggagttggttaactcctctcaccggcccctggaaagggttccaagtcctttagtacccgacgctgtctgggaattccgggcgtttcggctccttggtcgcagaggcaggaggcacccgaccgcatgtctgtcatggacctcgccaatacttgctccagctttcagtcggacctggatttctgttcagattgcggctcggtcctgcctctgcccggggctcaggatacggtcacctgtattcgctgtggcttcaacatcaacgttcgggactttgaggggaaggttgtgaagacttcggttgtgttccaccaactggggacagccatgcctatgtcggtggaggaagggcctgagtgccagggacctgtggttgacaggcgctgccctcgatgtggtcatgaaggaatggcataccacaccagacagatgcgttcagccgatgaagggcaaactgtcttctacacctgtaccaactgcaagttccaggagaaggaagactcttgacctttttcctgggcaactctacagtccctccctcctttcggaaggtgaaggatactgggtttttagatgccttgtccatcctgtctggttgcaatgttttgctcccagaagagaatcagatcatcatgtggggattaccattgttcctggagtactcctacccttagttgaatttccttattaaagttatatttttctataagacccaaa

SEQ ID NO: 363043 - DNA, 579 bp, Homo Sapiens
ggtcctttatacccgacgctgtctgggaattccgggcgtttcggctccttggtcgcagaggcaggaggcacccgaccgcatgtctgtcatggacctcgccaatacttgctccagctttcagtcggacctggatttctgttcagattgcggctcggtcctgcctctgcccggggctcaggatacggtcacctgtattcgctgtggcttcaacatcaacgttcggggttgacaggcgctgccctcaatgtggtcatgaaggaatggcataccacaccagacagatgcgttcagccgatgaagggcaaactgtcttctacacctgtaccaactgcaagttccaggagaaggaagactcttgacctttttcctgggcaactctacagtccctccctcctttcggaaggtgaaggatactgggtttttagatgccttgtccatcctgtctggttgcaatgttttgctcccagaagagaatcagatcatcatgtggggattaccattgttcctggagtactcctacccttagttgaatttccttattaaagttatatttttctataacggaacaacaacacatac

SEQ ID NO: 363044 - DNA, 503 bp, Homo Sapiens
taaagattcttaaaagaattacagtgtgtgcaagtttgctttgaaaaaaggatgaagggcaggagtattcaatggtcttggttccgatgataattattacttaacatagctgagaatcaaactgtagcaatgtctaatataaatagacttgggagatcgtttcgaaatggtggatccttttagtatttaaatggagagtttgagtattcatgtgactgtatggtcccaaagttaatgctatttatgaaacagttttgtaagaacataatgaagttggtaaaagctaagcgttctgcacaataaacagttcccagtttggggctttttcaaggctaatgaagttattgttggtctagaaaaatagtatttacttaataaaactctgtttgaaattgttctgtggatttttagagcagaatttgaaacaaatgtaatgcaaataaatataaagataaagtgtcttaaagacaatattctgaaataaaagatataaaatataattt

SEQ ID NO: 363045 - DNA, 777 bp, Homo Sapiens
gatagatatgggactgcaaagctgtcccatcaaggaagacagcttctagcagcgatacagctcagaccctcatcaggcgcattgactgtaggactagcatagacgacaccttcctctccaggccctgaatacataaaccagtccgttcccaaaaggcccgctggctctgtgcagaatcctgtctatcacaatcagcctctgaaccccgcgcccagcagagacccacactaccaggacccccacagcactgcagtgggcaaccccgagtatctcaacactgtccagcccacctgtgtcaacagcacattcgacagccctgcccactgggcccagaaaggcagccaccaaattagcctggacaaccctgactaccagcaggacttctttcccaaggaagccaagccaaatggcatctttaagggctccacagctgaaaatgcagaatacctaagggtcgcgccacaaagcagtgaatttattggagcatgaccacggaggatagtatgagccctaaaaatccagactctttcgatacccaggaccaagccacagcaggtcctccatcccaacagccatgcccgcattagctcttagacccacagactggttttgcaacgtttacaccgactagccaggaagtacttccacctcgggcacattttgggaagttgcattcctttgtcttcaaactgtgaagcatttacagaaacgcatccagcaagaatattgtccctttgagcagaaatttatctttcaaagaggtatatttgaaaaaaa

SEQ ID NO: 363046 - DNA, 1333 bp, Homo Sapiens
  misc_feature (461)..(543): n is a, c, g, or t
gggcggacggtcgcgcggcggcaggcacaggtgtaatggataggtaacagagaagacctcgtcccttcctagtcagggcatcagcatgactgagtgcttcctgccccccaccagcagccccagtgaacaccgcagggtggagcatggcagcgggcttacccggacccccagctctgaagagatcagccctactaagtttcctggattgtaccgcactggcgagccctcacctccccatgacatcctccatgagcctcctgatgtagtgtctgatgatgagaaagatcatgggaagaaaaaagggaaatttaagaaaaaggaaaagaggactgaaggctatgcagcctttcaggaagatagctctggagatgaggcagaaagtccttctaaaatgaagaggtccaagggaatccatgttttcaagaagcccagcttttctaaaaagaaggaaaaggattttnnnnnnnnnnnnnnnnnnnnnnnnnnnnnnnnnnnnnnnnnnnnnnnnnnnnnnnnnnnnnnnnnnnnnnnnnnnnnnnnnnncttgacagcagctgatgctgttaaacagtggacggaaacagaagaaaaagaaaaagccaattcaggagccagaggtgcctcagattgatgttccaaatctcaagaccatttttggaattcctttggcctgatgcagtagagaggaccatgatgtatgatggcattcggcttgcagccgttttccgtgaatgtatagattacgtagagaagtatggcatgaagtgtgaaggcatctacagagtatcaggaattaaatcacaaggtggatgagctaaaagcaggcctatggaccgggcaaggcatcttacaaaacttggcaccaactatgaagcttaccacgggtacgcccagctcggcgtgaacgcaggaatcggcagagaccttccaacacaatctggctttaccaaaagagcttatgcccagatccgcaagaggactgagggacggaccccggagcactgagaacagtggcaggaacttacagcgtttaaccttccaagagactgaccagaaatgtaaaactatccttcctgacttcacttggactcaattgtagaccatggaacccatgtcattgccacagcgtactggaaaacacacaaatgaattatagcagaaaacatgtcgcataagtggcacaagcccacaatggtacaacagataaacaaaccgacgacctagagaaggaaaaacgaaacgtgagccacaccaccccattcggaaaaagcagagcgactacaagcgacgcaaataacaccacaggaacggcaacaaaacggccgaacaacca

SEQ ID NO: 363047 - DNA, 510 bp, Homo Sapiens
tcggttgcctcatgtacccattaaactgagctatggtcattttatcttacccatttccccctcctctatacacttacctataacaccctatccacctggaatgttaattctcctaaccacaagacttgtatattctatctacttattaagagacaggtcaaattccaccccctctaggacagccttctctcatttcccctgctggaaactctttcttctctgaatttccgtaacccttgattcacttactggtttctaccccataataggaatgaacatgtttgacacccctaccaatctggaagcattttgagaaaagaaccatgttttacacaactttataagacccaaagaatttaacagcatctaacgtggttggtatttaatgtgataaatgaatttttaaaaatcaaaggaacacttgtcaaagagcaaatttagtatttaactataaaatttccccataaatttagttcaaatattaataaatgattgtattctgaaatatgt

SEQ ID NO: 363048 - DNA, 476 bp, Homo Sapiens
  misc_feature (240)..(282): n is a, c, g, or t
aagggtgagaactattgctagatttggtagggggtctgcatctatgggcccgagtcctccatctccacaagctgcccctcagtggggaagaggagggggaggctaagggagtctccgtaacgtttgtgggcagcagggaagagaacatggcagagattcctcaccgctggatggcttgtcccctggggatgtgtgtttttatctaacacccacctgcatctacttgggttggtctctacnnnnnnnnnnnnnnnnnnnnnnnnnnnnnnnnnnnnnnnnnnnactaatatttttgaaatgagaaggggctaggacaagagaagctcctgagaatgttatccccgcagggcgggggccatgggttaccatcagacaaggaaaattcaatccatgttcaatgcagagaacagcgacttctcaccttgaaaaactctccaactctactggggcttgcattttgcagctgtctttcatgt

SEQ ID NO: 363049 - DNA, 544 bp, Homo Sapiens
tctgtctctttggctctcagctctgctttcatttgagttggctttattcttgggcttcacagtgtggccccacagcaccagttattgataaaaagagctcccctttgctgacagaactgctggatttggttctcattggtccagacgaggaaggtatccagcctcaagtcatcattgtggccaggaagatggaatacaccaaatggacaggcctggcatgtacccacagagactgagagttggtgctggtggttgtggtggcagatgatattacctgaagaagggacgaatgggtgctgggcaggacaaagcatcagctgtccagttcaggcctctcctctttccctggtgtcttcattttcctccgtctccctgctgtcccttaccctctgcccaatctctcattactcctggtcttgggagttgccttctgaggatactccactgggggtacctgagcctggattagagggcagggggaggatattgcctagccaaagtgggtgttcaataaagaaccatttggagatggtcttctgtctgg

SEQ ID NO: 363050 - DNA, 819 bp, Homo Sapiens
  misc_feature (87)..(87): n is a, c, g, or t
  misc_feature (445)..(620): n is a, c, g, or t
cggcatgaatgtgcccttcaagcgcctgtctgctttttatttcatccccaaaatctaagggtcctgcctccgtccaccccagcattntgcatcactcagcactcagcccagaccctccccagcccacctcgaagagccccgtcctcagagcctggaaggccacactgaaggtgagcgcgctgcccttacgggaaaagccaaggttgttgaggggcgtgtggcagacgacggagtccagggcagcctgcatggcccggcgctcctcctcacacagctgctttcctgggggcagaaacagggaccagcaaacactacagcgttcctcattcccacagggccttcgccagcacagtctcatctgattctcaaagccactctgtggagtaaactgagcaaacgttatcttttgtgcatgttgtagataacaacagctaatacgtactgnnnnnnnnnnnnnnnnnnnnnnnnnnnnnnnnnnnnnnnnnnnnnnnnnnnnnnnnnnnnnnnnnnnnnnnnnnnnnnnnnnnnnnnnnnnnnnnnnnnnnnnnnnnnnnnnnnnnnnnnnnnnnnnnnnnnnnnnnnnnnnnnnnnnnnnnnnnnnnnnnnnnnnnnnnnnnnnntgtctatgccctgaaagtcactctgccccactgcctctctaaactctccatctaggacactggggagaccacccaggtacaggacggaagccacctgccacaagtcgcctccatgtgatggggctggcaccaaatttggctgttttcactgtcctgcctacctgactttttcctttctcttctcctccctgtgaaagta

SEQ ID NO: 363051 - DNA, 457 bp, Homo Sapiens
tctcaggctccatattccatgtccctgttgaatacagatccccgaactgagaaataagaaacaactacatacgaagtaatacttgaaaatgtttctcttgtaatacttccatatccaaagcatttgaatatatttattttattgatgtaggtctgccaactcttccttctcaggaaggactgtttttattccaaacatgtatatataaggttaaaatgtattttttaaaataagataattattgatagttgtttttaaaatagccttgcttagcaaaataaatgttggcaaccctaagtttgttctattataatattattgaaattacattgaattctgaaatccatgtcaacttgaagttaccaagttttaaccactgttagaaaataagcaggaatgaaatctgtttcaagcgtttcaatttcaatacaatttaataaacaggctttgagcatct

SEQ ID NO: 363052 - DNA, 557 bp, Homo Sapiens
tgcatttgtcacacttcctcggacactaatttggatagttcaggcccagagacggcttcccgggttagtgtgcctgacaacactgaagaaaaattgtgacattttccttccccagaattacttcgttttatacatttcacttctcttctgaaatcacagcaatgccagtttgcgccttttggtctgaggaacgcaggccctggccactaccaggaaaaagtatttacttttaaaacttgaatgtatatctttaccgtatgcctagtacagtagtgcttggaagaaacagattagtaagacaaaatatatgtcttcaagaacacttacgttctgagaaagaattctgaatgcagattctaatgtctggtaaaatgctttacagtgtaaagaatgcatatatgattcttattttatggcattttaaactttccaccccacggttttaaagtgttaatatatgttaaaaatatatgcaatttataaaggagaaggaaagcccagcttgatttttgctgccaaagatggtatatttaaaattaaacgtaactaatggcaaa

SEQ ID NO: 363053 - DNA, 565 bp, Homo Sapiens
  misc_feature (30)..(30): n is a, c, g, or t
atgtgtcttatctagctagtatactctganaatttgagtatttaatattaggcatatgaagtggttgttgggaaaggagattccttcagaatatttagaatagcgtttaaggctctcaaggcttaggtatttaccatgagatggttgtggtcagttgcacctgataccatgtatccctgaatcatgtgtatttttattagtaatgcagccactaccattgctgatggggtctgtgtcctagtccctgtgggattggccttctgaagaaaagcacatttatggtacacaaggttgattctcagtttggtaggctctatagttccatcccagctgtctaattctgaagtgctccagtcttattggtgcccaatggggtaatctgtgcctcttccccaaaagcaatgacaggcaccagtgtctccacatttagatatattcccagtctctgtacatttaacagtactctctggggcaagcaataagtaggaccttgtgtgcagtttcattgtagagacatgtatatctgaggaataaaacagcttgttctgtgtcagtctgaaaaaaa

SEQ ID NO: 363054 - DNA, 489 bp, Homo Sapiens
gcggccgcgttgatccacagggcgctggtcagaaagcccaggaaagcaaagagccagtgaagcctggggggctggctgtcagatgtggcaaaaaaggtcactgaagccaaggctgtgcctgcgatcaccaccacgacccagacgggaacgaggccgcctatctcatagacaccataggtccccgactgcagggtcaggaccacaaccagggggctgataaccagatgcagacagttgaggggccgtttccagttctggtcatccttgtccgggtccacgacggggactgtgaggagcagcaggaactccacaggcagcttgaacaccttgagggctttccagtatgctgatttccttctccacttcatgtaatccaggggattgagggcccggaccagggtctgagccgtggtctcctgggtagaagaacagcggccggtactcattcaccgtagtcattagctgtttggtatttagaaggtaccccgt

SEQ ID NO: 363055 - DNA, 474 bp, Homo Sapiens
  misc_feature (421)..(421): n is a, c, g, or t
gcccctgctgctgctctgcgtcctcggggcgccgcgagccggatcaggagcccacacagctgtgatcagtccccaggatcccacgcttctcatcggctcctccctgctggccacctgctcagtgcacggagacccaccaggagccaccgccgagggcctctactggaccctcaatgggcgccgcctgccccctgagctctcccgtgtactcaacgcctccaccttggctctggccctggccaacctcaatgggtccaggcagcggtcgggggacaacctcgtgtgccacgcccgtgacggcagcatcctggctggctcctgcctctatgttggcctgcccccagagaaacccgtcaacatcagctgctggtccaagaacatgaaggacttgacctgccgctggacgccaggggcccacggngagaccttcctccacaccaactactccctcaagtacaagcttaggtggtatgg

SEQ ID NO: 363056 - DNA, 589 bp, Homo Sapiens
  misc_feature (12)..(12): n is a, c, g, or t
  misc_feature (55)..(55): n is a, c, g, or t
  misc_feature (130)..(130): n is a, c, g, or t
gccctgatctgnaaagtcagcgataacgagtcgtcatctaactatacctcaagantacatgtgccgggggagacagattcttccaatctcaacgtcagtgagcctcgcgctgtcatccccggactccgcntccagcaccttctacaacatcacagtgtgtcctgtcctaggtgacatcgagggcacgccgggcttcctccaagtgcacaccccccctgttccagtttctgacttccgagtgacagtggtcagcacgacggagatcggcttagcatggagcagccatgatgcagaatcatttcagatgcatatcacacaggagggagctggcaattctcgggtagaaataaccaccaaccaaagtattatcattggtggcttgttccctggaaccaagtattgctttgaaatagttccaaaaggaccaaatgggactgaaggggcatctcggacagtttgcaatagaactggatgatttgaacacctgcctggaattccatcatctgaaacagagttggcagataagaatggcccctatgccaaatttggctcattgtctgtttttgtaaataaagttttattggatcac

SEQ ID NO: 363057 - DNA, 507 bp, Homo Sapiens
  misc_feature (429)..(429): n is a, c, g, or t
gcggccgccgcagtcccgccggcagccgccgccaaccaccaccatcaccaccaccatgcgctccacgaggcgcccaagttcaccgtggagaccctggagcacacggtcaacaacgactcggagatctggggtctcctgcagccctaccagcacctgatctgcgggaagaacgccagcggggtgctgtgcctaccagacagcctgaatcttcacagagacccacagcggtcaaacaagccaggggaactgcccatgttcagccagtcggagctgaggaccatcgagcagtctttgctggccacgcgcgtaggcagcatcgccgaattgagtgacctggtgtcccgtgcaatgcatcacctgcagcccctcaatgccaagcaccacggcaatggcacccccctgcaccacaagcagggggcactgtactgngagcccgaggccctgtacaccctttgctatttcatgcactgcccacaaatggaatgggaaaaccccaacgtggagcct

SEQ ID NO: 363058 - DNA, 526 bp, Homo Sapiens
  misc_feature (135)..(233): n is a, c, g, or t
cccacaccaaagacaggggcagcgtagtattcaaaccagtattgtggtggggaataattgtatacatgtaaattatcaagccctatgagtggaagaattttttcaaattatttttgtctctctatatattgattnnnnnnnnnnnnnnnnnnnnnnnnnnnnnnnnnnnnnnnnnnnnnnnnnnnnnnnnnnnnnnnnnnnnnnnnnnnnnnnnnnnnnnnnnnnnnnnnnnngtatcccctagtattggatcatgaagagctcttcatgcattctttgcaaaggaggttataaagttacgccctcagaacatttataactataagaatgtgccagttaaagtgctcaacaggaaatatgacagtttaaaagcattgtaaaactcacatagcttacttctctctctaaagtgcaacaaggatgaatagaatgggccaaggtatgacaattaatggttctgcatgacctagccactgctgggggttttcttctataacgttgtccttgtgaaaacttttgtgaaatt

SEQ ID NO: 363059 - DNA, 1140 bp, Homo Sapiens
  misc_feature (621)..(765): n is a, c, g, or t
  misc_feature (778)..(789): n is a, c, g, or t
  misc_feature (815)..(824): n is a, c, g, or t
  misc_feature (885)..(946): n is a, c, g, or t
  misc_feature (1016)..(1024): n is a, c, g, or t
  misc_feature (1072)..(1098): n is a, c, g, or t
gctggggggcactgtcaatcagccaggtttcattgtcgtgaaaccaattaccgactgtatgcctacacgagtcgggagctgcagattgccctcattgccctcttctctgagatgctctatcggttccccaacatggtggtggcgcaggtgacccgggagagtgtgcagcaggcaatcgccagtggcatcacagcccagcagataatccatttcctaaggacaagagcccacccagtgatgctcaaacagacacctgtgctgccccccaccatcaccgaccagatccggctctgggagctggaaagggacagactccggttcactgagggtgtcctgtataaccagttcctgtcgcaagtggactttgagctgctgctggcccacgcgcgggagctgggcgtgctcgtgttcgagaactcggccaagcggctcatggtggtgaccccggccgggcacagcgacgtcaagcgcttttggaagcggcagaaacatagctcctgagagcgcgggacttggacacggacctcggcgggcgggactgggcggggcggggcatcagaactcaggtgttttttatttacgcgtcagggcttttcttgtttaataaagttatgatagctnnnnnnnnnnnnnnnnnnnnnnnnnnnnnnnnnnnnnnnnnnnnnnnnnnnnnnnnnnnnnnnnnnnnnnnnnnnnnnnnnnnnnnnnnnnnnnnnnnnnnnnnnnnnnnnnnnnnnnnnnnnnnnnnnnnnnnnnnnnnnnnnngctgtgggggggnnnnnnnnnnnntaaaaaatttttaaaaactttttgtnnnnnnnnnncccccaaaggtaagggaaagggggcttacttttttccaaaaaaactccgggcatgaaaagnnnnnnnnnnnnnnnnnnnnnnnnnnnnnnnnnnnnnnnnnnnnnnnnnnnnnnnnnnnnnnggggggcccggggggcttccggggtctttttccaggggtggccccgccgcgcccccaaaaataaaatttnnnnnnnnngtgggcgtattttttgaaaaaatgggggggaatcattttaaacacctnnnnnnnnnnnnnnnnnnnnnnnnnnnacacggggggggagaacactcgaacgcccccggggggattaa

SEQ ID NO: 363060 - DNA, 1041 bp, Homo Sapiens
ttttccgagatagccactcctgctgggctttcccagggtccctgggcggagggcaggagcatccagttggagttgacaacaggaggcagaggcatcatggagggtccccggggatggctggtgctctgtgtgctggccatatcgctggcctctatggtgaccgaggacttgtgccgagcaccagacgggaagaaaggggaggcaggaagacctggcagacgggggcggccaggcctcaagggggagcaaggggagccgggggcccctggcatccggacaggcatccaaggccttaaaggagaccagggggaacctgggccctctggaaaccccggcaaggtgggctacccagggcccagcggccccctcggggcccgtggcatcccgggaattaaaggcaccaagggcagcccaggaaacatcaaggaccagccgaggccagccttctccgccattcggcggaaccccccaatggggggcaacgtggtcatcttcgacacggtcatcaccaaccaggaagaaccgtaccagaaccactccggccgattcgtctgcactgtacccggctactactacttcaccttccaggtgctgtcccagtgggaaatctgcctgtccatcgtctcctcctcaaggggccaggtccgacgctccctgggcttctgtgacaccaccaacaaggggctcttccaggtggtgtcagggggcatggtgcttcagctgcagcagggtgaccaggtctgggttgaaaaagaccccaaaaagggtcacatttaccagggctctgaggccgacagcgtcttcagcggcttcctcatcttcccatctgcctgagccagggaaggaccccctcccccacccacctctctggcttccatgctccgcctgtaaaatgggggcgctattgcttcagctgctgaagggagggggctggctctgagagccccaggactggctgccccgtgacacatgctctaagaagctcgtttcttagacctcttcctggaataaacatctgtgtctgtgtctgctgaaaaaaaa

SEQ ID NO: 363061 - DNA, 463 bp, Homo Sapiens
ttggaagagcagcagaaaccttgggatatccttgtgggtcaaggaggcaactctcctcacggattccctgatttgataacaacatactcatggaaacaccaatccaagttttcacaagtttctcttaaagttaacttaagacttcctagaccaagaattcctaccacgcaaggcctgtgaaaatattgtaaacttaatatccgacagggagatattcaaagatgccaaagtacctgtttttataaatattaccacatggtttaagatttgacttctcacataaaatgagtaaaaataacaatgatttttctgcagtaccttaatgatgctgtaattatgaagcagggttttaaaattctgccatgtagtgccttatttttatagtaatgttttctatgaaccttctaatttaatgtgtattaagagatttaaagagtatgtaattaaaaaatatctttccaac

SEQ ID NO: 363062 - DNA, 1600 bp, Homo Sapiens
  misc_feature (983)..(1008): n is a, c, g, or t
  misc_feature (1170)..(1179): n is a, c, g, or t
gcggccgccgccgtggccaaggcggcccccgcccccaccgccagctccaccatcaacatcaacacctccacctccaagttcttaatgaatgttataactattgaagattataagagcacatactggccaaaattggatggtgccatagatcaacttttaactcagagtcctggtgactatatccccatatcctatgaacagatatacagttgtgtgtataaatgtgtatgccagcagcactcggaacagatgtatagtgatctgattaaaaagataactaatcacttagagagagtctcaaaggagctgcaggccagccctccagatctctatattgaaagatttaatatagctcttggacaatatatgggagcattgcagagcattgtgcctcttttcatatatatgaataagttttacatcgaaaccaagcttaacagagacttaaaagatgaccttataaagctgtttacggaacatgttgcagaaaagcacatttacagcctaatgcctttacttttagaagcccagtcaacaccatttcaggtcacaccttcaactatggcaaatattgtgaaaggcctgtataccctcagaccagagtgggttcagatggctccaactctattttctaaatttattccaaacattctccctccggcggtggaatctgaactttctgaatatgctgctcaagatcagaaatttcaaagagaacttatacagaatggttttacaaggggtgaccagtcccggaagagagctggggatgagttggcttataatagctcgtcagcatgtgcaagttccagggggtacagatagtgaatgtattgaatatgctttccttcctgaaaagaggacacactggagctgcagagactgtattcagagcacagtgggggctgcacacactcaggagctctgtcacaaagctgttcatggaagaggatgttggacttcttacttggtttgtaattttnnnnnnnnnnnnnnnnnnnnnnnnnncgttgctgctagacttgggggtgattttgaaatgggacaatcttttaatgagtttatctacagattctgtgaggaaaaagcatctcagaaagtgaccatttctaagtgaaatctgacagccaaaatcagcagcttcctccaaaaatataagagcagaagaannnnnnnnnnaagcacttgtttggttcattggtggactgggcatttgggtgtatgggtttcacatgtcaggatctctttggctttaaaaccaagcagatcattacagtacagtatttttcacccacaaccaaaacaaccccttttaaaagagtgggtcttggtttagcattagaaagtctgtgtaaagggaaaatgctaactctgctttggctagaactttcccccatcagttcacaactttcttctactctgtgccttgagcttggtgcactttgcaactgtgtgaccatgttgtcaaactcctccgtggagaagtgtatggtatctaaactcacccaccaagatggcaggtgtggccctgtagcaggatgctaattaagtgggaaaatagaaaccttttgcacatgggtcggattttcccctggttcac

SEQ ID NO: 363063 - DNA, 384 bp, Homo Sapiens
tatttaaaatgttctttttttatttgtcgtttaaaaacaaacttggaagaagcaaaatccaaaacttgccctttgcctctcgcaacataaatatgtacagttcagaatgatcgctgatacaaaacatgccaaggacaggggcgctgagggtggagggagagagggcgctttaaaaaagggaaccatttcatccgttgttacgaaggaccaaccttgctgtacaggatacacacaacacaaaataaagtcttcacgggattcacacttgtcagcgatttattttttaaaaagggggagggtcctggaggtgaggggagaagactgtaaaggggaaaactgaaaactgagtatgtgcgagtgtaaaccaacccaaaatacaaacac

SEQ ID NO: 363064 - DNA, 1393 bp, Homo Sapiens
gcggctggtacggtccggaagttacgggatatcgtcgaccacgcgtcggcggcggggacggggtcagtgccaagatgtcgacggcggcggttccggagctgaagcagatcagccgggtggaggcgatgcgcctagggccgggctggagccactcgtgccacgccatgctgtacgccgccaaccctgggcagctcttcggccgcatccccatgcgcttctcggtgctgatgcagatgcgtttcgacgggctgctgggcttccccgggggcttcgtggaccggcgcttctggtcgctggaggacggcctgaaccgggtgctgggcctgggcctgggctgcctgcgcctcaccgaggccgactacctgagctcgcacctgaccgagggcccacaccgcgtcgtggcgcacctgtacgcgcggcagctgacgctggagcagctgcacgccgtggagatcagcgcggtgcactcgcgcgaccacggcctggaggtgctgggcctcgtgcgggtcccgctgtacacccagaaggaccgagtcggaggcttccccaacttcctgagcaacgccttcgtgagcacggctaagtgccagctcctctttgccctcaaggtgctcaacatgatgcccgaggagaagctggttgaggccctggctgcagccaccgagaagcagaagaaggccctggagaagttgctcccggcctcctcttgagggctgcctgagctggtggcaccctcccctgggccggaagactgggaattcctgctaagtgtggcttctagagtgtttgtgtgtaccccgcttctgactgcctagggcgagtgggcatcctgtcatcatctccactgtcccaagcagtcactaggtggcggccgggccagctggaacccagcccatcctctcaggcagagcagggtggtccgggcacactgggcctgcctctccagcctcaggatgctcttgtttattctgggctcagaccctcctcttgtacgtctcatcacagctggtagagacccaggagtgcctgattgtcccacaggggtggcgcacagctctgggaccactcagaagatgggatgtgtgggtggaggatgccttgtctcggtcagctcattcctgcctccttcctgagccagttcagggcctgggggagagccagcttggggtaggaagttaataatactgttaatttgggttgttgttggatttactttgctagattttctctttcaccacgtgtgaactgtgggtgaggtttcaaagtagcttcaccccacgtggcttggttcccagggacagtcagggcctcgggggcccagctatgtacaacgaagctgtcgaaggagaagacaataaagtcgctccgcagctgctctgtgtgttaaaaaaaa

SEQ ID NO: 363065 - DNA, 842 bp, Homo Sapiens
  misc_feature (343)..(378): n is a, c, g, or t
gggtaaacacaaacactctagaaccccacacttagcaggaattcccagtcttcccgcccaggggagggtgccaccagctcaggcagccctcaagaggaggccggagcaaattctccagggcctttttctgcttctcggtggctgcagccagggcctcaaccagcttctcctcgggcatcatgttgagcaccttgagggcaaagaggagctggcacttagccgtgctcacgaaggcgttgctcaggaagttggggaagcctccgactcggtccttctgggtgtacagcgggacccgcacgaggcccagcacccatcggtgccttccacggggccagagccaaannnnnnnnnnnnnnnnnnnnnnnnnnnnnnnnnnnnacctccaggccgtggtcgcgcgagtgcaccgcgctgatctccacggcgtgcagctgctccagcgtcagctgccgcgcgtacaggtgcgccacgacgcggtgtgggccctcggtcaggtgcgagctcaggtagtcggcctcggtgaggcgcaggcagcccaggcccaggcccagcacccggttcaggccgtcctccagcgaccagaagcgccggtccacgaagcccccggggaagcccagcagcccgtcgaaacgcatctgcatcagcaccgagaagcgcatggggatgcggccgaagagctgcccagggttggcggcgtacagcatggcgtggcacgagtggctccagcccggccctaggcgcatcgcctccacccggctgatctgcttcagctccggaaccgccgccgtcgacatcttggcactgaccccgtcccatcccgagaattccggaccggtaccagc

SEQ ID NO: 363066 - DNA, 1068 bp, Homo Sapiens
gggggggagcaaacctaggctaggtgcgaggcctgggtggcgaattcggcacgagggtcgacggcggcggttccggagctgaagcagatcagccgggtggaggcgatgcgcctagggccgggctggagccactcgtgccacgccatgctgtacgccgccaaccctgggcagctcttcggccgcatccccatgcgcttctcggtgctgatgcagatgcgtttcgacgggctgctgggcttccccgggggcttcgtggaccggcgcttctggtcgctggaggacggcctgaaccgggtgctgggcctgggcctgggctgcctgcgcctcaccgaggccgactacctgagctcgcacctgaccgagggcccacaccgcgtcgtggcgcacctgtacgcgcggcagctgacgctggagcagctgcacgccgtggagatcagcgcggtgcactcgcgcgaccacggcctggaggtgctgggcctcgtgcgggtcccgctgtacacccagaaggaccgagtcggaggcttccccaacttcctgagcaacgccttcgtgagcacggctaagtgccagctcctctttgccctcaaggtgctcaacatgatgcccgaggagaagctggttgaggccctggctgcagccaccgagaagcagaagaaggccctggagaagttgctcccggcctcctcttgagggctgcctgagactggtggcaccctaccctgggccggaagactgggaatacctgctaagtgtggcttctagagtgaaagtgtgtaccccagattctgacttgcctaagagcgagtgggcatcctgtcatcatctccactgtccccaaggcagtcactaggtggcggcgggccagctggagacccagcccatcctctcaaggcagaacaagggttggtcccggcacactggggccctgctctccagcttcaggatgctcctggttattctggggttcaaacctccttcttgtacggtctcatcacacgtggtcaagacccaggagtgcctgattgccccagggtgggcccaaggtcttggacctcaaagatgatgctg

SEQ ID NO: 363067 - DNA, 576 bp, Homo Sapiens
ggccgcaagtgcaactccagctggggccgtgcggacgaagattctgccagcagttggtccgactgcgacggcggcggcgacagtcgcaggtgcagcgcgggcgcctggggtcttgcaaggctgagctgacgccgcagcggtcgtgtcacgtcccacgaccttgacgccgtcggggacagccggaacagagcccggtgaaggcgggaggcctcggggagcccctcgggaagggcggcccgagagatacgcaggtgcaggtggccgccggatcccagccgcacttctggcgtgagtatccggactgcaggggccgggacgaggtcggtgttcgaatcttcccagctctggttggcccgcagcctggttagcaggtcctcgtagcgtttccgcaactctcggaatctggagtcttcggagtgcaactctgagggtcccgggaaacttgcgcggctcgcctcggccagagacagggcgcccccatgcggcagccacgagagcaccagcaacaccaagagcatctgagagccattcaccgtcctgagtccttgcccgggcatggctgtgcaggttgcggct

SEQ ID NO: 363068 - DNA, 1255 bp, Homo Sapiens
  misc_feature (139)..(168): n is a, c, g, or t
ggggatgatctccaaagtcgtttcaactcttaaagacatcttaatcctgaatgtaaacaattgttatgtgtttagaatcagaatttgattttgaacttgagtaattcatccttacagctatctgtagaattagtcatcnnnnnnnnnnnnnnnnnnnnnnnnnnnnnngttaataagcaaacttatttgctgcagaatttgggttgactcctgagcatatttaaaacaaagaagctagaaatttagcagtcagattaggtaggtggttttatttcaaagggaaactttaatccaaagaaagattaattactctaacaaacaagagaagcttcatgtttgatgatacagatttaagaatacctgagacttaagagtgttggaagtcatttgatagaaagatgagatcggagacaatgttgtgttatagggcacacattgaaggtatatgccaaatctctcaccagataagtccttttctccctgtgccgttttcttgctcaaagggaacagtgaattagccagctagaatcttcctggtccctttttgaggcagtagcaggtaaggaaagggctgattttcatcaaaaccaagacctttctgcagggatgatagtggaataataatgtgggattagcccgctagcattaggagcagttgggaagttacctggtagatcaagcattacacacaaaaaatcaagttgatcagagtatgggttctccatatagcaatacttcagtgagattaagtataaacagtttttggcaaaaaacaacacagtctactctttctgcttacaaagacaaagccttacaaactcactatgaaggtaaagggaggacagcttgcttctttgcccagacatttacaaagttgtttttaaaacacactcataagtaagtttggcaagttgtttaaaaaatgtctctttgttttgtacagttctgttagatgttgttatattttaaaagtttaatttaaaaaatttaatttgtccttcctaagaaggataaatatataaaaaagccactggaatgaaaacttcctatatgctatgctgttgtcttattattatatagaaaaataactttagaaaaatattgaagacattgtattaccacttgtgattcaaacaattttgtggttaaaactggattttaaatttaaaaatcaataaaaatttcaaatgtttattaccttcctcggtgccataattttgactttatcttcaaataaaatccttcattaattgtg

SEQ ID NO: 363069 - DNA, 457 bp, Homo Sapiens
  misc_feature (14)..(14): n is a, c, g, or t
  misc_feature (82)..(82): n is a, c, g, or t
aacgggttttgggncaaaaaaacaaccacgggcctaccccttccggcctaaccaaagaccaaagcccttaccaaaccccacnatgaagggtaaaggggagggaccagcctgcctccttggccccagacatttaccaaagttgtttttaaaacacactcataagtaagtttggcaagttgtttaaaaaatgtccctttgttttgtacagttctgttagatgttgttatattttaaaagtttaatttaaaaaatttaatttgtccttcctaagaaggataaatatataaaaaagccactggaatgaaaacttcctatatgctatgctgttgtcttattattatatagaaaaataactttagaaaaatattgaagacattgtattaccacttgtgattcaaacaattttgtggttaaaactggattttaaatttaaaaatcaataaaaatttcaaatgtt

SEQ ID NO: 363070 - DNA, 462 bp, Homo Sapiens
atgctggttcccggaatgaatcagctgctgactgtctccagaagggctggaaaggatgctgccaggtgacccgaggtgcactcgccccagggagatggagtagacagcctggcctggccctcgggacacattgtctgccccgggactatgggcaaatgcccctccttcttacttcccagaatcccctgacattcccagggtcagccaggacctgttacagccctggtcacttggaactgacagctgtgtgaggcctgcacttctcagacccagacttagaacaaaaggaggagtgaggactcaaggctacaatgaggttccagtacttgttacaagaaattggttttctgcaaaaaaagtccctacctgggcctttaggtgaatgtgggatccactcccgcttttaacatgaaagcattagaagatgtgtggtgtttataaaagaacagttgtcatcaccgg

SEQ ID NO: 363071 - DNA, 237 bp, Homo Sapiens
tgagccaccgcgcccggccttaagggttcatctttaaataaaattgatactaaatcaattattccattggttgctttaaaactggatcaggtgaaattttttgaaattaggttgaatagtctacagccataccaccctgaacacacccgatctcatctgaaattaggttgaatattttcacagagaagcagtgataccaagtactatcagaacagaactcttagtttgtaacaaagg

SEQ ID NO: 363072 - DNA, 515 bp, Homo Sapiens
gcagtgcgctggtgctgcctaacagaacgcacactggctgtcactaggaagcgccatacggttgctatcacccaacatggtgaaagggtgatggatttcactgtgaatatgccaaggacacctctaaacttcccccatgtcagtcagatgaagttactactatatttcaccaccctgcaggtaactgaaactcaattaccgctgccgctcactcggttccatccccctgagtttagatagctctggtgcctctcagaactcccctgtctgttctctttgctctatcccaggggtgagcctgcgagagccagccaactaccccttcttcccagagctcacttatctgaacgtttcagctctccctggaagaccttttgcgttggtctccagagcccccatgctgaggctactaatgaggaactggcccgaagcctcccacacctcagggtttatttgaatacgctggcgctctcagtttagggctctgtagaagatacataatgaaatttctcttg

SEQ ID NO: 363073 - DNA, 654 bp, Homo Sapiens
tacaccccttaacagagccagtgccaacaaaacattttgaatggacttagggcccatgaggttgtggctggcttaggcagcaacctccacattcccacaggccttgagcagaattttctgagactgaagggaaatcccgctttctttctaccagccctgcaagtttcctcatggacgctcgcgaggagcaggctgcaggtttcctgcctatggtgagatcagatgtggccaagggaaggagctctggttccagagaatttgcacaaagttccctctgtacagagacaaaacggcctccggctctcagagcataatccttggcagggctcagcaggcgcacgttggtttcttggtcgtcctttgagtgacaacttctccgtgaacctgctgaaagaggcagaaaggctgtggaaagctgtatttccattcttgggtttctgcgccgtcggtgggcacttgttattttccaggaaccttctcctggtgtctacatgtttgcttagaggcggctccaagagcccccagagctgcctgcatagcacaccttagatgtggtatttattttcttagttctgtgaacacctgggagggagagcggagaaactgggatttatttttcaaattggtgtcataatattgtgtaaaaagggaagg

SEQ ID NO: 363074 - DNA, 393 bp, Homo Sapiens
tgagcgggcctcccatccctcttaaaagagttaggcatttagccatgcctcccacccgggaccctttccagcagcctacattagataacgatgattcctacttaggagaactgcgggcttccaagaaccaagatccaattccctggagaatttttaacccctcccactccacccatcactttcctggctaacatcagacactggatcaaccctaaaaaggagtccatccacagcatccaaggatccatagtgtcccctcacactgcagccaccaatggaggctactcccgaaagaaagatggtggcttcttctccacctagtgttgacagatccctgaactaattatagtgaaacatactgcggcccacttccattaaatagatttgggcaag

SEQ ID NO: 363075 - DNA, 1381 bp, Homo Sapiens
aaccggttacatccgagtattactgagcctcaaaatcaccctttctgtcagcatatcttggccctctcccatgtctcagtgttgcctgcatttctcccatgacttgggggtggggtgaaaagcgctacaaaagatacttaaaacggctcctgaggtacacaagcgcaggaggtcctgcagtgaagccgtgggcccttcctataatgctcgcttttatagcaacctctcgtctacctctaggttctccaaagttcactgtctgcgcgttacctctacggttatgatatcgtggccagtgattctggacatagtaccaagaaggcaagagttacatactattctctactagtaataatttaaagttataactaacatattgccaaatgctttcctttagcattgttccaagtctaaatgttaacctcaagctactgcaatttagacaatgaaatgaggctgggtctacccccagaccaccagccctcatcctctctacccagtgctctggtttatgcttgtctcctgactgctctgcttacaaggtgaaagtagcaggaacaacagacaaaagccaaccaaaaacacaggtagccagtgcaagacatctcactcttctgacatcctgcagtccccaccagtcctgaccgtgggcccctcaggggtctgggagtgtgacgttgtaatcttcatccgtctctatcccaacttcctcaaagaactgcttcttgctcttggggtatccttcaagtattgcatcagacagctctgtagccatcctcgttcctcttcctccactccttacagtacttctgcctctctctgtacacctgctctttctcttctggagtcacatgattggtagctgctttaatgttcttcaatctctctctgtagccagcgcattccttctttaactcctggatttctttctgcatctctggtgtggtcagggcactagataattccttgagctcagcctccatgtagcggcagctctgctgcaagctctgcaccttagcagtgagggccacgattttgccatctaggacttgaaggtcagcatcactcaccatgtcaaactggtcctgatccgcaaaatagatcttctgcttgccgtacatcttctctttgatcttgccttgttgcgccagctgctccagcgtcttcaccaccaccgccttgcccagtccgtgttcccgctgtaggttcccgaacacatcctgggagctgtagggccggttctgctcctgcaggtacctcaggaggatcccggcggctcccgccgcagcttctgcccggcctttactcatcgcctttcccgccacccaactcagaaagccggacgtggtagtggggtggcatcgataaacaccgggtaccg

SEQ ID NO: 363076 - DNA, 1250 bp, Homo Sapiens
  misc_feature (178)..(178): n is a, c, g, or t
  misc_feature (186)..(195): n is a, c, g, or t
  misc_feature (688)..(727): n is a, c, g, or t
  misc_feature (762)..(771): n is a, c, g, or t
aagtggtttgtcgaggagtgaaggggtgtaacgaagagaatgagggcactgtaccgggagtaaaaatcggagtggcagcggaatttatataggagggatgcgcaagggcgaatagttccgcatcagggtacacggagggggttaaagcatggagatgatgagaagggggtcggagtanggtatacnnnnnnnnnntcggaagcgaagcgttttgagaaggccggcgcgtgatgggggacacatgggcgtatgagcaggcgtgaagtcctaggagggatgtataaggagggtgggaggtcatacacgagcgggtggtgaggaatgtgcgggagaaaagaaaatggggagggggtacagaaagaggtggttcgttaacggagcaaaggggctgtgggcgagtggggatgttagggccgtggttgtgtagggttagagaataggccgaaagggggggcctcgacgagggtagtggaattctctggtaggggggagtgttcggcaagagaatgggggccccccagaagggtaagggtggtccagctacgagaggtcgccaaaaagtaacgagtttttgcgccggcaaaagaatgttttaaaaagtacgggccaaaggccctgaaatttataaagaggactctctgatagggggccccttgttccaaagaaaaatggggtacgggaaaagttnnnnnnnnnnnnnnnnnnnnnnnnnnnnnnnnnnnnnnnnggaatagtagattgtcggcggggagtgggtgatcnnnnnnnnnnttgggagttgtgggtggcggggttttgttacatattggaaatttttaatttttctaaataccaatgcagttttgctacggttacaattttgaaatattaactgagcctcaaaatcaccctttctgtcaagcatatcttggcctctcccatgtctcagtgttgcctgcatttctcccaggacttgggggtggggtgaaaagcgtacaaaagatacttaaaagggctcctggggtacacaagcccagcaggtcctgagtgaagccgtgggccctccaaatgctcgttttatagcaacctctctctaccctagttctccaaattcacttctgccttcctcaggtttgatatctggcaggtttgactatccagaggaaattaaatatttttatataaaattaaattataataaatattgccaaatgctttcctttagcatgttccaagtctaaatgttaaccatgccagggaattccggaccg

SEQ ID NO: 363077 - DNA, 295 bp, Homo Sapiens
tgtggtacaacaaggcaagatcaaagagaagatgtacggcaagcagaagatctattttgcggatcaggtgaggagaacttgcgccgattgtcacccatgagagcccgacaacgggtgaatctactcctggtgtgaactctttggggacaaggccccccatggaaaactcacctgtcttaggccaccatccttaaatcaaggtgtgtactcctcttgttaggatcccaacttcacgaggtttccagatttacaatatgatggatgacagaagattctgtattgtgctatacacagg

SEQ ID NO: 363078 - DNA, 754 bp, Homo Sapiens
ctggcctaggcagttgtcctgaccttgagaagacatagatgaagcattttatcatcattagacttaatgtttaattcttcagaatgtcagaagttgataggttgttaaatacatttatataatacattaaatatgtgaaattaatacaccttcctacattttgaaggtgatgcatagatgccatagtgtgcatcatgttccttatatgaaaacgtttaaagtactgggtcttttccattaaactacttttgtatggcttagataaatcttccattagtgttcatttttatagaattatgctgttaaaactactttaggtgaacaaataaacttgtctattatatattaacgcgactgaactacagtaaatgtttgtgatgtttccaatgctgaatgcctgttagcatatgaggcaaagtgtagtgttataaaaaacagcctgttgactgctgggcccgattctgatatgagttaggtgaccatgagaattgctgtttgaggtccacactgacacacacccattgggtcacaccccctttgcatgtttgtatttcctccctttcatcacatttgtttgaaataaggtacttttatagggttggtatttcagaacactttaggtcatgttgtagtttaaattcttcttgaaaaaggtatatgtgataaataaaaatttttattggaataattattacatggtactacatcaccctgaggaagagaataaattaaaattacacacttgcatggcaaa

SEQ ID NO: 363079 - DNA, 652 bp, Homo Sapiens
  misc_feature (86)..(100): n is a, c, g, or t
  misc_feature (109)..(224): n is a, c, g, or t
cccggggtttttttggaaaaaaatttggcccttttttctttccttggggggcccgccccccaaaagattgtttaaaaaattttttnnnnnnnnnnnnnnncccaaaaannnnnnnnnnnnnnnnnnnnnnnnnnnnnnnnnnnnnnnnnnnnnnnnnnnnnnnnnnnnnnnnnnnnnnnnnnnnnnnnnnnnnnnnnnnnnnnnnnnnnnnnnnnnnnnnnnnncactatagaaaaacctttaataacaacttcagatttacatgacccttctggtgctcagaacactatggattaacacacacactggaaagatacagacacaggaatctgctgcattaccccaaatggcaaagtcttgactggggcttcagctcctttcccaatccaaaattggcacctttttccatggaaattcaaactgcatctctaaatgatggggtacatgaactgtctgtttcaaaagtatttaaaaacaaacaggaagtacagcttccatttcattaagaaaacaccaccacaagacatggtgcagtatctactagcttaaagtttatcactccattagggcttattgacagcaaaaatgtgaatgtagtaatgtagaaataaggaagagagcacttaagaaaaaaacagtccagaagttttag

SEQ ID NO: 363080 - DNA, 577 bp, Homo Sapiens
gtggaggggacaaagaagcagagaaggatgatcagaaggggacccccagcccttggaggagagacggcagcctcaggccgccacaaaggattttgtggagtcgccccaggcctgacggcgttaattatccctggctttcatcttgatgctcttgcaggggaggctcaagatgccttgtggctcgacccctgcacggagcccccagcccagcctccccgtgggttgaaaccttgatctgggcctgactgtggctgctctggggacatgccctcgtcctttgctgaagctgaggctccagagggggagtcactgccacgaaggttgcccagaactttccttgctgcaaaaagccccaagacttctccctgccacacacacagcttttgccatcgcgttctaaaagctgacagctttctctccaacactgttctccctgagtagggtaaagctacacttggcttccccagtttcctgtttcctgcctagaaacaaatttttgtcagtctgcttttcaaatgggatatatgattcacataccataaaattcaccactttatatggagaaagacgacaaacg

SEQ ID NO: 363081 - DNA, 990 bp, Homo Sapiens
  misc_feature (932)..(932): n is a, c, g, or t
cttaaacaacccagggttccattaagtgattttgacttttcctggtttaaatttctacattcagttctcagcttgagaaattgattgaaaagaattactttcttcataagtcagcccaggaagcatataagtcatacatacgagcctatgattcccattctctgaaacagatctttaatgttaataacctaaatttgcctcaggttgctctgtcatttggtttcaaggtgcctcccttcgttgatctgaacgtcaacagtaatgaaggcaagcagaaaaagcgaggaggtggtggtggatttggctaccagaaaaccaagaaagttgagaaatccaaaatctttaaacacattagcaagaaatcatctgacagcaggcagttctctcactgaacacatgccttcctttcatcttgaataactttgtcctaaaatgaattttttttccccttgatttaacaggatttttgtagactttagaatttggacttacctaacaagagtataaattgacttgggttgcaagcactgagcactgttacttctatcacgtctctcttttatttctgggatataaaacaggctttaagtttcttggttgcccaagggcagagcaaggaatatctggtgtttcttgtgatgataatattttaattttaaatatccctccctcatacaagtgtatgttaccattttaatataattctttttgtacctttccttcttgttttgtgaagatttttgtggcatggattgctgtgctcactgctgtaaaaggtgacctagtgtactgggcagctggtggcggtgcagaaaaagagtctcaggttattttttgtttttagttatttcttgggaccttgacagtatctaaatgactcctcctgaaaaatgctggcagtataaaaagaggcaaagaggctttgggggaantacctaaggaaggcaccttaaggattaggggtgggcattggcttttataggattcttt

SEQ ID NO: 363082 - DNA, 174 bp, Homo Sapiens
cccctcccccacccaccaccgctcccgcggcaagccagcccgtgcaacggaagccaggccaactgccccgcgtcttcagctgtttcgcatccaccgccaccccactgagagctgctcctttgggggaatgtttggcaacctttgtgttacagattaaaaattcagcaattcagt

SEQ ID NO: 363083 - DNA, 316 bp, Homo Sapiens
gcgcccccgctccccctctctctcctacctcggttaaagcccatagcgaaggcccccgcctcgtttccagatatgaatttgttttaatagattataaatatgccatatacagtgtatgtataaagcagaatgccctgcctttccctggttattttttgtaccatattgtaaattatattatttattctttaccaattttgggaataaaaggtgttttggttatttaatataataagagctgttaaacttctgtttaaatttccagttcaacttgtaaatgtttttattgtgcataaatacatactaatgttgatct

SEQ ID NO: 363084 - DNA, 558 bp, Homo Sapiens
gggagtgaagcgcccacccagcggatggacagcacccacctgggtttactcaagggtgtgcattcattttaggtgggatcgccacaggatttcatgttattttccctacggcttccttttcactgacctcatttgttgagttaatgtaagttaaatgtgtttatgatataactccactgtacatcatcctttgagtagtaaaggataaaagcatatatactacctatatgtatgtgctgtatgtgggcatttcattgagatctaattaatagctagcctatttatggttattcgttttagtaagttctgtgggagcaaggtatttaaaatcaaaactaataactacatcatggtttttgattaggatctaaatattcaggttttaagcctgctgcaaacttttaaaatattatgatagattctgtactacatgtgggaaacaagcaagaactaaataatcaaatgttgtcaaccaaaagtaatagttgggtattggagatttttttaaaatgtttttatgttattagctatttggagttaaataaaaacagaacaagg

SEQ ID NO: 363085 - DNA, 362 bp, Homo Sapiens
acaatcacatagttctttttaatactccactcttaaatataagcaagattaccaacgattgccaggcagctaaagaaagtctgtaacatgaaagattaaattgaagaacagaaagcagaaagacatatgcagggagatgaaagcttctacagagcatattaatatcctcaaagatgttgcaacaaggaacaaggtactgtccctatatatctacgtatataaaggaacaatcagagaatcaacttggagtaatcctccataaattatgatcaaaagaaaagaaaattggggttggggcacacagggaggagaggtaattctgggtccaccatctgagtaacagaaattccagaaagaaaacc

SEQ ID NO: 363086 - DNA, 797 bp, Homo Sapiens
gaggtgttttatgtcacgcacactccatcccagtgtacaaaacctgcttctcttctcaaccgtggcatctcccgctggctcctatgccctgccctaaagggctcttgagcctctgggaatgggaggggccaagagaaggaaaaccctgtctttagcacccttttaaaagaactgtgccccccttctcagtgctgcctttgcatgggcactggcccggctcgcactcgtcagtgactccaaccctcctgcttgctgtacttgggatgaaacgaccccacaggtcaggtggagggtggggcgtgggcatcaaccaggattgccgttacagtctttttctcaggagctacaaagatctctttcctgttactaaatggtcgcaccccagcagcctctctcgcacaccggggccctgcatgtcagatggcgtggtctgcagggggagctctgtgccttagtggctcttggcaggacactgagggcctgcctgtggtgtgcccggctctgccactcccgggaggggaagggctgctcagctcaaggtgtcctgttcggtagagcaagtgtcctctgacagccgtgtccccggacagttcagacacccttggggatggcactccacacacgacagagatgcaggggccagggaagcccagcgctcggtgcccttcgtccagggttaaaatcggcctgtggggtgtggtgagaaggcaggttgtgcgggtgttgaccgatgtatcttttccttaaagttattataataatgggtaatttgtcaataaagcattcctttgggggac

SEQ ID NO: 363087 - DNA, 493 bp, Homo Sapiens
agtacaaatctattgcaaagtaaaaagattctgtgcatcagttcaatcaggagaagcaggaaaagaatgtcccaaccataagagttcaagtttaagttgtgttctgaaagcctagaagcttaagggacaccatgttgctcacagtatcctgatatgcataactgcttaagctactaagctgtgtcttcctctggaactagaaccacattccaatttactttctattccgaagacgtttagatttcctaagagagtctatggcttccgtggccttttttcgtttccgaggagactcctcattctgcccggaccctgaggaatgtcctacagcactttccattacttctcgtagtttgcgttctagctctgccaaccgtgcattttgttcacctatgatctgggtctgctctagcagtttctggtcctgttcttgaagctgtttttgctgttgttgcactgtggtgcaaagctcataaatgtcacgcctgagaac

SEQ ID NO: 363088 - DNA, 719 bp, Homo Sapiens
  misc_feature (67)..(67): n is a, c, g, or t
  misc_feature (161)..(161): n is a, c, g, or t
gtggggcctctatcaagcagaagagactatacgtgaggggagaacgggaggcctgtcatgctcacangcagtgcgcacaagactgccaagcccaatggagaatgacataccagaccttctcccatttagccttaaccccttcttacggggacacttacacntgtgtggtagagcacattggggctcctgagcccatccttcgggactggacacctgggctgtcccccatgcagaccctgaaggtttctgtgtctgcagtgactctgggcctgggcctcatcatcttctctcttggtgtgatcagctggcggagagctggccactctagttacactcctcttcctgggtccaattattcagaaggatggcacatttcctagaggcagaatcctacaacttccactccaagtgagaaggagattcaaactcaatgatgctaccatgcctctccaacatcttcaaccccctgacattatcttggatcctatggtttctccatccaattctttgaatttcccagtctcccctatgtaaaacttagcaacttgggggacctcattcctgggactatgctgtaaccaaattattgtccaaggctatatttctgggatgaatataatctgaggaagggagttaaagaccctcctggggctctcagtgtgccatagaggacagcaactggtgattgtttcagagaaataaactttggtggaaatatt

SEQ ID NO: 363089 - DNA, 462 bp, Homo Sapiens
ttaaggggtcttcaagtaagtaaaacatacatcgtagctagaagaaaaatgtacccttaaatttgcatcttccctctcatacccaagctgtaaacaattgaaatattttgtcttaaatcacttggttcaatacatgcttatttgttttaaaacctgtatcatcaaactctctctctaaatttaaaatgctgttgaatatgatacttttgaggagagagtgtgctcagaacttagacgggatttggtaggccaagtatgctaagtgtacaatatattttttaattttacacctgaaacaaagaaatgtggtcactaaaaataaaagtatatatgtaggaattaatgtactcttgctttgtcaagctgtttgctatagtttccaaggtattatgttactctaactctgaaaagtgatgtaatctggtagcaatgtagtagttcaaataaaggcatttacataat

SEQ ID NO: 363090 - DNA, 984 bp, Homo Sapiens
  misc_feature (51)..(87): n is a, c, g, or t
  misc_feature (641)..(650): n is a, c, g, or t
aatgtatagactcactatagggcgaactggagcttatcgcggtggcggcgnnnnnnnnnnnnnnnnnnnnnnnnnnnnnnnnnnnnnatcaggccaaatcggccgagctcgaattcgtcgagagcggtccggctcccccatctgcccagcacggcctgcactgtgcccacccactcgccccacaacgtccagttggtcctgctgccaagagccccgtgcatccaggcggccaagcacaaactgggggagaggaggccgccagcccggaggctgcagcccagaaactctacctcatccacactggtgcagggagccctccttgaactgacctttgattggtttctgcttcaactaccaaaatgttatctccacttccccctcacccgtagaggatcctggccacagacagtttcaagtagtgtcagatttttgttgcttgggcggctgttggtagagtgggcagtgcccgcgccatggggtgctctgtgggcttctccaggagcagggagggtggaggggagggatggggggcacaggagctgggagccccgtctccaggaaaaggagaggggttaagatgcaccgaggctgtagctgggctacttgatcttgctgaaagtgtttctaaagatagcaccacnnnnnnnnnnaaagcttttatatattaaaaaacgtatcatgcaccaactgtgaatagctgccgcttgcgcagaggacccggggaggggtcccgagaggctccccatgcaacactggaaatgactgttccagagagcgggcagacctggcagagcgcccctggcgcctgagactaccacccactccgttcctgccagaaacgaccctctgtggccgatgggccatgcgggcccctcgcagccaactcagccagtgttgggactggctcagagcccatgggggctggaggggggcagctgggactctggaatcttctttataataaaagccttacggacaaaccta

SEQ ID NO: 363091 - DNA, 514 bp, Homo Sapiens
taggacactgccagagactgtgggacatacaggcataagtgatgtgtgtgtttctgcttctgttttaaaaatccagggtcattacacacagcatggaaattagcacaaaatgctgtgcaaacgtcagatgctcccaaaccagcaaagggatgggcttgcttcacatcagatgcgggcacgccttacccctgccttccgtgtccccaccccagggtcaagggttcctcagaccagccatgcctcctcctcctgccgcctccttctctagctcagatcatgccgtgtggccagaaggctgcggacacaactgacctgcttctcgaggtggttgatgttttaaacaggaagctccacggagttcagccctgtgtgcatttcctcatgtatgtaaacgccaagactgaatgtgagaggtgttggccgcgggccttaagtctgagcagatccatctggaatgttcggggtgtgctgtctggatgtggtgcgctaaaaacacggaataaagatcagtgac

SEQ ID NO: 363092 - DNA, 687 bp, Homo Sapiens
ggggtgactgacttcccagactctcctctgtccctcaggagcagccgtgtcctctcccaggccctaggacactgccagagactgtgggacatacaggcataagtgatgtgtgtgtttctgcttctgttttaaaaatccagggtcattacacacagcatggaaattagcacaaaatgctgtgcaaacgtcagatgctcccaaaccagcaaagggatgggcttgcttcacatcagatgcgggcacgccttacccctgccttccgtgtccccaccccagggtcaagggttcctcagaccagccatgcctcctcctcctgccgcctccttttctagatggggaggggattccgtcacaagaagagccgcccctcggccgtgtgcaggaagccccatgtcgctttgccgagatcagccctgggaggatccccttctccagctcagatcatgccgtgtggccagaaggctgcggacacaactgacctgcttctcgaggtggttgatgttttaaacaggaagctccacggagttcagccctgtgtgcatttcctcatatatgtaaacgccaagactgaatgtgagaggtgttggccgcgggccttaagtctgagcagatccatctggaatgttcggggtgtgctgtctggatgtggtgcgctaaaaacacggaataaagatcagtgacaaagcc

SEQ ID NO: 363093 - DNA, 342 bp, Homo Sapiens
gtgatgagggcagctttctggtacaggattctaagctctatgttttatatacattttcatctgtacttgcacctcactttacacaagaggaaactatgcaaagttagctggatcgctcaaggtcacttaggtaagttggcaagtccatgcttcccactcagctcctcaggtcagcaagtctacttctctgcatattttgtatactctcttacagccttaacaaccttgtaaatccataactagcatcttcctatctggcagaccctttacaaatgcattatctcaagcctcacaacaattctttgaggtagacatagaaagtgaaagttcagaaagggtttg

SEQ ID NO: 363094 - DNA, 769 bp, Homo Sapiens
  misc_feature (97)..(117): n is a, c, g, or t
  misc_feature (494)..(494): n is a, c, g, or t
ggcatttcaggagagcagcagttaaacccgtggattttgtagttaggaacctgggttcaaaccctcttccactaattggctatgtctctggacaagnnnnnnnnnnnnnnnnnnnnnaaaccctttctgaactttcactttctatgtctacctcaaagaattgttgtgaggcttgagataatgcatttgtaaagggtctgccagataggaagatgctagttatggatttacaaggttgttaaggctgtaagagtctaaaacctacagtgaatcacaatgcatttacccccactgacttggacataagtgaaaactagccagaagtctctttttcaaattacttacaggttattcaatataaaatttttgtaatggataatcttatttatctaaactaaagcttcctgtttatacacactcctgttattctgggataagataaatgaccacagtaccttaatttctaggtgggtgcctgtgatggttcattgtangtaaggacattttctctttttcagcagctgtgtaggtccagagcctctgagagaggaggggggtagcatgcacccagcaggggactgaactgggaaactcgaggttctttttactgtggggtagtgagctgcctttccgggatccgtttccctagggatgttgctgttcccctcccttggtattcacagcttacataacaacggggcccaacccccagtaaggccggatcccaaaatatggaatcagtggctgggggcctgaactcccccaataa

SEQ ID NO: 363095 - DNA, 795 bp, Homo Sapiens
  misc_feature (641)..(641): n is a, c, g, or t
atgagtggtaccatctactccacactggctctctccacactgagagtcactcctgccttcaccatgaagtccagcggcctcttccccttcctggtgctgcttgccctgggaactctggcaccttgggctgtggaaggctctggaaagtccttcaaagctggagtctgtcctcctaagaaatctgcccagtgccttagatacaagaaacctgagtgccagagtgactggcagtgtccagggaagaagagatgttgtcctgacacttgtggcatcaaatgcctggatcctgttgacaccccaaacccaacaaggaggaagcctgggaagtgcccagtgacttatggccaatgtttgatgcttaacccccccaatttctgtgagatggatggccagtgcaagcgtgacttgaagtgttgcatgggcatgtgtgggaaatcctgcgtttcccctgtgaaagcttgattcctgccatatggaggaggctctggagtcctgctctgtgtggtccaggtcctttccaccctgagacttggctccaccactgatatcctcctttggggaaaggcttggcacacagcaggctttcaagaagtgccagttgatcaatgaataaataaacgagcctatttctctttgccctnaattggtactttattcccctttccaataaccctttttgcttgttttcccgtcaccaccttgtggacacaatcccttcttccctaccctccttttactttcttcccacaatattttatttcttgagaaaaatgtaatcattttgtgccccccctg

SEQ ID NO: 363096 - DNA, 514 bp, Homo Sapiens
ggtctgagcataaaactcattaaacctgcccctatcactagtgcatgctgtggccagacagatgacaccttttgttatgttgaaattaacttgctaggcaaccctaaattgggaagcaagtagctagtataaaggccctcaattgtagttgtttccagctgaattaagagctttaaagtttctggcattagcagatgatttctgttcacctggtaagaaaagaatgataggcttgtcagagcctatagccagaactcagaaaaaattcaaatgcacttatgttctcattctatggccattgtgttgcctctgttactgtttgtattgaataaaaacatcttcatgtgggctggggtagaaactggtgtctgctctggtgtgatctgaaaaggcgtcttcactgctttatctcatgatgcttgcttgtaaaacttgattttagtttttcatttctcaaataggaatactacctttgaattcaataaaattcactgcaggatagaccagttaaaaa

SEQ ID NO: 363097 - DNA, 726 bp, Homo Sapiens
  misc_feature (168)..(168): n is a, c, g, or t
gaaatctttgcctcctcagtcgggaagagtcctgctaaaaatcaggctaaaaatcaggccaaaaatcaggccaaatgacttggcaaataattgacaaagtggttttcacgtgtgtctatctttgctagcagcttgtatacctcaggccaggtgagctccccaaatttnttttttcatttactccagtgagtttctgctgtctttttcaagtatgtaccataggacttaaaggtgatttgggatgcgttgtaacactgctaaatatgctaaagtaccagaattttatctacagtactgtgagacagtcaattattgcctagggtagttcaaaaatatgatgtgagctagttaagcctttgcttgactgatttcagtgatattcagaagtgtgtaccaatcaaggctctttaaaatacggaacgactcacttaataaccagggaaccagccaaatactgtgcagccgcagaatatgcatatcaatgagttggaggtgattattctctgtaactccctaatgattgttttctaagcattgtggcttctcagtggcttgacagcatcttcctggttgtatgtggcctgtttacatgatgtattgaataatgttgtttgttgtgagcatcaatgcctgtaacaccaaactaaacacgtgtttttgggatatgtttccaatctttaaatgaccttgccctgtccaataaataaatgattgtctcaccctgtt

SEQ ID NO: 363098 - DNA, 534 bp, Homo Sapiens
ccgtgcccatagtctctcccaagctcaaagttcacctctttctccagatcccctggggtccccaagcctgactcagtgtatctgggggggtcccttctgagcccacgcaccgacccagctcctcttccctgcagttgtggctgtgcccatggtgctcagtgccatgggcttcactgcggcgggaatcgcctcgtcctccatagcagccaagatgatgtccgcggcggccattgccaatgggggtggagttgcctcgggcagccttgtggctactctgcagtcactgggagcaactggactctccggattgaccaagttcatcctgggctccattgggtctgccattgcggctgtcattgcgaggttctactagctccctgcccctcgccctgcagagaagagaaccatgccaggggagaaggcacccagccatcctgacccagcgaggagccaactatcccaaatatacctggggtgaaatataccaaattctgcatctccagaggaaaataagaaataaagatgaattgttgc

SEQ ID NO: 363099 - DNA, 908 bp, Homo Sapiens
  misc_feature (629)..(696): n is a, c, g, or t
  misc_feature (807)..(807): n is a, c, g, or t
aaggctggtaccggtccggaattcctgggaggtcagcttcacattctcaggaactctccttctttgggccacggaattaacccgagcaggcatggaggcctctgctctcacctcatcagcagtgaccagtgtggccaaagtggtcagggtggcctctggctctgccgtagttttgcccctggccaggattgctacagttgtgattggaggagttgtggccatggcggctgtgcccatggtgctcagtgccatgggcttcactgcggcgggaatcgcctcgtcctccatagcagccaagatgatgtccgcggcggccattgccaatgggggtggagttgcctcgggcagccttgtggctactctgcagtcactgggagcaactggactctccggattgaccaagttcatcctgggctccattgggtctgccattgcggctgtcattgcgaggttctactagctccctgcccctcgccctgcagagaagagaaccatgccaggggagaaggcacccagccatcctgacccagcgaggagccaactatcccaaatatacctggggtgaaatataccaaattctgcatctccagaggaaaataagaaataaagatgaattgttgcaactcttnnnnnnnnnnnnnnnnnnnnnnnnnnnnnnnnnnnnnnnnnnnnnnnnnnnnnnnnnnnnnnnnnnnntagaaagaagcctcggccctcaaaaaaactttcaaaaccatttcttttggcgcccgggcccaaaaaagaaagtgaaaagggcccatacctgtttcccaagaaaaacctggncatgactatggcttcggattcccccccaaaaaaaattcccggaggataccgggggggcgggacccatcacaaagggagcaccggggggccttactgggatc

SEQ ID NO: 363100 - DNA, 571 bp, Homo Sapiens
  misc_feature (44)..(80): n is a, c, g, or t
gggaatataatcctatgggaatggagcttcacgcggggcggcgnnnnnnnnnnnnnnnnnnnnnnnnnnnnnnnnnnnnnatcaggccaaatcggccgagctcgaattcgtcgagagcggggcatttcctgggccaagttgggacccggacggcctcaccatgatgaaacgggcagctgctgctgcagtgggaggagccctggcagtgggggctgtgcccgtggtgctcagtgccatgggcttcactggggcaggaatcgccgcgtcctccatagcagccaagatgatgtccgcagcagccattgccaacgggggtggtgtttctgcggggagcctggtggctactctgcagtccgtgggggcagctggactctccacatcatccaacatcctcctggcctctgttgggtcagtgttgggggcctgcttggggaattcaccttcttcttctctcccagctgaacccgaggctaaagaagatgaggcaagagaaaatgtaccccaaggtgaacctccaaaacccccactcaagtcagagaaacatgaggaataaaggtcacatgcagatgta

SEQ ID NO: 363101 - DNA, 377 bp, Homo Sapiens
ggggaacacatccaagcttaagacggtgaggtcagcttcacattctcaggaactctccttctttgggccacggaattaacccgagcaggcatggaggcctctgctctcacctcatcagcagtcactgggagcaactggactctccggattgaccaagttcatcctgggctccattgggtctgccattgcggctgtcattgcgaggttctactagctccctgcccctcgccctgcagagaagagaaccatgccaggggagaaggcacccagccatcctgacccagcgaggagccaactatcccaaatatacctggggtgaaatataccaaattctgcatctccagaggaaaataagaaataaagatgaattgttacga

SEQ ID NO: 363102 - DNA, 750 bp, Homo Sapiens
  misc_feature (593)..(593): n is a, c, g, or t
gggaacacatccaagcttaagacggtgaggtcagcttcacattctcaggaactctccttctttgggtctggctgaagttgaggatctcttactctctaggccacggaattaacccgagcaggcatggaggcctctgctctcacctcatcagcagtgaccagtgtggccaaagtggtcagggtggcctctggctctgccgtagttttgcccctggccaggattgctacagttgtgattggaggagttgtggccatggcggctgtgcccatggtgctcagtgccatgggcttcactgcggcgggaatcgcctcgtcctccatagcagccaagatgatgtccgcggcggccattgccaatgggggtggagttgcctcgggcagccttgtggctactctgcagtcactgggagcaactggactctccggattgaccaagttcatcctgggctccattgggtctgccattgcggctgtcattgcgaggttctactagctccctgcccctcgccctgcagagaagagaaccatgccaggggagaaggcacccagccatcctgacccagcgaggagccaactatcccaaatatacctggnggtgaaatataccaaattctgcatctccagaggaaaataagaaataaagatgaattgttgccaaaaaacaacaaacagaaaatatcccttaatttaaaacacaaacaaacatgggcggcccgccctcggcccctcgagaaaactttttctagaacca

SEQ ID NO: 363103 - DNA, 692 bp, Homo Sapiens
  misc_feature (112)..(125): n is a, c, g, or t
catacaattgaagatttatgtaagttacttacttatttttaaactgcacaatgctgaagccagtctaaaaaagaatcaaacacaccactgcaagttaattcaatgagttacnnnnnnnnnnnnnnaaacagatttgtacagcaaaaagttcccagatcacagtctctaccatacagtcacctgtccagtgtgcaggaagccacaggggccctggccagaggggccaagagcagaagctgcactgcagagtttacttctacctacaggtgacatgtggctggaagaatcttgagttccctttgttctccagtgtatcttgtacaaaatattacatttgtttaaacacatatttacagagtttgcacaaatagaaaatggttacaaattacaaccaggcttggcaggataccagttcccctccccactgaccaaggtcagatgtgatgaccatttcatatttacagttgcaatttaaaaagtctgtgtttagagacctaaatgaagtttataaaaactgggttaaatatcatcaactcatttatgtaagctgtacaagtagtggataccaattagtcagttcatgtcttgctccctgaagaaagattttgaagtaaaagaaaccctctcaagcaagcaacatacatccctggcctgtctgccagtttgtttggtttttgccggggaaggagata

SEQ ID NO: 363104 - DNA, 559 bp, Homo Sapiens
  misc_feature (112)..(125): n is a, c, g, or t
  misc_feature (191)..(191): n is a, c, g, or t
  misc_feature (222)..(222): n is a, c, g, or t
  misc_feature (225)..(225): n is a, c, g, or t
  misc_feature (470)..(470): n is a, c, g, or t
  misc_feature (506)..(506): n is a, c, g, or t
  misc_feature (514)..(514): n is a, c, g, or t
  misc_feature (538)..(538): n is a, c, g, or t
catacaattgaagatttatgtaagttacttacttatttttaaactgcacaatgctgaagccagtctaaaaaagaatcaaacacaccactgcaagttaattcaatgagttacnnnnnnnnnnnnnnaaacagatttgtacaacaaaaatgttcccagatcacaagtctctaccatacaggtcacctgtccangtgtgcaaggaagccacaggggccctggcanganggggcaacgaccagaagctgcactgcagacgtttacttctacctacaggtgacatgtggctggaagaatcttgagttccctttgttctccagtgtatcttggtacaaaatattacatttggttttaaacacatatttacagagtttggcacaaataggaaaatgggttacaaattacaaccagggctttggcagggaaaccagttccccctcccccactggacccagggtccgatggtggatggnccatttcatatttaccggtggccattttaaaagtcnggggtttngggggccccaatggagggtttttnaaccggggttaaaatcctcca

SEQ ID NO: 363105 - DNA, 648 bp, Homo Sapiens
cttgcgggccgctccgcaggctagagaattccgggagcgggcgaggcggcggcggcagcagcgatggcaggaatagagttggagcggtgccagcagcaggcgaacgaggtgacggaaattatgcgtaacaacttcggcaaggtcctggagcgtggtgtgaagctggccgaactgcagcagcgttcagaccaactcctggatatgagctcaaccttcaacaagactacacagaacctggcccagaagaagtgctgggagaacatccgttaccggatctgcgtggggctggtggtggttggtgtcctgctcatcatcctgattgtgctgctggtcgtctttctccctcagagcagtgacagcagtagtgccccacggacccaggatgcaggcattgcctcagggcctgggaactgacccagctggtcctgaaggagaagccaaatggctgcactggccgattctggtctccagaggaccttggtgtttgctctcccttgacccaccccagtgagtgccaaagggcagccccaacatgtgcacccctgcatttcctgtcatgccacagactggcccttgagggcagcctgctgtactggccatgctgggccagccccacctggagctcagtaaaaactgctgtttgattaa

SEQ ID NO: 363106 - DNA, 151 bp, Homo Sapiens
cgtttttggttggactgtttgcagatatttaaattttatgaaatttccaaagattttggttgataacccccttttaccttctaaatgatttgagatgttcttatgttcttactgtgtgttttaaatatatataaaagagccacaagcattt

SEQ ID NO: 363107 - DNA, 308 bp, Homo Sapiens
gaagaaaatcttaaagctgtattagggcctgttaggttactgatatttgaatgcctatttacttatttactacattgagtcttttgttatcctctgacctataaaatattttaataaattactggtttacttcaagggaaaagaaggaaaatgagaaacatacatctttttttcactccttatctcattcctgtttggtgatgggatggattggggtaggaaggaatgttaatatgagagaaattttaaaatgtataaaaaagtaaaaggttgtattgttttgctcagtttgaaataaagtaaatacc

SEQ ID NO: 363108 - DNA, 368 bp, Homo Sapiens
ttttgttttgttttgttttctgaaaaaatcatacaactttgtgcttctattgcttttttgtgttttgttaagcatgtcccttggcccaaatggaagaggaaatgtttaattaatgctttttagtttaaataaattgaatcatttataataatcagtgttaacaatttagtgacccttggtaggttaaaggttgcattatttatacttgagatttttttcccctaactattctgttttttgtactttaaaactatgggggaaatatcactggtctgtcaagaaacagcagtaattattactgagttaaattgaaaagtccagtggaccaggcatttcttatataaataaaattggtggtactaatgtgt

SEQ ID NO: 363109 - DNA, 128 bp, Homo Sapiens
aaactctacaaacactaagccaaggaattcaggttatctgctatgttaacctaataaagcaaaggaaaatatgttgctttaatccttgcttgttaacctaataaagcaaaggaaaatatgttgcttta

SEQ ID NO: 363110 - DNA, 1487 bp, Homo Sapiens
aggatgtccctcacagactgctagaccttaatatgaaggaatacactgggttccaagttgctttgctgaataaggatttgaagccacagacatttagaaatgcttatgacataccaagacgaaatcttttggatcacttaacaagaatgagatctaatcttttgaagagcactcgcagatttctgaaaggacaggacgaagatcaagtgcacagtgttcctatagcacaaatggggaactaccaggaatacctcaagcaagtaccttctccactaagagaacttgatcctgatcagccacgaaggttgcatacatttggcaacccctttaagctggataagaagggtatgatgatagatgaagcagatgaatttgtggctggacctcaaaataaacataaacgacccggagaaccaaatatgcaagggatccctaaaagacgtcggtgtatgtctccactactaagaggcagacagcagaatcctgttgtaaacaatcatattgggggaaaaggaccacctgcacctacaactcaagcacagccagatcttattaaacctcttcctcttcataaaatttcagaaaccactaatgattcgataatacatgatgtggttgaaaatcatgttgcagaccaactttcatcagacattacaccaaatgctatggatacggaattttcagcatcttctccagccagtttactggaacggcaaaccaatcatatggaggctcttggtcatgaccatttaggaaccaatgacctcactgttggtggatttttagaaaatcatgaggagccaagagataaagaacaatgtgctgaagagaacataccagcatcttcactcaacaaaggaaagaaattgatgcattgcagaagccatgaagaggtcaatactgaactaaaagcacaaataatgaaagagatccgaaagccaggaagaaaatatgaaagaatcttcactttactgaagcatgtgcaaggcagtttacaaacaagactaatatttttacaaaatgtcattaaagaagcatcaaggtttaaaaaacgaatgctaatagaacaactggagaacttcttggatgaaattcatcgaagagccaatcagatcaaccatattaatagcaattaaaagaaaatagaatgtggccacttatttcactatcttcttcaaatacaaagtaaatacaagactgttgtgatcttgcattcattttctgacatgcattgttggctatttgaaatactaaaagcaaatctacagatcctttttccatcattttacagtgaccttttcttcattttggtttatttttgtaatgtgaaaagtatcactctaaaaaacatttttaatttaacaaactaaaaatattcctccaaatctcttgcttgtcattgactcttgcgtgtcaatttccctcaggttctattttcttaaaccaacctttaaaattgtaacctctgttaaggttgaactttgcca

SEQ ID NO: 363111 - DNA, 475 bp, Homo Sapiens
atataacatcagataggcctgggttttaataccatctctgctatctactccaagtatgggaatttaggcaccttcccttttctttctgagctttatttttcttttccattaaatagtataataagtacccccatttgatttttagatggactctgagataatgtactacatgccaggcaccttgtggtactcaaataaaggtctactataatgcacatatatttctctttttgtggggaactggtacaagtagttctcatgtagttataaaaccacagagaatacattgaaggaactccctatttttaaaagcctgtatcaggaatgccctggataaactagagtctttgtttatcagactctaatgattaatcagactctcattcttatattgagtgacaggcagcaaaacaaaaaaagagtatttggctgttaaaaaaagagagagagatgtcctatgagtcaccagagggtt

SEQ ID NO: 363112 - DNA, 617 bp, Homo Sapiens
gcccaactgtgccaccacttgttgaccgttcagtgcttgtggtcatcaagatgcacagcatggaacacaagctcctctggatcctagcagctatgtgacattggagactgtatttcttggtccacatgaacacaggctccatccaggcccagctcctacccaccgcctctctgtgggccagctgtaacacagaaggccttccatctgatgctccccatcgcctgcttgctctccagccgagtctggccaatttgccatggggaggctgcagtgtccaagcctgctggaaactgggatgtagctggggacgaaaggacagacccaagcgttctccctgcctgagatggtgtggccacagcagtggaaggctgcacacaggcacattccctttttccacagtggggcaccaaaggattctgtcctcattgctgggtaagcagggagaagagaagttttccccatgtctaattttgggatttcagtgaggccttttccatctgtccaggagaacagaagggaaaaaaagatacttgaaagaaactgaaggaaatttaaacaaagaaacacttgaaagaaactggaaagaaaaataatttttttatgtgaacaaattttgc

SEQ ID NO: 363113 - DNA, 471 bp, Homo Sapiens
tgggggcttgtcacctcccccaccttcttcgtgagtcactcctgcagccttgctccctaacctgccccacagccttgcctggatgtctatctccctggcttggtgccagttcctccaagtcgatggcacctccctccctctcaaccacttgagcaaactccaagacatcttctaccccaacaccagcaattgtgccaagggccattaggctctcagcatgactatttttagagaccccgtgtctgtcactgaaaccttttttgtgggagactattcctcccatctgcaacagctgcccctgctaactgcccttctctcctccctctcatcccaaagaaacaggtcagctgggagcttctgcccccactgcctagggaccaacaggggcaggaggcagtcactgaccccgagacgtttgcatcctgcacagctaaaggtcctttattaaaagcacactgttggtttctgctc

SEQ ID NO: 363114 - DNA, 2176 bp, Homo Sapiens
tgatcagcagaaagctctttggattcactgaacggtacggagcagtgttctcatcccgggagcagcccaaactggctgggtttcagcaattcctgcagagcctgcagcccaggacgactgaagctcttgcagcccctgcagacgagagtcaggccagcaccctgcgaccagcttctccactgatgcacatccaaggcttcctggcagctctcactacggccaaccaggacggcagggtcatcctgagccgccaaggcagcctcagtcagagcaccctgaagtttttgctcctgaatccagctgtgcactttgcccaagtggtgaaggaatgccgggcagtggtcattgcggggggtaccatgcagccggtgtctgacttccggcagcagctgctggcctgtgccggggtggaagctgagcgcgtggtggagttttcctgtggtcacgtgatccctccagacaacatcctgcccctcgtcatctgcagcgggatctccaaccagccgctggaattcacgttccagaaaagagagctgcctcagatgatggacgaggtgggtcgcattctctgtaacctgtgcggtgtggttcctggaggggtggtctgtttcttcccctcctacgagtacctgcgccaggtccatgcccactgggagaagggtggcctgctgggccgtctggctgccaggaagaagatattccaggaacctaagagcgcacaccaggtggagcaggtgctgctggcatattccaggggcatccaggcctgtggccaggagagaggccaggtgacaggggccctgctcctctctgtggttggaggaaagatgagtgaagggatcaacttctctgacaacctaggccggtgtgtggtgatggtgggcatgcccttccccaacatcaggtctgcagagctgcaggagaagatggcctacttggatcaaacctccccagagcccccggccaggcacccccagggaaggctctggtggagaacctgtgcatgaaggccgtcaaccagtccataggcagggccatcaggcaccagaaggattttgccagcgtagtgctcctggaccagcgatatgcccggccccctgtcctggccaagctgccggcctggatccgagcccgtgtggaggtcaaagctacctttggccccgccattgctgctgtgcagaagtttcaccgggagaagtcggcctcttcctgatgggcaaccacaccactgcctggcgccgtgcccttcctttgtcctgcccgctggagacagtgtttgtcgtgggcgtggtctgcggggatcctgttacaaaggtgaaacccaggaggagagtgtggagtccagagtgctgccaggacccaggcacaggcgttagctcccgtaggagaaaatgggggaatcctgaatgaacagtgggtcctggctgtccttggggcgttccagggcagctcccctcctgggaatagaatctttctttccatcctgcatggctgagagccaggcttccttcctggtctccgcaggaggctgtggcagctgtggcatccactgtggcatctccgtcctgcccaccttcttaagaggcgagatggagcaggcccatctgcctctgccctttctagccaaggttatagctgccctggactgctcactctctggtctcaatttaaaatgatccatggcacagggctcctgcccaggggcttgtcaccttcccctcctccttcctgagtcactccttcagtagaaggccctgctccctatcctgtcccacagccctgcctggatttgtatccttggcttcgtgccagttcctccaagtctatggcacctccctccctctcaaccacttgagcaaactccaagacaccttctaccccaacaccagcaattatgccaagggccgttaggctctcaacatgactatagagaccccgtgtcatcacggagacctttgttcctgtgggaaaatatccctcccacctgcaacagctgcccctgctgactgcgcctgtcttctccctctgaccccagagaaaggggctgtggtcagctgggatcttctgccaccatcagggacaaaccgggggcaggaggaaagtcactgatgcccagctgtttgcatcctgcacagctacaggtccttaattaaaagtgtactgttggtttctgctg

SEQ ID NO: 363115 - DNA, 439 bp, Homo Sapiens
tgcgagtcccagcctcactgaagaaagaggagaggcccacagctgacagcgcacccagcttgcctctggaggggatcaccgaaggcccggtatgaccagtgtcctgggaggatggacactaagccctgggcacatctgccaccctgacatcataacacaatagaaatggttttctgtagtgtatttttcatcagttgtttctcaaagtcatcgtacttctgcttctgtttcactgatggtgttcctgctactttaaatgtctacttccaacatccttgaatttgcaagtgaaggacaacaatctctgagagacgtgtggaaaaggctgtgaaggtggggtttggggagcttggccgattcgtctatctgaaatgtttgctgtaacagccaccttcctatgttttcatggttgtaaaacataataaaacctcccacgtgg

SEQ ID NO: 363116 - DNA, 1030 bp, Homo Sapiens
  misc_feature (781)..(860): n is a, c, g, or t
gtagcgaggcctgggtggcgaattcggcacgaggctggggggcctggccctgcaggccccaaccttccctcatctctggcggccctcttgggcctctgacccagcccctccccgggccaggctcacagaagctggcttctgggactgtcctgggcccaagtgggcacctgcgccagccccacctgagcctgggctgtggccccttcctacagggcgctcaccatggccccgccgctcctgctgctgctgctggccagtggagcggccgcctgcccactgccctgcgtctgccagaacctgtccgagtcgctcaccaccctctgtgcccaccgaggcctgctgtttgtgccgcccaacgtggaccggcgcacagtggagctgcggctggctgacaacttcatccaggacctggggccccctgacttccgcaacatgacgggactggtggacctaacactgtctcgcaatgccatcacccgcatcggggcccgcgcctttggggacctcgacagcctgcctcccctccaccttgacggcaacaggctggtggagcttgaaatcgggagcctaccgggccctcgtgtatctgccccacctaaataaatcgatgcccacaatattggaatcgcctcccccacctgagcatttcaaccacaacccctacaaaagattgggaaggactatagaaactgacccccacatttaaccactcacaatgcggttggccccaggcccccggaatataaatcccaatgatagagtataggctccctgacaaaannnnnnnnnnnnnnnnnnnnnnnnnnnnnnnnnnnnnnnnnnnnnnnnnnnnnnnnnnnnnnnnnnnnnnnnnnnnnnnntaaaatattcagacgatccaaaaaattgccccgccccgcagtgaaatcgcctccttggagaaaccatataatcccctctttgaaaaggcgtcccccacattatccttttgaagcccctcccccacccaaactataccccctattacacaacgcgcgtagagccctccgac

SEQ ID NO: 363117 - DNA, 302 bp, Homo Sapiens
catgttagtgacagtgatattttaatatttttttaagccagtaataatttttctccattacagggctaagttctgtggctggtggtcagtttgtaaatttatacttaaagagacttaatagtaacttcatttatttgtctggttatgttattgtatatataaatatttatgttttcatatattgcatataaaaatttgtgttacatgttactctcagaacagattgctgtaagacaattgtaaaaaacatgtctttcgtctgtttctcaaagcaatgtaaataaaacctatggactgtccag

SEQ ID NO: 363118 - DNA, 529 bp, Homo Sapiens
aagaagagagccatgaaccagcttcagttgactaacgggctcctgtgagtgcatctttggacttttctggaggttgaaatctagatgtggtatgtgtcttaaagctgccaccttcagacctcagcatggaagcttccaagatcctgcccttggatctgggctgagcctctgacttgcgttgaccaacagaatgcagtgaaagtgatgccgatactaccctccctgccctagacttgggatacctggcagctatattcttccattcctcaggacttgcaaaaacgggtctcagcatgccttcccagagccatgaggtgtttctttgcccattcattgatctgagaagtgagtgtaaggagtttaaatcaacctctgttctgtgctagttaaggtaataaagttgctgcagtccagggggtaggtacctgtggacggctctgcgaataggacagttgcatttcttgggaatcaagtgcatccctaggctggcagtgcagcagaaatactgaataaaatgtgacaaatcaaa

SEQ ID NO: 363119 - DNA, 801 bp, Homo Sapiens
ccagggagatttgtcacattttattcagtatttctgctgcactgccagcctagggatgcacttgattcccaagaaatgcaactgtcctattcgcagagccgtccacaggtacctaccccctggactgcagcaactttattaccttaactagcacagaacagaggttgatttaaactccttacactcacttctcagatcaatgaatgggcaaagaaacacctcatggctctgggaaggcatgctgagacccgtttttgcaagtcctgaggaatggaagaatatagctgccaggtatcccaagtctagggcagggagggtagtatcggcatcactttcactgcattctgttggtcaacgcaagtcagaggctcagcccagatccaagggcagggaagaggctccatcgtgtagttgggctcacttggaaggtaatgggaggagttggtggctgctttaagacacataccacatctagatttcaacctccagaaaagtccaaagatgcactcacaggagcccgttagtcaactgaagctggttcatggctctcttcttcaggtggagactaaccaactccctgaccctcttcggttaagtgctccttcctttttcctgctgcctggaatgtctatgtgccatctggagctatggcagccttcttgcaaccatgaggcaaactctatgtgcaagagcaggtagctagaaagagcctgccaccctgggcttatatcctgcttcccagggagcttaaagatagcaaaacccacagccattttcatcaaatgccaggaaattctttcc

SEQ ID NO: 363120 - DNA, 458 bp, Homo Sapiens
ctcgaggaccaccgccacctgcccgtgggctgcgtttccttccagaacatctcatccaatgtgctagaggagtccgccatctccgacgacatcctgtcgcccgacgaggagggcttctgctccgggaagcacttcactgagctggggctggtagggttgctggaacaggcagccggctacttcaccatgggcgggctctacgaggcggtgaatgaggtctacaagaacctcatccccatcctggaagcccaccgtgactacaagaagctggccgcggtgcacggcaaactgcaggaggccttcaccaagatcatgcaccagagttccggctgggagcgcgtgttcgggacgtatttccgcgtgggcttctacggcgcccacttcggtgacctggatgagcaggagtttgtgtacaaggagccatcgatcacgaagctggcagagatctcacaccggct

SEQ ID NO: 363121 - DNA, 575 bp, Homo Sapiens
cagaaaacatgttaagattatatatagatgtattctttacattggatattgtattagagtcctccttacaagaaatgaaatagtttttagcactcttagcattagagttcctagattggtgttgatagctacagttttaaaatgtataacctgaaaatgaaggttaattttgcattgtaagagcacatttgatctatgtaaaaagtgtccatttggtgtatttttttaaaaaagagaaagcactttcatattaagtagcatgtgtatgaatttagattttcatatttgttgtgtctgtattcagtgaagtaaattgagcatttaaatgtttgttgatggcaacattaactattaaattaaagcaccttatactctgctgcttaacttgcttgtaattgcacctttgttacctgcacattttcatatagaatattgttgtaacattgcttcatgtgggtctggatggaagattagtgggcctacaggatcatttatttatattgtttatattacaataatatattgtagatcagttgtaagttcatttctttacaaataaaagcctcttccatttg

SEQ ID NO: 363122 - DNA, 1023 bp, Homo Sapiens
aattcggcacgaggcggcacgaggaatttactaagcatattcatgtccatttttatttgatcatctgatttgtgaaataacttgaaatttgtactgtttggtttgtgaaaataatattaccaaatctctgtcattagaatgtgtactttatgttcagaagtgactgtgggtttattcagagccagccattctctcccttgatgcactttgtaaccagctacacatgcttttaggtggcttttccctgatagggtcaagtatatgactataaaacatttttcttgtgaagctattaagttcattagttactcttatttccccttgttgtaactaagtgggtgcaggtataaggcatatccccagcattcctgtgtgtgtgaatgtgcactgctgatttgggactgttcttgagaaaggtgctgtgacatatgtcaatatttgttagctctggggatatctttagaatgcttgagaaagttgctaggtgtgtgccacattggtgcaggtaaatctatgctgttcacagccaagcagcatttgcagagaaaaggagagttttacatagaccccaggaaaaacagtactaacctggttgatggccttggtggtggaattttgtttcacccagaggctactcattatatcagaatgatgttcagtataacactatctgatttttagattggtcgatttctgttgtaatcaagtatttaggatgtaatctttttaaagtcattgctttaatctgaaaagccattagaagggagaggaatcactgttccacaggatatttaaaactcaggagttcaaataacctcacatattgaacataaactgttaacttattccacaactaaattctaacctgatacttatgaattgcaaagtgattgctgcaaactttttctaaggtggctgaagatttaaaatagatcattctaaagggaaatcagtaaaatgtcttgataattggtatccaaatcacttgtgtgcctgagaaaataaaaggtaatattttactgt

SEQ ID NO: 363123 - DNA, 524 bp, Homo Sapiens
gcggccgcaccacaaaatggcagtcgctcggtcgcggagaagcacctgctaaatgccgtgactccctccccctgccctgccccgctagcgccaacgtcgttctccccgcccaggcgccccggtcttcccacgccgccccgcccaggggcaacagggtccggagcccgccaacaacgcggcgcctttgtgcgggcgcacgccacctttactcagccacacgggcccctctccggggggctttttcttaaaggggcaaccgctggaagaaacggagcaccgccgcccgggacgcccctcaggcccggggttactacggtttccccaactcgcagcgttagcgtcaggccaccaaagtgaagatgggtggtgaaaggaccacagagcccgataggagagaaaacctaggaaaaattagtgaaagacgcccccaaccaatgctttggcggccacgctgagtcctaacgtactgagcccactcgacggggcccgtgcgcacaggcggctccaaagggcgggtttcggct

SEQ ID NO: 363124 - DNA, 1670 bp, Homo Sapiens
  misc_feature (726)..(726): n is a, c, g, or t
  misc_feature (1207)..(1254): n is a, c, g, or t
  misc_feature (1630)..(1630): n is a, c, g, or t
aaggaagcgaggcctgggtggcgaattcggcacgaggctaaatcccgacagctttatagagcccaggcctggcaggctcccagaacttgaagccaccagaccccacatggaaccaaaggcctcctgtccagctgctgcacccttgatggagagaaaattccatgttcttgtgggtgtcacggggagtgtcgcagccctgaagttgcctcttctggtgtcaaagcttttggacattcctgggctggaagtagcagtggtcacaactgagagagccaaacatttctacagcccccaggacattcctgtcaccctctacagcgacgctgatgaatgggagatgtggaagagccgctctgacccagttctgcacattgacctgcggaggtgggcagacctcctgctggtggctcctcttgatgccaacactctggggaaggtggccagtggcatctgtgacaacttgcttacctgcgtcatgcgggcctgggaccgcagcaagcccctgctcttctgcccggccatgaacaccgccatgtgggagcacccgatcacagcgcagcaggtagaccagctcaaggcctttggctatgtcgagatcccctgtgtggccaagaagctggtgtgcggagatgaaggtctcggggccatggctgaagtggggaccatcgtggacaaagtgaaagaagtcctcttccagcacagtggcttccagcagagttgacctgngatttctgtcatgggtgtccctctgtactcagaatgggttcaggccaagtcggtgaagatggatgttggcaaaataggaggataccctcatttgctgaatgggggacctgctctgagcctgcccaggggccaggcctgctccaggttaaactggacggaaggcccaggtctcagtttctttcaaccaggagaggccgctgcctagagcccctccccaccttttcctggatgggtgaggcaagccaggagagcaagcagtgttgtcctccacgggaggaggactgagcgactgggaaaactcggctctacattttcacccagaacggcttttagaaacaccacagctggagagtcctggctgagccttgggagtttcagctctttggcggggggcccaggtgccatgcgatcagcgaagcctgcgagttggcaggactctgaggtttcctgcagaccatcccatgagattgaaggggcgggnnnnnnnnnnnnnnnnnnnnnnnnnnnnnnnnnnnnnnnnnnnnnnnntccttgtcgggccgccctcggcccctcgaaaaagcttctctagaaccattcggtttgggccccccgggcccccagtaaggtaaattgaaacatgggtcattaggtgtgttttccctaaggaaaatccctggggccatggaactaaggggcttggaaattcctcaccccaattaacaacaaacgccccgggggggcccaaccggaagcggttttttggaaacaaaattcccagaatgggaaatttcctggaaggtgccttttaactgggaaatccttattcacaacggggggaggtctcaaaagggggaagccttcggagttatctccaatttttaaccgccccccgcggcccttgggccccactttttgtggcggnggtaacctggtgttgtaaaaattctcccttgtgaacgggc

SEQ ID NO: 363125 - DNA, 488 bp, Homo Sapiens
  misc_feature (17)..(17): n is a, c, g, or t
  misc_feature (33)..(33): n is a, c, g, or t
  misc_feature (63)..(63): n is a, c, g, or t
  misc_feature (71)..(71): n is a, c, g, or t
  misc_feature (338)..(338): n is a, c, g, or t
  misc_feature (346)..(346): n is a, c, g, or t
  misc_feature (349)..(349): n is a, c, g, or t
tggccctcagtttaagncccctgaaattccacnaaattttttggaacaaaacttgggccacanaaaattanaaccagaaataaatggttcctatgttttcaacttcccaggttggggcaggcccagagcaaggcggtcctcatcgaggtgggtgcctacctgtgtgtgtgtagatgagtgtgctgaaggtggggagggcagcacacagcagctcatgcagagccgcctcctaggtcttggcaaagaggcaagctgacgatagacatctacctatattgttaagaaaggggtcggggggatcagccaaggtccatcattgcttttttgccgcgcccccnccccccgnccnccatagattgtcagctgtaagtgaaactcctagtgaaaaagaggggagccctgtgttaggagtccccataaacatgtactgtaattctttgtatatagaaaaaaaatttactgtaaagtaaagtttaactttactcata

SEQ ID NO: 363126 - DNA, 351 bp, Homo Sapiens
agatgtataatgtttcataaaccctggcactggtcacaaagctcagctgtgaaaatgaaatttgtagtatttttaaacatgaatgtcaatttcaagtgtatttgaaatggttcctccaggagagatatttgtgcaccattaggaaaatcttctctgcagaggaagtagccttctttggagaaaatggaaaatgggttctgatatgtgatctcagagtagcccatttcctagggcaccatggaaaacacaaatgtgatctttaagtatacctcttccccagtttggggaggaaaggactcagtttgcaccctttttgtatgtaaaataaaatgtcttacctttcttggctaa

SEQ ID NO: 363127 - DNA, 1127 bp, Homo Sapiens
  misc_feature (38)..(38): n is a, c, g, or t
  misc_feature (719)..(860): n is a, c, g, or t
  misc_feature (955)..(1047): n is a, c, g, or t
  misc_feature (1060)..(1060): n is a, c, g, or t
cgcgctgtcctgcctctcctgcctcgcctccttttgcnccgcgcacctgggcccgcacgagcgcagccccgccctccgcggacaccgcctggtgccgccgctgcgccggctagaggagagcctgtgcccgcgccacctacggccgctcgagcgctactgccgcgcggagcgcgtgtgtctgtgcgaggcctgcgccgcacaggagcaccgcggccacgagctggtgccgctggagcaggagcgcgcgcttcaggaggctgagcagtccaaagtcctgagcgccgtggaggaccgcatggacgagctgggtgctggcattgcacagtccaggcgcacagtggccctcatcaagagtgcagccgtagcagagcgggagagggtgagccggctgtttgcagatgctgcggccgccctgcagggcttccagacccaggtgctgggcttcatcgaggagggggaagctgccatgctaggccgctcccagggtgacctgcggcgacaggaggaacagcgcagccgcctgagccgagcccgccagaatctcagccaggtccctgaagctgactcagtcagcttcctgcaggagctgctggcactaaggctggccctggaggatgggtgtggccctgggcctggcaccccgagggagctcagcctcaccccatcatccccaaggtggtcgcgccgccggcagaccccctcggcccgcgccctgcgtnnnnnnnnnnnnnnnnnnnnnnnnnnnnnnnnnnnnnnnnnnnnnnnnnnnnnnnnnnnnnnnnnnnnnnnnnnnnnnnnnnnnnnnnnnnnnnnnnnnnnnnnnnnnnnnnnnnnnnnnnnnnnnnnnnnnnnnnnnnnnnagaataatgccttgcccgcccccccactccctgtgcgcgccgccccgaccaattccgccccccccgttgccgtcccccggagcgtcgccgccgcnnnnnnnnnnnnnnnnnnnnnnnnnnnnnnnnnnnnnnnnnnnnnnnnnnnnnnnnnnnnnnnnnnnnnnnnnnnnnnnnnnnnnnnnnnnnngcagaaccatccntccccccgcgctataggctatcccgaaccgcgctccgccgccgcccgcggcgcacctccgtcgttcc

SEQ ID NO: 363128 - DNA, 481 bp, Homo Sapiens
tagataatcaaagtttaattgtgaacatcctatgcaaattgctggcatgccatgaggatgctgttgaatgtgctgtccttttgatctaaggaataatagtggtcctgttcaccacagttgcattggtaagagtgacgatggtatcttctgtgaggtccactctgtctcttcaagttgtctttgtgacagagagcttgactagcagagtgttcatgggtcagagagaagcacagtgtcttcccacaggatttagccactggccatgtctggattcatggtcgaattcactagacttcctggacacatacaagcccccatgtcaggcttcagctcaaggaggattaaccccttggctgcagaaagttgctgggagtgggtcattctcagccactgcacatactggagggttgtgaggtcagtccagctcactgtccacagaggacctttccgcgtcctgctgagagggagctgttgcgggggc

SEQ ID NO: 363129 - DNA, 1008 bp, Homo Sapiens
ggcatttgctatttccaaatagataaaaaagactgcacatttattacaaaaggcacctgggaagtcatcgggatagaagctctaaccagtgattatctatactacattagtaatgaatataaaggaatgccaggaggaaggaatctttataaaatccaacttagtgactatacaaaagtgacatgcctcagttgtgagctgaatccggaaaggtgtcagtactattctgtgtcattcagtaaagaggcgaagtattatcagctgagatgttccggtcctggtctgcccctctatactctacacagcagcgtgaatgataaagggctgagagtcctggaagacaattcagctttggataaaatgctgcagaatgtccagatgcccgccaaaaaactggactccagtattttgaatgaaacaaaactttggtatcagatgatcttgcctcatcattttgataaatccaagaaatatcctctactattagatgtgtatgcaggcacatgtagtcaaaaagcagacactgtcttcagactgaactgggccacttaccttgcaagcacagaaaacatgatagtagctagctttgatggcagaggaagtggttaccaaggagataagatcatgcatgcaatcaacagaagactgggaacatttgaagttgaagatcaaattgaagcagccagacaatttttcaaaaatggggatttgtggacaacaaacaaattgcaatttggggctggtcatatggagggtacgtaacctcaatggtcctgggatcgggaagtggcgtgttcaagtgtggaatagccgtggcgcctgtatcccggtgggagtactatgactcagtgtacacagaacgttacatgggtctcccaactccagaagacatccttgaccattacagagtaagagatgaggacctatacctattttataacctatttataagtggtttaagaaccttcttaattgtatctattctaaaaaatacatatttttatatcc

SEQ ID NO: 363130 - DNA, 800 bp, Homo Sapiens; identical to SEQ ID NO: 15479
  misc_feature (330)..(357): n is a, c, g, or t

SEQ ID NO: 363131 - DNA, 632 bp, Homo Sapiens
gggctttcacattcgggaagcgtcgggattaggtgaaagtacgtagttgtctttcgtaagttaaaatgataattgggccgaaacttactgccttacctaaaaggcagcgcagtcaggatattggtaggtcgggggcggctttggaaacccttaagtttacaagcatgcgcggacttgagtgctcattaggtcgccgggcgtccacgtgcagccctggaccctgaaccccggcgtgcgtgggccgtgggccctcggggaaaggttccgtgcactcggggactccggtgaagcctgttcagccgtctgtgtcatgtggccatcttgagtctactctgtcgctcttgtgccctagcaccccgagaaccgtcagtttgagccagatggaagctgagctgaacacattacgatggatgatggaaacataagactatcaagaaatccaagtggtaatgggcgaagtttattcagcatccggcaatggacttatcgtagttggggaaacgggtgttccgaataatatcctggaagttatcaggacacctattttaaatataggcctgaattttgtaaagtaatatttaaggtggtccgtgataattaaataaaatgcttaattcatgtggctaaaaaaa

SEQ ID NO: 363132 - DNA, 491 bp, Homo Sapiens
cattaagcattagtgtgctcttcatgttaatatggcagagttttgtaaactaaattaaaacttactgatatattggactttgagccaagggaaagaatgagtactatctttccagatatcttaagggtaaaagcttattctaagacagtctgtccattgagaatattagatttctgacttgcaaatatgtttgtactccagaagaaatagaggaaaagcagatactagaattcctaatttaattacatatacagccgtctttgtttataagtgtagaattctttatattttgtacaaaaactaattcttttggtaaaatgaaccatttacagttcggttttggactctgagtcaaaggattttcctttaaatgcttgtctcaattttagtctggtcttttgtacttttcttcagaagaaatgaattaaagggtacagttgcataaagtgggtttttatcctaatgtattggaaataaatgataaactttaa

SEQ ID NO: 363133 - DNA, 1382 bp, Homo Sapiens
  misc_feature (786)..(929): n is a, c, g, or t
  misc_feature (938)..(962): n is a, c, g, or t
  misc_feature (1141)..(1162): n is a, c, g, or t
gaaataatttacaaatgctttataataaaatcaaagatattcatggatttttttaagtaaaaaatctttgcagctaaatattcatcaacttaaacttattctttcttttataagaatgttcactatgtaacattataactctccaaaggagaaattctataattagttcagttctctgccttaaaagttttattataaggcagaagaatggaataattgaagtttaaaaataagcaaaaatatataactctaaaccacagtcccctcatttaaaagagcttaacaagaatactttctgcaatatatttataaacaacctaatatttatataataacacaaagttacaacttaaatcatgatgatcaaagttaatgtgcattttgatacccttatcagcttaaattattaaatatctaacggtcttgagagattgaattttaaaaaatgaaccacatgtactttaaaaatggttacctattcaataactaaggtgttggtcaaagtgtttagaatatagggccagagttttagaaaaattatttgagaaatatagtatatatgattgggtcccacgtagaaataagcctgtacaaatggatatgtttaagcatgaacaataattgaggtaacccaccaacttcttttttaaaagcgtaagtcaacgggcttctttaaaagagcaaatgaatcacttgctcattttaaatctcctatcttgattatattaaatagtactactttttaaaataagaaattattgattattaattagagtgtaggtaacnnnnnnnnnnnnnnnnnnnnnnnnnnnnnnnnnnnnnnnnnnnnnnnnnnnnnnnnnnnnnnnnnnnnnnnnnnnnnnnnnnnnnnnnnnnnnnnnnnnnnnnnnnnnnnnnnnnnnnnnnnnnnnnnnnnnnnnnnnnnnnnntctgtctcnnnnnnnnnnnnnnnnnnnnnnnnnggaatataggtaacaaatagtaaattctggtcagcagcaaaatttttggacccaatgacaaaaacatgttaatagaatgtgtttaagaataactctatattgctgatattccaacagcactatgatctttgctatcagcaatccaagatttagttcttcatcaaaagtctctctctctnnnnnnnnnnnnnnnnnnnnnnttctcgtaccgtcttgtctctacaaatgcatctcaggttatattctgtttttgaagattacattttttaaaacacatcaacatttttccaacaaatcaatcatcaaaaaatgactcactgctttcattaacaatctctcaagatcactcaatgtttaaagattagcctgacaagaacttgcagagctgaaattgaattggcatcagaacaggataatttt

SEQ ID NO: 363134 - DNA, 650 bp, Homo Sapiens
  misc_feature (562)..(562): n is a, c, g, or t
  misc_feature (582)..(591): n is a, c, g, or t
  misc_feature (605)..(605): n is a, c, g, or t
  misc_feature (608)..(609): n is a, c, g, or t
agtgtttctaagtcttcttctaaagacctcggacattcttgattctccctttctagtgtctcatggctctggttttccagagtcttcagtgactcttgaatctcctctcccagagacttcagggtttctttttccaaaggaacctgggagtcctggatttccttcctgtttagatcctcttcttcccatatttcctgctgcaagctgcttaccactttgccctctatggctgtttctttctctaccaacccccagatttgcccttcaccttcccctcggcatatgctgaacactctagacccaccggattctccatccttagcctctaaactggagtggtcagggctgaggggtggtgccaaggaggcatggtcctctggggactggcctgtactggcctcttgccgctggcccccaggctcctctggtccaggcaggacgctggcaggaatggccaccctggcttcagcccgcaggggctctggagcctgtttcctcccaccctgtgtctggagcagagagagaggagcatcctgggctctgatctctgcatctacagcangagaaggtgccctgagtgtnnnnnnnnnnatgggtctgcccanggnngggtacgggcctggaggaattcttggtcttaagaaaggctg

SEQ ID NO: 363135 - DNA, 557 bp, Homo Sapiens
ggggagatgatgatgatgacgatgacattgactggctgggatgaagacccaggaaactggtgcaaaggtttctctgcaacccttccctaagcatgattttgcacagccaaccctgggtctaggcgagccacagggtgaggtcaaggtgagcattctgagccccacccccgccagacctggtgaagaggatcataaccctgtcttcaagaacactgggatttcagcagcaagttggaagaaggactggtaggttcccctccaagccagtcacctgtaagagtcctgtcctctgccagactttttaatctcttcattaactctcagactgacctgggagccctctacctgaatccagtgctcaactgtgccccggcaacaagacctgggctgaggtctccctggtagaactaagggagattacaccatctaaatcccagtgcagtcaacagcctggcctatagtcctgggacatgtatcttcttctttgccttaaatctgatacaagaggtcaatgactttgaaaataaaactaaaataaatgtctataatgaaacttg

SEQ ID NO: 363136 - DNA, 2105 bp, Homo Sapiens
  misc_feature (690)..(744): n is a, c, g, or t
ggcagtccaaattcaaaagtgaaaagcagaaccggaaacaactggaactcaaggtgacatccctggaggaggaactgactgaccttcgagttgagaaggagtccttggaaaagaacctctcagaaaggaaaaagaagtcagctcaagagcgttctcaggccgaggaggagatagatgaaattcgcaagtcataccaggaggaattggacaaacttcgacagctcttgaaaaagactcgagtgtccacagaccaagcagctgcagagcagctgtctttagtacaggctgagctacagacccagggggaagcaaaatgtgaacattttgttggcctccgcccaaggatgaagcacctgcagcagtaccaggaggtgtgcgcacagagagatgcctaccagcagaagctggtacaacttcaggaaaagtgtttagccctccaggcccaaatcacagctctcaccaagcaaaatgaacagcacatcaaggaactagagaagaacaagtcccagatgtctggggttgaagctgctgcatctgacccctcagagaaggtcaagaagatcatgaaccaggtgttccagtccttacggagagagtttgagctggaggaatcttacaatggcaggaccattctgggaaccatcatgaatacgatcaagatggtgactcttcagctgttaaaccaacagnnnnnnnnnnnnnnnnnnnnnnnnnnnnnnnnnnnnnnnnnnnnnnnnnnnnnnnggccacgaagaccttcccaggagcagtcagcctcagccagttctgggcagcctcaagcacccctgaatagggagaggccagagtcccccatggtgccctcagagcaggtggtcgaggaagctgtcccgttgcctcctcaggccctcaccacttcccaggatggacacagaaggaaaggggactcagaagctgaggcactctcagagataaaagatggttcccttccacccgaactgtcttgcatcccatcccacagagttctagggcccccgacttcaattccacctgagcccctaggccctgtatccatggactctgagtgtgaggagtcacttgctgccagcccaatggcagctaagcccgacaacccatcaagaaaggtctgtgtcagggaagtagcaccagatggcccactacaagaaagctccacaagactgtccctgacttcagaccccgaggagggggacccactggccttagggcctgaaagcccaggagagcctcagcctccacagctcaagaaagatgatgtcactagctccaccggtccccacaaggagctgtcaagcacagaggcaggttccacagttgcaggagcagccctcagacccagccatcattcccagcgttccagtctctctggggatgaagaggatgaactgtttaaaggggcaactctgaaagctctaaggcccaaagcacagcctgaggaggaggatgaagacgaggtgagcatgaagggacgcccgcccccaacgcccctttttggagatgatgatgatgacgatgacattgactggctgggatgaagacccaggaaactggtgcaaaggtttctctgcaacccttccctaagcatgattttgcacagccaaccctgggtctaggcgaaccacagggtgaggtcaaggtgagcattctgggaacaatatttgggctcagagggtgggttggccacccttctgaaccccacccccgccagacctggtgaagaggatcataaccctgtcttcaagaacactgggatttcagcagcaagttggaagaaggactggtaggttcccctccaagccagtcacctgtaagagtcctgtcctctgccagactttttaatctcttcattaactctcagactgacctgggagccctcctctacctgaatccagtgctcaactgtgccccggcaacaagacctgggctgaggtctccctggtagaactaagggagattacaccatctaaatcccagtgcagtcaacagcctggcctatagtcctgggacatgtatcttcttctttgccttaaatctgacacaagaggtcaatgactttgaaaataaaactaaaataaatgtctataatg

SEQ ID NO: 363137 - DNA, 657 bp, Homo Sapiens
aggaaaggtttgatcttgtaatatgtcactgtgtttccttagtggccagccagccttcagaatagctaaaggccttccttccttccagtcagcctgagagagaacacctgtcccctaagcacctggtgtctccattggaggcagactgctctcaggagactactagaagcttcagcccggaagacaggctgctctctcatgctggtggcccaaattgagaaagtggtgtcccttcctgattttgccaccagccctaccgaatagttgtaaaccagtatcaggaattgggatcgctagagtgtttcacgtattagaagatgaatcgtcctcatcacagacctccctgtcaggactgtgatctagaaggcatcacacacagctttctggcacgaatcacattttgtggaagtgactactcaggtttgtatattttagtatcaataaagaattgcacaggtttgaataggaaaaatgtattctatagatttacagtttgaatttaggaatatttcagtatatatagtttttattcgttttaagtgaatcatagtaaaatcagtcatggtgatttaaaatagctatcaagaacaagttcttggaattatctgttgtatctgtgataggaaaccattttacagtattaaattactttattac

SEQ ID NO: 363138 - DNA, 418 bp, Homo Sapiens
  misc_feature (80)..(89): n is a, c, g, or t
  misc_feature (269)..(278): n is a, c, g, or t
ggtcctcctctgtttcatagaaaagtcatagaatatctatgatacattgaaaagttactgcaatatttgagaactgttcnnnnnnnnnncttgtgtgtgccatctttccattgttggctacgtcttttcttttgccttgatgaacgttctatgtatttcatcggatatacagcatattccatttaggatgtgtatttaatgcatttagtaatgacgataaagtgtttttagtatgcttttagtctcttgtaactggggagaagcagtgnnnnnnnnnnaggaaaggattatgcgacacaataaaataagatattctgtctgtagtgaatacatttctcatgtactaacactatttataatatatgattaaagatatttcttgttttattaaataataagaaataagatctcctttatg

SEQ ID NO: 363139 - DNA, 666 bp, Homo Sapiens
agttgattcattaaacttgctttattcatcaatattaaagtcaggaagtaaaagtgtaatagccatgataacattcaaaatagcatttttgatgatcttaattatttttaaagccttcagtacctaaaatttatatatatactttcatattcccccctctaatactttccttgcattaacctggagcatacacaactttgaaaaagtcaaaaatcgagattgttttccagggtttaaagatagttgaaggctggaataaataaggatttgctgaatgtatcgttgctgctgttgttaagatctcaagtcaatccctccctggttgctgaagccatatcaccctagtggatccatcactcatcactacaccatccgatacacagggtcaccaactctcaggcttccaattttttccactgaataatagatcccaaaaagtggagacaacttgtacaattccctctcagaaggatcacacaggcggtagctcttcagggtgtccagtggctgtttcctgtctatgactccagtgtctgggtccaccgttgtcaaaatacacctggggcatgccattacctttgtcacttctacactaccaattaggagttcatcccacgtatcctcctcaaaagcatcacaggcggtcaccacaatattcggcctgaa

SEQ ID NO: 363140 - DNA, 565 bp, Homo Sapiens
ttatttattctatggtttctgtctctgatcatcaccttccattctataaaaagctcagttactgatttgctgggtcatggtcaaaattcttacctattatttatttcatatcaactttaaaaaataaattacttgcattctacatattactaattgggaagtaatatgcctcaaatcagttttatactggattattccctatgctttaaaccactgctctcaataaaacacttcctgattaatgtttgattattagatattttagtcttgttggggatattttagtcttgttgggttagccatgctctgaagaatctgtgaaagtacagtaaagttttaataagcaataaatgtaaccttttatataaatctcagtgctaggttaacttctaataagcagacgaacatgttacataaattataatgtctgtcttgtaaaaaagttgaggggactaaaagtttacgactctgatatggaagttgtcatattaaaaaactacattttaaaacatcaaatatttatactatttgcttttcaaataaaagcatagtgctgtttggcata

SEQ ID NO: 363141 - DNA, 352 bp, Homo Sapiens
attatgtcttaaagtgctaactctgttcactgcacataacctcatatgttcctagatgagaccactgaaatagaaagtgaaagtctatccaattcttccatctcattttaataagtcttagtaataactacttgtattttgaataaagaaatgaaaaatccaggacaaaataaaccagacaggatgcagggtgataggcatacactgagacttctaggcaagtgagcaactggtcagccgaattaaagcccttggaggggttcctgtaccctaggttcttaatacatgcttgttgaatgaacaatcggaggtagcttatttgtttgaataaggctttctgtgtgttactgca

SEQ ID NO: 363142 - DNA, 864 bp, Homo Sapiens
gtcagcatcacaagatcttgaacccaagcccctcttccccaaacccgcctttggccagaagccgcccctaagtaccgagaactcccatgaagacgaaagccccatgaagaatgtgtcttcatcaaaagggtccccagctcccctgggagtcaggtccaaaagcggccctttaaaaccagcaagggaagactcagaaaataaagaccatgcaggggagatttcaagtttgccctttcctggagtggttttgaaacctgctgcgagcaggggaggcccaggtctctccaaaaatggtgaagaaaaaaaggaagataggaagatagatgctgctaagaacaccttccagagcaaaataaatcaggaagagttggcctcagggactcctcctgccaggttccctaaggccccttctaagctgacagtgggcgggccagggggccaaagtcaggaaaaggaaacagggagacaagaattcagccaccccgaaaaagaagccattgcctcccttgtttaccttgggtccacctccaccaaaacccaacagaacacaaaatgttgacctgacgaaattccacaaaacctcttctggaaacagtactagcaaaggccagacgtcttactcaacaactcccctgccaccacctccaaccatcccatccggccagccaaccaccattgccagcatctcacccatcacaaccaccagtcccaagcctacctcccagaaacattaaacctccgtttgacctaaaaagccctgtcaatgaagacaatcaagatggtgtcacgcactctgatggtgctggaaatctagatgaggaacaagacagtgaaggagaaacatatgaagacatagaagcatcc

SEQ ID NO: 363143 - DNA, 531 bp, Homo Sapiens
gaggtggtgcggagtaccaggctgtgctgcccgaggtcagaaaggttcttgcaaacgtcctcccaaaaaatgcccaacgacaacatctccagcgcagattacactcaggacccttcagtaactccctgctgtaatccctaccaaattgcctgccgctgtcaagccgcataacagaccaatttttattccacgaggaggagtacctggaaattaggcaagtttgcttccaaatttcatttttaccctctttacaaacacacgctttagtttagtcttggagtttagttttggagttagccttgcatatcccttctgtatcctgtccctcctccacgccgacccgagaagcagctgagctgcgctggctctgggcagggagtgtgccttaatgggaagcacacgggctttggagtcaggcacaggtgccagctccagcttttgaacttgggcaattgtttaacctaacctgcaagttgattttgagggttaaataaaggcatacatgaaaatgcctggcaaattacctgacac

SEQ ID NO: 363144 - DNA, 308 bp, Homo Sapiens
ccttagtcatcccagacattcctttctattgattataggtctttagacaataactttcagccagtggcccataagaagatccttgagttcacctatgacttggaacatccccgcttggaattgtcctgcctttcccacagaaccaatgttcatcttacatgtcttgattggtgtcttatgtctccctaaattgtataaacccaagctgtagcccgaccatcataggtacatgttcttaggacctcttgagactgtaccttgggccattggtcactcatatttgtctcaaaataaatgtcttcaaataa

SEQ ID NO: 363145 - DNA, 538 bp, Homo Sapiens
gcccctttcttacctcacaggggcaagagggactctaaagagggcgtaagcaatagaggcacctgcagccctccttcctcagcaggaaatcaatgtggagccccagagggacattttatctcagagagagcatgctggccacaggacccagtgcagccctgcttcctgcaccgtgggtctttcctgatagctgcaggcttgagattgcagcctcaggataggacacgttcagatgccttccagactacacacactatgcttagattcgagagtctttcctgaccttaaaatttgtcccttgcttactttcacactgcagaagatttatatatatattcatcattatttttgcagcagtacaagtggaaacttcaaaaaaatcattccctttcatgtcctggtctttttaagtcttgatatgtaaccattttcataaatatccaaacagagattgtcattccccttaaaaacagaaacaaaacacaaaactagtgcttgtgaaaacacacagcgcaaagacaattatcctattgcgtta

SEQ ID NO: 363146 - DNA, 508 bp, Homo Sapiens
gcggccgcggcaggtgcaggtgctggcgccgtgcagggcgcggcacgcgggggttcggggggatgcccaggcccggtgagctcgctctccgcctgggcacttgggctccgggcccttgggggcggcgtgtgggggggactttggcgacccgggtcagccggccgccccctgggctgctggtgggcgtcgggcggcggctcctcccccgggcacgggcgcgttacacattaactgcgcggtcccgcgcgcccggtgcagggagcccgagtccagcgggttacctggcggcgggcgggcgcggccgggagcggagggccgcggtcgcgaagaggatgaagagagagttcccgaacaagtcggaagcagctcacaacaccggacgccgcgcggcagggctgtggacctggggtggtttcgtgtcccagtcttaggaaactacgcgcgaggcaccgtgctgaggcgtagaggtcaccctcgggaggtttcggtgaaacctggtgtgaaattc

SEQ ID NO: 363147 - DNA, 1074 bp, Homo Sapiens
  misc_feature (150)..(150): n is a, c, g, or t
cattctgtttggccgggccccccggggaaaggtcctaagaaggccctaagttggagggtttcaatatttaacccgggcctccgtgccgggccccttcttaccctcggtatgggggaagcgccggagaaagggagttctggcagcttctcngaagacaccaacaccccactggtgcaaaggtattgctgactacagacccaagggatggagaaaccattgagctgaggctggttagctggtagcccctgagctccctcatcccagcagcctcgcacactccctaggcttctaccctccctcctgatgtccctggaacaggaactcgcctgaccctgctgccacctcctgtgcactttgagcaatgccccctgggatcaccccagccacaagcccttcgagggccctataccatggcccaccttggagcagagagccaagcatcttccctgggaagtctttctggccaagtctggccagcctggccctgcaggtctcccatgaaggccaccccatggtctgatgggcatgaagcatctcagactccttggcaaaaaacggagtccgcaggccgcaggtgttgtgaagaccactcgttctgtggttggggtcctgcaagaaggcctcctcagcccgggggctatggccctgaccccagctctccactctgctgttagagtggcagctccgagctggttgtggcacagtagctggggagacctcagcagggctgctcagtgcctgcctctgacaaaattaaagcattgatggcctgtggacctgctacagtggcctggtgcctcatactcctcaggtgcaggggcagggacaagagaagggggaagtaaccccatcagggaggagtggagggttgcctgagccgcccatgtgggccattgggggagtgatgggaatgcccagcagtgatgacattgactactgactgagcaccccactactatgactgagcactcactcgctagatactatcttgaactgctctgtgaggttgttgatattttcatttttatctgtgctttacaaatcaggaaactgggaggccgggcatgggtgtca

SEQ ID NO: 363148 - DNA, 332 bp, Homo Sapiens
gagtatgtatcctgaactttggttcataaatatggctcttgaacccatagaccccagttgaagatggaattttcaggaaagggaaaatactagataattctagaattctagtcttcgtgttagatgtttatagcccagcatcttgggacctttccagttactaggtttggacagcttgatgtgaacgaatgggataggatttttaaaatcagccagctccatgcccaaaccttcctgtttgcagaactttttaatgtcttttctttttcattaaaacttttttgttcgatatgcctctttccacattttttccttgcaatgtatttattatt

SEQ ID NO: 363149 - DNA, 763 bp, Homo Sapiens
agcgggataaactgaaagcttgttctatcacaggtatgagctgctatgatacatgaagaacattccatgaagtatgttttaaaaccttgttatatctgagaggctttaaaagcctattaactgtttcagggcaaccgcggtacagacgtggtctctgtgagacttccacctgaccccagttttaagtggtacgaatgttgtgcatttaatgttaaaggacagtctggaataataaagtaagtagccaacctgggtgcccagcagtgctgagacctggctgctctattgtaagctttggaaacacaatttatgcaacagatgtccagatatgattctatttatggaaaaaagtttatatgtgttttacaaatggttttaccatcttatattaaaatgaccttttgacaggtgtgcactgttttgtctccagtgagcacataccatgcggattttatatgtacatcagtagtgtgaatccactggcacagtgtgtgtaaatgccagatgtggtgagattttatcttataaatgtgatcagataaaataactcctgacagaaactgtaaggaaaccagctgaatgtttgacctgatgactgatgttgtatggtttatgttaaatgtatattcttttaatcaatgaataaagcattaaaaatgatcattgtaatatattttattgtatatgaagcatgactacttttagtgttaaataacttgcaatatccttatattgtgtgacaaataaaaaaattctccaggct

SEQ ID NO: 363150 - DNA, 1333 bp, Homo Sapiens
  misc_feature (1087)..(1198): n is a, c, g, or t
  misc_feature (1207)..(1221): n is a, c, g, or t
atcaggccaaatcggccgagctcgaattcgtcgagagcggaatcgagggcaacgctgctacttatcagagcagaatgggctgtagtttagtgaaataggaaagctgcaacacactgtggagtgctcccgtgtaaataaaaagaggaaaaaagtttctcaagtcgccgctgcacgacgtctggccggcgctggagcgggggtctgcgctctcccgagcggccgcgcgctggactttattgtgccgcaaccagccccagttcccattgtttgtgtttttttcaaaatatggcaaaggttcaggtgaacaatgtagtggtgctggataacccttctcctttctacaacccgttccagttcgagatcaccttcgagtgcatcgaggacctgtctgaagacttggaatggaaaattatctatgtgggctctgcagaaagtgaagaatacgatcaagttttagactctgttttagtgggtcctgttcccgcaggaaggcatatgtttgtatttcaggctgatgcacctaatccaggactcattccagatgcagatgcagtaggcgtaactgttgtgctaattacttgtacctatcgaggacaagaatttattagagttggctattatgtaaataatgaatatactgagacagaattaagggaaaatccaccagtaaaaccagacttttctaagcttcaaaggaatattttggcatctaatcccagggtcacaagattccacattaattgggaagataacacagaaaaactggaagatgcagagagcagtaatccaaatctacagtcacttctttcaacagatgcattaccttcagcatcaaagggatggtccacatcagaaaactcactaaatgtcatgttagaatcccacatggactgcatgtgaccacctaccatccctttagtacaaattaagctattaaaaatacacagaactatttccctgaaattccgtaagtacatagtcaaaacacaatgtgaagaatttgtttaaaaacatcctgtagaaagtttataagaaaaccagtatttgaacaaattgtggaatataaatacaactatttttaagtaannnnnnnnnnnnnnnnnnnnnnnnnnnnnnnnnnnnnnnnnnnnnnnnnnnnnnnnnnnnnnnnnnnnnnnnnnnnnnnnnnnnnnnnnnnnnnnnnnnnnnnnnnnnnnnncctggcggnnnnnnnnnnnnnnnaaaaagttttaaaaacctttctttggggccggggccccaaaaggaagggaaacggggcaaatactggttcccaagagaaaaccgggcaaggaaaagggttgggattccccac

SEQ ID NO: 363151 - DNA, 624 bp, Homo Sapiens
  misc_feature (490)..(506): n is a, c, g, or t
atgtacagttatcattagatcagactaccggtctatgacaataatgtgattctggacattgcccatgtatatcctcactgatgtttcaagctaagccaaccaccttatacagagatctagaatctctttatgttctccagaggaaggtggaagaaaccatgggcaggagtaggaattgagtgataaacaattgggctaatgaagaaaacttctcttattgttcagttcatccagattataacttcaatgggacactttagaccattagacaattgacactggattaaacaaattcacataatgccaaatacacaatgtatttatagcaacgtataatttgcaaagatggactttaaaagatgctgtgtaactaaactgaaataattcaattacttattatttagaatgttaaagcttatgatagtcttttctaattcttaacactcatacttgaaatctttctgagtttccccagaagagaatatgggannnnnnnnnnnnnnnnngactcatttaataatgctcttgtgtttacctagtatatgtagactttgtcttatgtgtcaaaagtcctaggaaagtggttgatgtttcttatagcaattaaaaattatttttgaactg

SEQ ID NO: 363152 - DNA, 460 bp, Homo Sapiens
  misc_feature (22)..(22): n is a, c, g, or t
ttagtcctcctgctctcaaccnccatattttgcctttgaatacgtgggttttagtatatatagcccaaaatggtaactgtctccagaacagcaaccacattgaattcttgtgacttaggaaagcttcttatagttgctgacattaattgcaagaaataactatatactactttgagaagtaaacatgtcaaaaaaaacaaagttcagatatgggacaaaatttaaaaattcagtaacatttataaacagaattgaatgaaaagagttacagaccaacttaaacatcaattcgtgtcagtaaactgacttttgggggtaatgatcattgttttgtatctcaaaagtattgagtttagaaatcagttgtatgatactacctttgtatgtctgtcttttcccgtgtatttttaaataactggtgatctataatttaataaaatttttcgttggtgtaatatta

SEQ ID NO: 363153 - DNA, 438 bp, Homo Sapiens
aatcaaccctttcaatgtaattacaaaatgaaattcatggttgaaaaacaaaagagggcagatataactgagaggttttgtgctaaggcttatattgttacacatgtaaataatgaaaatattgttatatatcaccagatctttttaatgaatttggtcattgtgttcctttgcagtgcaagtgtcttgtgcttcgtaaagtgcccatttgtttcctccatttcaatccaaccccccctccccttccaacccaaaggaaagtgacaaagttctgttccatcagccttgctaatcccaagctaggcccacttacagtttacagtctcctgtggctcttgatcggttgtccaatccttcgtcgctcccacaaccatcttcctctggcaagtactatgcgataaatcattacagttgtaatcacatacagtattcatccta

SEQ ID NO: 363154 - DNA, 811 bp, Homo Sapiens
atcttcttaaggagctggtctgtggatcttgcgcttgaatagatgaacctacataagtctctctgtgagtgctcttcctgatgctcactcagtgacagtcacttccagtcctaatacaccttccactatggtcacaggattgacgagttcacaaggctgattctacacatttactgccctaaacctctaaatgcagaagcttggccataacttggatgagttacacctataataaagctgtgtgtcatggacaaagatcttctgacttgagccctgaaggcatgaacaagcatgccagctaatgatttgaaggtcagcaagctaattgtaccacttgtaatcctacgtattgttacaagcaacggaacaatactgttgcgtgaaagccccttgttgtaaagcctgtaaagagactcaagtctctgagagatccagttttccttgtgcaacgaaaatctataccagataatcggtatagattgctattcagaagaatgataaaaagatgcctcaaatctagtcgaaggctcacctgatggaaaatggagctgggctactgagatatttttcattatatatttgataacattctctaattctgtgaaaatatttctttgaaaactttgcaagttaagcaacttaatgtgatgttggataattgggttttgtctattttcacttctccctaaataatcttcacagatattgtttgagggatattaggaaaattaatttgttaactcgtctgtgcacagtattatttactctgtctgtagttcctgaataaattttcttccatgcttgaactggg

SEQ ID NO: 363155 - DNA, 546 bp, Homo Sapiens
agagaacggagctgggaatgtgactgctggagcctgagaggtggaggagttctgatcccccgttacttcctagcattttctcctcttgccttaaaagttccctgtatgtgaaacgggaagtcctgagagtgtgtgttggtggctgtgcgcacgcacacaagacgggagtcaccctgtgcttcctgcccaagatactgacccattgaacccccaaagcatctttctctccacaaagtccgtggtgccttcctggtgggctgcagacactaatggtgttggggggtcttggaacagcttctctatgtgtggattcgtgtaaatgcgaagagttcacatataaagaagtgactttgattctgtgattatattgatttggtacacagtaaatgggagtttaaaaaatccaaagactctaatgacttgtaaagactctaatgatttgtatcatgtaatgaactaaaccacctgtaattttgtaccgtatgtgtctttccatcaaatgaccaacagcttctcaataaaaccagaccatttctcacctgcaaa

SEQ ID NO: 363156 - DNA, 569 bp, Homo Sapiens
ccatgccttagaaattggatggggtccccagtgagctcctggattctgctggctgaaagcaacagtgcagacgatgagaccgacgatcccaggaggtatcagaaatatggttacattggaacacatgagtaccctcatttctctcatagacccagcacactccaggcagcatccaccccacaggcagaagaggactggacctgcaccatcctctgaatgccagtgcatcttgggggaaagggctccagtgttatctggaccagttccttcattttcaggtgggactcttgatccagagaggacaaagctcctcagtgagctggtgtataatccaggacagaacccaggtctcctgactcctggccttctatgccctctatcctatcatagataacattctccacagcctcacttcattccacctattctctgaaaatattccctgagagagaacagagagatttagataagagaatgaaattccagccttgactttcttctgtgcacctgatgggagggtaatgtctaatgtattatcaataacaataaaaataaagcaaataccattt

SEQ ID NO: 363157 - DNA, 592 bp, Homo Sapiens
agttaatagtacacatcatgctaatatacatttcctttaaacatccacaaattcttaaaaagattgaatcagtaaatttcatttcagctaaaaatggagtctaatatattgttatcaaaagatacatttttacccaccataaatgttacaatatctgaatatgcttcgtcaaactatccctttatgcaatcgtcttcatattgtttttatgattctaatcaagctgtatgtagagactgaatgtgaagtcaagtctgagcacaaaaagataatgcacaatgagattgcctaccattttataggatatttactatgtatttatacgttaagacctctatgaatgaatgtatcagagaatgtctttgtaactaactgtttaattcaatctgtaataaaaatctaactaactaactcatttatttctattaaaaaggtattgtcctttaggcggggaatgggaatccttgctgcactgttgcagtcattctgaaaggacctttccctgtacttacctttcaacatgcttcaatcttatcaacgctacattttgtatttttcaaacaagtataaattctgcaataaagagatgtag

SEQ ID NO: 363158 - DNA, 546 bp, Homo Sapiens
  misc_feature (46)..(46): n is a, c, g, or t
  misc_feature (63)..(63): n is a, c, g, or t
  misc_feature (84)..(84): n is a, c, g, or t
gaacctgcagcatatcatgccgtcactgtatttgtttgtggaagcngagtttgtatatggttngaatcctttaaaaagtttttngagtctagggccaaacccagtatgaggcattcatatgcccagctgttaagacacagcagtcctaggaagcaatagctttggagactttcagcttccagataggttatatacttaggtaaaatatgttcaacaatgggagcatttttgttggagttaataattatggaccatgttaatccaaaagtatccttggaatatttattatagtagtagacactgttcatcttactagcctagaacttattttaaaatagtttaagtaagtaagtccaagcttaatttgttattgacagaaaagtaatacagcctaatctaatctaagcaaaaatgtaagggaataaagtctacatgcatcaactgaacagccttagaatgaggaactgaatggatatattaatttccatggtaaacttgatactggttttcataatggacactaaggaaaataaagagccatattta

SEQ ID NO: 363159 - DNA, 277 bp, Homo Sapiens
tcaagtatctctctaataactaaatgccacttatttgcattctccttgtggattttttgtcacctaaggaaatgcatttgatgagtgctggaaacttcttaagtgctttacagtttgttttcattgtttgcagcggatcactggacatcaaagattcattgcacttatgaacaaggaaccttcttttcaatttctgtgtaatttgcaaggctgtacaatgtgtgctgatgcaagcctttttcagttcaagagaataaatgtttacaaataaaaaaaa

SEQ ID NO: 363160 - DNA, 525 bp, Homo Sapiens
ggctggccctggcatgtctgctaacatcccattggtcaagacaagtcacatgctcaaccccgggtatgggaaattatgctttgccctcggtgggaggacatcacaaagttagactgcaaagggcacacaggtcaggagaacggagaagggcatttaaactaaggatgctgcttttttacagtcttcagagacgatgaacctcctgtcacaggaggtatgcaaacagagaggtgtaggcttggtggtaaaaagggatcaagcgtggatatagagttgggataaattaatgattcccaaatatcaatcatttctataacatagtcataattttccccatgaacgtttattcatttaatatagttccttaaatcatctaagtattctttttttataagctatatttttattattaaatgacttgcttgtaaactacacttgagaccactactttatctagaaaactgtatcatttgccataaagagaaggctttattactctaaaaataaaatgaaattaaaatgtaa

SEQ ID NO: 363161 - DNA, 509 bp, Homo Sapiens
caaaggaccctctgggaatccatagcttcctaatctggagatgggaggtcataagggagacgctgtggggttccttgaagtttcttgggttcacagaggagccccctcacttggtgttctcccgtgagccagcctccacctgccaaagacactctggtcctcgtatagtgagtaatggggctcagggcctctccaacaacagagaggagctgatgctgtagggctgaccccgtgacttcctgagtcctcaccctgtccagtgctttgagattcttcccacctccccatcctcaccagccggatcgggcgctgtgcagtgtggtcagcatggtgaagaaagtcatttccttggtggacagtattcctctttatctctcattacactggaaatgttatttctgctgtatcatccgtgctcaacgttttagtctgtcaggctcaccttctctctggaaagaatttgcttaacttgacattccatgtgccgctaataaaatatattttgaaag

SEQ ID NO: 363162 - DNA, 404 bp, Homo Sapiens
tcgcttagaatccatggggccttctcctcaaattcaatcttcccaggcatttcatgaacttgcgtctagtttctgttccctctcaaattgcccaggctgtcctgtgagtgacagcagctatttcgtgggcctcctctggaatcatgagaagtcacccaaacaatctcagttttctagctcactccgtcttgacatttctacactgtcatccttggttttcttggaaattaatttgcttttcttcattgtctttctttggagctgctttccttttgttggttactattttatttttagcttctcacaccataccgacatatgttggttattcttttagacatgttttttgttgttgttgtcacctggaacttttgtatcttgaataaatttggggatcaaataca

SEQ ID NO: 363163 - DNA, 526 bp, Homo Sapiens
  misc_feature (36)..(36): n is a, c, g, or t
  misc_feature (39)..(39): n is a, c, g, or t
  misc_feature (79)..(79): n is a, c, g, or t
  misc_feature (194)..(194): n is a, c, g, or t
attataatgggccggcaaaattccctcaggggctgnaanacgtgtccaaatacccggtcctgatagaggagttgctaantcgtggctggagtgaggaagagcttcagggtgtccttcgtggaaacctgctgcgggtcttcagacaagtggaaaaggtacaggaagaaaacaaaatgcaaagccccttggagganaagttcccgggatgagcagctgaacagttcctgcccactccgacctctcacgtctgcgtcagagacagagtctgacttcaggcccaggaactcactgagattccccatacactggacagccaagttaccagccaagtggtcagtctcagagtcctccccccacatggccccagtccttgcagttgtggccaccttcccagtccttattctgtggctctgatgacccagttagtcctgccagatgtcactgtagcaagccacagacaccccacaaagttcccctgtttgcaggcacaaatatttcctgaaataaatgttttggacatagaaac

SEQ ID NO: 363164 - DNA, 607 bp, Homo Sapiens
  misc_feature (31)..(31): n is a, c, g, or t
gtggtgtagaaatgcaagtattttggcttancagcatgaagtctgggttgcacattgtatcagaggtgctgtaatctttccagtatctctgatatacggctttctggttgaatgtcaccctgggccctcttgactggataaacaaccatgaagggctcttctctgtgaagctgccgagagcttggtggtagaaagcgatgtttctaaacaactgcagcggctctttcctgtctgaactgcatcgtgtgtctgactgccttgctgtccatacatacagactccttcccaggcccggctctgtgcagaacttcaatgttttaccacatttttctctcctgaactccctttgtcagccccagggtgttgaggctgggtcctctctagcaatctctaccttcagaagagacttttctaaatattttgcttttccagttcttgttgcttttgtcattgtgaagagtcacccaggatgctggcgcttggtaccctaagatcagaagtggtgtgtgtgtgagctgtgagacatgcacaccctttcagagtgatactgtgtggtggaaggactgttagaactcaaagaatagttaataaatccagtgtattattc

SEQ ID NO: 363165 - DNA, 652 bp, Homo Sapiens
tgccacgtggaattggattcagacatccatttccaggggcaaacagcaaagcctgaacccataaaccgaaatgataggtgaagtgggggggttttatccaaggtctcaagcaagcaaggtcggggaatatcatagagtaacaagtgcgggtcagccaaagaaacattcacggcgggtgaaccaataccataagcatgtattatctaagcactggatcaagaaatatacatgtggtacaagctctcaatttggtccatttattatcaaatttttaaaatacaagttgggtatgtgattgggaaaagatgccttcgggatcttaagccagtggtcaggggaggtcctcagggctgcaaaggtcaagacataacccggttcctcaccatcatgataccagatacaggtgaatacataggaactatcggccggtgtcctcaatctcccttcaaacaagatgctgatttgtagggtacttggcaggttaaattaaaccagaagaggtgacttaataaaaaagggaatgacatttagggtataaagatctcataagaaatgtaatatgtaaattatatcttgctttatgttgtaaaatatacattgtttgcgctagaatagaaatgatttcttttcaataaaaagaaagaaggactct

SEQ ID NO: 363166 - DNA, 1972 bp, Homo Sapiens
gggtccggaattcccgggatctgagaaagagcacattgtgggggcccactccatgtgatgtttgcttggttgcctgttcccttttctacctgcagagcacggttcccataagggcggcgagatcagcctcctgtctcatctggaagaccaccactctggggtctcagaggaatgatggaagccttggggtttctaaaattggaagtgaatggccccatggtgacggtggccctgtcagtggctctcttggccctcctgaaatggtactccacatcagcattctcaagactggagaagttaggcctcagacatcccaagccttctcctttcattggaaacttgacatttttccgccagggtttttgggaaagccaaatggagctcagaaagctgtatggacctctgtgtgggtactatcttggtcgtcggatgtttattgttatttctgagccagacatgatcaagcaggtgttggttgagaacttcagtaactttaccaacagaatggcgtcgggtttggagttcaagtcggtagccgacagcgttctgtttttacgtgacaaaagatgggaagaggtcagaggtgccctgatgtctgctttcagtcctgaaaagctgaacgagatggttcccctcatcagccaagcctgcgaccttctcctggctcatttaaaacgctatgcggaatctggggacgcatttgacatccagaggtgctactgcaattacaccacagatgtggttgccagcgtcgcctttggcaccccggtggactcctggcaggcccctgaggatccctttgtgaaacactgcaagcgtttcttcgaaattctgcatccccagacctatcctggttttactcttatcatttccatccataatggtcccactggcccggattttgcccaataagaaccgagacgaactgaatggcttttttaacaaactcattaggaatgtgattgccttgcgggaccagcaagctgccgaagagaggcggagagacttcctccaaatggtcctggatgcccgacattctgcaagtcccatgggcgtgcaagactttgacatcgtcagagacgttttctcctctactgggtgcaagccgaacccttcccggcaacaccagcccagccctatggccaggcctttgactgtggatgagattgtgggccaggccttcatcttcctcatcgctggctatgaaatcatcaccaacacactttcttttgccacctacctactggccaccaaccctgactgccaagagaagcttctgagagaggtagacgtttttaaggagaaacacatggccccctgagttctgcagcctcgaggaaagcctgccctatcttggacatggtgattgcagagacgctgaggatgtacccgccagctttcagattcacacggggaggcagctcaggactgccaggtgctggggcagcgcatcaccgcaggcgctgtgctaaagatggccgtgggtgccctgcaccatgaccatgagcactggccaagcccgaagaccttcaaccctgaaaggttcacggctgaggcccggcagcagcaccggcccttcacgtacctgcccttcggggccggcccacggagctgcctcggggtgcgtctagggctgcttgaggtcaagttgacactgctccacgtgctgcacaagttccggttccaagcctgccctgagacccaggtaccgctgcagctagaatccaaatctgccctaggtccaaaaaatggtgtctatatcaagatcgtatcccgctgacacagaaggctgccgggtggggggagggcacccccaaattcaaagaaaaccctaagtgtggatgttcagaattttggaaaaatgtcactgaagtgattgaaagagtgcctggcatgcaaggataagaggttctttacataacatttcctaaatgcttaataaacgtttgttgcacttggttttgacattgcc

SEQ ID NO: 363167 - DNA, 134 bp, Homo Sapiens
catagcacaaatttagaggcattgagttgaccatttctagtttctatacctgaaggaacccattgattttaccagtttttatttctgtagattggatgtaaaaatcacagattcaataaattaataaactttgt

SEQ ID NO: 363168 - DNA, 1199 bp, Homo Sapiens
ttgtcccataaaccctggttttaaagtactgggttggctggccttcaaataggacagaagcctcttcagaaattaggcatgtgttgggaatacgagccccctatacaggcctcgattccggactggaaggcctccctactcagctcttctcccgtacacacagacttggagtccgtggtcaaatgcagtagtcaatccaaaggcaggaggtaaaggtcgtcttttgaaacatggcagctgggaggactgggtggcagtagggtgggggccaggcccagggaggccttccaacagcagttgctcgaggagggttagcctgaaggcctcagggtccttcctttgcttggtttgagacagccatggcgctaccacactgcagggctcctgtggggaggccctgacccccgggatggtgctctctgagctgaagtcccagaaggggttgaatgaagaacgcagggactactgggacaaaaatcagatgagcagcaagcagcccacaagccaaaccctgcacacctgggcagagttctcaccgcaacataaagcagagtccgaggagccggccacctggtttcagtgagggagatgctggggcctttgccaggagatctgtttcttccagaacagccactggggcctcaccgtttccattccatgacctgggtcaaccgaaacagagctcactccagagatccgcacagcccaaatctcagaggcagctcaagctgggacctggcccagaacagatcaagactaggacagggagcctttccaagttccaggttcccccaaggtaggaaagacttgggcactttgtcctttgatatcctcaaaggtctggacagggtgagccactctggggcttgaggcactgtgcaactgttgtctgtggggctgcaaagcaagcccctgcctctccgactcctcccacctgtggaatgcagtgcgcatcttgctaagaacagcagcttctttggtctcagtttcttggagtcaaggagcaaacgtcagtcacgattgctggggtctgcaatttgcagcgcaggaacaatgggaaaagggagggccctgcaggcccctgatgaaaatccaccttagtggagttgctggctctagcagcagtctgcagagcgggcagcattcccacgggtggcacggcccccatcccaagcatacgacgtcttctggttttggaa

SEQ ID NO: 363169 - DNA, 1190 bp, Homo Sapiens
  misc_feature (809)..(867): n is a, c, g, or t
  misc_feature (1000)..(1058): n is a, c, g, or t
cgtgggtggcgaattcggcacgaggcaccgaagccactttctacaggccagcaggggcttgttgcaggctgtgggttttggtgtggtttgtcagaggctaattctgcagagtttccaaaaccagaagacatcgtatgcttgggatgggggccgtgccacccgtgggaatgctgcccgctctgcagactgctgctagagccagcaactccactaaggtggattttcatcaggggcctgcagggccctcccttttcccattgttcctgcgctgcaaattgcaggccccagcaatcgtgactgacgtttgctccttgactccaagaaactgagaccaaagaagctgctgttcttagcaagatgcgcactgcattccacaggtgggaggagtcggagaggcaggggcttgctttgcagccccacagacaacagttgcacagtgcctcaagccccagagtggctcaccctgtccagacctttgaggatatcaaaggacaaagtgcccaagtctttcctaccttgggggaacctgggaacttggaaaggctccctgtcctagtcttgatctgttctgggccaggtcccagcttgagctgcctctgagatttgggctgtgccgatctctgggagtgagctctgttttcggttgacccagggtcatgggaatgggaaacggttgagggccccagtggcctgtttctgggaagaaaccaaatctccctggaaaaagggccccaagcaatctcccctccactggaaaaccagggtgggcccgggctccctccggaactcccggcttttaatggttgccnnnnnnnnnnnnnnnnnnnnnnnnnnnnnnnnnnnnnnnnnnnnnnnnnnnnnnnnnnnctcggcttggcctggcctcaatttgtaatttttttggccccccacaaagttccccttgcgggttccttcccttttcaaccccccctttttgtgggaattttccggcctccaaagaaaacccaccctttccccnnnnnnnnnnnnnnnnnnnnnnnnnnnnnnnnnnnnnnnnnnnnnnnnnnnnnnnnnnnacaacccccccttgggcctgtgcttccaaacccaaacgcaaagggagagggcccccctggagggccttttatagagtttaaacatattcccccaagacaaacatccgcgtggtgagagagaggtttctctga

SEQ ID NO: 363170 - DNA, 1931 bp, Homo Sapiens
  misc_feature (477)..(477): n is a, c, g, or t
  misc_feature (978)..(1022): n is a, c, g, or t
ccagtcacctccacggttcaccgcatgcacctctgagcaggtctgcttgtggatgggtcgtcatgcccggtgcagcgcaccaggcctccatgtacgccatgtcctggtctccgtgtccagatggttctgcacctatcgggtcttaagatcctgcccactctgcaactgctttagtccggatgggccagagaaggagaaccatggcaggagccggaagcagctgttgctgcagccagccagagggtcccgagggaggaacgcgagcgggcggccggagcctgcagcggcccacaccttcaagagcccaagccagcgctgcccctctcccgggatcccatctagagagggagctgcggcccagggccatctccaggggtcggggacgcacgtgcggggcgggaagcagccgtcggcagcaggccccgggcgcatcatagcacgcgtcctaagtggccgcctggccctcgggcccgtgcncgtggctgcgctgatgggtcttgagcgagccctcgcgcgcgaagctcttgccgcagcgggggcagaagtagggccgccgctccccgaagacgccggggcggcgcgggtgcggcgcgggcatgcgcgcgtgggtgcgctggtggttgagcaggaagcgcggctcgcggaagcagcggccgcactgcgcgcactggtgcggcttctcgccgctgtggatgcgctggtgcgtgagcaggttctgcttgaggctgaagcagcggccgcactcggggcaggggaagggccgctccccggtgtgcgtgcgctggtgcacctcgaggttgtgcttgacgctgaaggccttgccgcactcgggacacacgaaggcagccgcgcggcccgctccggcgtgcgccttctggtgccgcaccaggctgggctgctgcgagaaggtctggccgcacagcgggcagcggtagggctgctcctctgcagggtggtggatgaccaggcctcgctcgnnnnnnnnnnnnnnnnnnnnnnnnnnnnnnnnnnnnnnnnnnnnngaggacgccagctcggtcatgggcacttccagctgcaatcaccagtccatggcgccgcctcccgagccttccgtctccgctgcagcgccgcagtcgccggcgtcgtcgcagccgcacagcagccccgtgaggctgggaggtctaactctccggcagcccggctggcggaaaacggggctgccagcgctgcgcccgcccgggccggagcggcgaccatgcgggggccggttccggggcctgaacgtcccacggagcgggccctctcaagccccccgatccgccgacccagacattccccctttcgggattccctgaggcctgcattcggccgttatagcaccatccctattttcctaatcccaaggccaggcccacaaaccgcccccagcgacaggaaagagggtcggacggaggcgccggcctttccccgggtgacatgggctgagcgccggagcccggcggcggagcggccctgggcgagggtttcaggactggagacaatagtcaaaggggccgaatcgaggagctgccctcgctgacagtttcgccaaagtctgcctgactatatggcctgggttatatcactagagtgaccagagggaaaggaagaagacatcaggcccctgctgaccccacctcctcagaacggaacccgcagtcaagccagagatatcccataaaagagcaacttacgacgtctggagtagcagcgggcgtgagagggcagaaccaaattacagcttccagctgccatttaatgataatgtcccttactcggacataactttgccttttacaaagcccttttccatgttatgatctcgtgggaaccttccaataaccatgtgcaccctaccttgtgtgggttttatcccattttatagacgggaaaataaaattgaaacacag

SEQ ID NO: 363171 - DNA, 798 bp, Homo Sapiens
gcggccgccgccccagtcacaggccagcagtcagtgcggcgggaagatgtccgcgcactgctgcaggatgagctccaccacctggttctggaacaccatggtcatgggcatgctggtctcttccacctcgggccgcagcagcgtgggcccgaacacaatggccacgctctgcaccgacatgcggttctgctcgccgtgctcgatcacccggcagaggtgctggaagagcatccgcagagtgtcggtggttggggagcgggcagcgagcgaaccaagtcacgcacacagccgctgcgccgggcctgggcctgcaacttgatggccgcaatgaactggcggaagtgcgagaaggggaagtaggggctcgggcacctcccgaaagaagagcttcagggctccggtgataacgtggacgtcctcccagcgcccgtcatccaggtcaaggcgctcatcgtggtccaccttatagcgtagcttctggatggtggccaggtttccactgatgcggtacagcccgtcgatgtccagcccgcgggcctcgacggcgcggatgcactgctgcacgaagcgtggcacccggctcctctcgcgctcacacagcgcggccagcgcgcagccgaacacctggtctttgatgtagcccttctcccgcagcgactgcagtgtgggccgcctctggaggaacttgcggagcttgtgccggaccttgctcaagtcgctctccaggcccacggggcccagggcgggcgcggctgcattcggtcgcgcgtcctcccctcgtgccgaattcgccaccca

SEQ ID NO: 363172 - DNA, 851 bp, Homo Sapiens
ctttaacaaattgaaaaatgaaatagggtgttttccctttttgtgcacacctatattaccttaagaaatttccttccatagacagctgcctcaaagggaaatcctctttaaaccgtagttggcgcagaggtcagtcctagtcggagcttaggaggggcggagacgctcacatcgtctgacttgagtcgccactgattgtggcaacagctttgcctcatgagtcaaaaattggcaatttcttttgatttttagttgttgaatttgctgtttcaagcatttgtacatattagaagtctaaggagtagcaagtcagtgggaggactttttcacccctggcattagcagcttcgacctcattttccagatgcaccagctcctattaataagttagcaaggaaagtgtatgtcacgtgcaggaacagtgaggcagggacaggggttctgctccttctcacttcaccaccggcacacagcttgcccctgtctttgcccccaaaggtattttgtgtctagtgtcaaattggagctattcttcactggtccttaaccttgggttttaaaaagaaggcttctctgtttgggtagcgtaagagctgagtatagtaagtcctcttccaaagagatggcaatatgctgggcatctactttaaaacaaagttgtctgatttttgcaagagaggttaggattttattgttcttatttccctttacagttctgcagttccatcacagtatttttttaaataactcaggtgtatgagaagaaattagaaaagaaaattaacttatgtggactgtaaatgttttatttgtaagattctataaataaagctatattctgtaaaaaggat

SEQ ID NO: 363173 - DNA, 560 bp, Homo Sapiens
  misc_feature (459)..(459): n is a, c, g, or t
  misc_feature (473)..(473): n is a, c, g, or t
  misc_feature (479)..(479): n is a, c, g, or t
  misc_feature (523)..(523): n is a, c, g, or t
gactgatttcctggtgggattatggtccagttttaccaaagaaccaattccttgaatgttggaatctaactttttatattgtcattattattgttgtttttaaacggttctttgtcttttctgttttatttttctcaagctgctttcaggagctagcagaaaataactcaaagttgaagactctggaagattttgctttaacctaactcgcattgatgtattaaatttataattttagcattcccaatagatcctatcattccttaaacataataccctttgtcttggagtagaatactaagttagagttagtgggatttctagtttagggagaggagctcaaaactataatctttaacaaattggaaaaatgaaaataggggtgttttcccctttttgtggcacacctatattacccttaaggaaattccttcctaggacagctgcctcaaggggaantcctctttaaaccntagttnggcgcggaggtcagtcccagtcggagctaggaggggccggagangttcacatcgtctgacttgaggtcggcacggttgtgg

SEQ ID NO: 363174 - DNA, 619 bp, Homo Sapiens
tgaatgaattatacctaaatctgggacagggaggtgacagtggaacaggctaccaatcagaactagatgacttttaaggctcctcctattatgagacttcaatttccaaagagaagaactagcagagaaattgtatttcagtaattttaagctccttctgtcttgtagagtcttgttatagttgtataaatcaaaaacacagaataaggaacatatttaactttttttcattataaaatggttagaggaccctaccccctctagattccctgatttccccaggcctgcagcatacagtaagatgggtccctgtgccaggcctcaatactgccagggaataaaaccagagggagaggaccctcagtgtcatatcaggaagcccagtgccagaggacagacaggttcaaaactggcttttcctctgggcctgggttggtgctataggccaagggtcattttatacttgggtataaatcaatcccagtttgggaaaagattatttttaagcttaaaaggctgacatgtgccattatatgtagtatgtaatatatgtaacatcttccaattcttttaaaataaaattaatatttataatggatatttaatgattgttattttt

SEQ ID NO: 363175 - DNA, 417 bp, Homo Sapiens
ctgttatgtacttagtgttagagggtcaaaataatctttctgcttagcatctcttaaaccatacctgcaaatatagcaggattattacatttacagtactttaatacttgtataaactatgcagaaatttttaataaagtgtaatatattttataagctaataagactgaatgggtaaaggtttttagcatgcattagtatacttgcagatactgaaacattttggtaatctttcttactaaagatgtgaatgtttaatgtaccttctctgtttctactctgtagtccaatgggaattcagtaatgacattttgtcatgtcaaactgtgaacataaatttgtactgtacagtcctcatatactatatacagtatgcaatatatattatatacttgttaataaaaccatcagaatatt

SEQ ID NO: 363176 - DNA, 435 bp, Homo Sapiens
gttatgtccctagtgttagaggggtccaaaataaacccttccctgccttagccatcccctaaaccccatacccggcaaatatagccaggattattaccatttaccagtacctttaataccttgtataaacctatgccagaaatttttaataaagtgtaatatattttataagcctaataagactgaatgggtaaaggtttttagcatgcattagtatacttgcagatactgaaacattttggtaatcctttccttactaaagatgtgaatgtttaatgtaccttctctgtttctactctgtagtccaatgggaattcagtaatgacattttgtcatgtcaaactgtgaacataaatttgtactgtacagtcctcatatactatatacagtatgcaatatatattatatacttgttaataaaaccatcagaatatt

SEQ ID NO: 363177 - DNA, 485 bp, Homo Sapiens
gggctcaaaccatattctgaccttggcttcccaaagcactgggattacaggtgtgagccactgcgcccagccaaggagggaaaaattctaggatataataagatccagggtataaccctgaatgtgccctaaggaagtagagtgaatgaagaccattagactccagaaggtcagaaaacatgagtcaagcaacatatgcaagtcacacatcatgatggaggaaagggaaggactgtggacttcaaccgcagatatcacttgtatgttgaaggaaaatgaaaaaggagaagaggtggtaaatacaaatggtatgagctggaaaagaggaaggttttttcacagcaaaatgggaaccgtaatggcctggtagtggcccacaagaaccgggggaatgacagcactatctcaagcattcacagtacaacagggtgaaggataatggcagatattcagtatagaaagataaggagaagtcctgtccttgg

SEQ ID NO: 363178 - DNA, 266 bp, Homo Sapiens
ctgccgtcctttcaaatggatatggggccttccatcgtgcacccggtgatgggagtcatggacgtggcgcgcccggaggcggctgccgccaagcccgacgcgaaaccccgccccgggacgcagcccccccaggcccgctgccgccccaacgcggacctcaagctgaacgacgtcatcggcctctaggttccctcattccccgcgcccttcccgcccggcaccccacttctgtatacataaacggccaaggtgtgtgcccggaaaaa

SEQ ID NO: 363179 - DNA, 498 bp, Homo Sapiens
accggaagtggaaatcctgtttcctgtaggcatttttgaaaccctgctttttggatctgtagcaaatccagtgcaggcaacattatgtggaaatagaaacagggctcctgctaggagattgacattctggctttcctttggaacccctcactgactcatcgcccctgaagcaggagccagcaggtcccaaggctcccctgctcctgtccctgccccagggcgaggtaggaagccggaagcctgggcaggctgagcccagccgactggaaccagggaagagcctgtgggtgggtggaagggagggaaggaggccagattcctccagaactggggaaaagaacaggttttgaagttgggggagggtttgggtttcacagtgatggtttcatgataccctggagggttgcacactcctggtgcatttttgtattcgtgctttgaatacagcccgcttcctttcaaccctccgcttaaaaagttttgatgttttaaggaaga

SEQ ID NO: 363180 - DNA, 636 bp, Homo Sapiens
  misc_feature (530)..(556): n is a, c, g, or t
  misc_feature (582)..(582): n is a, c, g, or t
  misc_feature (621)..(621): n is a, c, g, or t
ggaggtgaaagtgacttgccctaggagcagacagcatgccaagaatggaattaggcctcaggatccagcctgggctcaccctgtctggctcattccccacccaggaaactgaagataaaagatttgggaaaacacaccaagaaaaaggggcagttttctttgcccaagcatttggtgctagttagaggctgttcactctctcctgctcctcttcggagtagaaataaaggctgtgacacaaggaagccagtggggtgggagggaggcaccataatccctccctaaaacccacagaagactaacctgatactcttttgacccaactgcatcaacactaaacagctgcagaccccctgaatctttcacacatgccaagtgaacattcttgatgatttctctttgtgaccgcaaccacctgcaaaccagaacgactctagaatttccttccccgcccccctttttgtttagtttctaatctcttgtttatgaggtgtggggtttataagggactgaatcaaatgaatgtaacnnnnnnnnnnnnnnnnnnnnnnnnnnntgccttttctcagggccagtgagttncaaataatttttaaagaaaagcctataattacatcatcncaataaattttttat

SEQ ID NO: 363181 - DNA, 672 bp, Homo Sapiens
  misc_feature (41)..(41): n is a, c, g, or t
  misc_feature (51)..(51): n is a, c, g, or t
  misc_feature (279)..(287): n is a, c, g, or t
cccttaagtaacatcccagataatgtgatactgtctctttngaagcacccntgtaaaccttttagagatttgaagttgggtcttgactcttaatgcatgtggacagtcgcgagcgtttatgctgtcggtgtgtctgtgttggacaaaacaatctgtaatctacagcaaagtacattctacattccgttcatggggcacacccaggggaataagaataaaatgctattatgactaagttgtaaacctatgcacatcccttgcattttgggcaactttatnnnnnnnnngaaactgatttttattaataataatcatgtagtgaaatgtgtttgtaattttgtctcaatttaatttgttgtaaggtggggtggggggaattgctggtttcaccatttcagatctgtgttgtctaagagtattaacgttttaattaagcaaagaaatgatttttaatctgtatgtaattgttttaaagcacccattttaagagaaaatactgtgcaatgaagaaaccagtttaggcatttgctataaactgaaatattccaaaagaatcatctataacagccctgtaaattcctttaaaatgataactaacaggacagtttgaccaattttttttaaatatacttccttttatgtgttcaataattaaatgcctttgggtccttc

SEQ ID NO: 363182 - DNA, 458 bp, Homo Sapiens
  misc_feature (82)..(82): n is a, c, g, or t
  misc_feature (90)..(140): n is a, c, g, or t
atgctgccactgctgagcccgatatgaggctcctcacggtcctgttgcaacagtcgaacatcagcgagattaatctccaggncaatgagnnnnnnnnnnnnnnnnnnnnnnnnnnnnnnnnnnnnnnnnnnnnnnnnnnnacctcagaagaatcattgacatagagtgaggcttgtctgttgcagctaccgggagttaaatggaaactaacctctcctgctctcattttagccttgacaggaagagtgttctatcaagagaggctctgagctgttggcatctgggttagaactttgaatgcatttaaccagagaagcactgttatgcacagcatttaggatatatatattgtttaggatatattaaatgcacattcttatgtaagcagatttttgtgagcagtctgacaaacaaaacttcaattgtagaaccactctgagaaaataaatttaagttgc

SEQ ID NO: 363183 - DNA, 1227 bp, Homo Sapiens
ggagctggttttagaaacccaagttcctctaagcacagcctcccgggtatgtaactgaacttggtgccaaagtacttgtgtactaatttctattactacgtactgtcactttcctcccgtgccattactgcatcataatacaaggaacctcagagcccccatttgttcattaaagaggcaactacagccaaaatcactgttaaaatcttactacttcatggagtagctcttaggaaaatatatcttcctcctgagtctgggtaattatacctctcccaagcccccattgtgtgttgaaatcctgtcatgaatccttggtagctctctgagaacagtgaagtccagggaaaggcatctggtctgtctggaaagcaaacattatgtggcctctggtagtttttttcctgtaagaatactgactttctggagtaatgagtatatatcagttattgtacatgattgctttgtgaaatgtgcaaatgatatcacctatgcagccttgtttgatttattttctctggtttgtactgttattaaaagcatattgtattatagagctattcagatattttaaatataaagatgtattgtttccgtaatatagacgtatggaatatatttaggtaatagatgtattacttggaaaagtactgctttgacaaactgacaaaggtctaaatgagcacatgtatcccagtgagcagtaaatcaaatggaacatcccacaagaagaggataaggatgcttaaaatggaaatcattctccaacgatatacaaattggacttgttcaactgctggatatatgctaccaataaccccagccccaacttaaaattcttacattcaagctcctaagagttcttaatttataactaattttaaaagagaagtttcttttctggttttagtttgggaataatcattcattaaaaaaaatgtattgtggtttatgcgaacagaccaacctggcattacagttggcctctccttgaggtgggcacagcctggcagtgtggccaggggtggccatgtaagtcccatcaggacgtagtcatgcctcctgcatttcgctacccgagtttagtaacagtgcagattccacgttcttgttccgatactttgagaagtgcctgatgttgatgtacttacagacacaagaacaatctttgctataattgtataaagccataaatgtacataaattatgtttaaatggcaaaaaaaa

SEQ ID NO: 363184 - DNA, 722 bp, Homo Sapiens
agctccaacaagagttagtgttaagtgatgatcaagttcccatttcacctgctctacttttgctgcattaattaatgacacccggatgaggagacgtgcgctaacttcattgctcatctgggatagtgcatgagcccattgaattagagctgctcctactagataactgagcagtacacataagtgcatgttatgaaacatgaatcacatagagcagtggagttttaccaagtggtgtgtgtggtttttgttttttactatgcaaagatgggaaatgcacaaacttttcaaagactagtgtctgaagaactttacaaacaatacttgaaccctttctttaaagttatcccatcatgttttatagtcattgttgcttccattgttagtttccattttcaagtgctttgtaattttttaagtgcactacctgaaattttgtttgaaattaataaattcattcgtatcttgttggctgcctatgaatggagattcagtagtcattgtatgcatctttaagtcaaatgtgtattaaaactttcgttaacgtagaatgttgtagctttatgctttaatcatttcttttaaacccccttttctgtttcctcttgtagtgctgattaaatggccatgtgcctgatatcatcagagttttagcatggatccaaaggcttactgaaaatttaagcagtcagtggcacaaaataaaatctctgattaatgat

SEQ ID NO: 363185 - DNA, 471 bp, Homo Sapiens
  misc_feature (448)..(448): n is a, c, g, or t
  misc_feature (456)..(456): n is a, c, g, or t
gcggccgcgtccttcctctctgccgtgtaaaagggtgggtcatagatcaggaactccgtctcccagggcaccttctcgttgggcacggggaagcgcgtgacagggcagttggggtagaggaggtgccgggcattcacgtggtagctgtcgcccggctcctccgtcttcttcctgcctcccggctcagcatccggctcctccgcggccttctgggaggccagagtggggacgtccgcctccgagctgaagccgctggcccgcagcgtcctcacgatccagtgcagggctcgggctgtctgggccacctgctcctccagggaggccaacctctgctccatggagcccgacctcttcagtgggtccagggtccagcaggtccaccatgggcgtcaaaccctgaaagaggaagcagctgagcttggacggacaacacaactttggggccatnggaaacgncacaacgttttgaag

SEQ ID NO: 363186 - DNA, 626 bp, Homo Sapiens
  misc_feature (144)..(221): n is a, c, g, or t
gtcattaaccagtggttcaaaaagcaggcggttcggtccggaattccgggatatcgtcgacccacgcgtcgcttgtcctggaacatgggtgggaccagaaatctttatgaataaatgaaaagataagggattggaagccacagnnnnnnnnnnnnnnnnnnnnnnnnnnnnnnnnnnnnnnnnnnnnnnnnnnnnnnnnnnnnnnnnnnnnnnnnnnnnnnggggatacaagatttcttacatgcatgtattaaatggccattttaaaattagctagtttcatgctcagatgtcataagtggcagctatctttagccagactgttgcagttattgctcgatgccactcatggtgtcctacctcctatttggaaaccatctctatttttttcttactgagattcttactttggggtcaggaacttgaagggatgcttggagtgagtagatttgagggtccagttatggagtgctactaaaacattttcttctctcctggcctctggaagcatctttagctttgactttgggcaagtctctgtacttttctggccagcttttccaggatttataaaattagagcttcggcttgacctctgtgataaataaatattcactctgtgcctt

SEQ ID NO: 363187 - DNA, 523 bp, Homo Sapiens
agcgttatggacaaacgattccttttagaggattacttttttcaatttcggttttagtaatctaggctttgcctgtaaagaatacaacgatggattttaaatactgtttgtggaatgtgtttaaaggattgattctagaacctttgtatatttgatagtatttctaactttcatttctttactgtttgcagttaatgttcatgttctgctatgcaatcgtttatatgcacgtttctttaatttttttagattttcctggatgtatagtttaaacaacaaaaagtctatttaaaactgtagcagtagtttacagttctagcaaagaggaaagttgtggggttaaactttgtattttctttcttatagaggcttctaaaaaggtatttttatatgttctttttaacaaatattgtgtacaacctttaaaacatcaatgtttggatcaaaacaagacccagcttattttctgcttgctgtaaattaagcaaacatgctataataaaaacaaaatgaaggaaaaaaa

SEQ ID NO: 363188 - DNA, 1012 bp, Homo Sapiens
agaaactctgagtttgaggtacaggggcttcggagtgcagacgtccctccagggcccatggtcagtattgcacctgtgttatgaacccccagatgctgtgcagggcaggggcgggggctgctgttttattggggaggggagcatcctaaaaatggggtccaggcagacccctccagacctcacactgccgaggaggcctttcccaaagggcgtcctcccgggatgcagacggcaggtgtgtgggaagcgccgtttaaatacacagcacgacgtatccttgtaccgacttctcccggttcttgtttgaaaatactgtagttcaggctcttgatctagatggcagataggaactttcttgtcacaaaaatactggaggaaaatgttgtaaaaatagacttttggacacacagctgttggggctgcactgagctgcaatttttaacatggatttataacttaatgtttctgtttataaaatactaatgatttgcaatgtattttactggccaattaaaacagatgttttattccgagatggtacagtggacaaaaaaaatagacatgtcgcgtcgccctcggccctccaaaacgcttttctaaaacaattccttttggcgcccgcgtccccattaggccaacggcacattggcccataagctgtgttccctaaagaaaaatcctggcccatggaattaagcggtttgggatctccccccttataaacaaaccgccccgccggccaaacccgagcgctccctgaacctaatccccaaaaggggagcttcctggagggccattcaacgtggaatctatatccaccgggacaccccaaacccgcaggtttcgcaaacataagatttacccaccgccgtgcctttggccaccttcattccgcgaggaaagtgtttggtccaatttcccttacaggccctctcttggacctgaacctggtgaaagcccactctcaaaataagcgggacttgctaggcaacacaccgtcaaaatccttgac

SEQ ID NO: 363189 - DNA, 1474 bp, Homo Sapiens
gtggaacgcgcacacggggtggtgttctggtagcacacgcgtggggtttgcgatgacacgcgagcaacggcacgcccgattgtgtggactgtgtcgaattgtgtttcccaggcagggctgttgggggttcaacacctgccaacggcctgcgccaaacagccctgggggttactaatggtcaagcttattacactaggggcacgggcaaacttcggaggcgcgcctggtgtcccgggctttgttgctggcccaattcccacgtgggggtggcctggggcccgcggcgcgtgtggtgcccgcgtgcgtaagggccccgcgcgtggttcccgacattcttgcttgctccggctccgcccgtgtcgccggtgccccttccgtgccaacggttgggggcaattgcgggttacctatccggcctctgccggttctcagttcagacctccgagcccaagccggagcaggctccacgctctcctggctctcaggcccctgacgagggggcgggcggggcgctgcgcagcctcctgaggagccttccccgcagggcccggtgcagcgccggcttcgggcctgaatccagcgcggagcggccggcgggccagccgcctggggccgtcccttgcgcccagccgcggggcgcctggcgcgtgacgctcgtgcagcaagcagcggccgggcccgagggtgcgcccgagcgggctgccgagctgggagtcaacttcggtcggagccggcagggcagcgcgcgggggaccaagccgcacaggtgcgaggcctgcggcaagagtttcaagtataactcgctgctcctgaagcaccagcgcatccacacgggcgagaagccctacgcctgccacgagtgcggcaagcgcttccgcggctggtcgggcttcatccagcaccaccgcatccacacgggcgagaagccctacgagtgcggccagtgcggccgcgccttcagccacagctcgcacttcacgcagcacctgcgcatccacaacggcgagaagccctacaagtgcggcgagtgcggcaaggccttcagccagagctccaacctggtgcgccaccagcggctgcacacgggtgagaagccctacgcctgcagccagtgcggcaaggccttcatctggagctccgtgctcatcgagcaccagcgcatccacactggcgagaagccctacgagtgctccgactgcggcaaagccttccgcggccgctcgcacttcttccggcacctgcggacccacacgggcgagaagcccttcgcgtgtggcgcctgcggcaaggccttcggccagagctcccagctcatccagcaccagcgggtgcactaccgcgagtagccgggcgggggctcggggctcggcctcctacctgcccccaacccaccctccaccccgtcccccacggtgggcactgcccagcaccgcatgccacgtgtccggaataaattctttttgattgttgcgaa

SEQ ID NO: 363190 - DNA, 445 bp, Homo Sapiens
  misc_feature (13)..(13): n is a, c, g, or t
  misc_feature (61)..(61): n is a, c, g, or t
  misc_feature (93)..(181): n is a, c, g, or t
ttcttcttctaanggggtaagtccataatctgtgtaatactacaatttatggggatgctcnactatgccctgtttctcttctaaacgaatttnnnnnnnnnnnnnnnnnnnnnnnnnnnnnnnnnnnnnnnnnnnnnnnnnnnnnnnnnnnnnnnnnnnnnnnnnnnnnnnnnnnnnnnnnccaaggcccatgagctcatagggctgaggcaggatttggaatcaggccatgtcttctccagagcccacatccatcctttctctatattgcctcccacagatgtgctaaaatttatttaactaatcctttatcctctatttgtgttgtctcccattttttattattacaatattactgtggtgaacatgcttaaaaatacattccttggatatctgacaacgtgtttctgaaaaacagattttcataagtaataataaaaataat

SEQ ID NO: 363191 - DNA, 470 bp, Homo Sapiens
gcggaccctcgcgtggcttttcaaggtacacgctgaagacggcagagtgacaagctagatggaacctggatcctaaatcaccatgttaaaggccacccaccaaatactcaacattgaacagctctgtgagtgagaaataaacttttattgtgtgaagtctttgaggtttggggccttatgtattatagcaatttgtgttgcttactgtgacccagaaattgcacttctaggaatgtttcctaaagaaataatccaagattcaaagggctgatagaatctgagaacaatggacaaaacccgaaatggctataatcccaatgaatgctgcaaagggctctgaaacatgggaatggaaactgaacagcagaggacagaaaataaattacaaaattgctcaagtagtacaaatacagtatttgtgatgggaattaagaacaatagttgaaaagaaaataaaaacctggtcggcg

SEQ ID NO: 363192 - DNA, 346 bp, Homo Sapiens
tcctttcctgcctttgttttgtaggacttgttctaacatggaaaacaagtccagaagactctcctctgactgttacctttgccccaagccaccccaaacttttatgctcatgttttattaaagcaggtgctccctggaatctctgggacatttttgaggcatttgaagcagaatatagagtggtctcatctccttccttaatcttcctggtggttgggatgttccacttgtatcatagatttttttattacagatatgctccactgtttttaaatgtgaacttgtgcgcaaatgtgcagattcaatgttcttgttacagattgaataaatttttattttgaagatg

SEQ ID NO: 363193 - DNA, 492 bp, Homo Sapiens
ttttggagttacagtaaatacactgggaagagactttattgcctattataattatttttatctgaagctagaggaataaagctgtgagcaaacagaggaggccagcctcacctcattccaacacctgccatagggaccaacgggagcgagttggtcaccgctcttttcattgaagagttgaggatgtggcacaaagttggtgccaagcttcttgaataaaacgtgtttgatggattagtattatacctgaaatattttcttccttctcagcactttcccatgtattgatactggtcccacttcacagctggagacaccggagtatgtgcagtgtgggatttgactcctccaaggttttgtggaaagttaatgtcaaggaaaggatgcaccacgggcttttaattttaatcctggagtctcactgtctgctggcaaagatagagaatgccctcagctcttagctggtctaagaatgacgatgccttcaaaatg

SEQ ID NO: 363194 - DNA, 196 bp, Homo Sapiens
aatttagtatttgtgtaaaaccaccttttgaagcagcaactatcaagtctgaaaagcaattgatgtttccattaatctttttctggggggaataccttagttctaaggatttaacatcctgtaagtgaagtttaacataacagtattccataagcagcctttttattgtcagaccattgcctgattttaatataat

SEQ ID NO: 363195 - DNA, 576 bp, Homo Sapiens
agctgggaaaggcctccaggcttctagagcagctagcttgggctggattctcacacccaggctgccccttggattgttctacccaagcttttccctggggtctgggctcactccataaggtaaggtgccttttaccttatggtccttctttagcaggtaacaaaggagcatcaggggcaggctgccctggtggcatcacactggctagtgaggccgtgaatatcttgtcccccagcagggccgacagtttctatcacagaaaacagtgtgttcagtggtgaaaatcgttgcatgcatgttttcatctgagcgtgtccttctcccatactccctatcagccagccctgcctgtagctgctgtatggtgattgcacttggacatcagtccaatgactgcaagtcggcctggattttcacttgcagaggctacagctgcattgtcaggtctccccgccctgcagagagctccctccactggttagcagtgtgttgtgttttccattcatttcagaagagctacattgtgtcactggacatttttaaaaactgtgatttttaataaaaatttaaaatttg

SEQ ID NO: 363196 - DNA, 480 bp, Homo Sapiens
atgcatgaagatgaaacatcaatgaactcatctctaaataaatgtatcggtaaaattctggttcatgccaggcacaaaagtagcctaatcatatacacattatttaactcacagaccatctgaaggggctcgagaatatcactttgagaaacactcttcctaaaggatactgacagaggagttgtcaataactgagaaaaacacctccattttagatttgtaacatcagtaaccaattaagctgggagtaagctatctggttaaatagccatctctttattgttattcatggggaaaatattacttctttccacttttaagaacgacaaatccattacattttcaggttgtgcctttctaccactgagattgatttgttgatctctctaatcgtccttattggtatcaactttcatgtaaataatagtcaagtcttaaaagcttgtatacatggataagtaaataaacaactcccccctg

SEQ ID NO: 363197 - DNA, 474 bp, Homo Sapiens
  misc_feature (165)..(165): n is a, c, g, or t
  misc_feature (204)..(311): n is a, c, g, or t
catttgcccttccctttctcctacagtcccttttgtcttgtctgtcctggctgtctgtgtgtgtgccattctttggacttcagagccccctgagccagtcctcccttcccagcctccctttgggcctccctaactccacctaggctgccagggaccggagtcagntggttcaaggccatcgggagctctgcctccaagtctacnnnnnnnnnnnnnnnnnnnnnnnnnnnnnnnnnnnnnnnnnnnnnnnnnnnnnnnnnnnnnnnnnnnnnnnnnnnnnnnnnnnnnnnnnnnnnnnnnnnnnnnnnnnntctcactggtttttccaccttcctccttcccttcttccctggctcctaggctgtgatatatatttttgtattatctctttcttcttcttgtggtgatcatcttgaattactgtgggatgtaagtttcaaaattttcaaataaagcctttgcaagatactcgaa

SEQ ID NO: 363198 - DNA, 1058 bp, Homo Sapiens
  misc_feature (24)..(24): n is a, c, g, or t
  misc_feature (718)..(771): n is a, c, g, or t
ctgtgttcacagcaggcagaagcncactggtatgggcctcccgccccttccacatccatgttgtgattggatccataagtttactttcttcaaagagttgataggatgtttaaaacatcaacacattgcttaaaatgatgaaaccaaccctcaaaaaaacagtctcctaaccagccatcccctcctgtgggagtgagctgggggttttgtccatagctttggttgggcctgtgtcacatccaggcagccatgtggagggagtcagggtctgtctggaagcatccaccctctcgctgccccagcctgtgctcccaggggcctaggctaccatggactgaagggcagtcccctcccacctggtgcccagggcttctgcttgcctcgctgatgttgcatgggcagacttcaaaaaggatagttagaaaggtttgggttgatggagtttgcattaatgcaattagtgtataaatatgttttaattgccaaccgtgtgaaacaacaaaatatctaaaaactaatcccgattgaacaatgtactccctggcctggatacattaataaccataaatttgcatgaattaatctccacgtttggtaaactaatacctctggttgactgagactactgagtaagatataagacctaccaggaacctttaagaatatgctctgtcggtgtgtagtctgcttgtttgcgacggaggtctcgctgtgtcgnnnnnnnnnnnnnnnnnnnnnnnnnnnnnnnnnnnnnnnnnnnnnnnnnnnnnntgggtttcggggcagttctccttgctcggctccctgtagctggattacggtgccacagcatgctcggtaatttcaatttacgggcggggttccccaggtggccggctggtcgatcggacctttatcggccgctggcccaagtgcggtacgggtgcctgctcgccgttccttgacccccgtgagagggatgcacggggtctactcgcaccgcggggcggcgtctttccccgtgaaccacatcggccggggggccggcgtaatcaactcctcctctgttggtttttttt

SEQ ID NO: 363199 - DNA, 627 bp, Homo Sapiens
aaacaaaccttcctataaaagaaatggatgcttttattcaacctgagttaaaaccacaatgaatcatatcagagttcatgggaatcataataaatgactagtaaaccactcacaaaatcaaagctatcaacatactaggatcacacacattaattagtgctatagttcaaaacataccctttaacttatttagcacgcaaaataatcataaaagtaatgtctataagctctaaccaaaaattttaaaaattaaaaatagcacaattctacaattctgattttaccaagaaaataaaccttttttggcacatattatcctatgaaaatggaaagctgagtcaggctgctctgcttttcacagcacaaataagcattcatgctatcagacttgggaaattaactcggtgacaaaaattcactggaaaatagaatccttggaaaaatggggtcaggtgccatccactgagaggcaatgataatgtgtgtccttcgttattagcacaaagttaggcagcacactataattttagctacatgcaactctataggaacacatgtgggtaaggcctgaaagttacgagcaagagtgaaaagaactgctgtgttgggactgaggaataatgggtg

SEQ ID NO: 363200 - DNA, 501 bp, Homo Sapiens
aaaaactaaattgaaactttactttttatatgaaaatttatcatgccattgggattaattttaaaaaatcaaaaatgatttttgtcattgaaactgctgaggctttcaaattcagtagttgaatgatgactgtttctttagtgaaacaattcttgcaattggagacattaagtctaagagttttccttctgctcttgctgtagctgtttcttctgcatttcagcaacaagaatgtgaaatcagaaacattaggactctaagttgaataaaggcattcatttcatggtaaacctgttcttcacttgcaatgaaggatgtcagcttttcttacaaaacatattatcaatgaattagaatataacaataggttatctcagtgatacaaatacaactcataccacaatagaaacagaaacatggagaacaaaaacatgtcccctaacagaataatttgtatattgatgatacaaggttttatgcatgtatactaatttaaaaaaa

SEQ ID NO: 363201 - DNA, 693 bp, Homo Sapiens
aaatataaacatgagtataatgtgtcaccaagaaagtagaacaaaacaatgaatgaaagaattatagaacagctggcatcggtatatgactgggggagagagggaatgtcactttagactccgaatttataacctggaatgaaatacatttggatacaaaatttaaatacaaagttttaaaaaaaactacggaagagggtaactattagacatgatttatggtttaaaatatgaggaaggtgacaggggctttaatttttattatttattagtatgaattccctgatgacgaatgagatccgagccactactaaaagccttcccacattccttacagttatagggcttttcaccagtgtgaattctcagatgtcgagtaaggtttgagcatttattaaaggcctttccacattcattacattcatatggtttttcatctgtatgaattctctgatgctggaaaagtggtgagttctgagtaaaggccttcccacattcaagacattcaaagggtttctcaccagcgtgaattctctgatgttgacgaagctgtgagctctgagtaaaagcctttccacattccttacaatcatagggtttctcaccagtgtgaattctctgatgattagtaagtgctgagccactactaaaggctttgccacattccttggcactcatagggttctcaccagt

SEQ ID NO: 363202 - DNA, 563 bp, Homo Sapiens
  misc_feature (76)..(76): n is a, c, g, or t
tttttcctcttaatctgccttactattttctaatgtagttactgtcaaacttagcaagtaccactcatttttgtgntgtaggcaaaagcaactatgaataaacagaagaagtctcccacagtgggtaaatgtgtggacctgggtttgaaacctgatgaaacttgctggctgtgaccccttgggcccagggattaactgctgtcactcttagttccctcaaccctcaggtgcatgtgattatattcactgcctgatatggtttggctctgtgtccccacccaactctcatcttgtagctcccataaattccaacgtgttgtgggagggacccggtgggaggtgatggaatcatgggggtgggtctttcctgtgctgttcttgtgatagtgaatgtgtctcatgagatctgatggttttaaaaacgggagtcctcctgcacaagttctctctttgcctgctgccatccacataagatgtaacttcctcctcctttccttctgctgtgattgtgtatcctccccagccacatggaactgtaagttcaataaacttctttcttttgt

SEQ ID NO: 363203 - DNA, 501 bp, Homo Sapiens
tttgggaagtcaccacctcttcccaagcctgtttcccatatcacagatgtggggccatggcctcgatgatggtctccacaggtctttccacctctgtgagtccaagtcaggtcaatcagcaaggacccatctctgccctgggtcagctcctcagaaccaacccccagcatctctaaagcaaaagcctcacctcaagggctgctcagaagagagcaccttcagcatgagttgttgctggaagatctaataagctgtgtttcctgggaagtggtgctttacttagccctgtggacaacttctctatgcatctgtgtgagcagatgatcattgtattaccttttatcggtagtaagcttggaaaaataatttaagaatacaatggagaaatgtaaataagtatctatgtaaatttgtttaaaataaactgaatgtatttaatggtccatttatatgttcttttatgtaacatgtagtttaataaagttcctgtttatgagagtc

SEQ ID NO: 363204 - DNA, 189 bp, Homo Sapiens
catttttaaaaaacaactttatacatatacagcccacccattaaagtgtacaattcaatggctcttggcatattcagcatattcacagatttgtgcaaccacaatcacttttagaacattttcattaccccaaaatagattttcatttagtgagagtctgctggtgacagaatccctgacttcgttggt

SEQ ID NO: 363205 - DNA, 502 bp, Homo Sapiens
  misc_feature (414)..(427): n is a, c, g, or t
taaaataacatttctgtaagtctgacatactaatagtcactcaagcagtaccatttattttagtttgcatatattttcactgtttttaatttaatgtattgagtctaatagactgttttgcaataattagaataaagatttatttcttctaatcaaagatgcataacagctattatctaggggaccaccaaatgtgatttcaaaattttgttaactattacaaatgtaatccttatatagaaattttaattttgtaaagtagtgtataatattgtaatattaaattcttgttcttaaattcaaatatgtattgatcttcaatgtgctgtgttaaatcttgcttctctgaaaagttggagacaagatttgtcttccttttaacagtttgtaattttcactgttttattcctgttnnnnnnnnnnnnnngtcatttgtaacccatgcagaccattgtttgatctatgctaacttatcaacttggctattcaataaagttaattg

SEQ ID NO: 363206 - DNA, 567 bp, Homo Sapiens
ggtggctggaatctgcgtttgtagccaagtgctcttcctgtgtgactcagcaaagtgggggtgcatatggggaacacccggggctggggcctgagtcctccacccaaagccaggtttgattcttgcattcccctccctgccttccatccagacaggcccaaggatgcaagaggcgttgatcagcccatctccatccatgcctgttgcctcagagagggccgacggcttttaaaatgctgttgccatagcaacagcatccagccagtgggtaccacaggcagggagccacagaaactggggtgctgggatggaaactgacttgtgagagaccacagctactgctagaaggaaggggggcaaagcgggcacaggtaatctaagaatacttgggcgggaggagtccccaaggttaccttgtgcatccctctgtccccagaaagaactgtaccccaacaatctctcccctcactgcatcccctggggaagaagggaatgcagaaatgaaatgtcataatgagtaacaatgtataaaaatatcgaataataacagctaacatttcttttgca

SEQ ID NO: 363207 - DNA, 560 bp, Homo Sapiens
  misc_feature (39)..(39): n is a, c, g, or t
gagcccagcaatgagaaggcaggaaaggaaagagctganaatgagaaagcccaagagtagaacagtggatacaggagaagaacagcggctccactcagacccagccccaggttcaatgtcctcccaagaataaagtctttccctggtgatggtcccccgctctgtctttccagcatccactctcccttgtcctcctgggggcatatcacagtcagccagcggcttcctcatgatggtcattggggtaaaaatcatgtgacgggtcccctccaggttactaaagggtgcatgtcccctgcttgaaccctgaaaggcaggtggtaggccatggccacaatccccagctgaggagcaggtgtccctgagaacccaaacttcccagagagtatctgagaaccaaccaatgaaaacagtcccatcgctcttagccggtaagtaaacagtcagaagattagcatgaaagcagtttagcattgggaggaagcacagatctctaaagctgtcctgtcgccgcccaggattgacctgggggtaagtcccaataaactcacctactcccc

SEQ ID NO: 363208 - DNA, 476 bp, Homo Sapiens
  misc_feature (155)..(163): n is a, c, g, or t
cactcaaaactgtgaaaatatggtttacatttaattgtacataaaggtaaagggagaactcaattcagtaccagttagtttgtacattttagggggcttttcacattaactgcccatttgtgtaatttatagtttgacatgatgtgtttgttttnnnnnnnnntgcatagtataaacccattaaggatctgggaaaagagaagaagtttaatatagaactaagcttttaaagtttgtttttgtttttaattctggtctcggtgcaaatgttagttatgccttattcatatcacagttagatcaccatgctgcaacatggtttatattcatgctgccctagaaacttttgtaattatttgttgcaaatttgtgactgtccttattaactttcttttatgtaagtaatttgtaaaagtttcttaaaatttttgcttttgcttatttaattttgaataaaagctaaattcctaataaaa

SEQ ID NO: 363209 - DNA, 1004 bp, Homo Sapiens
ccgcgcgcttgtactcctccctcgccccgccttcatcctccccgttcacggaaacgacaggtgcggctgcggggctggcgccgcctccctccacctaccacgtctgccctcgccgctctagccctgcgccccagcccggccgcggcacctccgcctcgccgccgctaggtcggccggctccgcccggctgccgcctaggatgaatatcatggacttcaacgtgaagaagctggcggccgacgcaggcaccttcctcagtcgcgccgtgcagttcacagaagaaaagcttggccaggctgagaagacagaattggatgctcacttagagaacctccttagcaaagctgaatgtaccaaaatatggacagaaaaaataatgaaacaaactgaagtgttattgcagccaaatccaaatgccaggatagaagaatttgtttatgagaaactggatagaaaagctccaagtcgtataaacaacccagaacttttgggacaatatatgattgatgcagggactgagtttggcccaggaacagcttatggtaatgcccttattaaatgtggagaaacccaaaaaagaattggaacagcagacagagaactgattcaaacgtcagccttaaattttcttactcctttaagaaactttatagaaggaagattacaaaacaattgctaaagaaaggaaactattgcaaaataagagactggatctggatgctgcaaaaacgagactaaaaaaggcaaaagctgcagaaactagaaattcacaactaaactcagctcgccttgaaggagataacattatgatttgggcagaggaggtgacaaaatctgaacaggaattaagaataactcaaagtgaatttgatcgtcaagcagagattaccagacttctgctagagggaatcagcagtacacatgcccatcaccttcgctgtctgaatgactttgtagaagcccagatgacttactatgcacagtgttaccagtatatgttggac

SEQ ID NO: 363210 - DNA, 1803 bp, Homo Sapiens
agcgggtttttcccttgggacccgggtccacacggcggggtcgcccgtccatctccggctcgcccgcggggcccatcgtcgacgttagcggccgttctccgagccgactgacccatccttggcgctgccgccgcgcgcttgttctcctccctcgccccgccttcatcctccccgttcacggaaacgacagctgcggctgcggggctggcgccgcctccctccacctaccacgtctgccctcgccgctctagccctgcgccccagcccggccgcggcacctccgcctcgccgccgctaggtcggccggctccgcccggctgccgcctaggatgaatatcatggacttcaacgtgaagaagctggcggccgacgcaggcaccttcctcagtcgcgccgtgcagttcacagaagaaaagcttggccaggctgagaagacagaattggatgctcacttagagaacctccttagcaaagctgaatgtaccaaaatatggacagaaaaaataatgaaacaaactgaagtgttattgcagccaaatccaaatgccaggatagaagaatttgtttatgagaaactggatagaaaagctccaagtcgtataaacaacccagaacttttgggacaatatatgattgatgcagggactgagtttggcccaggaacagcttatggtaatgcccttattaaatgtggagaaacccaaaaaagaattggaacagcagacagagaactgattcaaacgtcagccttaaattttcttactcctttaagaaactttatagaaggagattacaaaacaattgctaaagaaaggaaactattgcaaaataagagactggatttggatgctgcaaaaacgagactaaaaaaggcaaaagctgcagaaactagaaattcatctgaacaggaattaagaataactcaaagtgaatttgatcgtcaagcagagattaccagacttctgctagagggaatcagcagtacacatgcccatcaccttcgctgtctgaatgactttgtagaagcccagatgacttactatgcacagtgttaccagtatatgttggacctccagaaacaactgggaagttttccatccaattatcttagtaacaacaatcagacttctgtgacacctgtaccatcagttttaccaaatgcgattggttcttctgccatggcttcaacaagtggcctagtaatcacctctccttccaacctcagtgaccttaaggagtgtagtggcagcagaaaggccagggttctctatgattatgatgcagcaaacagtactgaattatcacttctggcagatgaggtgatcactgtgttcagtgttgttggaatggattcagactggctaatgggggaaaggggaaaccagaagggcaaggtgccaattacctacttagaactgctcaattaagtaggtggactatggaaaggttgcccatcatgactttgtatttatatacaattaactctaaataaagcaggttaagtatcttccatgttaatgtgttaagagactgaaaataccagccatcagaaactggcctttctgccaataaagttgcatggtaaatatttcattacagaatttatgttagagctttcatgccaagaatgttttcttacaaaattctctttttattgaggtttcactaataagcagcttctacttttgagcctcaacttaaagcagaactgttttctactggatttttcattaacagcaagctttttcttttatgtaaaataaatctattgtatctcaaatgagccgtggacgctctagagac

SEQ ID NO: 363211 - DNA, 407 bp, Homo Sapiens
gccagttgtcatttttacaggattgtgtgagctattcaaactcttcaacccctgaacagggtattaagcttccaaaataatgatggggataaatatggaaatcctttttaagttgtatttccattaaacaaaaacccttataattcatactatcatgaatttgctttatccatctcatttgcataacagttcatctgtctggtcccattaggctctaccaaagaaagactctgatgagtggacattattactgtgactcttgtaagtagccataaataaaccaaaatagtatcaaatttaggtatgaaattccacatgtgcaaagtactgttaaggtgataacatttttgatgagatttaaaaaaatatttgaaatattaaaaagcattatctgtaaacatcctaaa

SEQ ID NO: 363212 - DNA, 453 bp, Homo Sapiens
ccaagagtggtagaaggaacaaccagccaatcacgagatacacatgggagggcatttgcattgtgatggaagacagagaagaaaagcagatggcaattgagtagctgataagctgaaaattcactggatatgaaaatagttaatcatgagaaatcaactgattcaatcttcctattttgtcagcgaagggaatgagactctgggaagttaaatgactggcctggcattatgctatgagtttgtgcctttgctgaggacactagaacctggcttgcctcccttataagcagaaacaatttctgccacaaccactagtctctttaatagtattgacttggtaaagggcatttacacacgtaactggatccagtgaatgtcttatgctctgcatttgcccctggtgatcttaaaattcgtttgcctttttaaagctatattaaaaatgtattgttg

SEQ ID NO: 363213 - DNA, 1035 bp, Homo Sapiens
  misc_feature (108)..(227): n is a, c, g, or t
  misc_feature (431)..(441): n is a, c, g, or t
  misc_feature (880)..(881): n is a, c, g, or t
ctgggctgtggtatttgggtgatctttacattcttcagactcttgtgtgtttgaaactttttataatgaacatatatcatttttattagaaaagaataaagtttttgnnnnnnnnnnnnnnnnnnnnnnnnnnnnnnnnnnnnnnnnnnnnnnnnnnnnnnnnnnnnnnnnnnnnnnnnnnnnnnnnnnnnnnnnnnnnnnnnnnnnnnnnnnnnnnnnnnnnnnnntttccaaacacccctataatattcaccatatttcaaatacatgtgtcggctgacccctcaaccccaccaaaatcgtcttataaccattctttggtgcgtcccgggcgccccaacaaaatataaataaaaggagcgtaaacaattttctccaaatgaaccatacttcagaccctgttagacggagtcgttgtattcttccacatnnnnnnnnnnncgcggcggaacaataacacactctcgttttacaaacaaaccccacgccatctaatgtactccacaaagaccgcctaatctgggtctaaataaaaccaccttgagatttctaccacggcaaaacacttgagaaagtaaatttatactctaccacgtccccgcacgatgacattatctgaaataacgaaagcagacgacgtgatgagatataacgaacaccagataccgcaaccgttcggcgcacccgacaaacgagctataactctccccacaacaacaacggagggttttaaggaagtagcaaacacatatttggttatctattgtgtcgcgcgaggaccagacacaaacacatttgatgaaccctcgacgtgcgtggtgcaaacttaataattcgtccccctccgtgtaacacattacaatctcaccatgggaggggnnagaaaaaagaatctttacacaacaacatacgcaccccccctcttcactattatatcaatatcgaccccagtagagccatagcccccccacatgagagagtacccccgtccagtcaacacattaaataacattctgtggcgcatccaccccaatc

SEQ ID NO: 363214 - DNA, 485 bp, Homo Sapiens
gtgatgggggagaaaacacttcattgggttcaaagataatattccctatcataaatcagtggcataaacagccagtgggccaggtgggcccaccgtatgctagctgacaagggcagtcacacaccggtaagtgctgatacaggatgaggggtgcggagctgaggatgttgttctctttgatgaaggactgaaaacttcccctggcccctgctgcccacctcagggctcctcaggacgaagggcatgaggacaggttcccactctggcccttcgctgggggacatgggtttggtttccccatcgccaggctggccagctggggcccaagcactgaccgtccttccccaccttatcccatcagctgccctgcacaggagcagaaaacccatgcctcagacctaacttcctaaggacactgcctctagaaggccctaaagtggcagagccggggatggcaggtgcagccctggccactacacagcagt

SEQ ID NO: 363215 - DNA, 491 bp, Homo Sapiens
  misc_feature (363)..(376): n is a, c, g, or t
taatccagtaggggtggtgcccgtataaaacaaggaagaggcaccagagctttctctgtctgtgtgcacactccgaggaatgccatatgggtcatagctagaatgtgaccatctgcgaggcaggaagagaaccctcatcagaaaccgaatcagccataactttgatcttgaacttctagcctccagaactgtgagaaataaatgtcaataaatgtctgttgtttaagccacccagtctatgggttttgtgttttgttatggcagcctgagatgaccagtacagtgaccatttaaacaaggtttttaatgtctctgagaaaagcctcattttcttatctgtagaataattatacctgcatttgnnnnnnnnnnnnnnctggcccaggcttagtatagggaaaggttaatttccaacaaaacttattggtagggaggccagtctatagtgatactttttgtaatgatttattttggtagacaatctcaatttt

SEQ ID NO: 363216 - DNA, 491 bp, Homo Sapiens
tgtgtcattgtctgtgacatcatgtgtgactccggccgccggaacccgacgcggcagcgcgggtgctgttggcacaaacacaggcagagggggccctcctccccacgctctgcgtgcttccggcgagcaaagccccgcccaaggtgtctcctagctggggaaccagtaccggcccctggtgcactgtccagctctggagagataaaaggaagagctggtgccttccagtggactacttcatcctagaagccctcgggatgcacgtttcactggaagaaaggcctagcttgggtaggtccctagaaagaggggatacccctggaggagggggtatcctattacccccactctctaaaaggaaggatggaaatgtacatgctacccaaggacattcttctagaagaagcctggctctttatatatgttgtcattttatcctcacagcaactccaagagatgttttacaaataaaacaggtctcagcaaggcta

SEQ ID NO: 363217 - DNA, 586 bp, Homo Sapiens
ctgaatgcgggactccatcaaactgggttccaggctgggaggtctctgaacccaatttctagacagcctgctttggagttcaactgatgggaccttagacaccagccttaccctctgcaagtcttgtgatttgaagccagatacttggcctctctgtgctccagggagacaccactgcacctacctgagaggactgaaggagaggatctgtgcaactcactcaggatactggatcttaagccaatgggtggacttacattcgtcacctctgattctgtctcctcctgcgcggtgacttagcaaacacttctccctctccagctctgcttcttactctccagctctgctgccctgttccagtgctgacgccagacaacagataatttcccaaatgcttgtattagcccttaggagttcatgtgttcctcccccagccaataaagctgttaaatcccaataactgtcaggaatggagccaattgctataaagtacttccagcttcttggcatgaagaaataattagaatatatgtgttggctttgaaacaacactcactggttcattaaaaaattctgtgcatattgt

SEQ ID NO: 363218 - DNA, 446 bp, Homo Sapiens
tctgttgagtgatggatacagctaaatatggatcatcaaagggctttctaggtcacatggagggcagctacatgattcagaaaatatgaaattcaacttggacagaaagacagaaatatttgcaattcacttcttagagataaggtcagaattgacaaagaataaaagggcagcacagaagtagagttacaacacagtaagagatcagcataataagatacagattcacaagatgaaaagagatagagaactggattttttggcagattgatttgggcaagggaggtgggcatgaacactacagtccaaaaatagaaggaagaactgagaaatcctcaaaaaaatattttttaagcctaaagtcgagtaaatgataaaatagaaatccccaggtattaatgacgttgtaattaaacaaaagctatcatttattatctaaaactatg

SEQ ID NO: 363219 - DNA, 523 bp, Homo Sapiens
gtgaggaaagaacaggaggggaggaggaggagtgtgctctgcacttgccttgctccaggatggggtggcagcagaggaatgtcacaggtcagcagcctaggcctccagctataaatagtccggagggcccgagaggctcccgcccgtccagcagggctgtcagcttcctgtgtggcagcacctggcacactggctctggccagcattatgctaaaaccctgttactctccaatgaaccagggaggcgggctcctctctgcgcctatcccttgagaattctgtcttaccagtgaagggtggggctgcccagatcaggcagcaggagtgaggggcacagtcaccccaggccttgctgagcccaggtctgggtactgagtgtccagagctgcctccccaggaggttaaggtgggggcaaaggggaagcttcaagcactttgcctacttttgttcactccccagtgcactgtgactcaggccttcccatcaggcctatttgtctacccaataaagcgtgttttttcc

SEQ ID NO: 363220 - DNA, 923 bp, Homo Sapiens
  misc_feature (86)..(104): n is a, c, g, or t
  misc_feature (745)..(745): n is a, c, g, or t
  misc_feature (768)..(768): n is a, c, g, or t
  misc_feature (825)..(825): n is a, c, g, or t
  misc_feature (895)..(895): n is a, c, g, or t
tgtttgttaacaaaatacaaagatctcaaacaaaccccttttagcttctcctagcaacatctgtgtcctcagaaacctctggttcnnnnnnnnnnnnnnnnnnnaggctgccctggcacccaaattgctgccatgctggcatctgtagctcggtggcttgacattctccccagggacttcccggttcctagttctttgccagctcctccccactctgtgcgacctttccaagccttccctcaccctccccgccagcaccctctttggggagcaggaacttaatctgctgacagagctacacctttcataacaggctcagatcactcagctccctgtgacctttgtattcacccaggcttccttctcagtagctctagctgggggaggtgtcagctgggcccctcctgtgctatctccccagaggacatccctgactccacccctttcttcctcccaaactctgcacctcttcctcagctgctccagaccggccagggtaaccagctaaccatgcctggcatctggaagccagcaggccagagagtggcccaaaggctgatgaacggtagggaagggtgagcagattcctatgttggtgggcaccaatattccaagggcagctctctttgctgaatgagggccttctcgtgaggtactgacaacaccagcaactcgagagctgggaaactcaaggaggaggaagaaaatcaaaaccaccctactccctggggtgaggaaagaacangaggggaagaaagaggagtgtgnctctgcactttgccttgctccaggatgggggtgggcagcagaaggaatgtcacaggngtcagcagcccctagggcctccaagctataaaataagtccgggaaggggccccgagaagctcccgccgtncagcaggctgtcactctggtgcacacta

SEQ ID NO: 363221 - DNA, 805 bp, Homo Sapiens
  misc_feature (785)..(785): n is a, c, g, or t
gggagacagtaggaaatttctccttagtgagagctgagtccttgagaagttaagagactgtttcctgcttcccaccccaccccgttttttgtccctccgtttgatcacctccctgttgagtatggaatgtcccagtttaatataaaacatacagtttattccacacagcagttggactttgtaaaagtttagcaaaataactgattgttttggataactcaacatgtttttcttaaatgctgttttagtattttctacctcttaataagcaccatattttagatcttgtataaaaagttgccatctgccttatagacaaatgtagagaattgatgttcttgctttgtgttgtgttctggtaaagctttaagtgagtgtcttacccctttcctatactttcttgttatccatatcattcttttgtgagttttgcagcagtcttgaataatacagattataactactgaaaggggaaccttcgtctttttaaatgtgttatttcacattacaataatatgtgtagtagttgaattgtgttatcaaagcatgtccaacttctgtccagatgacattaaaaccaaagcctaattgttaagcctcttattctaaagtccatagcaatgctatggaatatcaagtataatgatgtagtaaaaagatttctccagaaaacactttgagatactttaaagaattccagagcatatcgaatgttatgaaatgaagaagtaaaattaattaccgggaaaaagaatgccttggatttttcccttggccccacccanataaaccacggttgggacac

SEQ ID NO: 363222 - DNA, 614 bp, Homo Sapiens
ttgtgacaaagttgaagagattattaatgaactagaagagatatttgaggaaagtacttgtcccagaaagacaaagagatggaagatataaaaagagaggctaaaggaaatggaggatagaatgaaaagaccccaactctatatgatctgagttgtgagaaaataaagagaatgggtgcaaatggatgtttgataggagataatggatgaccatttccaaaactgatgaaaactacttattccccagattcagaaagaccaatatctctagcagaataaatatcacaaggaaaccgcaaaacatccaagacaaagaagttattcacaagcagccagagaggaaagttagattgcttatgaaggaatgacaaatagattgatagcattcaatagcggaggctagaagatgatagagtatcatcttttaaaataataaccaacttagaacaatatatccagcaaactatctttcaagaatgagaataaagacatttttagacaaatgaactctgagagggtttacaaccaaaagaccctaaaaccctctcattaaaggagcttctaaaggttgaatttaaagaaggataataatttccaaagaaaggtctaggtgc

SEQ ID NO: 363223 - DNA, 767 bp, Homo Sapiens
  misc_feature (156)..(251): n is a, c, g, or t
ggcgattcggacgagggaaattacctgataataaagcaagtaaaggtgtaaggtttcctaagggattacaacacagtggtttcctggtctctctccctgtcatcaatcagggtagtaacttgacttaagaataccactttttagaaaaattacgannnnnnnnnnnnnnnnnnnnnnnnnnnnnnnnnnnnnnnnnnnnnnnnnnnnnnnnnnnnnnnnnnnnnnnnnnnnnnnnnnnnnnnnnnnnnnnngtgtgagccaccacacctggccaagaataccacttttgaagttaatccttttgtgtgatacaggatgaacttgggatgtttgaaccctggacattccaaataaagaataggcccctgcctggctcctgggagataacctctaagccattagaatatcttgcctgataagagtgtttttgtttacctgtgggccttgggccatgcagtatcagcttgaccttgcaaggtcaagctgaggagactaagttagccatgtgggcagtgaagcatgccaatgtgatcaatccctagtaaaagccctggacacctaggcatgggtgagctactctggttggtaatactctgtgcacacatcattgtagccacacatcattgctgggagaattaagcattatcctgaagactctgccaggagaggataattggaagttctcttggaccttaccttatgtgcctttcttcattgctgattttaatctgtatcctttcactgtaataaactgtaactatgagtgc

SEQ ID NO: 363224 - DNA, 915 bp, Homo Sapiens
ccaccctgcactcaggagagcttctcggtttgctcagtgggccatccatccaacctttaacttgaagagcctttcctgcagcctggaggtgtccaaggattcccgtacagtgactgtgtctcaccgcccacaaccctatcgctggagctgtgagaggttttctaccagccaggtcttatgttcccaggccctgtcttctggaaagcattactgggaagtggacactaggaattgcagccactgggcagttggggtggcttcctgggagatgagccgcgaccaggtcctgggaaggactatggactcttgttgtgtggaatggaaggggactagccagctctctgcatggcacatggtcaaggaaactgtccttggctcagacagacctggggtggtgggcatctggctgaaccttgaggagggaaagcttgccttctattcagtggacaatcaggagaagcttctgtatgagtgtaccatctctgcctcctctcctttgtaccctgccttctggctgtatggcttacatcctggaaattacctgataataaagcaagtaaaggtgtaaggtttcctaagggattacaacacagtggtttcctggtctctctccctgtcatcaatcagggtagtaacttgacttaagaataccactttttagaaaaattacgatagagatgggatctcactagcgttgcccaggctggtggtcgaattcctgggtctcaagcagtcctcccaactcagcctcccaagggtgctggggaattacagggggtgagccaccacaccctggcccaagaaatacccactttttgaagtttaatcccttttttgtgtggatacagggatggaacctttgggaatgttttgaaacccctgggacttttcccaaaataaaaggaaataaggccc

SEQ ID NO: 363225 - DNA, 460 bp, Homo Sapiens
ctttaattactttaatataaaagacagcagtttcacatttcacatatttgaaaaacatttcaaaaccctctaataagtatttaatgaaaataaatttatcgaagagaaacaatgaccacaaaattaatactaccaaatcattactgagactttttgcattacaatatttggagagtaggtgaagaaaatatagaacagaacatgaacattttaaaatgatattccacccaagctttatctttttgctaaatcttgtggacactagaatatatattcaagatgttggtaaagatattcagcaagccatacttcaaagatgttaaaacagccctccaccaataatatggcattgcaaacccttctatcccatcccttttcagttaaaagagagaatattaacagagatttagtaatagtgaccaaaataagaaatcagtatagtcaagaaagatatgtaatt

SEQ ID NO: 363226 - DNA, 730 bp, Homo Sapiens
  misc_feature (523)..(574): n is a, c, g, or t
  misc_feature (578)..(578): n is a, c, g, or t
ggtcactaggttgtagttttttttaaataaaggaaaagcagtattgtcctggttttaaacctatgatggaattctaatgtcattattttaatggaatcaatcgaaatatgctctatagagaatatatcttttatatattgctgcagtttccttatgttaatcctttaacactaaggtaacatgacataatcataccatagaagggaacacaggttaccatattggtttgtaatatgggtcttggtgggttttgttttatcctttaaattttgttcccatgagttttgtggggatggggattctggttttattagctttgtgtgtgtcctcttcccccaaacccccttttggtgagaacatccccttgacagttgcagcctcttgacctcggataacaataagagagctcatctcatttttacttttgaacgttggccttacaatcaaatgtaagttatatatatttgtactgatgaaaatttataatctgctttaacaaaaataaatgttcatggtagaaaannnnnnnnnnnnnnnnnnnnnnnnnnnnnnnnnnnnnnnnnnnnnnnnnnnnaacncaacatgttcgaacccttccgccctcaaaaaagctttttcaaaacatttccttgggtgccggggcccccataagggaaacggcacccggggccaaacctggttcccaacgaaaccccggggaacataaaataggggtcgggcttcccccccc

SEQ ID NO: 363227 - DNA, 411 bp, Homo Sapiens
gggcgcctggcgctcgctccgggccgcggggcctagtgctgcgccgcggggccggccccagcagccgccagtccccaccgccgccgccgcgatggcgccgctcctgggccgcaagcccttcccgctggtgaagccgttgcccggagaggagccgctcttcaccatcccgcacactcaggaggccttccgcacccgggaagagtatgaagcccgcttggaaaggtacagtgagcgcatttggacgtgcaagagtactggaagcagtcagctaacacacaaggaagcctgggaggaagaacaggaagttgctgagcttttgaaggaggagtttcctgcctggtatgagaagcttgttctggaaatggttcaccataacacagcctccttagagaagttagtagatactgcttg

SEQ ID NO: 363228 - DNA, 478 bp, Homo Sapiens
aagggtcggtgagggagccggatttcgcgccgccctctcacccctcccttgccccaccccacccccgggcgcctggcgctcgctccgggccgcggggcctagtgctgcgccgcggggccggccccagcagccgccagtccccaccgccgccgccgcgatggcgccgctcctgggccgcaagcccttcccgctggtgaagccgttgcccggagaggagccgctcttcaccatcccgcacactcaagaggccttccgcacccgggagtatccttttccagccgcgcgggccgggctgggccgggctgggccggggtagggcctggggctcgcgagaccaggtcagccgcgcatccccggcccggggcagctgtcagcgcgccccggccgctcgcgggcctggaggctgagtctcagcctgcgcccgccgatccttccaggggatccggcggggggcgcgcaccggccctggaaggagaag

SEQ ID NO: 363229 - DNA, 520 bp, Homo Sapiens
  misc_feature (329)..(337): n is a, c, g, or t
acacacgcgagaatgaggcagatcccagagcaaggactgggcccagactctccacatgtgctctactagtgagtgccttatactctcagtattttggggcttacagcttcttatttgtgctaaaaaggtgcagttccaaagtaggaactgccacacaggccccagcatcctctctccaacttcatacctctctcccggtggggggagcgggcatcccaggacctccggaatcaaggatgtgcagagaagagcgaaagtaatttttctagtcacatgaactgattggttccaggcaattagaaaatggctataaaataaccttaattttnnnnnnnnntcttgggtcttcgttttcctattaggagactgaactgaccacatgtattgatttatatcctgaatatatgggaacttctgtgtttgggatgtcctactgtaagactgatgaatgtacagagttaatttcagggtacagttttgccttaatggttttaaaaaataaactattttttaaaattta

SEQ ID NO: 363230 - DNA, 410 bp, Homo Sapiens
  misc_feature (298)..(363): n is a, c, g, or t
  misc_feature (380)..(380): n is a, c, g, or t
  misc_feature (384)..(385): n is a, c, g, or t
accctgcatgaccctgttccccgggaggggcagcctggggagtgacaggcatgacctcgatggtgggccaggggcctcctcagaggagcaaagagaagcttggtggaagagaaagccgctagtattcagcgagaagatcactcaaatccttcaccagcatgctcagtgaagaatgcattaaaaaaattagactttttttcttcctggcaacaaaatcttgccaaaataagtaccaaaataagtgttccaatggttttatttggggaaagccaacgctttccccaaaaagactttttcnnnnnnnnnnnnnnnnnnnnnnnnnnnnnnnnnnnnnnnnnnnnnnnnnnnnnnnnnnnnnnnnnngaaccgatgcggccgcnagcnnatggcgcggggacgcgagcagcgcc

SEQ ID NO: 363231 - DNA, 145 bp, Homo Sapiens
acctttcccacccacctctcaccaaacacacaaagacacactctttccctccactgattccaccagtatagccatatttctctttctggttaaatttatactaaatgtttacatttatataacttaataaatattatttttttcc

SEQ ID NO: 363232 - DNA, 438 bp, Homo Sapiens
agacttttgaccccattgtctatgctcaaattaaagtaacaaaataactcagcttttccaatgaggcttgaatccatagtactcacatctcagccctatcttcacacatcactttcacttttttacaaattttggaccaccacctgtgtgaaactgcagtcggagttgtttagatgtgatctggcaatgctatccagcatctttggagaccaatggtcagtcttttcctggccagaggaaagattgatggccctcccacttgaactgacagcctgtgagccccttgggggcatagactgccttccttggacccttccaaagtgtgtggtacggagctcagtgcacagatgtattcacccagcatcaggaatcaacttgggaggagtcaaccaaatgaacaatctaccaaaaatttcaaataaagtcaaaccccccagt

SEQ ID NO: 363233 - DNA, 518 bp, Homo Sapiens
aatttccttaagtgatatttaaagatagagatatctaatttcttgtaatagtaccaaagacatccagcactataacgtctacagagtatgacgtctagcggtaaaatggctttattctcagaacagagtatcggtttcctcatttgcttgctgcctctgtttcctttttacgttcacgtctctgtgctgtaaccttccaaatccttatcaccaggccccaggaaatatcacctggtcggcacactcctgcagggccagatcactgtgcacacacttaaccttccattgttttccatacgtttcctaggatgcggggggctagaggatgacggagagttgcctcccggttcttcccctcgttcttatcttgggccctctaggacaaatgtccctcacgtccctcgatgcgaaggtctggccgcgagcagccgcggcctccggcacgtgacggtcacggagccgtcgcggtcccccgcggctggggggcacccggggatgcggcgggcgctgacgtcgtc

SEQ ID NO: 363234 - DNA, 879 bp, Homo Sapiens
ccagcatcagctgcccaggactgggtctctgctgccgcagctctctgacatcaccccctaccagccgggggatctaggcctggtacctcgccaggtccactatgccatcccaagcccccaggacctcaggctgctgtcatctatcacccgtgtggtggaccgtttccgggcagcagcagcagccctgaagatgcgtgcccctggttctcgtaaaaaggcttgaaaagtttagtcttacctgaagttcccctatcgtcccaagtaggacacagagagaagaagcctactccagaaatggacctggtccaggtcacagtcacccccactttagatccgcaagcagcctggaacagtctagaggagatttgtataacaaagtagataccaagaaaacaatacaaatagaaaaagacgataaataaagaaagataaaggaactaacttaccaaagacacacagaggggggcccgagccgataagaccaccgcgagggggggacccgcaatcgaagaccccagtagaatgggttcaacaagggtgcgctcttccagcagtccagtaatgaaagctgagcgtggcggacgagtgacgtaaaaaacaagaggcgtagcgggacaagatgcggtcctaggtggcgcacatcaggagaagaagagggagccaaccctaaacgcgggggcgggaggtcgctcacatacaatcccgagcatacccatgttgccagccacccggggaagggaaataatacccccatggggggacaaacatcccacaggagtacagtagcgccaacaaggagcgactaaacaaccttcggaataaagtccgaatgccaaaggaaccatatcgccaaggtgagcatattcccggacggaagac

SEQ ID NO: 363235 - DNA, 1678 bp, Homo Sapiens
cccggaagacttgttcccccccgaggcgttgttttttgggggaccccccaaatgctctaaaggggtaagctcccagattaccgcctccttatttgttacctgcccccctgcgccccagctcaatgtgccctaccctcgaggagggtgggttcttttcacagtccaccccccactttaacccgcaggcagcctgaaacagtctaaaggaggatttgtataaaaagtaaataccaagggctgggcgtggccagctctgtggcagtggctgggttggggggcactacagtcaggcaggcagccatggccactagtgtcacggccccagtgagggcccctggcttcgctcacggatgtggtccaagatcaggtcgggggctcgatccagcaacagaggcagcagctcctgctcagcaggggagaagcagcccagcacatgggcctgaaccgcctcagggtgcgccgggcgcccgatacccacccgcagccttggcattgcaatggagttgaggcagctaatgcaggaacggactccattgtggcccctggcactgccccccagcttcagagccagtctccccaggggcttgtccagctcatcatgcaccaggtagacttcctcggcagtcagcccaaacagctccgcagcccgggccacgctgcgcccgttggcgttcataagccgccgtggccggagcaggaccagttgggcatcccccagcggggccagggcgaggtcggcggcacagtgccggtcgcgcgtccaactctccgccacacccagccgccgcgccagctgccccagcaccgccatgcccacgctgtgtcgcgtgccgggcagtccgggattccccaggccagccacctgcgggcggcaccaggaaactgaggcccaacaactctcgccacccccgatctcacagcgtcccgtgggccccaacgcagaggagcggaaacgcagagcaacgctgcagtggggaaggggcgcgaagaaggggcccagaaacccgacccctgagaactccagaaggctgggcaggcagggcgccctagtgcaggaacggagcttcaagaagtttggagcccgtcgagcactgaactcaccagttaagaaaacagagcagcaatttgggggcactcggctcccgggacataatggccgaactgaagctagggaccgggagcccctacgtcgccgccccacgccactcaccatccaccgcttccccggggggcgaggctccaaaacacatcggctcatggctctactcagccgctgtccggcgcccaaaaagccgcccggcctcatgctgcccccattcactccgacaccgccccctgacgtcatcaccccgcagcagccaatcgtgttgccaactgtttggcgtccaccgccaacgtccaatccgggccgggctacgtggccgccatgcttctgaggggcggaagcggcgaggcggtggccgagtccgggaacccaggcgccttcagtagcgcggcgtcacagtgtcccttcgggacttgtgtgggacgctcggagctcttgctttgaccttcggttgggaggccttgtaatgcccccccgctatggcccttgacttgcggcgaacatctggcaagtccttttccccgcctgtagggcctcaacctctccagctaattaaaagttttctacctccac

SEQ ID NO: 363236 - DNA, 462 bp, Homo Sapiens
gggatgcccaactggtcctgctccggccacggcggcttatgaagcccaacgggcgcagcgtggcccgggctgcggagctgtttgggctgactgcgcaggaagtctacctggtgcatgatgagctggacaagcccctggggagactggctctgaagctggggggcagtgccaggggccacaatggagtccgttcctgcattagctgcctcaactccaatgagctgctgcctctgttgctggatcgagccaccgacctgatcttggaccacatccgtgagcgaagccagggccctcactggggccgtgacactagtggccatggctgcctgcctgactgtagtgcccaccaacccagccactgccacagagctgccacgccagccttggtatctactttttatacaaatctcctctagactgttccaggctgcatgcggattaaagtgggggtgactgtgaaaa

SEQ ID NO: 363237 - DNA, 1941 bp, Homo Sapiens
  misc_feature (65)..(126): n is a, c, g, or t
cctgggtggcgaatccagcacgagggctggagcccacagcgttaagcggccgccgcccgggccgnnnnnnnnnnnnnnnnnnnnnnnnnnnnnnnnnnnnnnnnnnnnnnnnnnnnnnnnnnnnnngaccgggagccgcaccgcgccagccgggctgcagcggccgcgcaccaaggctgcgatggggctggagacggagaaggcggacgtacagctcttcatggacgacgactcctacagccaccacagcggcctcgagtacgccgaccccgagaagttcgcggactcggaccaggaccgggatccccaccggctcaactcgcatctcaagctgggcttcgaggatgtgatcgcagagccggtgactacgcactcctttgacaaagtgtggatctgcagccatgccctctttgaaatcagcaaatacgtaatgtacaagttcctgacggtgttcctggccattcccctggccttcattgcgggaattctctttgccaccctcagctgtctgcacatctggattttaatgccttttgtaaagacctgcctaatggttctgccttcagtgcagacaatatggaagagtgtgacagatgttatcattgctccattgtgtacgagcgtaggacgatgcttctcttctgtcagcctgcaactgagccaggattgaatacttggaccccaggtctggagattgggatactgtaatacttctttgttattataacataaaagcaccactgttctgttcatttcctagctgttctaattaagaaaactattaagatgagcaaccacatttagaaatgtttattgacaggtcttttcaaataatgcttttctaattaatagccaaagatttcatatctaactttgtaaccagaattatacagtaagttgacaccacttagatttaaaggcagacagttttgctttagtacaatagtatacattttataatgatgaacttataatgattaagggacatttctataaaaatactacaatagttttatgcacaacttcccattaaaaatgagatttcttatttgtttgtctgtttttactctgggagtaatactttttaaattacctttacatatatagtcactggcatactgagaatatacaatgatccctggaaattgcagtaacaaaagcacacaacgattatagtaactataagatacaataaaacaaataaatgtgaaagtagattcatgaaaatgtattcctttaaaatattgttttcctacaggcctatttaacaagatgtttcattttactgtatattttgtagttaatataaatgttgctctaatcagattgcttaaaagcatttttattatatttatgttgttgaactaatatatgaaataagtaaatgtagctcccacaaggtaaacttcattggtaagattgcactgttctgattatgtaagcatttgtacatcttctttggaaataaaagataaaagagcgatacacaaagctttcttttctaacttttccaagcaaaatctaaaatgttttatgacatttttctggctgtgatcttaaaataattcatatctaaatagtattttgtctaggagatgctttctctctagtagttagaaactaaatctgtgtcagcattcctataaatgtctcactttactttcaagtaatataggtgctatttaacatattacagtaaatgttacttctgatactttagtacaatttcaactacagtgattcatgtagagagacagcggagttgtcaacttgggctactgaactacatgcataaactaaaaactaacagctacaaacttttaagatttctctaatattggtatgtaacacaggataaagttattcctgtcattttgaactgtagagtcctatttcagtgtgatgaatcactgttgctttgaaaaatctcattatttctgg

SEQ ID NO: 363238 - DNA, 620 bp, Homo Sapiens
  misc_feature (55)..(55): n is a, c, g, or t
atggctaatatctgcaggagtagctatttatattttaggagaataatatctgttntgcttcttttgcaatgttttaatcatttatttcatatttactctgttaaaaggaatacacaagatctagctaaagcattgaaaatgttccccattttctttaaggaacgctacagtttacacagataattcctaccctggtgcttacatcggtgaacaattggggaatgtcttgaagagtgttcctcatgtttctgcgagttattcacctttccattcccacccgatactgtgtaaattctttctttccctttgttacatgatttcatgatgatgtcaagttgtctttattctatctaatgaaagatgatctccttaaaaataaggattatttcccttgtttttactccaaatttcagcactggttggcacatagctagtacacaaaaaatgcatattgaatgaataaggaaaaattgaactggatcttcaacacccaggctttggatagatggaagagagatgtggatcagcatgacaagctgttggtgaaatgaaatggagaaaatggtgttcgttataggacagaattttgtgacaaactattttgttgtattttcttttac

SEQ ID NO: 363239 - DNA, 196 bp, Homo Sapiens
gcaagttgacttttttgacttttgaagccaaagggaggtcgaaactgcggtgattggacaacatagttaattaatgattgagtaatcatcttagctgccttcattctatttaggtttttcctgctctgtgctgacgataaagccctcctttacagatctgtactgtggattaaaatgtcatgccacgcggtttcga

SEQ ID NO: 363240 - DNA, 847 bp, Homo Sapiens
  misc_feature (19)..(19): n is a, c, g, or t
  misc_feature (41)..(41): n is a, c, g, or t
  misc_feature (46)..(46): n is a, c, g, or t
  misc_feature (261)..(261): n is a, c, g, or t
  misc_feature (298)..(298): n is a, c, g, or t
  misc_feature (759)..(759): n is a, c, g, or t
cctaccgggcctgcctaanaaacggggtccaacgtttgccnctagnccctccaaaaaggcatttgggttggaactgagtcccccaaaatgtgcccccgggaggagttgccacaaaaggtttccaaaagcctcctgtcaggccccctcccaccctctgaaagataaagttcctaactgccccggagacctgtaaagccgcaggatggagattttgaagtcccctggtccttagcatctggacagacctcttattagccaccncgtagtggtgcatttaggaaaagacaagttttgggtnctcagcgcaggcctcagttctgtataggcaatgctgtgttattacttgaatatagaatatatagtttacaaaatgaaaattacaatgttctcaccaaatatatgccttcgtgtgtccaaagtataattattttagatgctaattttgaatagtttattaaacagttataaatatgcaaagtagctggcatgtagtgtcacggattttctggatagaggaagtgattggaagtattccacttaaagccatggaattagcaatagtttgctttttaatagaaggcccatttgtaagaatgttgaaaatatgtgtaccgtttaaagaaaaagcagctttaaagtgacaaacaaaataccctttttcttttagtatggtttatttttctaggttttctgtccctccctcagtagtgaagagttttctttattcctggcagtgtcaggaatattggtttgaaaagnctgttggcctatctggagtttggccttgttaacctagtattctaaccagttaaccagccttagtatgcattaaaattgtattgttcag

SEQ ID NO: 363241 - DNA, 516 bp, Homo Sapiens
gctgcaatgtctctaccacatcccagcaccagggggagcaaaccctgcccctgcccgcctctcagaaaagctgctgtggtgggcaggggattgggccatctgtctcctggccctggcccatctgcctcctggccttcctgttccagccactggggtgggggccaggttcactgggaccagggctacaggcacagagtctcctggaaaagggagaggggaccctgccaaagatgaggctccagctgccctggggggagggtggtggccattactagagggggcctgggtcctctccccaggggctgccagcatccaggccaggaagcctggagccaagaaccttctggctctgagggagcaagagctggcaggcggcagggctggcacagacagacggaagcagaaaggacagtttggctgctgtgtctgctgcgcacgccccctccccggacagcacctgccacctagaaactttcttagcaaaaaaattaataaaaacaaatccattgtcctctt

SEQ ID NO: 363242 - DNA, 1777 bp, Homo Sapiens
  misc_feature (538)..(546): n is a, c, g, or t
  misc_feature (1420)..(1475): n is a, c, g, or t
  misc_feature (1501)..(1509): n is a, c, g, or t
aaactttagagtctaaatgaagctttttctcagtacaagattctgagtatcataaaatggttatttaattgaaacgtagtgtggtatactcttgatggttagaactcttacagccttatttatttttaagtttgttacagccaaagggttggagtgtgccagtgcacaggtagactaaggaaaacattatagaggagtgaagagaacagaccattgaaaagactattatctgaccagcggaggcagaaaagagaggaacccagttgaataggatccaatccctggttagcctctacacaataatagggagacaaggattaggagccatacctcccagagcaaggtatctttctagagcaaatttctctttctagaaggggagggtcacagggtcacagattcaccaaagctgaaagggctgaggagctcatggtagcctgggttgacctactctggagcacggtgtcttccttctaaactgagtgactgtagtactatctgtgcctctgatggtaataaaactgacaagatgtctaannnnnnnnnaagtaggaccaaaggaaaacaagatttagatagtctgactttgcttttgaacaacagacattgcaagtcaaaattgttgtcaaatttacatatggtaaatgatgaactttaaaaatgtgtccaggtgttagatgagttcattagactcttttaatgctaatggctagtacgtttaaacaaaacagcagttctctgctgcaatattcccattgaccacttaaatgaccataagtggtcatttaagaacatgttagggttagccctgatctgaatataaaagtgtagaaaagggctacagtgcatttcttggtaacttaaactgagtcttgaagttataatgatccattcgagttctgtgatccttattgttcttaattgtgtttctctacgtattggtacagatgagccatacgtttctttgtatcaatgtagacatgacttcagatacctctgaggacctacccagcagtctaggaccctgggccaagtgctgggactatggtactaaatccagtagatgggctgtgtagcaactctcccagggaacacactagggtacttagggaggtgctttgtggagcatgttgaagctttgagatctgagcaggaggcagtgatgtccctggtctattcagggaaagatttcagtgtgaaatggtaaacatccaattgacaggatttagattttgcttagtttttctgctttttaatgtttctatcccccatctcagtgttttctttatccatcccagtgatgccttatttgaaactgggcttaaactgcaaaaagaatgaagttggatttaggaagctgttagatcattgagtggtgttgagagtgaagtttcactagcagggaagtttccttgagccnnnnnnnnnnnnnnnnnnnnnnnnnnnnnnnnnnnnnnnnnnnnnnnnnnnnnnnngctgttaggctcctaattcgtggggnnnnnnnnngtaaaaacagtttagataatcctgaatgcaagcattaacttggttgctaattacaagaatgaaaattataatggaaaaggacaaaataatataccagctggtttgttattatagtccgtgtattaaaatactattgaaatacgttaaaggtaaatttttaaggtttaaaaaatattgagtaactgacagggatggagcaatttagatttcagcaggtggcgcagcatttatttttataaggtcaatttctatcctgaatcacggactt

SEQ ID NO: 363243 - DNA, 520 bp, Homo Sapiens; identical to SEQ ID NO: 60258

SEQ ID NO: 363244 - DNA, 460 bp, Homo Sapiens
ctggtattggcatctctatgcctcagtttgccttccctccactttaaaaagcctcttcagtctcgatacaaaaaacatcccacacatgttctaaaaccatgctttccttgatttctcctcatgtcaagacatttcttacttctctagtctcctagcattttgtgcctcacaaccctcaggacaggccagctagtgtatggctgtgggtttttatctcacctcccctgcctgaccctgagcccttgtggggagtatactcaccctactcctacagtgccttgcattccgtagctgctcagtacattaacccattcaatgtctttaagatttttacaagttagttttcctgtaattactaatcatttatctttaattctgagtaaaattcacaacaacaaataaaaggaaatagtagtaattttttaagctgtttagtcaataaagatttaatgcgtcagtt

SEQ ID NO: 363245 - DNA, 170 bp, Homo Sapiens
gagattgagataaaaatttaaatagaataaatatccaaacataaacttcccaatcggatctgaatagagcatttctctaaagagtaaacacaaaatccaaattaatatagtgggtcactttataaaataacatcattacaagaaaagtcaatatccaatcaactttcttc

SEQ ID NO: 363246 - DNA, 550 bp, Homo Sapiens
gcatgtgtgtgtctgcattcatgccttaactcgggttactgcacaactttagttcttgacttagtctgcaccgtcatctagattgtattgtacatctcggtctgaacttcatcctggcaaaaacaaagttgcaggcacaacagtttaagaatgcattcctccagaagagtatctggtcaggttgaccctgagccttctttggacttgatttggaacttagcctggaaagcgaaagtggactgtccaacagaaagatgtcaacaaggaaaagaggagagccaagcgctagcatgccttttgcctctgcatatctgtgcacactgtatgttgttcatgatagcttgtctacaacttgactaggttggagttctggtaatagtggcaatcttgacattcttggtcagagtttagagagatgtaagactttcaattaatgtcttatttactcctttatgttgattagtctttgatacatgtgctgaatcagaaacctaaataaagataattttttaaaatgcaaacaaaccccacaaaataaaaataaaacatg

SEQ ID NO: 363247 - DNA, 496 bp, Homo Sapiens
tgacttaacctgcaccgtcaaccaaaatgtaatggtaacacctcggtctgaaccttcaccccgggcaaaaacaaagttgccaggccacaacagtttaaagaaatgccattcccccccagaagagtatcctggtccaggttgacccctgaagccctcctttggaccttgatttggaacttagccccggaaagccgaaagtggactgtcccaacagaaagatgtcaacaaggaaaagaggagagcccaagcgcctagcatgcccttttgcctctgccatatcctgtgcacactgtatgttgttccatgatagcttgtctacaacttgactaggttggagttctggtaatagtggcaatcttgacattcttggtcagagtttagagagatgtaagactttcaattaatgtcttatttactcctttatgttgattagtctttgatacatgtgctgaatcagaaacctaaataaagataattttttaaaatgtaaaaaaaa

SEQ ID NO: 363248 - DNA, 748 bp, Homo Sapiens
agcggggcatgtcaaccgcggtttaaacgacgcagtaactataacggtcctaaggtagcgaggctgggtggcggttcgttctctgatctggggtctgagtcatctcctcctagagtgggtcacgaacctgatggggctcagaactgaccccctctctcccccgaggtgggtgggcaccgtggcgtctcttctgccctgccctaaatctcccactctctgtttctgtctgtttcctactgctgctctctcaacctcattcccacctctggggccccttcctcgtgcttctccttcctgagggtttgggaaggtcctggggcagactctggggctcccatggggtggaaggagcctgttccagcacccttttcccagctgcattcccacgggtggccctggagctggtgagctttgtctgggcgttgtcttcggctggcattgctcctcccagctctggcccctctgctccctcaggaagcagtcccctcgtctccctttctgggcagcttccttgaggacagaaacttgaaaacaaacacaaaccaaagtttctggccatctgtggctggagggttctgaatgtcctctctccatgtcaggcagagggtcagcccccatgcttttgcctcaggccccaccccaccccaccccaggcctgcccctcacctcagggccatacccacagcgccctgatggaggaaccagaccgcaggctgtgccaccattaaacaagagcggctgtgaaaaa

SEQ ID NO: 363249 - DNA, 520 bp, Homo Sapiens
ccagcacagagcattgctaaattaattacagtaatctaattaattagtagctaggcttcttctgataggaaagtttcaaccagaaaccactagatgttctattatcatagcttttgtagattggatggaagaataagtaggaagaaagagtattaatgtagctagtagggaccagtgttgctgcttgtggctgaggcagtaatgctaaggctttagctcttcaaaagcagaatgaaaaggcacaaaaagcacttcaagcttgtttctgtacccagttgtccctgtattgtctacataaaatcctgtttcctgctatctgtctgtgattcctgtttattacaaattcagtgtgtctgactgatattaaacactgatattaaaatttcaaacttcacttatctgtgctgttgtgaacaggcagctgatctggcagccctcgaatgggaaacaagtgcttctgttgagctgtagcatatataatataaatgtgcctatgtgtattaaaatgtcttctgtaaac

SEQ ID NO: 363250 - DNA, 1630 bp, Homo Sapiens
  misc_feature (57)..(67): n is a, c, g, or t
  misc_feature (157)..(166): n is a, c, g, or t
  misc_feature (227)..(314): n is a, c, g, or t
  misc_feature (339)..(349): n is a, c, g, or t
  misc_feature (372)..(389): n is a, c, g, or t
  misc_feature (409)..(521): n is a, c, g, or t
ccccccccttttcccgggggggaaaatatttttcgccaaggggttaaagtgttttannnnnnnnnnngatttagggtcccccaggcggcctttaatttatttccatctccgcgagaatcccttataaaattccccccaaacccccacgaaagccccnnnnnnnnnnttaattaaaatgagggtcccccggggtcctttttttatggtccgaaaaaacccccaaactnnnnnnnnnnnnnnnnnnnnnnnnnnnnnnnnnnnnnnnnnnnnnnnnnnnnnnnnnnnnnnnnnnnnnnnnnnnnnnnnnnnnnnnnggggaccgggggggccccggttccnnnnnnnnnnngggccccgcccccaaaaaaatgnnnnnnnnnnnnnnnnnnggggcggggggggccgcaannnnnnnnnnnnnnnnnnnnnnnnnnnnnnnnnnnnnnnnnnnnnnnnnnnnnnnnnnnnnnnnnnnnnnnnnnnnnnnnnnnnnnnnnnnnnnnnnnnnnnnnnnnnnnnnncccggaaaaccattttaattataatagcttacacaggctgcagagagggagacgcagagccggacctgacgggctgtgctttcaaaactgtgcagtctccttcctggctctgaacaggttagcaagagttccaagaggcctcaggcctccaaccacaaaggcagagaagttagccccagaaagctgacagctgaaggcggggaggctgaaagtgcttggtgtttgacagatgagtgttgtggtgggaggagtatggagtcacacagaggctccacccagcaaggcctctggccaggggctatgtttaaggctggggtcaggcagaggtgggagccgcaggggagagaagtctggccggcaagccccaagggaaggacaaaggcactggggcagatgtgaccgtggacaaccgcagtgcaggcagggcccctacaacgctacagcaagcaaggccgtccacgaagctccctgagctacattctaacagaatgtggatgtggggctgggtcagcatgtggccccaccatctttagctcaggggcagttctgacagcttgggtggcaaggaatcccattaacccttgcagcggcagccccccgctggtgtctcctgggcccccaaggccccaaccgtgggcccttggtgacccaacagatctcggtgtggcagacggtgcagcggatccagtcgcagccgtccttcttctgtaccacgatctggcactgggggcagcgcatggcctcgccctgctgcagcatcacctggagtggggcaggtgctggccctggggcggggctggggcagtcacccagcctggcccctccccatggcagggagaaggtggtgaccctctagagctgtggagtctctcctgtgtggctctgccaggccaggctccatccagcaaccccctcttcattcctgtggtctccaccctccacccagacgctcttcctgacatgaccattcggcctaagtcccacctccggatgggagtgacagccagaagggaggtcagagcctcacagggatgtgtgagcacagcccttactgggaacgcccccagcccccactggatcccagaacttaaaatcctagctctcgcatg

SEQ ID NO: 363251 - DNA, 576 bp, Homo Sapiens
  misc_feature (206)..(214): n is a, c, g, or t
aatttgctaggtttgtatatagaagatcctttcattatcaagaatgagtatggttgcttttgccatggttgcttttactattaataaatgtatctagcctacccaaactctgtagtaacttttgagattctcttaatttcccctcagattaaaatagagaaggttgaaggtactttttgatgaaatttttttctagtctggttagnnnnnnnnngttgtgacatattcattgtgttaccgtaactagaaccttgctttgtgaactgtctttcattgggatgtatggtttctctcaatgtgaaatctggaaacttcatgtaaactacccatgccgttatttcatgtgactccagtgcccttgtattccataacatgctgatgaaagggatttctcacggtttctttctttgctaaattttttaaccataaagcagcttaccctttattttcccatcttggaagtaaaattgaccaaagaatgtacgttctagcctggtggaatgtgcatactttaaatttgtatgttacattgtccaaagccctttactttcttattagtaaactgaatctaatatg

SEQ ID NO: 363252 - DNA, 541 bp, Homo Sapiens
gcccaagttcagtggggtggagaagatcaagaccatcggcagcacctacatggcagccacaggcttaaatgccacctctggacaggatgcacaacaggattctgaacggagctgcagccaccttggcactatggtggaatttgccgtggccctggggtctaagctggacgtcatcaacaagcattcattcaacaacttccgcctgcgagtggggttgaaccatggacccgtagtagctggagttattggggcccaaaaaccgcaatatgacatttggggcaacacagtgaacgtggccaaccgcatggagagtacaggagtccttggcaaaatccaagtgactgaggagacagcatgggccctacagtccctgggctacacctgctacagccggggtgtcatcaaggtgaaaggcaaagggcagctctgcacctacttcctgaacacagacttgacacgaactggacctccttcagctaccctaggctgagattgcactcgccttctaagaacctcaataaaaagactctggggtgtctgg

SEQ ID NO: 363253 - DNA, 1190 bp, Homo Sapiens
  misc_feature (710)..(862): n is a, c, g, or t
gcggccgcgggttcggcgggccgcgccgcggtgcccttgctgctgtgtgcgctgctggcgcccggcggcgcgtacgtgctcgacgactccgacgggctgggccgggagttcgacggcatcggcgcggtcagcggcggcggggcaacctcccgacttctagtaaattacccagagccctatcgttctcagatattggattatctctttaagccgaattttgctgcctctattgcatatcttaacaacgtggacacatacgcgctgcgctgactgcggcacgacaacagcatgcgcactgagccctcccacactgcactcactgccacctaccactgaagcacattcatcttcccgaggcactacgcacgctggctggcttgcatgcacacgcacagcctaccgacacgcaggcacatcccccaccttaatctacacctccacttgtgggctctgcccactggctcactataccccttggccactgcgccgtgggccacacacagcggctctccccgcaacctgggcccccttctacctgctcccaacctccctacgccacgcccttgcaaacttggccccctaactcgcatgccttcgggctgaacccaattgggcacttccggctgggcgcccagtccgcctttaagcccgcccctactcacccccactatcgaaacatttcccgcgccaccccatgtttgtggcgcctnnnnnnnnnnnnnnnnnnnnnnnnnnnnnnnnnnnnnnnnnnnnnnnnnnnnnnnnnnnnnnnnnnnnnnnnnnnnnnnnnnnnnnnnnnnnnnnnnnnnnnnnnnnnnnnnnnnnnnnnnnnnnnnnnnnnnnnnnnnnnnnnnnnnnnnnngacaaacctgcgccccggacaacgcgctcccgcgacctccccacacaggaggtcccccccatacgcccaacgacaggcgaacggactcgggcacacaccagcacccctcccacacctcaacgcgccacccggggcctgggaccttacaaaacgttcccattcccatttgcctgctcccaaactccttctctctcaaaccgttcccccttacacctgtacccgccgacttaaccaccaaacctgtgcccccttaccccccttcctgaccaaacctcagcccaccccgcaaacatcacccgttcccatttctcccaaacaacgcggcaca

SEQ ID NO: 363254 - DNA, 1056 bp, Homo Sapiens
  misc_feature (851)..(860): n is a, c, g, or t
tggaccggtccggaattctcgggatggaagcacgggtcctgggccctcccgcggggcgggtactcgtctcccggccgagcgacttcagctcggggacctgccccatggccgctccccagcaggacagggtaaccgccgaggtggggggcttcttgtccgtcccagcccccccaactcaggccctctcgctgcccctggcgaccaccgcgtgcgcccttccccagggcgggcgcagtcctggacgcctccgccgagcgtgactgcgtgcattttctctcctttcccttcccaacctgcggagagaagacagccccagagccgctgtctccatcctctgctgatgcctgctgtctttatgttggcctcgtcgtccgcactgcagtgtggcaggggcgtccctcgtttcccgcggactgaggtgggcgccgggcattcagtaaacgaagaaaccaaagcggagaaggttgggaatcaaacgtctgtcatatctgccaccagcagacaagcggctttgggtacctcctggacccaaagacgaactcagcccctccaggagcgcagtcattggcaccctcgtgggaacaatgccagtgggatgggtggccaccggatgtttccggggcccctcagaggcccagcagcgcaggtcttggagaatgaatgtgggtcactgggccgcgctgcagagggcgggtcctgagtcgcttcctggaggagaggcccatggccagcacttggcttcgcctggaggaagaagcacctggctaaaccacgagcgttcagggtttggcggtttgataaaaaaaggctgggtttgcaacaagtcgcacctcacgcgtcctttgtggctnnnnnnnnnnccccctcctaaaagatcccctccggggggcacaaggttttcggctacccaggttttttttgggccaaagggggtcccccattgggcgggcgcatttaaaccctacccacatggccggccggcattaacacagcccggagcccggcgaaaacctgcgcagctccggcgagcttttgtgaagaaaacccctcttgccg

SEQ ID NO: 363255 - DNA, 581 bp, Homo Sapiens
ctctagtcctttaatgagcatgaatttatacttctacatttgttgcttagtaaaattatactcagtactttgagttattcagatttatgtttaatattgttaaattcttcatcagagagcataaatatattgtcttctatactttgtaacttgtgcatatctaaagaaactaacaacgaacattttgggagatgtttttgtgtttttttatagtagagttttagagtacatttgtcttaataggaagtttttaccataaacccaagattttatttcacgtattgttgctttctcttatatggaacttattgtgtacctcttacctttatttctaatcatttagtgatactaatcttttcatagtaaatatatttgtttctaattgtattcctagagtttacattcctaaagaataaacgacgactttggctatttttgtgtgttccctaccttcttaaggctatggaaataaactggagtttagttttttgaatttttgtatatttgtgtaaatgttctccatatgtagtacttgttatacaacaagtgttgcctcttgttttattgaaataaaaactgaa

SEQ ID NO: 363256 - DNA, 502 bp, Homo Sapiens
acgaatgcctctcctggagcgggccgagagcctgtctctccgtgagctcccggctgcacgcgggcaaggacggcaccatgccccgcgcggggaggagcctgggccgcagcgccgggacctcgccccccagctccggggcctcgcccaaggccggccagtccaagatctccgccgtgagcagactcctcctggccagccccagagcgcgcggcccgtccgcctccaccaccaaaaccctcagcttctccaccaagtccctgccgcaggcggtgggccagggctccagctcgccccccggtgggaagcacacgccctggtccacgcagtccctcagcaggaacaggagctcgggcctggcctccaagcttcccctgcgggccgtcagcgggcgcatctcggagctgctgcagggtggcgcgggcgcccggggcttgcagctgcgggccgggcccgaggcggaggcgcgcgggggggccctggccgaggacgagcccgcggccgc

SEQ ID NO: 363257 - DNA, 318 bp, Homo Sapiens
  misc_feature (87)..(119): n is a, c, g, or t
ggtgtgaacctgggaggtggagcttgcagtaagacgagatcgcaccactgcactccagcctgggctacagagcgagactctgtctcnnnnnnnnnnnnnnnnnnnnnnnnnnnnnnnnntcctgcattacacataggcacatgcaaacacacacatgtggaaatagatacaccatattataacactttattaaaggatagcttgttctcaaggattccttcttgcttgatttggaatcaagtattaatcatgtgttagccacaaggtgagtgattttgaaaagatagtcgagagatttttaaactatttccacaaagt

SEQ ID NO: 363258 - DNA, 679 bp, Homo Sapiens
ggggggtgctgcctgcggaagccggcggctgagaggcagcgaactcatctttgccagtacaggagctcgtgccgtggcccacagcccacagcccacagccatgggctgggacctgacggtgaagatgctggcgggcaacgaattccaggtgtccctgagcagctccatgtcggtgtcagagctgaaggcgcagatcacccagaagatcggcgtgcacgccttccagcagcgtctggctgtccacccgagcggtgtggcgctgcaggacagggtcccccttgccagccagggcctgggccccggcagcacggtcctgctggtggtggacaaatgcgacgaacctctgaacatcctggtgaggaataacaagggccgcagcagcacctacgaggtgcggctgacgcagaccgtggcccacctgaagcagcaagtgagcgggctggagggtgtgcaggacgacctgttctggctgaccttcgaggggaagcccctggaggaccagctcccgctgggggagtacggcctcaagcccctgagcaccgtgttcatgaatctgcgcctgcggggaggcggcacagagcctggcgggcggagctaagggcctccaccagcatccgagcaggatcaagggccggaaataaaggctgttgtaaacgagaaaaagacaaaagagcaacac

SEQ ID NO: 363259 - DNA, 921 bp, Homo Sapiens; identical to SEQ ID NO: 15841

SEQ ID NO: 363260 - DNA, 495 bp, Homo Sapiens
cagggctcatcccagaaaatatggatagaaaagtttccttcagtttgcttttcaaatagtgcttgaataataaacctcctttgattggtgactagtcttttttggtatatctccacctttaaaaattgttcaagtttttaacctggttatactgtgttctaacatgtctctcattttctctcaaaattagtttatctcattgtagaaaaagcaatggttttcatagcttcatctatcaggaaataaaactcttactaaagaatagcatactgcatctttaagcagtagagggtaaactacctgcaaatgtgaatttcttagatacatttaaaaatatatagttgttaaccttctgtgtgccaaaaactcttaagttacattttccttcaaagcaatgtacttttttctacatatgcagtatgtagttagcataaaatcattggtgccatgaagattatttttaaacttaaataaatatttaaatatcaaaaaaaa

SEQ ID NO: 363261 - DNA, 722 bp, Homo Sapiens
  misc_feature (53)..(188): n is a, c, g, or t
gattgttgaactttgctgaccaaatatagtaaccagtaaccccagctagctgnnnnnnnnnnnnnnnnnnnnnnnnnnnnnnnnnnnnnnnnnnnnnnnnnnnnnnnnnnnnnnnnnnnnnnnnnnnnnnnnnnnnnnnnnnnnnnnnnnnnnnnnnnnnnnnnnnnnnnnnnnnnnnnnnnnnnnnngtctaggacatatattttgtattttcccctcacccaccatccaataatgagtaatagcacaaagtaaaagtgacttaatttgaaattacttctgtttggctagtttgcttagctgatcaccaccaacatcataggtctataaatcacccaactaagatcaggggtgtttcatgggaaaatctacacaaactattcattaaaaaccatagagccatggactgtcatttatgatttctgtttgattctttgtggtcatcattgaatatacaggggcctctatacactctggggagtatctattctcaggtgagcaaaataccgaatactgaatggaaatcaactgtaagtattaggacttcatatgcaacttgaatttttggtgctgtccggagtctagagccccacaatctgttttggttacagtttatccctgtaggataaatgatccatttaactattcatcagaggtgctgtaattttaaattgtctcttgtctccttcagttaattttcagaattaaaaacataccatggg

SEQ ID NO: 363262 - DNA, 460 bp, Homo Sapiens
ctggcttttctggcagccacatacagtttttcacacacagggggtccaagtttcaatggagagaaacagttttacagaacaggagggtaaggtgagaaactgccagccccgccgcatctctagtaacacgtatggcaaaagatgaggatgaaagaaaagagtgctaatgggggctggcaaacgcttactgtaaaggaccagatggtaaataatttaggatttgccagccagataatctctgtagcaacgactcaactctaccttgatggcacaaaagcagctgtagacagtatatcaataaacgaacagggatgtgttccaataaaactttatttatagaccctgaaatgtgaatttcataggattttcatgtgtcatgaaatactgtttttcaagccatttaaaaaatgtaaaaacctatgacattatgttaagtcataatgaaagaagctagccacaa

SEQ ID NO: 363263 - DNA, 929 bp, Homo Sapiens
atttaggctaggtacgatggctggtggtgaatcggccgaggccgggcctcctggcggcggcggagtgaggctgacagcggggaacctgggagacccctccggccctccccgcgatgcgctcggcctgagggtacccggcccggcccttcctcgcttccctcgactattccactgcgtctccgcgccccggcgtcatcctgcgagtccctctgacgggagggaagatggctgcacggagctggcaggacgagctggcccagcaggccgaggagggctcggcccggctgcgggaaatgctctcggtcggcctaggctttctgcgcaccgagctgggcctcgacctggggctggagccgaaacggtaccccggctgggtgatcctggtgggcactggcgcgctcgggctgctgctgctgtttctgctgggctacggctgggccgcggcttgcgccggcgcccgcaaaaagcggaggagcccgccccgcaagcgggaggaggcggcggccgtgccggccgcggcccccgacgacctggccttgctgaagaatctccggagcgaggaacagaagaagaagaaccggaagaaactgtccgagaagcccaaaccaaatgggcggactgttgaagtggctgagggtgaagctgttcgaacacctcaaagtgtaacagcaaagcagccaccagagattgacaagaaaaaatgaacaagtcacacgaaaaaaaagaagaaatcaaagtcagatgctaaaagcagtgcacaaacagttcacgccatgtatggaaaggaagttgatgaaggagcctgggaaactaaaattagtcacagagagaaacgacagcagcgtaaacgtgataaggtgctaactgattctggtccattggattccactatccctgcgattatgaaaataccatcacagttaccaccg

SEQ ID NO: 363264 - DNA, 1023 bp, Homo Sapiens
attaatccccctctttcccccccgattgttccgccgagggaggacagcggggcctggcgctggcgccgagacgccgcttagctggccgccactggagacactccctcccgcctcccgggtctcctggcggcggcggagtgaggctgacagcggggaacctgggagacccctccgccctccccgcggtggcagcggccgatccccggctccggcgcgagggacggccgcgatgcgctcggcctgaggttacccggcccggcccttcctcgcttccctcgactattccactgcgtctccgcgccccggcgtcatcctgcgagtccctctgacgggagggaagatggctgcacggagctggcaggacgagctggcccagcaggccgaggagggctcggcccggctgcgggaaatgctctcggtcggcctaggctttctgcgcaccgagctgggcctcgacctggggctggagccgaaacggtaccccggctgggtgatcctggtgggcactggcgcgctcgggctgctgctgctgtttctgctgggctacggctgggccgcggcttgcgccggcgcccgcaaaaagcggaggagcccgccccgcaagcgggaggaggcggcggccgtgccggccgcggcccccgacgacctggccttgctgaagaatctccggagcgaggaacagaagaagaagaaccgggaagaaactgtcccgagaagcccaaaccaaaatgggccggactgctgcaagtgggctgagggtgaagctgtacgaacacctcaaagtggtaacagcaaagcagccacaagagattgaccagaaaaatgacaaagtcaacagaacaaataggaagaaatcacagtcagatgctaaaagcagtgcaaaacaggtacacgcccatggatggcaaaggaagttgatgaacggagccggggaaactaaaattagcacaaaagagaaaacgaagccagcgtaaccgtgcatacagtgccgacgaacacggaacagggatcgacatcccgggg

SEQ ID NO: 363265 - DNA, 412 bp, Homo Sapiens
  misc_feature (76)..(92): n is a, c, g, or t
accagtatcttgccgatatctcaccatcatgcatgtcttcttatccttgccaacctaacagataaaaatgttctannnnnnnnnnnnnnnnnatgagtaacgtagagcatattttcatgtatttaacagccactggaatctgctttaccatggcctttcctatttctattctttgcctatttttctgttggttgttggtctttgttttgtattacaggtgtgctttagatattagctttttgtaagagatcctgcaaatatcttctttccagtttgtcattgtcatttgtcttttgactttgttctggtattttttgatatgtagaaatttttattttcatgtaagcaaatttatgaatctttgtacaccataagtatatacaattatgatttgtcaattaaaaatattagt

SEQ ID NO: 363266 - DNA, 463 bp, Homo Sapiens
acctccttccagggtaggttcagtgaattgtgtaggagaggttgtctgtggccagaatttaaacctatactcactttcccaaattgaatcaccgctcacactgctgatgatttagagtgctgtccggtggagatcccacccgaacgtcttatctaatcatgaaactccctagttccttcatgtaacttccctgaaaaatctaagtgtttcataaatttgagagtctgtgacccacttaccttgcatctcacaggtagacagtatataactaacaaccaaagactacatattgtcactgacacacacgttataatcatttattatatatatacatacatgcatacactctcaaagcaaataatttttcacttcaaaacagtattgacttgtataccttgtaatttgaaatattttctttgttaaaatagaatggtatcaataaatagaccattaatcagaaaac

SEQ ID NO: 363267 - DNA, 726 bp, Homo Sapiens
ggttcccactgtgtctgcacagtgcttgacttctcggcccggaagagaacctgcgttctctggtttccttcctgagtctggcacagacggggctattgtagttactgatcaagtccttggagtcagccttgcctggctctccttgtagcagattcagtcctacagactctctggctgccccttcagtgaacaagtatgctgtgcaattcaacctcttggacttgtctgctcctaagcctttggttgctggccctgactattgtaagaggtgaaacattacctagtttcgtttgagaatgaccattttcctaatgtgtaaaaccatctctctcaccacttttattagtaggactaacattcatatccgttataaatggttgagcaatttgaatgacttaacacagtgtcattatcttgcaatataaactggtaacctcacaactgccacacttcatcaccatatgaagtaaatgaagctagctaagcggatgctgtatcaactagtaacttgccattaaggattattttatagcatgaatttaagactatttattcaaatgatattttactcttgtattcactttgttttagatttgtgacatgaatatttcagtgctgcttaattttgttctgaattcttgtttcttgcttgtaaatggcttttttatggtataaataaacgtcaatggacattgctgtttgtaaataaaaatgctgctagaaccc

SEQ ID NO: 363268 - DNA, 499 bp, Homo Sapiens
  misc_feature (19)..(19): n is a, c, g, or t
cccttggttggctgccccngactatgtaaaggggtaaaacttcccccggtttggtttgaaaaaggacccatttcccctaatgtgaaaaacccacctcccctcacccacttttaataagtagggctaacaattttttcccgttataaatggttgagcaatttgaatgaccttaacacagtgtcattatcttgcaatataaactggtaacctcacaactcccacacttcatcaccatatgaagtaaatgaagctagctaagcggatgctgtatcaactagtaacttgcccattaaggattattttatagcatgaatttaagactatttattcaaatgatattttactcttgtattcactttgttttagatttgtgacatgaatatttcagtgctgcttaattttgttctgaattcttgtttcttgcttgtaaatggcttttttatggtataaataaagtcaatggacattgctgtttgtaaataaaaatgtctgctagagc

SEQ ID NO: 363269 - DNA, 423 bp, Homo Sapiens
tgtagtggtcagaggaggagaccacaaatatgttctggatttttagagccccagaaagacccttaaaatctgccttaaaatgtgttttccatttactagtgaaggctgaacattcttttaaagatgtctttgtccttgtacaatacaatatacccagaagggaaaacactttatagcccttatggactaacttggtctgctttgaaatttggctcaggtaggccttaccatggagttacctggtagctattaaagaagtttaagtacagaagttttcataattacttccttaatttcttcctcatagtttgattttaaattagaagagaattactggaatacatgtatcctcctcaatcactacccctagcaagcttcattagtctttgaaatgtttctccctgtaaagaacagtggcaaaaa

SEQ ID NO: 363270 - DNA, 717 bp, Homo Sapiens
acaaaagtttaagaatacatgcctgagatcagttcttacaaaggttaagaatacattactctagtgactatcaatattttttgtcttcataccccttgacactctttaaaaagtattgatgtttccaagaatttcctgtgggttatatcttccagtgtttgtcgtattacaaattaaacctgagaccatttatttatttattttaattgttttacctcacctggaccatgtgaaacctgagcccttttaaaaacaggaatgtacaaacacatattccattatccataaccctcagaacaattatgcaattgcatgttatttagcctctggaaaatcctgtgagtatctttcaataaaaatgctaatatttctacctatgaaatttcaagcttgattttcaagattgagattttgcagttgaataatttcttacatgtgtatgtatatacacacataacacagaaaagtgtaaaattagtcccatataaggggtgtgtgtgtatcagtgtcacataaaaccaggctaattttatgtttattagtcataatcatcttcctcatcttcatcttcctcagattcttcattctcagctgcgagtagaactgcttcttgtgcagccctgaaagcctgctcctcctccacactaggatcatccatttctgtaatttctggtccactggggtattcttgataaactggtggtggaactgggggtg

SEQ ID NO: 363271 - DNA, 455 bp, Homo Sapiens
atttataaataaaatgtaacatattcacgttctattttgatatgaattaccataatattctattaggatatgaattgttataatggccattagaaggaatggattgttcccatatataacataatatatccatgtataaagtatctatataataccaacacgtaacataatgtaaagaaaagagattcatggaataaaatgtgcatgtcattgatataaattttaaaaacacagaaataatacattatattaagactatatatgtatgtaaaattattaccagtggactgatttggatatacactaaattcatgctacttgcttctggaggttgcagtaaagaactggaactgtgtctggggatgtcacttttatctgttttatttagttcattttttataaacaatccttgaggcaaatatgagctgttaataaatgccaattagtctttttgc

SEQ ID NO: 363272 - DNA, 508 bp, Homo Sapiens
gcggccgccgccgccggggggcacacgcactcgcaccccagcccgggcaacccgggctacatgatcccgtgcaactgcagcgcgtggcccagccccgggctgcagccgccgctcgcctacatcctgctgccgggcatgggcaagccccagctggacccctaccccgcggcctacgctgccgcgctatgaccccgcggggccgcctcgcgaggaccggtgtgcacacgtgtacatatgtataggtacgagcgctgcggcctccccgtgcgccctcccgcgaccgggggcccggtttgtatgtacatagaatgtataggtgccaggtagaggcagagaggccaggcggggcaggagtggccaagcgcgcaagggcgcgggcgagcaggcctgtgaattcgcaggatcatttcagacccgcacttcggcagccaactcgaaagcaggcggttgtgtgcggcagcagttggcgtttgctttgcacttcggaacctgttgcgttttgacccac

SEQ ID NO: 363273 - DNA, 483 bp, Homo Sapiens
agcgttgaaaaaagaatgcacgtgtgagttactaaaaagtcagaataatgtgcatgggaacagtgcagcaacatgctagaaaatcctcactgcactccagcagaggctagaggaatgccagtgttaccttacgcttctagaagcagagccactccagccagaacccattttgcagtcttctcttcgctcttcagcctgaaggtccagatgtagctggggcctctcagtttggttctatacacagggcactcgtaggtctgtttggtttcttgtctgtccacgggggtggcttttgcaaagatgaccggcatagggcatgccagctccttgagacgggcttcaacaatggttcctgcttgggtgtcccagcgggcgcctatggcaaaaacacagcggttgcaattgtgtggcagcttgctactaatgataatgatcaagttgtttgatgcaataaacattcaacattctggttttgtcatatta

SEQ ID NO: 363274 - DNA, 1066 bp, Homo Sapiens
cggtccggaattcccgggattagccaatgacagaggccgtacggcggaagtatagaaaaggactctctggaacatggcaacattaatctgaccacaagctgactggcaggtgctttaaccacaagctctgactccaggccctgtcccctgagctctgccctcggatgtccgaccgcccagagcctgcatgcgccgtggggcgccccaggaccaggagctggtggggtccggggccccctggccgggggtcccggggcgcccctcctcccttgggaccggttgtccgggtcctggtctttcccccggatctagtattcagggcggaccagcggagcggaccccgacagctgctgaccctctataaccccacaggaactgcgcttcgcttccgagtcctgtgcacagcacctgccaaatacacggtgtttgacgcagagggatatgtgaagccccagtcttgcattgacattgtgattcgccatgtggcacccattcccagccactatgatgtccaggaccgcttccgcattgagctgtctgaggaaggagctgagggccgagtggtgggacgcaaggacattacctccattctgagagccccagcgtacccccttgagcttcagggacagccagatccagcgcctcgcccagggcctcctgctgggacaccaccacccacggccagacacttccaggagcacccccgccagcgactggccaccagctccttcctcctctttctgctggacgggaattgtggtctaggggcctcctgggtgcttccattcccggaacaaattccgcagcccgctggcctcaagtcctgcaccgtctccctgggaaaaaaagttggtgggcccccctaggccttggcgccctccttcccctgggtggttcctccccgaccttgaagtcccgtggtttaaaacccccaagctacatcccaccccttcttggggcccagggccttttggaggaccccccctggggcagcttctttaccctccaacctttggcttccccaacccacctctccctttaccgggccaaagatccctccatttct

SEQ ID NO: 363275 - DNA, 1181 bp, Homo Sapiens
cagtactctacgggtttaggtagcgaggcctgggtggcgaattcggcacgagggaaggaacctggggcagagctggaagaggaaaggtcttgggggccctgggcctgggtctgcgggagccccatctagcggggttccaaggcggcggcggcatcagtcgaggccctgctccgggagctcatcttgtcccctttcgcccctcacgccccccagctctgactccaggccctgtcccctgagctctgccctcggatgtccgaccgcccagagcctgcatgcgccgtggggcgccccaggaccaggagctggtgggtccggggccccctgggcgggggtcccggggcgcccctcctcccttgggacccgttgtcccggtcctggtctttcccccggatctagtattcagggcggaccagcggagcggaccccgacagctgctgaccctctataaccccacaggaactgcgcttcgcttccgagtcctgtgcacagcacctgccaaatacacggtgtttgacgcagagggatatgtgaagccccagtcttgcattgacattgtgattcgccatgtggcacccattcccagccactatgatgtccaggaccgcttccgcattgagctgtctgaggaaggagctgagggccgagtggtgggacgcaaggacattacctccattctgagagccccagcgtacccccttgagcttcagggacagccagatccagcgcctcgcccagggcctcctgctgggacaccaccacccacggccagacacttccaggagcacccccgccagcaactggccaccagctccttcctcctcttcttgctgacggggattgtgtctgtggccttcctgctgctcccactcccggacgaactcggcagccagctgcctcaagtcctgcacgtctccctgggacaaaagttggtggccgcctacgtcttgggcctcctcaccatggtgttcctccggacctgagctccgtgctcaacccccagcccaccccaccctccctgggcagggtcttgaggcagccactgtgatgctcataccttaccttgcctcctaccctcttctctttcctgcctactccccactcctccctgacaaaaaacacccagggatttgtactcattttccaagttgaataaaatacatttttaaaatgataatcag

SEQ ID NO: 363276 - DNA, 643 bp, Homo Sapiens
  misc_feature (320)..(328): n is a, c, g, or t
gaacccagcagggtacagagggcatttgtgggagcagttaggaaaccaggacgtccagcttctgcctgccagggagctcgctcatgttgtctctgaaatttgcataagagcaattacctcatattctaattttaaagatacaatttttaaagacatggaaggctctgagacctcctgaaggctattcctatgtgaggtattgtttacgggtggcctttcactatttccaaatcagcgatgaaaagaagactgagtctaaaataaatgaagcaacagacttcagcagcctgagagaattttgttcaattccagtctccttnnnnnnnnntcggtttttgctttcaatttaggaaaattgttttgggttgcattgttgaaagtaatgatttctagcagctacttatgtataatctcttaaccaattaaattctgaatctcccaaacgaaagacgaaaccccaacaataataaatcttgtcgggccgccttcgggcccctcaaaaaagcttttctagaccaattcctttttgggcccccggggcccccccgtagggtaaatttgaaacaatggggccattaaccctggttttccccaggggaaaaaatcctggggctcatcgaacataggcggcctctgggaattt

SEQ ID NO: 363277 - DNA, 473 bp, Homo Sapiens
  misc_feature (72)..(72): n is a, c, g, or t
tctaggatgtgcccagcctgccacaccgcctccaggaagcagagcgtcatgcaggtcttctggccagagccncagtgagtgcccacggaggcccccagcacacccaacgtggcttgatcacctgcctgtccagctctggtgggccaagaacccacccaacagaataggccagcccatgccagccggcttggcccgctgcaggcctcaggcaggcggggcccatggttggtccctgcggtgggaccggatctgggcctgcctctgaaaagccctaagctaccttggggtctggggtgggtttctgggaaagtgcttccccagaacttccctggctcctggcctgtgagtggtgccacaggggcaccccagctgagcccctcaccgggaaggaggagacccccgtgggaaagtgtccacttttaatcaggggacagggctctctaataaaactgctggcagtgcccaggacggtg

SEQ ID NO: 363278 - DNA, 590 bp, Homo Sapiens
  misc_feature (152)..(152): n is a, c, g, or t
aagtggtgtctgaagcctttgtccgcttcttcgtggagattgtggacaatactctttggtccttgacgtcgggcgagcgtgaggagagaaccctgcagcgggaggccttccgcaaagctgtctcctccaagagcctccgccacttcctgganggtcttcatggagactcagatgtttcggggcttcatccaggagcgggagctgcgccggcaggatgccaaaggtctgtttgaggtccgagcccaagagtatctggaaacactccccagtggagagcacagcggtgtcaataagttcctgaagggactaggcaataaaatgaaatttctccacaagaaataactctcagcctcaagggaaaacttcctcctagtgcagccctatgctttaaaaacagttcctggtggcctttctgaaaggctgggtcccaggttgtcacggtgcggaactggaggccgcggtggcttctggccgaggctgggctcttccctggatgaggacctgggagccgcctgggaggacagccccagaaagggagcccgagaccaggcgtgtcgccgacatgcaaatgggttgttttggtggttggg

SEQ ID NO: 363279 - DNA, 468 bp, Homo Sapiens
tcttccccctgtcccaacccactctcaccccgcaacccatcagtattttagttatttggcctctactccagtaaacctgattgggtttgttcactctctgaatgattattagccagacttcaaaattattttatagcccaaattataacatctattgtattatttagacttttaacatatagagctatttctactgatttttgcccttgttctgtcctttttttcaaaaaagaaaatgtgttttttgtttggtaccatagtgtgaaatgctgggaacaatgactataagacatgctatggcacatatatttatagtctgtttatgtagaaacaaatgtaatatattaaagccttatatataatgaactttgtactattcacattttgtatcagtattatgtagcataacaaaggtcataatgctttcagcaattgatgtcattttattaaagaacattgaaaaacttg

SEQ ID NO: 363280 - DNA, 607 bp, Homo Sapiens
gaggttccaaccattaagtttgccagctcagacttgatcttgaatgaaggcggggttctgtgactggagaccatttctctccttttgtatttgttggtgtgtccaaaaacctcagatctcccagcttcaggcttctttgagggcagtgctaaattggttgaaaccttatttgaggcagttcctgaaaagggtaggtgaaatttcctgctgataaaaggcatcttgtgtcttgttcatccttagcaaattgccaattagcaaagaagagagggcagatgaagtaccagccaatttgaaattggtgtggacttccatcaaggtatattaattcactttacctagatgattcgaaattagttgcttttttcttttaatcctaaaaggataattttcttcatgttcttcttgtcatgtcagccaaatcctatagtgtcaactttcagtaaatgtatcttagatataactatggaccaatctagatctttctctctctatcatctatacagtttagagattttaaaactcttaccacttagtttgaaattttattttaatttataaaatgatatattcttatgtaaaaaattcagacaataaagatgtattt

SEQ ID NO: 363281 - DNA, 480 bp, Homo Sapiens
  misc_feature (374)..(374): n is a, c, g, or t
gcggccgctgatcggacgctccccctctgtctctcacactcaggggacaattcaagctttcgaaatacaaaaatcacattgtgagagtacacaagctggcaataatccttttctgtatgtgtgtgtttgtccgaaatggatgggaggcctccagccagtccttccattgctcactgaagggacgtccctgagccgtgcgctctccttttgcactcattcctggaggacggattccgctagacaccctccagcatcgctgactttataaagcggaaaaacggaaaacgtgactttgtaatagacaaacattgttttttaatggggttccatgggggggcgttcagcctttctgtttgctgtgtgctgtccagatngcctcttgggcgtcctgttgttctcttcccgtgttgtacgaagggtaccgtggccacgtgtacatgccagagctgttgatgagagttaccagtattatgaatgtct

SEQ ID NO: 363282 - DNA, 892 bp, Homo Sapiens
aggatagcagacagacgaaaactgttcgccgccgcgaccgccgcctccggaactaaacggggtgaggtcacattcggttatctctaacgttggaaaacgatggagctaacacccattatggagattaaccacttttcatcaggtttttaacttaagtcgtgaggaatacaacggtgaacacaagattcattttattttcatcaccatgggacgtatcctgttgttgagttctctgggtcagacctctgaagacttctcagatggatcctagtctctgggcttgccctgaaattactcgctgctcagggagagagttgaaatggttggcatcctcccactctgttgctccggctgtgtcccctcgctctgttgttccagctatgtcccctctgttgctccaactgcagctcattctgttagagttcctcattcagctggtcactgtggccagagggtgttggcctgctcccttcctcaagtattcttaaagccatggatttttgtggagcatttttcttcctggctctcccttgagttattttcctttcttcgctatcttgggactcttctttgtgcttgcggtcatcggttgagagaaggacttcttcttccttgtctccttggtgttggctcgtggttgctcttcaacaactggactggaggctcttggttttctcttcatcttcaacaagtcagtctctctcaagggtctcacgttgcagcattcttaccagaggccattgggcctggagttccagttccagtgtctggagagtccacctcagctcagcaatctcatgccggttggcaattgtcagcagaagccgatgcctgcccatcagttctttactctgaggtgttagagtggaataaaaatataaataccggaaag

SEQ ID NO: 363283 - DNA, 562 bp, Homo Sapiens
ggtccagctggagcacaacgtttggtgaatatgctgtttcctcagttcagagaggtagcaactaggtaaactccttataaaaagcaaatacctggatttacaaaagtgaaagtagttgttcacaaaagaattcgccatggaattctttcagttaccaagctctcctggtaatgtttgtggttatatcatttacacaaaacttttcaggaacttctgtgttgtttaagcaagatgtatctgtactgatgtctcagtgaatcagtctgtttattaagcacttatcagggcttccacacacttatttattttgccctagttaatcctgttgtttgctgccattggcatgaaatggccaactgtggctgttacagttctttcattcaattataacttgtaaaccagtgactcctaatctttttcaagttaagacaccttaccattgcttatttggttttatgagacttgttcctttttttctccctaaggaaaaagaaagctttatgacatatttatttttttaataaaactaagcaaaaataaaacttatggtaattctttaaaa

SEQ ID NO: 363284 - DNA, 538 bp, Homo Sapiens
  misc_feature (15)..(15): n is a, c, g, or t
  misc_feature (52)..(52): n is a, c, g, or t
ccctcagtccagagnggtagcaaccagggtaaaccccctataaaaagcaaancccccggattacaaaagggaaagtagtggttccaccaaaagaattccggcccagggaaatcctttccagttacccaagctccccccgggtaatgtttgggggttaaatccatttaccacaaaacttttcagggaacttctgtgttgtttaaagcaagatgtatctgtactgatgtcctcagtgaatcagtctgtttattaagcacttatcagggcttccacacacttatttattttgccctagttaatcctgttgtttgactgccattggcatgaaatggccaactgtggctgttacagttctttcattcaattataacttgtaaaccagtgactcctaatctttttcaagttaagacaccttaccattgcttatttggttttatgagacttgttcctttttttctccctaaggaaaaagaaagctttatgacatatttatttttttaataaaactaagcaaaaataaaacttatggtaattcttt

SEQ ID NO: 363285 - DNA, 424 bp, Homo Sapiens
  misc_feature (80)..(80): n is a, c, g, or t
  misc_feature (106)..(106): n is a, c, g, or t
atgttaagtagggggtgtccaaccctagacaaggctctccacactgaaaccaagaaaactgattttccctaatttaatanaaccagcagaggctatggtatatttncaaaaggcatacatttatcttttaaaactctgctccacaccacctggttataccaaggtattcttttgcaacagctttgtctttaaagagacaaagattaggctgtttcgtgaatctagttgctccgttttctgtctctatacaacttctcacacctcatggctgcttagaacaaataaactagcaaacaccttagctgccgcctgtttctaaggggttgaggtcgcctattagaatccagtgttggacagacaaggtaccgcggcctcttggtcaaacgcggcttctggaacgtgagcgcgccctcgtgtggatctc

SEQ ID NO: 363286 - DNA, 756 bp, Homo Sapiens
  misc_feature (58)..(58): n is a, c, g, or t
  misc_feature (72)..(72): n is a, c, g, or t
  misc_feature (122)..(122): n is a, c, g, or t
  misc_feature (134)..(134): n is a, c, g, or t
  misc_feature (147)..(147): n is a, c, g, or t
  misc_feature (214)..(214): n is a, c, g, or t
atcccaggctgtgcatcactgtcaaagctccaagctctcccgatggggatcatgtggnctgtgtcactgganttgctgtacggcccattgttgctgctgtagtgcctttgatcactgcaggnaaaaagcggatntcagccatcccanctatccctgatgaggctgacaaagttggggctgagaacacattcacctattcacttctcatgcaccncgaatgctctggaagagcctgatgaccagaaccacattaagtctccattgtcttgcattgggatttgagaagaaaatcagagagggaagatctggtatttcctggcctaaattccccttggggaggacagggagatgctgcagttccaaaagagaaggtttcttccagagtcatctacctgagtcccaaagctccctgtcctgaaagccacagacaatatggtcccaaatgaccgactgcaccttctgtgcctcagcccttcttgacatcaagaatcttccgttccacatccacacagccaatccaattaatcaaaccactgttattaacagataatagcaacatgggaaatgcttatgttacaggttacgtgagagcaatcatgtaaatctatatgatttcagaaatgttaaaatagactaacctctaccagcccattaaaagtgattgtttctgggtgataaaattattgatgatttttattttctttatttttctataaagatcatatattacttttataataaaacattataaaaccc

SEQ ID NO: 363287 - DNA, 403 bp, Homo Sapiens
aaaagagaagggactcttccccagagtccatcctaccctgagtccccaaagctcccctgtccctgaaagcccacagacaatatggtcccaaatgactgactgcaccttctgtgcctcagccgttcttgacatcaagaatcttctgttccacatccacacagccaatacaattagtcaaaccactgttattaacagatgtagcaacatgagaaacgcttatgttacaggttacatgagagcaatcatgtaagtctatatgacttcagaaatgttaaaatagactaacctctaacaacaaattaaaagtgattgtttcaaggtgatgcaattattgatgacctattttatttttctataatgatcatatattacctttgtaataaaacattataatcaaaaaaaa

SEQ ID NO: 363288 - DNA, 504 bp, Homo Sapiens
actggagtagtccaccctccctcaggctcttacaggaatatgttggaggctgtaggaaggtgggaaaccgagagggaaaggactgggccgctggagacttcactcattccctagcaagaaacaaaagcagtaaaaggtggcccgaggacaacctgaagctcactccttcagcacttttggctggaggtcacttgttggagccccactcagagctcagcacaccaccccaccagcagcctcctcctcccagctgaggctgcatttcatcccttcccccagcctgctttccctgagataggggagtgtttcccagggcccatgtgacttccactggcaagtgacgattaccaatggtttactagtcagtgaaactaccaaaggcttttgtgctgtagtaatccttttcctgtttaaaactctggggattttctaatgttgccaatagtttttcaagtcagcaattactgtgtggattatgtaatggctcggtattaaaaatagaaa

SEQ ID NO: 363289 - DNA, 676 bp, Homo Sapiens
  misc_feature (86)..(86): n is a, c, g, or t
  misc_feature (479)..(493): n is a, c, g, or t
aatgaggagcagtactgtgggattttgactctttcttctctgcaaagaagagatattatttattccttcttgggtttggctcctcntccagactcaaaggaagaagaaggagagacagccacagaagagacggaagaaatagccatggagggtgcggaaggggaagccgaggaggaggaagaaactgcagaaggagaagaagagcctggagaagacgaagattcctaggccttttcatgcttcatttcttccacttctccagaaaatggaagctatgaagcaacatttcaaatgtctctccacaaaccaaactcaacagaatactttggcttgaagccggcacacccagggttactgaggacttatgctgcctgacctggttagatgtacatggaggtatctcccgaatcatacaaaattaaatgtgaagaccgtttatgcataccttcatgtgcctgacagtcttggcttttgaagannnnnnnnnnnnnnngctctgcatagctagaccatcttattaataatactctgaaaaaaatgatttcaaggcatggaagttctctgtgatacaacaatagtatttcttcaaatgcgccttatgctacttatctcagaaacaggttttaaaatgaagtgctttccagagaaccatcatataaataaagattaatagaaa

SEQ ID NO: 363290 - DNA, 819 bp, Homo Sapiens; identical to SEQ ID NO: 98881

SEQ ID NO: 363291 - DNA, 938 bp, Homo Sapiens
aatataactataatgcttcactaataccttaaaaatgcctagtgaactaactcagtacattatataatggccaagtgaaagttttgtgttttcatgtcctgtttttctttgaaattatatagcccagaaattagctcattatctgaaaaacgtatgaagaactgatgaattgtataatacaggagtattgccattgaatgtactgtttgatttattcaagcaggtaatgaacaatgttgtcaaactctctaatgagacatcataattaggacataagctaaaaggggcattactccggcagtctttttttcttaatcctagtaccatacatattctttggcatgaaagaatgaaaagcattagtaaacaactgaagtcctaccatggctctgtagggtttttggaacaattcctggaattggaaagtgaaaatggatagcatgtgggggaaaccctcatctgagtagcaagattttagtaaagatgactaagccattaacagcatgcattcatatttaattttattgactcctgccatcagcttttgtagatcttttgggtggaaggttgtgatttttactgggaggacttgagtagaagtggatgattaaaattgaggagtatataattctttctgggactgcttaaatgttattgtttgaaaatgccttcactttccccctttggtcaaagagatgtgcttaaaattcttattccttcacaataaataattttgattttcttagacaggtttgtgtttaggtatgagtttctcttttacttcatcaagcaattctctctgtggtcaaaaaaactctgaaaaaagctttgagggaaatgaatataactcttaaattattatatgtgtgggtaaaaaaatagtttaactttaaaaataatttattagtcatcataaaaaaataaatgtctctgtctcc

SEQ ID NO: 363292 - DNA, 327 bp, Homo Sapiens
aattgtggtgctggtgactttcatgtgtcttgggaggttgaggtgttcaacatcgttaaggcactcccaaaacgcaaacctccttttttaaatgccaattgtacatctacattaattcatctatgcaaacttgtgttttcatggtttgttttttacactatatttctcattaggttctttaaacatcaggtttaatattgatattatgaataatttttaaaccaaagtattctataagtctgtgtgctttgttttcctggatggtttgaccaaggtaaacatcagtcttgtccttctctcttaataaagtcatccatttgttaagtc

SEQ ID NO: 363293 - DNA, 519 bp, Homo Sapiens
gacacagagaccccaaactgaaggagtctcccactgctaaaaatatacctgctctagaaagcaaagttcagttgaacagtacagaaacacagaccatgagttctgggtttgaaaccctggggagcttgttcttcaccagcaacgaaactcagacagcaatggatgactttcttctggctgatctggcctggaacacgatggagtctcagttcagctctgtagaaacccagacttctgcggaaccacacacagtctccaacttctaaaactaacggtggagtccatgtgtgaaatggcatctaccatttcctctggattaaaactacggactggggacaacagtattaattcgattgaatgtggctgatgatgcagttgcttagcttctttgtgtttctttgccttttgtacttgtaaacagaaatttgcgtataaatgtgagtgtattataaagtttgagatgttgatctaaattgtttttgtgttgcctacatttgccttttcacaggggtaccgagc

SEQ ID NO: 363294 - DNA, 295 bp, Homo Sapiens
tctaactgaagaactaagttgattttttatttgccataaaccaagcaaaagtaaatgcaataatttcgagatttatggtaaacaaatttgaggtatggataaatctttcacatattttttattgctctttagtaaagaaaggcacaagaaagaaaatatccagctctcttgtgttatctcagtgtggcgactgcagaaaattgacaatgcctgaccgtgtaaatgtatggcttactgtcaaagcatcattcttggctgcatgttgaaaatgtgattaaagttaatagaggagatg

SEQ ID NO: 363295 - DNA, 620 bp, Homo Sapiens
  misc_feature (20)..(20): n is a, c, g, or t
  misc_feature (23)..(23): n is a, c, g, or t
tgcaattagtgtttgaaaanaancttaatagctggctgtaaatactgcttggttttttactgggtacattttatcatttattagcgctgaagagccaacatatttgtagatttttaatatctcatgattctgcctccaaggatgtttaaaatctagttgggaaaacaaacttcatcaagagtaaatgcagtggcatgctaagtacccaaataggagtgtatgcagaggatgaaagattaagattatgctctggcatctaacatatgattctgtagtatgaatgtaatcagtgtatgttagtacaaatgtctatccacaggctaaccccactctatgaatcaatagaagaagctatgaccttttgctgaaatatcagttactgaacaggcaggccactttgcctctaaattacctctgataattctagagattttaccatatttctaaactttgtttataactctgagaagatcatatttatgtaaagtatatgtatttgagtgcagaatttaaataaggctctacctcaaagacctttgcacagtttattggtgtcatattatacaatatttcaattgtgaattcacatagaaaacattaaattataatgtttgactatt

SEQ ID NO: 363296 - DNA, 573 bp, Homo Sapiens
ggagctgcgtcaggagttttgcttcaagatgtcagaaagtcaagttcagctaagagacacccaggtccccagcttgccctgagcagcccttcagggcttctggttccttctgccgcccttcctgagaccttagaaaccagaagagccatacagtcagtggaaggcgggggggccctggcctctgcaccgggatcccagtgggaaccttcatgccttatttatttctaatgggtaaaggggttttcttaccaagcatccctgacctcctggagacaccacctgctttccgggcggcactgtgatgggagctggtggcgactgagtccttctgtacgtgcaactgggaaacttttgtcctttgaggctaggcagctccctgccctccgtgtgtgtctgttatctgggggagaggagtgtggaagggttgggggaagagctccagcctgtctgctccccagctctgtagtggcagaccagcgtcacctttgaagtatacgtgagagaaatatatttacaaatgctttattctcttctttaataaaaaatgcaccagtattctaaaagcaaaaaaaa

SEQ ID NO: 363297 - DNA, 474 bp, Homo Sapiens
tgcgttgctcaaatcactagcacagaggttccttaatttggggccttagaaaccattgtgggccttggggtccatgaaccccatgaaattatttgtagacttgtatgtacatttttctggggagaaggttcaagagattccataagattgtccaaactccctgaaggttccagaaccctctgccagggaagggggaagaaaacccctccccattaggaagcatgcttttgccagttaaatggcgatggtggaggtgatagggacttcaagagtaaaatgcaccttgtattgcataagaagcatacacaaatcaataaatcaagggagattataccagtaggactgaatcagggccttcaaagctggactgagttggtcctgttctggcacatatggtccactggagacaatgtatgattgagtttttctttggtctaaaaattatattaaacatttattttgaaataaaaaaaa

SEQ ID NO: 363298 - DNA, 482 bp, Homo Sapiens
agccagtgacttcttaatatatatcctaaagcgcaagaggcactggatatttgtggagtcttgataaccaccagggaggggcccaaggtaggagagaacaattgttctgagagacaagtaaccataaacaacgcgctgacacaacgaccttgctccacaggtagcccaaatggcacaacctcgatcagcatgtagccccctccagaagaccttataaaacttccctccagcccctgcctctttgcagacagccccttctctgtagtgctacatattgcacccttgcaatgaattttcatactttctctaataaatgtgcctttatttttctccccctacaactgtcttggtaaattcctttaccaccggcaacaccagccccagccagtcacacttgtaagagtactcagcagtgagcaacacttatttttcacagagctataggtgagaagacagacagaaacccatatgtaagtataact

SEQ ID NO: 363299 - DNA, 538 bp, Homo Sapiens
aattatgctttcattacctggttggttaaatctagacttaagaggctctgctcctcagaagttggcttctgaaaaatgctgagcgagaacaagaatcagaagaagaaatgtgactttgatgagcttccagtttttctagataaaccttttcttttttacattgttctaggttttgtttctcgatcttttgtttggagaacagctggctaaggatgactctaagtgtactgtttgcatttccaatttggttaaagtatttgaatttaaatattttctttttagctttgaaaatattttgggtgatactttcattttgcacatcatgcacatcatggtattcaggggctagagtgatttttttccagattatctaaagttggatgcccacactatgaaagaaatatttgttttatttgccttatagatatgctcaaggttactgggcttgctactatttgtaactccttgaccatggaattatacttgtttatcttgttgctgcaatgaaaaataaatgaatgtatgtcttttggtgcag

SEQ ID NO: 363300 - DNA, 681 bp, Homo Sapiens
gcttttctggcccatgagactacttgggctatgtaattcatcagtcccacgggtggcctcactgagaccagggcaggagttatgcacagcatagacagacatgctgggatgttcaatgagaaggttttccataggacttgtttccaccttgatagtggttaatccacctgcagtaaaacatgggggtggggtgataaaccagctctcctccattggacatgactcaaactggagaaagcaggaatcacttgtatcagccaagcactcaagagatgccggtaaacaggaaaagactgaagggtgctcagtaggtgactcttcactgatgtcctcctcttcttcttcttcttctgctgagaaaccagtgcaagtatctatgaagtcaacaagaatccattcatcatcttctttctcattgaattctggttcttggttggaggaagaactgacttcacccacaaacattttattcagcctctggaacattgttaaggcaagactgagagtttggctggatgtcttttatagctgagatttcaaaaccttgtctttagttggcccaatggtaccgacaggagattaaagtgcacagggtgcttattcaacttaggtgaaaagcaagaagagtcattgtacgtgggcccgggccgtgcggggctgcgcggggaagggagcggccgc

SEQ ID NO: 363301 - DNA, 182 bp, Homo Sapiens
acaaagttagtttgtgatcaacgattcactacgaattgaagtgttactttgtcagaatatttattcctttgtgtgacatgctagattccctggatgtagctgatcatttttattttgtaaatattacctaactttacataaactatatcataataaactatttttgcatcacccttaaaaaa

SEQ ID NO: 363302 - DNA, 188 bp, Homo Sapiens
ggcttaaaaatccaaggcctttaatttagtttttggtaatgaccataaatgccttcacaaaacctctttttcactgtaaatagaaggcactaggcattacataatacccttaaagcagtgattcctcctgatgctggtagagataaaacatttaatgtcagggtttacatagtaacaaattcttcttt

SEQ ID NO: 363303 - DNA, 1068 bp, Homo Sapiens
agcggatgtgcacacacatacactcacacgtgtgtgcaggtgcacacctcccccagaggctgcagccaagacgggcatcccacatcagagggatgaatggcaggtctgtcccgccagctgtgtgctctctcccacccgaagaaagcagcagagactcagacggcggagcctggaggagcccacgcagtctgttcccggcacccggtgcgtgtgaagggacttgagggcagcgagatggaatcagcaagagaaaacatcgaccttcaacctggaagctccgaccccaggagccagcccatcaacctgaaccattacgccaccaagaagagcgtggcggagagcatgctggacgtggccctgttcatgtccaacgccatgcggctgaaggcggtgctggagcagggaccatcctctcactactacaccaccctggtcaccctcatcagcctctctctgctcctgcaggtggtcatcggtgtcctgctcgtggtcattgcacggctgaacctgaatgaggtagaaaagcagtggcgactcaaccagctcaacaacgcagccaccatcttggtcttcttcactgtggtcatcaatgttttcattacagccttcggggcacataaaacagggttcctggctgccagggcctcaaggaatcctctctgaatgcagcctgggacccaggttctgggcctggaacttctgcctccttcctccgtgatctgccaggctcgtgggcactttccacagcccaggagagcttctgaaaggacagtatagctgcccttgctccctacccacagcacctgagttaaaaagtgatttttatgttattggtctaagggacttccatcttggtctgaagtcctgagctcagacgcaggtactgccagccataccttcctggtagcatctgctggacctaagtaaggcatgtctgtctaaggccaagtctgcccggcttaaggatgctggttctgactctaccccactgcttccttctgctccaggcctcaattttcccttcttgtaaaatggaatctatatctataaacggtgtcttccaattcc

SEQ ID NO: 363304 - DNA, 364 bp, Homo Sapiens
gagaggtgaaaaaaagagaaaacaagttagactccaaaggtgaattcctggtcttggcagatggctctgggaacaacgagggagcacaaaagtcgtggcctgaggctgttctatgggcacttggggctaaatcgcctcctgagggtgactgttgcttattctgctggacaggtttttacataaagcaaagggcatgtgaggggtgggattccttgttactcttactgcaataaaaatcaattgtttgatatcctgtccccattctgttgctgccctgtcccctacaaaaaagggaatttgctgacaaactttttgtaaaaagccccatctctggacttacttgcattaaatattttcaggggaa

SEQ ID NO: 363305 - DNA, 576 bp, Homo Sapiens
gccacaacacctaggcagaacatggaggttccacagctgcctggtggacagcagccagcagcctggcagcgtggggctggtgagctgctgctgctatctacccaggcaactccattttgctgaggtggtcctaagtagctgcatgtaatctctcctaagaagctcaatgttcttaacaatttggttttaacagttgatggaacagaaagatacgttagaaaaaaacaaggactttcttttcaatacaggaattctcatgcctgtaaacacatgcctgtatgaataaaatccagacacaaaaccatactgctgcaacagcatgattatttcctgatctccaaagcactgagaagtccaacatggaatcctggaaaatgcacgattattttgatcctggtttgttggtgctgttgttttagttgtaagagctttcgtgagacgaacgcatgtactgctctgaaataaggaaatcggggcatctcctcacctcttcttgaggcttctatgtggagagaagaattggacagtgtttattcatctttctctgctgaacatgcatgtcattgaaaacaccag

SEQ ID NO: 363306 - DNA, 721 bp, Homo Sapiens
gcaggcctaacttgggtggagagcccagcctgagcaccagaattagttgcttccacttgtgcagcctgctgaagagccggactcaggttgaagcagctttcctcccagtcttcactgatctccacagggagaaaacagaagtccccacaagtaccaagctcttcctgagactgcagccaccacacctcggggaaggggaggctggcaggagaggagtacactgtcccggtgacccacaccaaggtggctccaagtgtaaacaaagcctggtgccagggacagaagaggatgcagcctgatgtgaggttttcagaaaagtgaaatgacctagcaccaggttgggattgcttgggtctgcacagcagtccctcacactgcccttacagagaggaacaggttatttgatgacttgggcccatgagatgttctccaagccattgacagctgagagaattcaggtgatccacctgaatatcagaagtttcagccctcttagagttcgtaacagaaacccagagatttactgtcagctagaacaaagatgtaaggtctcaagtaaaataaaggattgtccttcaaaacagcaatattaacagacttctgactcaggaatttgttcatctgtccttgctggacctgagccaagtgcttgtaacgtgatctatgatctatctgtatgctaaagtgtaacaggtacgtgagtaaaaaaatctttaaggtt

SEQ ID NO: 363307 - DNA, 715 bp, Homo Sapiens
  misc_feature (94)..(94): n is a, c, g, or t
  misc_feature (104)..(104): n is a, c, g, or t
  misc_feature (118)..(119): n is a, c, g, or t
ttgatcgacaagtcccacaagtattcaaatatctcctcggatgtcactgtgattgagggcagcaacgtgattctggtctgcatggcaaatggcngtcctgaacntgttatcactgagnnacacctacacccagctggaagggaaatttgaaggagaagaagaatatctggagatccttggcatcaccagggagcagtcaggcaaatatgagtgcaaagctgccaacgaggtctcctcggcggatgtcaaacaagtcaaggtcactgtgaactatcctcccactatcacagaatccaagagcaatgaagccaccacaggacgacaagcttcactcaaatgtgaggcctcggcagtgccggcacctgactttgagtggtaccgggatgacactaggataaatagtgccaatggccttgagattaagagcacggagggccagtcttccctgacggtgaccaacgtcactgaggagcactacggcaactacacctgtgtggctgccaacaagctgggggtcaccaatgccagcctagtccttttcaaacgtgttttacccacaatcccccaccccattcaagaaattggtaccaccgtgcacttcaagcaaaaaggacctgggtcggtgagaggaataaatggatccatcagtctggccgtaccactgtggctgctggcagcatctctgctctgccttctcagcaaatgttaatagaat

SEQ ID NO: 363308 - DNA, 662 bp, Homo Sapiens
caagtcccactccagatctccaatatctcctcgcatgtcactgtgaagagctcacgcaacgtactctggttctgcatggccaatggccgtcctgaacctgtatccatctggagacacctcacaccaactggaagggaatctgaagcagaagaagaatatctgtagatccttggcatcaccagggagcagtcaggcaaatatgagtgcaaagctgccaacgaggtctcctcggcggatgtcaaacaagtcaaggtcactgtgaactatcctcccactatcacagaatccaagagcaatgaagccaccacaggacgacaagcttcactcaaatgtgaggcctcggcagtgcctgcacctgaactttgagtggtaccggggatgacactagggataaatagtgccaatggccttgagattaagagcacggagggccagtcttccctgacggtgaccaacgtcactgaggagcactacggcaactacacctgtgtggctgccaacaagctgggggtcaccaatgccagcctagtccttttcagacctgggtcggtgagaggaataaatggatccatcagtctggccgtaccactgtggctgctggcagcatctctgctctgccttctcagcaaatgttaatagaataaaaatttaaaaataattta

SEQ ID NO: 363309 - DNA, 467 bp, Homo Sapiens
tgcctgcacctgactttgagtggtaccgggatgacactaggataaatagtgccaatggccttgagattaagagcacggagggccagtcttccctgacggtgacccaacgtcactgaggaagcactacggcaacctacacctgtgtggctgcccaacaagctgggggtcacccaatgcccagcctagtccttttcaaacgtgttttaccccacaatcccccaccccattcaagaaattggtaccaccgtgcacttcaagcaaaaagtcctgctgcagctgaattttgctccttgagtcaacattaaaagccttgacccatttcacaaatcaatgcctttgattcaggacctgggtcggtgagaggaataaatggatccatcagtctggccgtaccactgtggctgctggcagcatctctgctctgccttctcagcaaatgttaatagaataaaatttaaaaatattta

SEQ ID NO: 363310 - DNA, 924 bp, Homo Sapiens
tggcttgcccttctcccagcccaaggtcacggagctgtgcctgctggctgtccacagatgtgccctggagagcccccccacctctcaggggccacctcccacagttcctccaccaccgcgtgtggtagacaagctctccctgtgtgtggctccggggaaggcctgcagccctgcagccagcgagatcacaggtctgagcacagctgtgctggcagcgcatgggcgtcaatgttttgatgacaacctggccaacctgctcctagccttcctgcggcgccagccacagccctggtgcctggtggcacacaatggtgaccgctacgacttccccctgctccaagcagagctggctatgctgggcctcaccagtgctctggatggtgccttctgtgtggatagcatcactgcgctgaaggccctggagcgagcaagcagcccctcagaacacggcccaaggaagagctacagcctaggcagcatctacactcgcctgtatgggcagtcccctccagactcgcacacggctgagggtgatgtcctggccctgctcagcatctgtcagtggagaccacaggccctgctgcggtgggtggatgctcacgccaggcctttcggcaccatcaggcccatgtatggggtcacagcctctgctaggaccaagccaagaccatctgctgtcacaaccactgcacacctggccacaaccaggaacactagtcccagccttggagagagcaggggtaccaaggatcttcctccagtgaaggaccctggagccctatccagggaggggctgctggccccactgggtctgctggccatcctgaccttggcagtagccacactgtatggactatccctggccacacctggggagtaggccaagaaggaaaatctgacgaataaagacccccgctgccccat

SEQ ID NO: 363311 - DNA, 575 bp, Homo Sapiens
atggcacagggtaggtgttcagtaaatgactccctttcccactactgaggctagagggacctggcaatcactacaggagggtgagaaagctagtagggaatttaagaaaatagaacattccctaactattgtttgattcccctcagattccattgttttctttcctccaatttagccacgattggacattgacttctatttccttcatactcacagctaactctgtcataacctagagcctctacagaggaagccagaagagactgaaagtgaatattatttactggtccattaggaccagctagtttgagataaggaacattttatttaaaaggtttgaattagcataggctgtaatctatgtctcacagctacaaagactagacaggccaggaaacaacccacattctaggcccagctcttccatgaacttgcagatgacctacaaaaatcattttatatgtgcttgccgttctctgtgttaatcagattatgcttactgaacgagcgaggttttcctccaataaaaatgcaacgtgaaggcacttttcaaaaataaaagaatgagggaagaa

SEQ ID NO: 363312 - DNA, 678 bp, Homo Sapiens
  misc_feature (35)..(35): n is a, c, g, or t
  misc_feature (56)..(56): n is a, c, g, or t
  misc_feature (61)..(61): n is a, c, g, or t
  misc_feature (116)..(116): n is a, c, g, or t
ccagggatgagcttgcctcacatccctgggctctngcaatagtagaggggcccctngcatntagcccccatcccttgtccacctggttgtgaagccaatgaacactttggtccgcntcattttaaaccaaaaaactgtcctttcacctcaccctgaaggccccagggaagaggacccgtgggatggtgcccaggggttgccttgggacctcggatctcctctggggggcttggctgctgctgttgctgctctgtatttgcctctcgtgattctgtttgttacccatgttcacttcccccaggagaggccttggtaccccctctcccctggggcatccctttgccttggcatccctgtagcccagcaaccctgcccctccccagcatcccagctgggccagagagagccgagtgtgccaacaaggactggggcctgcccggctgcccgcctcagggatgggcacctcatgcctgtctcgccacctcctgtgccaatgtcccaccctccacctgggggtggggtgcagcttccacttactgattagaagacaccactgccctcccttcccccctccctgtctggtgtcctgtgcccccatctgtctgtctatatttgtctgtactcccctaggagaagtattttgccatatataaaaccactgtcctgtcctttgaaaaa

SEQ ID NO: 363313 - DNA, 2095 bp, Homo Sapiens
  misc_feature (16)..(16): n is a, c, g, or t
  misc_feature (1617)..(1666): n is a, c, g, or t
ggctaggtacgaggcntgggtggtgaatcggcacgaggcttccagtttggctgggcctccacacagatctcccacctcagcctcatcccggagctcgtcaccaacgaccatgagaaggtggagctcacggcactcaggtatgcgttcaccgtggtggccaacatcaccgtctacggcgccgcctggctcctgctgcacctgcagggctcgtcgcgggtggagcccacccaagacatcagcatcagcgaccagctggggggccaggacgtgcccgtgttccggaacctgtccctgctggtggtgggtgtcggcgccgtgttctcactgctattccacctgggcacccgggagaggcgccggccgcatgcggaggagccaggcgagcacacccccctgttggcccctgccacggcccagcccctgctgctctggaagcactggctccgggagccggctttctaccaggtgggcatactgtacatgaccaccaggctcatcgtgaacctgtcccagacctacatggccatgtacctcacctactcgctccacctgcccaagaagttcatcgcgaccattcccctggtgatgtacctcagcggcttcttgtcctccttcctcatgaagcccatcaacaagtgcattgggaggaacatgacctacttctcaggcctcctggtgatcctggcctttgccgcctgggtggcgctggcggagggactgggtgtggccgtgtacgcagcggctgtgctgctgggtgctggctgtgccaccatcctcgtcacctcgctggccatgacggccgacctcatcggtccccacacgaaacagcggagcgttcgtgtacggctccatgagcttcttggataaggtggccaatgggctggcagtcatggccatccagagcctgcacccttgcccctcagagctctgctgcagggcctgcgtgagcttttaccactgggcgatggtggctgtgacgggcggcgtgggcgtggccgctgccctgtgtctctgtagcctcctgctgtggccgacccgcctgcgacgctgggaccgtgatgcccggccctgactcctgacagcctcctgcacctgtgcaagggaactgtggggacgcacgaggatgccccccagggccttggggaaaagcccccactgcccctcactcttctctggacccccaccctccatcctcacccagctcccgggggtggggtcgggtgagggcagcagggatgcccgccagggacttgcaaggaccccctgggttttgagggtgtcccatttctcaactctaatccatcccagccctctggaggattcggggtgcccctctcggcagggaacaggaagtaggaatcccagaacggtctgggggaaccctaaccctgagctcagtccagttcacccctcacctccagcctgggggtctccagacactgccagggccccctcaggacggctggagcctggaggagacagccacggggtggtgggctgggcctggaccccaccgtggtgggcagcagggctgcccggcaggcttggtggactctgctggcagcaaataaagagatgacgggcccctctgtctaccctctactccgtcatttcctnnnnnnnnnnnnnnnnnnnnnnnnnnnnnnnnnnnnnnnnnnnnnnnnnntttgctcttttcgcctctcttcttccccacacctccccgcgggggcgcgcctctttagaacctcccccttcgggcgttctcccctttctgcctcctccccccccttcttcttcactctaataggctgtcttcctcttgccgcgatcttttttcaacccccgtctcccccctgtctacttgcccactcctcatcactaccttgattaaacaaaacccatatcttctggttcccacccgtctgaccaagcccccctctctccctctgcggatgtgtttttctttgcgctgtacttccctactccctgttatcctcccgccgtccccctataccgtacgcactcttccctccgcgcgctcatgtgcgtcctcccagtctctcttttctcctcgctcgtctgttcctccttcgtccctccccttctttctctt

SEQ ID NO: 363314 - DNA, 1211 bp, Homo Sapiens
  misc_feature (1163)..(1163): n is a, c, g, or t
ctgtcccagacctacatggccatgtaggtctgggacaggttcacgatgagcctggtggtcatgtacagtatgcccacctggtagaaagccggctcccggagccagtgcttccagagcagcaggggctgggccgtggcaggggccaacaggggggtgtgctcgcctggctcctccgcatgcggccggcgcctctcccgggtgcccaggtggaatagcagtgagaacacggcgccgacacccaccaccagcagggacaggttccggaacacgggcacgtcctggccccccagctggtcgctgatgctgatgtcttgggtgggctccacccgcgacgagccctgcaggtgcagcaggagccaggcggcgccgtagacggtgatgttggccaccacggtgaacgcatacctgagtgccgtgagctccaccttctcatggtcgttggtgacgagctccgggatgaggctgaggtgggagatctgtgtggaggcccagccaaactggaagatcacgatgaacgggccgtagtagaggagggcagcccactcgggcgtggccgccccacagcccaggcaggggctgaagatgaaggggaaggacagcaggacgcagacggtgccgaccaggtgccaggccttgcgcgggccgtagcgggcgcagcagctggcggcgcggtcggcctcgtagcccacgagcggtgtgcacagcccgtcggccacctggcccagcagcagcagcagccccgcgccgcgggagctgtaggcgcgcaccgagtgcaggtagagcagcaggtaggtgaaccacatgacgcgcacaggtcgttgaggaagtggcccacggcgtagctcagccgcgccaccagtgacacgcacgcgggacggcgccgctccggccgctggggtcccgggcccatcggcccggcccgcgccccccacccccgggtccgcggaggtaccctggccaggccttcttggtgccgtggggcggcgccgggacccccacacgcgccgggcaccccgcgtcccgtcttttacgccgcgccctcacccacgtccgccgcgtccgccccacgtcgactctgccgtctcgacgattcgagctcgccgatgtgcctgatcatacttcgtatatgtatgtatacgagtatcgccagccaaccagccagntaaggctggcaagttcgccctttactagttcaatacatacatctagtg

SEQ ID NO: 363315 - DNA, 487 bp, Homo Sapiens
cccaaatcctgctcccctgcctgaaaacccaccctctgatcccatgaatccccttcattgccccccaaatcaggggtaacatggaggggccgccctgggagcccaggcagacctcagacccctggaagcccccaggcccaatttcccagccgcttgcccctcagatcggatgcttggcccccagatttgggggaggcaccccaacatatatcttcctgatcttgtttctaagccagtctgtgacctcaatattgttagtgtcagtgcaggctgaagtggtgggggaggatgggggccaaagacccagccttgtcatcgggggagggggcacgagatctgctccaagaaatgtctgtgacaaagtctcagcctgtgttatttatttgcctctgtgcaccccacccactcaccttcctgaactgctaaaccagtctcctacttaaattctcccttctcccatcagaccctcaagctgagttttataaga

SEQ ID NO: 363316 - DNA, 847 bp, Homo Sapiens
ctggtgcacaggaaggatgaggaagaccaggctctgggggctgctgtggatgctctttgtctcagaactccgagctgcaactaaattaactgaggaaaagtatgaactgaaagaggggcagaccctggatgtgaaatgtgactacacgctagagaagtttgccagcagccagaaagcttggcagataataagggacggagagatgcccaagaccctggcatgcacagagaggccttcaaagaattcccatccagtccaagtggggaggatcatactagaagactaccatgatcatggtttactgcgcgtccgaatggtcaaccttcaagtggaagattctggactgtatcagtgtgtgatctaccagcctcccaaggagcctcacatgctgttcgatcgcatccgcttggtggtgaccaagggtttttcagggacccctggctcctgtgagaattctacccagaatgtgtataagattcctcctaccaccactaaggccttgtgcccactctataccagccccagaacttgacccaagctccacccaagtcaactgccgatgtctccactcctgactctgaaatcaaccttacaaatgtgacagatatcatcagggttccggtgttcaacattgtcattctcctggctggtggattcctgagttaagagcctggtcttctctgtcctgtttgctgtcacgctgaggtcatttgtaacctaggcccacgaacccacgagaatgtcctctgacttccagccacatccatctggcagttgtgccaagggaggagggaggaggtaaaaggcagggagttaataacatgaattaaatctgtaatcccccgct

SEQ ID NO: 363317 - DNA, 479 bp, Homo Sapiens
agtctactggcaaaacggactctctcctggagtccagagcaccttggaaccaagtacagcgaagcccactgagttcagttggccggggacacagaagcagcaagaggcacccgtagaagaggtggggcaggcagaggaacccgacagactcaggctccggcagcttccctggagcagtcctctccatccctgggacagacagcaggacaccgaggtctgtgacagcgggtgccttttggaacgccgccatcctcctgccctccagccgtggcgccacctcccgggtttctcagactgcctggagtggattcttcgcgttggttttgccgcgttctctgtactctgggcgtgctgttcacggatctgtggagctaagcagccttagatagcagcagaaggctttttggattctcctccttgaaaagattctcagttaccaaacgtctccacctagaaaataaaaatacattaagatgtgc

SEQ ID NO: 363318 - DNA, 857 bp, Homo Sapiens
  misc_feature (637)..(672): n is a, c, g, or t
aggcaagggaagaggccatgaccgacctgcctgcaggtgacagattgactgggatcccctcgcacatcctcaacagctccccatcagaccggcagattaaccagctggcccagaggctgggccctgagtgggagcccatggtgctgtctctgggactgtcccagacggatatctaccgctgtaaggccaaccacccccacaacgtgcagtcgcaggtggtggaggccttcatccgttggcggcagcgcttcgggaagcaggccaccttccagagcctgcacaacgggctgcgggctgtggaggtggacccctcgctgctcctgcacatgttggagtgatggtgcctccagcaaccgctggggagtgtgtccctgagtcatgtgggctgaatcctgactttcactcagagcaggtggttttcgtgtaggttcgttttatttttgatgatcttcagatggaaggagaaaacagggtttccactagacattacttgaaaggccagattactcagcagatctcccatgttggctcaacaattctttgtttttaattgcttgaagattgcattgttgtaattgttcagtttttaaatgtgtaatggcattttaatagactagtaaatcacagtggttcaaannnnnnnnnnnnnnnnnnnnnnnnnnnnnnnnnnnnctcatgtcatcacattacaggcaggtgtctcatattgtaccacatttacctgaatgttgtctgaggactgaactgtggactttactattcatacgtgataaaatcatcaaatgcgaattactataaccaaacacccaacacggaaaacacacaaacaaaaaagcggcacaccataaaagaccccc

SEQ ID NO: 363319 - DNA, 810 bp, Homo Sapiens
aggaagagccagagtttagaccagcagtagggcaccccatgatccaaaaccatggacaaaagtccctgtttagtaactgccaggacatgatcctgctcaggttttgaaatctctctgcccataaaagatggagagcaggagtgccatccccatcaacacgtgtccaagaaagagtctcaggagacaaagggtatcaaaaaacaagattcttaatgggaaggaaatcaaaccaaaaaattagatttttctctacatatatataatatacagatatttaacacattattccagaggtggctccagtccttggggcttgagagatggtgaaaacttttgttccacattaacttctgctctcaaattctgaagtatatcagaatgggacaggcaatgttttgctccacactggggcacagacccaaaatggtactgtgccagaagaagagaagccagaaagacaatgaaggatggcattaaggggggttgggaaagcaaaagtggctagtagtctttttccatcctgcctgtgttctcagaagctctccgcctgaggaagtccataaaacccctttgtgaggagaatgcacccccttaccaatgaccaaagtggtctccagttgctattaaagatgatggagaacaacagaggggtgtttgatgcaagtaaaaacagaaacttccaagaatgtaactctgaatattccagccctatagaacaatctctctcacaggtgttccaatatcgcagttatctccgcgtggacactccattaaaccgaccccgcgtgtgaacacacttgatgatgttcc

SEQ ID NO: 363320 - DNA, 728 bp, Homo Sapiens
aagcaggcgtacggtcggaatctcgggatatcgtcgaccacgcgtcgctttagcctggcgacttctccctataaaagtaaagcctttttctgccccagctctgagacacttgcagatcttaaggtctgagactggctgattttctggttggagtgtttttttgtattgccatagtcccttccccctgaagcaatagcccctccccacctcctgcaatacgcctttccaatctttattggaagtctctccctgcctacttcctaatttattcttatttgacagagggtatggaagacttgcaatttgaaaactggggaccagttccaaagtcagtaattgtgttaaccacgtgtataacagctctgctggacacccaagaaagccatgggaacgccaactggaaaggtccccttccccaggggagcctgcgaaggagaggttctgtagaatccaagcccacatttccaaagtcacccccaacgcgtcctctcacaccgtccactgtgcgtttgtatgtgtctgggatccagggcaatgtgaattttctttttatttgggagattgttcacggaaaacagatcttcttctctcttgtccacctattaattgtttacaatatttgtacatctatgcaaaatacttgaatgggccatggtgccttttttccttgtcagtatttacattaaaaatgaattgtttgtcatttgcactgttacaaaaaaccacac

SEQ ID NO: 363321 - DNA, 1071 bp, Homo Sapiens
  misc_feature (245)..(288): n is a, c, g, or t
gagcagagacttaggggagtgcactgctgtctagataacattctcataggcaaatagccttggtgtgtctggcatcgtgagcagtgagtggggattttccatctttttcggtatttccacagtggagtaaaccgtatttgctggatcttcctttaggattgttctattagtgtgagggattgtgtcgtactctgtgttctctccagaatgggggcatatgttaggagtttcccgacaaatgtccnnnnnnnnnnnnnnnnnnnnnnnnnnnnnnnnnnnnnnnnnnnncagagaccaaagaaatagccccagtacaaagagactgagcaggaggggcaccaacaggagacacaggaggaccatggaggaatctgggtcatcagcagcaccttcacagagcttcctggcaaggatggggcttgagaagtttctgctgacagggttcctggcaacgcagatgaaggtcatatcactttctccccatctccaggagatggggaggatggacccattatgggactcattggctgcttgccccagggccttccaggtataaatcacatcctcttccccatgttccatgcagcatgtcagattggtcacacaggtgccattcttattgctctgcaaacccatggtgactttaggctttgacaggtgctcgtagacatgcagcacgtactcctgggtggagggctgctggagtgatgagctgtatatccccacatagtagatccctgagtcattcttcttcagtttgctgagcttcagggagtagcctccatctgggaagtctactctctccctattacgattttgggtcactatgatagtgcccccttctggctgtatggtgacaagaggggttgtgttgaaggtccagacaatagagtcaacttgctttactttggacttcagggggaaagtcacggccccaccaacggaaccgaccagctctttcacgggtccagaggctgctgaccctgtgagctgccaaaggatatagatgagggtgaggcatgttggggaaccagccatattgctctctggaagtcagccactgaaaatccc

SEQ ID NO: 363322 - DNA, 603 bp, Homo Sapiens
ttcggcacgaggccggaactagtaggctgcgccgcgcgcgccgcgccggggcaggagctgggtctgggcggcgggcaggagctggcgggggcgcacgggcagcgctgcggacagcccgggagccgcggcgatggcggtgcaggcggcgctcctcagcacgcaccctttcgtgcccttcggcttcgggggctccccggacgggctagggggcgccttcggagccctggacaagggctgctgtttcgaggacgatgagaccggggctccggcgggtgcgctgctgtcgggagccgaaggaggggacgtgcgcgaggccacccgcgatctactcagcttcattgactcggcgtccagcaacatcaagctggcgctggacaagccgggcaagtcgaagcggaaggtgaaccaccgcaagtacctgcagaagcagatcaagcgctgcagcggcctcatgggcgccgcgccccccggcccgccctccccgagcgccgccgacacgccagccaaacggccgctggccgcccctagcgccccgacagtcgcggccccggcccacggcaaggctgccccccggcgggaggcgtcgcaggccgccgcggccgc

SEQ ID NO: 363323 - DNA, 485 bp, Homo Sapiens
agaattcatctggttatcacctggtcctctgaagttaactgatggggctaaccgatttgtgcacacacttaggatggatttatgttaagggaattacttactgactgttcaatggaaggaagtattaataatagggaataagtttgcaactaatctcatgctgcaaacttgtgttaattctgtttaatatacaaatttggatagcttaattataaacatatttttatatcaaatatacagttctaatataaaagttataaataattatttttgttaacaaagacactaaaacagtatgttctggttttggccctcttgcagaaagaagcattagaaaaattactttaaaagtagctatatgttactgtattgcaaaatctgttaagagcaggaccacatcgatagtatttaataatttgttttacctcccaaaacacagttcttctttcagcttgtcttaagaatggttgccaaaaacaacagcc

SEQ ID NO: 363324 - DNA, 1080 bp, Homo Sapiens
  misc_feature (621)..(621): n is a, c, g, or t
  misc_feature (832)..(853): n is a, c, g, or t
  misc_feature (897)..(906): n is a, c, g, or t
agaactaatactttcagggttctgacaaccacattctagcttaggggtagggcccacacctgcccccactgaggactgctccttggaccactgtggaggaagcctgggctgtctgaattgtgaattatgactgccagcccaccagagataacagatcccagcaggcagagccagaacccagttttgggtctgcatgccaggaaatgtgaacttcctccaaatgtggccactgtgcctcccaatccaggcctcagcaaggtcattcttgggctttccccacacgagtccttccagtagtccacacataatgctctacatattaaaaacaaaccatttttgtactgtggataagaacagttgtaacaaagtcatagctacatatttttctctacattttgtttattgagacaaactaattaaaaggcacaaacatagggcatgtttacatggacattataacaaacatatacattaaaagtgtaggaatgtgttgccttcctgctaaacagaaagttcctaagcttttatatatacaaaagttgtacaatttaatgtcctaaagtacaaaagatcatttataaaattattttacactaagtactatgtattttatttttttanctatgtagttcaaccccctagaactgttttgtataatgacacacagatacctgtccctgatgtaggaagtctgtctcagatgcaaggtattttgatgcttgaactgacacagtagggtataaatggaaatcatccagtttgatagtcagtcctgcaaacattctgcaagattaacacaactaatttccatttctcttaactgcaatgattnnnnnnnnnnnnnnnnnnnnnncatattggcaccttaaaaaatcacagcatcttggtttagttaannnnnnnnnnaacgcaatgctttaaaaacaatgcgtggcatgatggtgtaaagagtatctgtttccctagcttttggtttctactttatgtacagagataaaatatcttgctaagaaataaaaagcacatgtctcaacgtgcataatcattgctgggtttctacagggaatgcagacagctgtc

SEQ ID NO: 363325 - DNA, 431 bp, Homo Sapiens
  misc_feature (32)..(32): n is a, c, g, or t
  misc_feature (53)..(53): n is a, c, g, or t
  misc_feature (96)..(96): n is a, c, g, or t
  misc_feature (152)..(212): n is a, c, g, or t
  misc_feature (237)..(237): n is a, c, g, or t
ctccagggaacccaagggtgtgaaagttaaantgtgggggcagagctttaacncccaggacaccaatccaaatcaacccatcctcactttccaaanggttaaacaccacaggaaggcgaactctttcctggtttttgtttaaaaacattttnnnnnnnnnnnnnnnnnnnnnnnnnnnnnnnnnnnnnnnnnnnnnnnnnnnnnnnnnnnnncatgtatatatgtatatatcccatncttcaatataaatatatcataagtgagagttgtaaatactccttggtcatatgtctgtctttctcatagtatcatatcttcaatgttatgttaacaactccatttattgattgatgaaatcgtgtgtagacctgtatcctcctgacatagtttatgtagggtctcttctcaaataaagtataaaacaacaaaaa

SEQ ID NO: 363326 - DNA, 2523 bp, Homo Sapiens
  misc_feature (1289)..(1349): n is a, c, g, or t
  misc_feature (1430)..(1449): n is a, c, g, or t
  misc_feature (1617)..(1617): n is a, c, g, or t
  misc_feature (1650)..(1650): n is a, c, g, or t
  misc_feature (1724)..(1724): n is a, c, g, or t
  misc_feature (1827)..(1827): n is a, c, g, or t
  misc_feature (1865)..(1865): n is a, c, g, or t
  misc_feature (1892)..(1892): n is a, c, g, or t
  misc_feature (1974)..(1974): n is a, c, g, or t
  misc_feature (2003)..(2003): n is a, c, g, or t
agcgggtgagtctgcgtggaagaggggtgcggttgtgtacagggaactgaatccccagacagaagaaagccaggatcctgcgcctttcctgaaccgactagttcggcctcgcagaagtgcacctaaaggccggaaaacacgggctcgaagagcgatcgcagcccattatgaagttcatccacgacctggacaggacggagcgcaggcaggtgtggacgggacagtgagtggctgggaggaagccagaatcaacagctccagccctctgcgctacaaccgccagatcggggagtttatagtcacccgggctgggctctactacctgtactgtcaggtgcactttgatgaggggaaggctgtctacctgaagctggacttgctggtggatggtgtgctggccctgcgctgcctggaggaattctcagccactgcggcgagttccctcgggccccagctccgcctctgccaggtgtctgggctgttggccctgcggccagggtcctccctgcggatccgcaccctcccctgggcccatctcaaggctgcccccttcctcacctacttcggactcttccaggttcactgaggggccctggtctccccgcagtcgtcccaggctgccggctcccctcgacagctctctgggcacccggtcccctctgccccaccctcagccgctctttgctccagacctgcccctccctctagaggctgcctgggcctgttcacgtgttttccatcccacataaatacagtattcccactcttatcttacaactcccccaccgcccactctccacctcactagctccccaatccctgaccctttgaggcccccagtgatctcgactcccccctggccacagacccccagggcattgtgttcactgtactctgtgggcaaggatgggtccagaagaccccacttcaggcactaagaggggctggacctggcggcaggaagccaaagagactgggcctaggccaggagttcccaaatgtgaggggcgagaaacaagacaagctcctcccttgagaattccctgtggatttttaaaacagatattatttttattattattgtgacaaaatgttgataaatggatattaaatagaaaagaacaatggaaaagaaataacaacaatacccgtcaatggcgtgcaaccagtattgtgctaaacacaaccaaaggtccgggcccccaccaccatcacccctacagggccgacggatgtcgtgcgacacactaccttgcgtgcagcctggttgacccgcccttgctagccannnnnnnnnnnnnnnnnnnnnnnnnnnnnnnnnnnnnnnnnnnnnnnnnnnnnnnnnnnnntatcacacttgtcaacattatacccaccacggtggctgggacgcgatcaaccaacgaactcccgatcgaccgattccttgnnnnnnnnnnnnnnnnnnnnttttctcacccggtggtccacacgctataacccccccttgaagccccctgtggtggttctttggttcaaacacaaaggtgcggaaccctaacctccggcgaacaaacattcttgtccgcaccaaccgctctctctctgtcgccccaccaccgttgaaccactcgcaancgtaggttaccgcgtgtgatgacaccacgcccnagtgacctagcggtctcggatcatgttgcctcacgcacaccacggcgggagagcccctacatctatcggcgtcntcaacgcggcgcaagcaccaccgaccagagcgagactgactaaagtagctccaccaccaaagcaaaaatcactgcgactgaagccactacccttgataagccncgtgaccctccttcgggcatcccctgccgccccatgcnttcttagatcaaacttaattgtttacntcgtgatgcggggggcgccccgtcctattatcggcggtacgggagtgacgtataatcctaccacccccgtagcggggcccgngtcccgccgttactcccttctgcccggangttgcttgtcccaatccctactcgtgtttagcataccttcggctcttctaacaatagacgcgggggtccactgtccttctctactcacatacaccacaggtattcacctcgcctcgcgtctaccatgggatgtctcaccgcgccatttataagacaccttattggacggacacactgggctcggggcgccgcaacccaacacacttcacgccgctccaaataaacaccccaaagcgccgccccgtacttcgcaatagaccattccatgagtgggcagaggcgtgcgggcgttagacaccattgtagacgcggggcccgtatggccgggcgatgaccccctaattctgcatttttgattgcgagggtgccgggagatcaggcgagcgttgcgcgcggttcttcttgcggtcgtcacttaactcgccggtttggttgaggtgctgtgcgccaaccaacggtcgattgtcgctcgttctttcttccgccagcgccggcagtacgccgcacttatacttattct

SEQ ID NO: 363327 - DNA, 1287 bp, Homo Sapiens
  misc_feature (142)..(167): n is a, c, g, or t
  misc_feature (177)..(177): n is a, c, g, or t
  misc_feature (209)..(273): n is a, c, g, or t
  misc_feature (634)..(921): n is a, c, g, or t
  misc_feature (954)..(954): n is a, c, g, or t
  misc_feature (1229)..(1239): n is a, c, g, or t
aaaaataaggatattggccgggtgtggtggctcactttaatttatatatttaatagtactgtcaagatgttatcactcgctaggtgaccgcagacagtcttgtggcctcccttctcccctgccatccccatcacacctttcnnnnnnnnnnnnnnnnnnnnnnnnnngagatggagnctcgctctgtcacccaggctggagtccaactnnnnnnnnnnnnnnnnnnnnnnnnnnnnnnnnnnnnnnnnnnnnnnnnnnnnnnnnnnnnnnnnnccctttaaacctttccctggcctttcccatagctggtgaaggacacctccatccattccacgcagttgctcaaagcagaaattttcagtgcaagtcttgatcctgcgccgtcccccactccctacatcagaacgcatccctcatctggactccagcggtggcttcttgatgtgcgcgtcccccactccctacatcagaatgcatcccgcatccagactccagcggtggtgctctacctgcacgctgttgccaagtccaagctaccatactcctgcctgagctatgacaacagcctcctcactgatctcccctttcttccctttgcctcctccagctcatttttcacagtgtagaatgacannnnnnnnnnnnnnnnnnnnnnnnnnnnnnnnnnnnnnnnnnnnnnnnnnnnnnnnnnnnnnnnnnnnnnnnnnnnnnnnnnnnnnnnnnnnnnnnnnnnnnnnnnnnnnnnnnnnnnnnnnnnnnnnnnnnnnnnnnnnnnnnnnnnnnnnnnnnnnnnnnnnnnnnnnnnnnnnnnnnnnnnnnnnnnnnnnnnnnnnnnnnnnnnnnnnnnnnnnnnnnnnnnnnnnnnnnnnnnnnnnnnnnnnnnnnnnnnnnnnnnnnnnnnnnnnnnnnnnnnnnnnnnnntgagccacccggcctggcctagaatgacttttnaaagatcaaattaaatcaggtcactcctttgcttacaacgcagtgcgtttagaggtacaccccatgtcttcacagggcatacagcatccgatttaatctgggatcattcccgggccttcctcctccagtcaccccagagggcccaaaccccgggggcccctttccttcctaaaatgtccctcgggcttcaataaccggggcctgggggcctttttctcccttcccccccgggccggggaaaaattcccttccttttccccctttttggccctgannnnnnnnnnnggggttacccccttcaaagattttcacaggtcacagggtcccctgggc

SEQ ID NO: 363328 - DNA, 445 bp, Homo Sapiens
taattacccaagtggggtactgtgagaatgagctatacagcacatatctcaatgcttggctcacagtaggtgcttaatacaatcaatgaaagctatgatgtgcattataaggaatcaacagacagcactgtccagggaagactagactcactcatgaagtgttaagttccccatcaatagagcgtgtgcaagcacttcttggtgcccaaaggattccagcacccacaacaggttggcctaactcttaaggtctctccagcttccagagatcatgctcctcagggtctgacttctagtccccacgcttcaagtaacaccgaccaggcacgtgtgcccagcgtgcaccccgcctgtcggtcaccgcctactgtcaataaagttgatttgaggcggctccaggcagaggggcacggccacccacacgccacctcagcccggccccgcg

SEQ ID NO: 363329 - DNA, 186 bp, Homo Sapiens
  misc_feature (138)..(138): n is a, c, g, or t
aatataacgagatatttataagtgggtgctagggtcttgactttatctccgctgcacaagcagtgtgttgaactttctaatctcatccctctcctaagtgagccctgagctagacggtttccttcctcccctctcaanagtttgtttgtttgtgttctgacagaggataaagctattttaccaaaa

SEQ ID NO: 363330 - DNA, 253 bp, Homo Sapiens
cgctacacgttagagaaagaagactccagtgtcgcctttgcatttcaggcattgtctaagttcttcctgcatttatgtggactctgcccaaggctccctaaagacataagcttcacttcttggatagtctgtaaggagaagcaaggggaggctggtgtggaggcaaggaggaataaaggcagggctggagacaaaggctccaggctggcagacacacagggtccagtaggggtttccctgccctgcggccgct

SEQ ID NO: 363331 - DNA, 608 bp, Homo Sapiens
cagatggacaaatgctagagtcagcacctgtctgtgggggcgcccttggcctgggcgctggacctaggccatcaggactggagagccttcttctcttctggccagagaaagagcaaagggtggcttcctgacaggtccggagctggcacagcacaacagagcctagaaaatcactagcagggctgagctcggggttccaccgctgcagccttcctgttggacccagtctgctcaaggactccctcacagcccagtgctttctgttcaccccggggcgctcccagcccagcctcctagcctcaagccgggcacgacagctgcgggcacagggagcaatcgcctggagccagagggggcaacgccagcccaagggcaaatgggcaaccctgtgcaaaaggctctggcaaccagatcatctactttagaagaaaggagaagaaaaagagcccccaggagaggaagtagcccctaacccgactgacaagcaatccgttcgcaaagacagaagggccttcagtgaattggtttcaaagtgcttgatttcttaaaaccagaacaattgatcattagagaactgattaagctacagccgctgttgaataaaaggt

SEQ ID NO: 363332 - DNA, 2047 bp, Homo Sapiens
  misc_feature (51)..(87): n is a, c, g, or t
  misc_feature (131)..(299): n is a, c, g, or t
  misc_feature (1390)..(1411): n is a, c, g, or t
  misc_feature (1492)..(1518): n is a, c, g, or t
  misc_feature (1626)..(1754): n is a, c, g, or t
aatgtatacgatcactatagggcgaatggagctctaccgcggtggcggcgnnnnnnnnnnnnnnnnnnnnnnnnnnnnnnnnnnnnnatcaggccaaatcggccgagctcgaattcgtcgagagcgtgagnnnnnnnnnnnnnnnnnnnnnnnnnnnnnnnnnnnnnnnnnnnnnnnnnnnnnnnnnnnnnnnnnnnnnnnnnnnnnnnnnnnnnnnnnnnnnnnnnnnnnnnnnnnnnnnnnnnnnnnnnnnnnnnnnnnnnnnnnnnnnnnnnnnnnnnnnnnnnnnnnnnnnnnnnctgagccaccgcgcccggccccttatgggttcttctacactgctgggatctctgttttaagtgctcagcttcatgattgattgctgggcttccattttcccatccagttctggagttcgtagagagtgaagatggtagacttgaacagataaataaacttaacgatcttgtaagagttgtctagctacttaaaaccctcagaagtaagagcttagtctcacgagttgtaagagtgggatttggagcttggtggtggagactgacttcagctgagagatgcacaacagtcatggttttcttaagcctcttatgaaaccatgaatgagagatgaagctaaagaatagaatccagagatcacaaactcatctagagtacttccacaaaatttacaaagatgtgggaactttatggataggatatattttgtttgtagttgttaatatcaactagaggcactttacatagggttaagtgatcgaaccctcttgtggttttgaacaccaacatactggcttacactgctgaaatattctgggtttcattattttgcactggatccaaccggtaaatactcttaagtataccatttcaaccactgttttttctactctttttgctgctcattaaaatctttcatgtaggtgccagaaccatatgtaaacagctttttaaaaaattgaagctggtattttgtttaaacaaaaagccatagaacttggtcatgttttccattttaaaatgatttactgaaacaaagtaatactaataaaaacccacaggcaccaaacaggctgcttaaaatggtctgttaaagacattttttggttatggaatataagaaaagttttgcacatctgtaagggggaaaaacagtatatcaccattgggtagagtggacgggactcatgtaaggactcaatttggggaagagcattcagtggcatgctgttagaggactagtgtccgagaatctcctcacagtatcatgttgcaggaattccccattgctctgcaacttccaaaccagtttgagtcatacaaatgttttctaaacttttattgtattactgcaataaatcttttaacggtnnnnnnnnnnnnnnnnnnnnnncaggagaaagaggacaggacaaaaagcgcaagacgaagaaagcgccaccaaaggagcgacgaaaccaaagggaaagagggnnnnnnnnnnnnnnnnnnnnnnnnnnngcctttgggggcccccccggccccaaaaaatttttaaaacactttctttgggggccgcggccccccaaggaagggagccggggccttctttgttcccaggggaacccnnnnnnnnnnnnnnnnnnnnnnnnnnnnnnnnnnnnnnnnnnnnnnnnnnnnnnnnnnnnnnnnnnnnnnnnnnnnnnnnnnnnnnnnnnnnnnnnnnnnnnnnnnnnnnnnnnnnnnnnnnnnnnnnncccgatataaaatttcccccccgcccgtggcattttttgggggtgggggttgggattccattaaagccttcgcgccgggagggggacacccctcccaaccgggggtggggaaaaccggaaacccgccgccggggcttccaccccaccttggggcccttggcggtaaaaaattctttcgccccggggaggacaccggggggggcaaaaaaatttttgcccattttgtggcccgcgttttaaattcaaaacatgggggagacaatcccccccgggaggtggtgggggggagaaag

SEQ ID NO: 363333 - DNA, 684 bp, Homo Sapiens
aaccctgttgtttggcttaacacatctcaacccctctgcaaagcttttattgtcacagatgaagacatcaggaaacaggaagagcgagtacagcaagtacgcaagaaattggaagaagcactgatggcagacatcttgtcgcgagctgctgatacagaagagatggatattgaaatggacagtggagatgaagcctaagaatatgatcaggtaactttcgaccgactttccccaagagaaaattcctagaaattgaacaaaaatgtttccactggcttttgcctgtaagaaaaaaaatgtacccgagcacatagagctttttaatagcactaaccaatgcctttttagatgtatttttgatgtatatatctattattcaaaaaatcatgtttattttgagtcctaggacttaaaattagtcttttgtaatatcaagcaggaccctaagatgaagctgagcttttgatgccaggtgcaatctactggaaatgtagcacttacgtaaaacatttgtttcccccacagttttaataagaacagatcaggaattctaaataaatttcccagttaaagattattgtgacttcactgtatataaacatatttttatactttattgaaaggggacacctgtacattcttccatcatcactgtaaagacaaataaatgattatattcacaga

SEQ ID NO: 363334 - DNA, 340 bp, Homo Sapiens
  misc_feature (232)..(232): n is a, c, g, or t
  misc_feature (316)..(316): n is a, c, g, or t
tttaggggttctgggtttaattgggggtgaaagggtgctgtatctgggcctccaagccccaaccccaccgtcactgggctgaacccgtaacggcctgtacccaaaaaatggtgcgggtccggctatcctcccacaaaaacaggggctcataacccaaatggcgctgaaccttgtcggtgctgaccgggaagggggtggttggccaccgccagcctgaagggggttcagcagngggtgcctaaaacaccaatggccccaacaaccactgcaacagggcattgagggcagccaagaacaccaacagccaatatggcancatggggcgggcgcccacaaaccg

SEQ ID NO: 363335 - DNA, 1126 bp, Homo Sapiens
  misc_feature (594)..(667): n is a, c, g, or t
  misc_feature (671)..(672): n is a, c, g, or t
  misc_feature (675)..(675): n is a, c, g, or t
  misc_feature (677)..(677): n is a, c, g, or t
  misc_feature (680)..(682): n is a, c, g, or t
  misc_feature (701)..(701): n is a, c, g, or t
cgccggtcaggattcgcgacccgacatggagcgtccccgcagtccccaatgctcggccccggcctctgcctcagcttcggttaccctggcgcagctcctgcagctggtccagcagggccaggaactcccgggcctggagaaacgccacatcgcggcgatccacggcgaacccacagcgtcccggctgccgcggaggcccaagccctgggaggccgcggctttggctgagtcccttccccctccgaccctcaggataggaacggccccggcggagcctggcttggttgaggcagcgactgcgccttcttcatggcatacagtgggcccctgaggttccaggtcctttgcggcggcgatctggagggcgtggctacaggacccgggatgccattcagttactcatcttttatgctttcgtcctgacctgtctcaactagacttgctcctgcaaccaccatgggggttttgcatttacatttgtggaccatgttacagttaagaaaaatcctgtttcagtccttatatgtaataaaatgttttatgatgtaacttggccccagaatgattttgaagatacattaaaggaaagccctnnnnnnnnnnnnnnnnnnnnnnnnnnnnnnnnnnnnnnnnnnnnnnnnnnnnnnnnnnnnnnnnnnnnnnnnnnccannaananggnnngcgccgccccaaccacgtngggcggccacggccctcccccgaaaaccttagaaaacctgtccctggcggaccgctcggccttcacaccaagagaaaaagcggccctggcgggcttcccgcacggtccgcatcgacctcgggaatgggagttctggattcccctcccagggaacaaacgcccccgggggatcacacgagacgctcctataatcaatccaaggtgcgccctcctggagacccccactcccgggaacttgatctcgaagattcccttaacgcgttggtcggccccaatcaaggagataacccctcccacccacacccgacactgactatacaccagggcacttgggcgaataaagggattttcaacaacccctgcgcgcgcggcattgcgaacaccaccacccccccgaccccgtcggagtggaatacacccgcggt

SEQ ID NO: 363336 - DNA, 1118 bp, Homo Sapiens
  misc_feature (18)..(18): n is a, c, g, or t
  misc_feature (1013)..(1025): n is a, c, g, or t
actaggagaaccatctgngaagcaaaaagtaggcttagttgtgtgttgtctcttaagtttgtcgctcatgtgtgcaacaaggtatggactatctgtctggtggccccgtttctggtggtctgttggcaggctgcccagtccaggctgccgtggggccgccgcctctttcaagcagtcgggcctgtgtccatgcgctcagggccatgctgaggcctgggcccctgccacgttggaaaagcccgtgtgaaaagtgaatgctgggactcagccttcaaacaaaaaggactgtagggagggcggcaggggcctggaaatcctcctgcagaccacgcccgtcctgcctgtggcgccgtctccaagggctgcttcctcctggaaattgaccaagggtgtcttgggcaaaactggctctgagcgcccccatccaaggccaggttctccgttagctcctgtggccccaccctgggccctgggctggaatcaggaatattttccaaaaagtgatagtcttttgcttttggcaaaactctacttaaaccaaagggtttttccctggacagtagattttccaaatgtaataaactttaaaataaagtagtcctgtgaatgccactgccttcgcttcttgcctctgtgctgtgtgtgacgtgaccggacttttctgcaaacaccaacatgttgggaaacttggctcgaatctctgtgccttcgtctttcccatggggagggattctggttccagggtccctctgtgtatttgcttttttgttttggctgaaattctcctggaggtccgtaagttcagcccaaggttttataaggctgatgtccaatttctgtggtgccaagcttccagcccccatcttctaaatggcaaaggaagggggatggccccagcaccagcttgaccttgaggctgggccccccccgggaggtgtgggaatcgaggcacttacccgccataacacccttgaaattactccttcccagcccggtttgaaaagggccacgannnnnnnnnnnnngtagggattcctgcccctcaccgtggactactgcgacaccgcccgtcttaccggtattccctgggccctcccccccaggtctggaggaccctt

SEQ ID NO: 363337 - DNA, 948 bp, Homo Sapiens
  misc_feature (632)..(632): n is a, c, g, or t
  misc_feature (659)..(659): n is a, c, g, or t
ggaatggcacccaaagcactttatgaaaggttatttcaggaacagcggaagggttactgatcccgggagcacacagcattgcacagtcgtccagatatgctcttcattgagagaaagacattttgcaaagatgctgctgaagaagagtcctttgggcctgtgacgtggcagcccccatagggtttgtggaatgagtttacccaagcctctgcctccctgtgctccccaggggtgcatgctcctgagaggctcagtgcccgccttggtctccaaacacctgtttaatctgggggttgaacggattctcctttcccaggatttggggccactggagctgcacctttttccagaaatgatccgccaacaacagcaaagccacctcgttggggtggaatccatccacgggctcgatgagctgccagggctgtccgcctctcttctgccactcctgtatgatttcatggaaggcaaaatccatgtagaaaagattgaagtttgtaaatttctcactggctgcaatttttttcagtgtgttggagagttgctctgctctctctgaaagtgagagtccgcaacgtcttgttggaagacatccagccgtggcagggggctgacctggaggcagttcaggnaaggagtacaactgcgcataggtcatngtcttaatttagctggccgagaggatgatatctggtgtgcaaattatcccagagaaaggttccatctggtaagccatacaaaataacatggctgccattgggcaggtgggaatttagatgcttcagagtctgcatgacgttggagtagagtttctcaggagtggtcatggctgggactgggtcactcttcccactgcagacatcatttccaatcatggcatatataacgatggcgggatagtccaacaccttgtttctagacaagctttctataaatttcttcaggttt

SEQ ID NO: 363338 - DNA, 997 bp, Homo Sapiens
  misc_feature (233)..(267): n is a, c, g, or t
  misc_feature (327)..(327): n is a, c, g, or t
tttaaaaggctggccccttggggaaaacaggggggttccttctgtctttgaagaagccaggagaggggtaagggttggaccaggcgaattcccgtggaaaagaacgtcttcggtgggaaacttccccatggtggaaaggtgggcgcgtttctcaacggctgagttgcttgcgcctgcagacggaagcttccccacaggcaagagctgcttggatgtgtgagtcatgaagcccnnnnnnnnnnnnnnnnnnnnnnnnnnnnnnnnnnnggccctgtgacctccctcctgtcttgcagctcctctgggcaccagtccccagggctctcntgttggtagttcctgcttttcttctgggaaattcctcgtggacctcgagatctttaccctaaaatagttctgttgaatttcaccctggcaatgtaaattgatagcttatcttcacagatgccagacaatggacaactcaccatcagtcctctgctcacctgagacaaatgcatgtctgattgcttcctctgccctattgtttatgtgaaaatgcagattcactgagccagactaaggcatcagtgactgttcctctacctgcctctcacatggagattgtgtattcagtgaaaggctgatcaaagacccaaaggaatgcaacagtttatctcttatctacctatgacctgcgagctgcccaccacccccagttgttgcgcctttccagacagaaccagtgtacatcttacacgtattaattgatgtcctgtgtctccctaatatgtatcaaagcaagctgtgcctcgaccaccttgggcacatatcctcaggacatcatcctgaggctgtgtcactggcatgtccttaaccttggcaaaataaactttctaaattgaaacctgtctcaggtactttgggttcataccacaagggagggttctcatgcacatgtgcctaataataacaactatcacaaaagactgcaaaaaccacaactttacacaaaggc

SEQ ID NO: 363339 - DNA, 1179 bp, Homo Sapiens
  misc_feature (51)..(52): n is a, c, g, or t
  misc_feature (754)..(762): n is a, c, g, or t
  misc_feature (914)..(926): n is a, c, g, or t
caccccaccccccctttaccgtacactactttacccatccactcacacacnnccccttcggccccgcgtccgcgaattcccgcggatctcaagagcaagctcagagggttgctggagcacatggggaaaccgaggctcacagggatttggtcactcctccagggtcacacaggctgtccacagtctggctccggggccctcctgcttatcctgcacccacagtgattgctgtgtgtgttttcttcaggagaatcccttcaaagaaaggatcgtggcggcgttttccgaggatggtgaggggaacctcactttcaacgactttgtggacatgttttccgtgctctgcgagtcggctccccgagagctcaaggcaaactatgccttcaagatctatgacttcaacactgacaacttcatctgcaaggaggacctggagctgacgctggcccggctcactaagtcagagctggatgaggaggaggtggtgcttgtgtgcgacaaggtcattgaggaggctgacttggacggtgacggcaagctgggctttgctgacttcgaggacatgattgccaaggcccctgacttcctcagcactttccacatccggatctgaggacactgccgaggctgtaggggcctagaagtccaccatcctgccctgcagtcacatgggtgtggcctccaagctccccaggaaagcagtggcagcctctggggtttacaccacaaatatatcctgtggccctttcagccnnnnnnnnnccttaaacagaaagggggcctgtgaaaggttagggacccttcccacagcccccgctgtgggccagcccccgggacccatgggcctctcctccaggcccctccgcaccccggtcccatgccccaagtccttttcctattcccgaaaatgcttnnnnnnnnnnnnnaagaaggggaagaccagaataaccccaccgggaggctggtggggctttgacattgtcccaatgtggctgcgcagaaacccctgtgttctccccaggaaagataccgaaagaaacaaacacaaatgtccctgggtttttaaccgagcggttgcgaattcttttttcccccaaacccaaaggttgggggcggcttttcccacaccctggctgagtatccccttttctctcggcgcttcccctttaagaggagtgg

SEQ ID NO: 363340 - DNA, 899 bp, Homo Sapiens
  misc_feature (720)..(720): n is a, c, g, or t
gatcagggcagttggtgattctagcccctcacctcggcaggtcctcagtccagatgtgtaatgctgaggaagtcaggcccttgcaatcattcctcgaagtcagcaagcccagcttcccgtcaccgtccaagacagcctcctcaatgaccttgtcgcacacaagcaccacctcctcctcatccagctctgacttagtgagccgggccagcgtcagctccaggtcctccttgcagatgaagttgtcagtgttgaagtcatagatcttgaaggcatagtttgccttgagctctcggggagccgactcgcagagcacggaaaacatgtccacaaagtcgttgaaagtgaggttcccctcaccatcctcggaaaacgccgccacgatcctttctttgaagggattctcccggagctctggcatctggatgatgaggctcatgggcacgtggacgatggggctcttcctgtagtccattgggacgaggttgggggccagctcatagaatcgcgaatgcagcttgaggatgtccttcttattgaagaaggtgcagtcctggtagttgtctagctgctcttcggtgaagatggtctgcttgttccccatggtggccgccgcgccgccgctcgcccgcccgggctccgactcccatcagcggccgccagacccggagccagcgccccgtgcccgcggccctcggcagccccgcggctggcagcggcccncggtggccggacccttcccgccccgcagctcgcctggaggaggcgcgcgggggtctcggaggcggggacgggaacccggagcggcagcgactccgccgccggcgggaagagggcggggcacccggctccgcggctgcagcgcgcccgggtcccggcaggaggcgacctggccccgggag

SEQ ID NO: 363341 - DNA, 948 bp, Homo Sapiens
  misc_feature (63)..(63): n is a, c, g, or t
  misc_feature (83)..(83): n is a, c, g, or t
  misc_feature (286)..(286): n is a, c, g, or t
  misc_feature (308)..(308): n is a, c, g, or t
  misc_feature (372)..(372): n is a, c, g, or t
cgtttaaaaagatagtaaaaagctttagatgcgggtgttacgactgcccctgaaagcactccntttttggcattagcccgaanctgatcaaggcttaaaaagttaatggactgcctttcctaattctaaaatgggtcctacccaggattggggtgctttagaccggaggagccctgttttaaagctgtcatgagtacgcgttattgtaaaagcaagaatctcctttcagcttgtaccggttccaaggctcctagagagtgcccccttaaaataaacacacaataangtggcttcctgtccacccccancccagcaggtgctctctggcactgggaacttctgctagggagtggtggaagtaggaaggatttngtgtgcaaagaaaaatcatggttgagtttcactgcagcaggctgacgttgcctgatgtgagagcaagtgcccgactggggtgcgggtgcacaggtcgggggagcacaggccacagagcgcagcctctgggggtcccccaaggcacagcatatacagcatggtcgccccttgccctggagtctgggaacaaagagaggagccagcctccccgcactgcttcagatggaaaagggaggcagggtgggcttccgttctccagatctgtttgctcttaacaggcagaacatgggagaatcccttattccctggttaatcactatgcatatttgaaataaaagaaagcgtaagcctctgcaattttaacttctcaaaggatgtctctgaaaagaatcactttaaaccaatgcctataaaaagcaagtctaccaaaataaactaagactttctatgtggtttgggctccctcttatttttacaagtttcatttttaaaagtaggcaactactttgggttacagtatttttattcatatttaaacatttttacaaaataaataaagtgttttacatagtaagg

SEQ ID NO: 363342 - DNA, 1454 bp, Homo Sapiens
ggtcatgatattgttcctatgttggaaactttaaaagctttctttgattttggaaaagacataaaggatgataactattcaaataaactactagatattctttcatatctaagaaataatcagctgtatccagaggagtcatttgcacacagtataaaaacatggtttgagagtgttcctggaaaacaatggaaaggacaattcaccacagtccgaaaaagtggccagtgttcgggctgtggaaaaaccatagagtctattcagctgagtccagaagaatatgaatgtcttaagggaaaaatcatgagggatgtgatagatggaggtgaccagtacagaaagacaacacctcaggaacttaagagatttgagaacttcataaaatctcgtcctccttttgatgttgtcattgatggtctcaatgttgccaaaatgtttcctaaagttcgtgaatctcaacttctcttgaatgtcgtctctcaactagccaaacggaatctgcgactgctggtcctaggccggaagcacatgctaagacggagttcccagtggagtcgggatgagatggaagaggtgcaaaagcaagccagctgtttttttgctgatgacatctcggaggatgatccattccttctgtatgccacactgcactccgggaatcactgcaggtttatcacaagagacctgatgcgggaccacaaggcctgtctgcctgatgccaagacccaacgcctgttttttaagtggcagcagggacatcagctggcaattgtaaataggtttccaggatcaaaactaacctttcagcgtattctcagctatgacacagtggtgcaaacaactggagactcgtggcacataccatatgatgaagacttggtagaaagatgttcctgtgaagtaccaaccaaatggcttttgcctccaccaaaagacatagagattcttacctctatgctaaagtttgtgtttgggtaccctctagggttggcatccagaggctcttgagctggtgtttgtttagggcattgcctctgtcctgaagataaaaggattctattaacagcattgacattgattttttaatgaaatgagatatatcttttcataaccagctgcgtttttttcccctaacatttgtttttggaggcttatcaagagttggagaacttagtgtagagcaaaacctgcatttctcctactgggccagctattccacttagcttgggtgactaatagtgcttttggtatccattttttgctacttctgaccttgccttccaggcctaccaatagcagaatcaatccatctgtccctgagatactcatgttgtttcaaatgcctcctcccatttctggcatagtctcattctctgtatgttatgccctatccacatggaatcatttatcgtcctctgtaataaactggccaagatactaaaggcttactattc

SEQ ID NO: 363343 - DNA, 1159 bp, Homo Sapiens
  misc_feature (320)..(341): n is a, c, g, or t
agcggggggcctacgaccttcctgggccggggaagacagtcgtggaggagtccacggatctcgtccccttggtggcccgattctgctttatactggggtgggagcgagagggaggctgagtttgcgcgctcgtgtgcgtgcctgtccgctgccccttcccgctggcactctgggtacggggtctgcctgggactcacgctctgcgccggtatgctggccccagagccagtccccgcgccggcttgaggcccgtgccaggccacgggggcttggtggcgctggagcagccctcctcccgtgagcttcccccacccaccccnnnnnnnnnnnnnnnnnnnnnncccttgctctgctgtaagctcgcgagcttcatcagaccatttctggtccacaggccttcggagcaggctggcaaagcacacaggctgagcgctgaggagagggaccagctgctgccaaacctgagggctgtggggtggaatgagctggaaggccgtgatgccatcttcaagcagtttcatttcaaagacttcaacagggcctttgggttcatgacaagagtggccctgcaggctgagaaactggaccaccatcctgaatggtttaacgtgtacaacaaggtccacatcacgctgagcacccatgagtgtgccggcctttcagaacgggacataaacctggccagcttcatcgaacaagtagcagtgtccatgacatagaccctgcccttcctctttgaattcttccgggggaaagggtgactgaactgggagtccagggagggagctgaggagcccttaccctcccaccactcccctcccaagacccagccgccgccgttgagggctgagtccttgctgtgggatgtgccagtgtccccaccaacaccaggaatttagaccttttccctgcaccactctcttcatcctgggggctctgttacactaatttgaataaactctcccctttctttgcaacttcccagcaacaataatgattttcttgccaggccgtctcttgctccctaattcatttcccaggaagctgtgatacagggtgaaataaagtcttgtcttagaaaccaggaccctaaaccccacactatgtaatagaaacacatgtgtttttatgtctcaaataaaactattatatcacttgg

SEQ ID NO: 363344 - DNA, 888 bp, Homo Sapiens
  misc_feature (540)..(550): n is a, c, g, or t
gccctgacggcgctcccgggagcagccggtgcgcggcggcggcacgaccccctgcgcctccgaggcagacgagcccatcgggagaaggcgaggcagggaagtgcctaaaccaacgggataggattcaaaactaggtgacaaactcatgagaaatccaacctggctgaatgtctgagaggctgctactgtatcaacatcacaagataaagcactctggtatcacctgcccatatcctccttagtgtcacccaagacatttgactctgatgtggttaattgataacttttcttgctccactttacaatgttttgtttcctacatcttattaccttgggacacaaaagtggcagagttgttgagagctgatgacaataaaaaggagaacactagaggaaatgagacaggaaagaaagccaaagctgattttccaactctatgctgactccaacctgcagaaaaagctgaatatagaaatcttcttccatatatgcatgaagtcactccacttacgacataacacacaaaggaatcacctggcnnnnnnnnnnnaacccagaagagttgtgctggggaccatgccccatcccgctgatacagatcctgaatggacataatcacggaatggcacagtgcaggtgtcatatcaacagtaaggccgcaaatctttgagaggaccctccaaatactgagaacttctgttgcactcgaaaaaagtcatccgtggacttactactctcgctcactgtgaacgggctcttacttcgagtgtccccccagaatcccgacctgcgaaccttatttctcccaaacaaggtccaactggaggttgcctacactagttacacagggtcttaatcttcataggtcagctagcattcacggcccct

SEQ ID NO: 363345 - DNA, 515 bp, Homo Sapiens
ggatgttcagttccctaggcttttcatcatggtcaattagggaatcagcccaaaaggtcagcatcactgcccttaaatgaggtcacactccatgcactctgagtaccccggaaagctgtggtgctggtgattaatgcatgtgtccagacacctggtttcaacgaggcaaatccctggcatacaatcccagcttgtctcttctcactgtgtgtatttctcgagctggcctgtcaccatgcaaagagtattttgaaaatgcagtttatgctcatcttggatgcagctgagatgccatggaaagaagtcagactttggaataggatgggtctcaggatttgggagcatgttccattatcccctcaagttttgattccctcatctgttaaaggttattgtgaggataagatataatgcctttcaagtgcttgatgaagggcctgaactatatcaggtactcatgaatgtttagtatgatgcaaatttcaagattaataataaaagaagctgcaccagaa

SEQ ID NO: 363346 - DNA, 430 bp, Homo Sapiens
aacctttcattgagaactatcattcttctgtattttattcggttcttttccactgaattggtttattagatgttcaaagcaagagaaacacctagccacaccctccccctggctaacttgttgccttataaaatgaaccttggtccagatacgtgcagtttgcactcaagaaaatcagttacagagaacacacatgagattaagaagaacgtttcttctattaccttgtagttaattcagacttaaatttctatagggtaaattctgattattttcatattgtaaaaagtatctatcccttaattcatattttcttcttggaagatgatacccatacggattttatttttccttacatttctatcaactttaaatatgaaatgctgtgtttctaaagttatagataaaatccctttcttttattgcttga

SEQ ID NO: 363347 - DNA, 1559 bp, Homo Sapiens
  misc_feature (978)..(1004): n is a, c, g, or t
  misc_feature (1386)..(1397): n is a, c, g, or t
ttgaaagatctccaccacaacgttcaagatagagagacacagcaagccatcaactatggttaattttgaaaaatggaaaagttgtgattgggcttacagtcagcactcagttatttgcaagtgtatttctttgctttgtagagtatttttatggggtgttaactttgacagctgagagtgggcttgcaagaacacaatctaaaagtgtgtttcaattgagtatctctctagtagaataggagttcatcctgaaaagctgtgactcattaacccagtaaacatatacaaagtaagcttaaaacactataaacatgagataagggaaaatgaatccagagttctcatattaataggtagtgaaacaataaggctttttagagcagactttgttggcataaaataacctggcttctatccctaaccctttcctacctttcctctccgtcaacatgtcctcatactgaagacaaacttgtttcaatgatagtcttcatttttaaaaacaaaaaggcaggcagacagaaataatgatgttttcttgcactaagaaggtactacttgtacacatatatcaaaacctcattctgcaaagtttttgaaggtttcaatgggaaatttgattttattacaaaataaaacattttttaatgttaaagtttatatattccatgcttgttttctcattcactggcatggatgatcaggagctgcctatatatgaaggcagaatcagactatcaggaaaagagctggccagggccacagccagtcaagatctctgagcaacttagagacatgggtgtcattatatgaagcttgcatttaatacatttatacataatacatttgtacatttaatttcataacgtctcttggttcacagatgcccttaaatataaaaataagttggccagatctctaagattgcctagtacacctttgtatctcatttgatgtgatacccagaagagatcattnnnnnnnnnnnnnnnnnnnnnnnnnnncaagaagatccttcgtgatcaccatgctgttctcatggtaagaactggagttatgtttttaaatttggaaatatgacattttatgtagcactttataaaaagtgaaagcgacaaattccaccgctgcttaatactgctttgcttctttttattgacatgatagataaatatgtatctacacagagtaataataataaaacacagtaaacattctatttctctatggtctacagcatgccagtaaataatatgtaggaccaataataaattatcaattacacatttttgtgttaactaattaaaagcatagtgtataagtgagtacactctaattaacttgcttctgttgcactttagttttctacctgcatatggactgcannnnnnnnnnnnaacacagtcagtatgtagaatgggatgtattcttctgctgctgcttattaaataaagaaagcctgagtgttcttagatggggttattctgagatgagggtcttaccctacagttcttttttgaatgaaaagtgctttgttttttaattatattcatcttttt

SEQ ID NO: 363348 - DNA, 691 bp, Homo Sapiens
  misc_feature (39)..(39): n is a, c, g, or t
  misc_feature (83)..(83): n is a, c, g, or t
  misc_feature (112)..(112): n is a, c, g, or t
cccactacaatggctctatcagtgacagactggccaacntgacacagagagaggctgcgtcttcaggccccctctcttcctgnacccaccccctcagaatggcaaaaacccncaagtcgtccccagcagctctgcttctaagaagcagtatgtatagaggcctgtggcttatgtcacccaacagaggggtcctgagaagtctggctgcctgggatgccccctgccccctcctggaaggctctgcagagatgactgggctggggaagcaggtgcttgctggccatggagcctcattgcaagttgttcttgaacacctgaggccttcctggtgcccaccaggcactacggcttcctctccagaatgtggctttgcctgagcacagacagagtcagcatggaatgctcttggccaagggtactgggggccctctggccttttgcagctgatccagaggaacccagagccaacttaccccaacctcaccctatggaacagtcacctgtgcgcaggttgtcctcaaaccctctcctcacaggaaaaggcggattgaggctgctgggtcagccttgatcgcacagacagagcttgtgccggatttggccctgtcaaggggactggtgccttgttttcatcactccttcctagttctactgttcaagcttctgaaataaacaggacttgatcacaaaa

SEQ ID NO: 363349 - DNA, 547 bp, Homo Sapiens
ggaccttttcatcagttataacaagtgcacaactcttgttcaggggaagctgtgcagttgggagggcagagagtatgtgggagctctctgtactttgtgctcagttttgcgtgaatctaaaactgctctgaaaaattaagtctgtgaaaaggaagaaatgaactaccaagtcatgaaaaaaacacagaagaatcttcaatgtatattactaagtgaaaatgcatactactgctatggtttgaatgtgtcccctaaagttcatgtgttagaaacttgatccccaatgtggtggtcttggagatgggacctagtgggaagtgtttgggtcatggggccactaccctcataaatgcattaatgccattctcaaaggagtgggttcattatagagcaagtagttttcttataaaagaagtttgccttcccaccctctctttgcccggcctctgggttgatgaagcaagaaggtcctcaccaaatgccagctcctcgatcttgggcttcccagccttcagtcccacgagccaataaatttctgtgcattata

SEQ ID NO: 363350 - DNA, 472 bp, Homo Sapiens
cactgtggaactgccacctcgcgtctgtgtcacttgtaggtttctctgcctccaggttgcctcaacagcaggaggcacagcagtttcaccatctttgaggtgagggtgaggtgccccagctagaaagcaagatcgctgtgctaggtctgaccaaaaccagagggcagtctagtcctgggggtaaagccctcagatcccagggtacactcttctccattccctccacccacttgcctgtcaccccagtcacctaagcaatcactgggcccagaggagaggagacagacacacactggctcctggacctaaagggtatgagctggagctaaggccagctagagcttccactgtcagccctcactgtcagccccactgcacccccctgtgcctgctgggcactgggcactagctagatgctttaggttgcttcagctgatccttcaactctgtgaggtggataccaatattctat

SEQ ID NO: 363351 - DNA, 571 bp, Homo Sapiens
  misc_feature (12)..(12): n is a, c, g, or t
  misc_feature (64)..(64): n is a, c, g, or t
  misc_feature (135)..(135): n is a, c, g, or t
acccctgagggnaccccggccgaagtggggcaaggcctgaagaaggaggcccggtggaatgccnagcattaccccgccgggaacagagcaggggcagggcagttcctatgccctgggagctccctgaactggccnggactctgccccccacactcagaaagactcagctcactcaatgagagaatgtgatttactttatagaacgtataatcaactttgttgaataatttgttctattaaggctgtctaaagtatgtgatgtcttcatcatagtatgaagtgttgaaaattaataacgagcctagtttaggaaaaagctgcttaaaactgtggctctaagagagtaatcataaaataccttagataaaattgcactatggaattttcattgagtatgtttaaattattggcttgtctactaatacacatctgcttcaaaatgaacatatttcataaaattggcatcaattttaatgacgctcctggtatggaacctcagatataccctattggagacaatcctttgatcataaattctccccaactataaatcattttatgtctttatcat

SEQ ID NO: 363352 - DNA, 714 bp, Homo Sapiens
aagaaagtgagattaagtcaagtggttgggtcaggggaggcagccacctgccctggaggacagcctcgaagtatcgatccagcagggcctccacctctccctcctcatagtcccacacctggaaccgagagccatctgctgctccccggatcatggccgaaagcactggaaagggcagggaaaggtgaagctgcctcccatccacaccctcacagctcccttaccccttgggagaggcgcggtgctcagagcccaccagggaaggagctgagggctgggtccatagaaagccaggagggaggcttggggtgctcaccgcggccagactgcgggcggaacaggcacaggatccgcttgttaaaggccacggcccggcccagctcatagcctacacccaaggatggctgtgtcacttctgccacgaccacgtccgcctgctgcagccactccaggtcctgctcatggatgagcctgtcacccccagcagcctcttccccgcgcgcgcccagctcggcggccgccacgtgctcggtgagcactgtcccgaatcgccgcagccgagacacgatccgctcgtacagcgtcctgtcctcgcgtccgccgcgaatgctcccgcagaagtacagggccgggcggccaggctccccgcgctcccagctctcgctgcgccccggcaccatggcagcagccattccccagccgcccgcgctcccc

SEQ ID NO: 363353 - DNA, 865 bp, Homo Sapiens
  misc_feature (686)..(687): n is a, c, g, or t
cgggggccggagagcgcgggcggctggggaatggctgctgccatggtgccggggcgcagcgagagctgggagcgcggggagcctggccgcccggccctgtacttctgcgggagcattcgcggcggacgcgaggacaggacgctgtacgagcggatcgtgtctcggctgcggcgattcgggacagtgctcaccgagcacgtggcggccgccgagctgggcgcgcgcggggaagaggctgctgggggtgacaggctcatccatgagcaggacctggagtggctgcagcaggcggacgtggtcgtggcagaagtgacacagccatccttgggtgtaggctatgagctgggccgggccgtggcctttaacaagcggatcctgtgcctgttccgcccgcagtctggccgcgtgctttcggccatgatccggggagcagcagatggctctcggttccaggtgtgggactatgaggagggagaggtggaggccctgctggatcgatacttcgaggctgatcctccagggcaggtggctgcctcccctgacccaaccacttgacttaatctcactttcttaaattcttctattctcagacactgctctagtaccattccttcctcttagccccaggagcaaattaaaaggtacaggttaaaatccccccaacgcacactcaccaaacaaaattnnaccttgttcggccgccttccgcccctcaaaaactttcctagaacatttcctttgggcgcgcggcccccaaaaggaagggaacatgggccatagctggttccctacgaggaacccgggccgtgacctagggcctggaaatccctcccccaataaacaacgcccgcgcgggcacccgagt

SEQ ID NO: 363354 - DNA, 641 bp, Homo Sapiens
  misc_feature (164)..(201): n is a, c, g, or t
acgtacggctaggtacgaggcctgggtggcgaatcggcacgagggggacaggccctcccccatgttcttctgtctccaggaagggcagcggccctcccatcactggaagtctgcagtgggggtcgctgggggtggagagaacactaagaggtgaacatgtatgnnnnnnnnnnnnnnnnnnnnnnnnnnnnnnnnnnnnnncaaaggtccagccaccccgtcctccagcctgcaaggggtgtctggcgccttgcctgacacccagccccctctccccctgagccattgtgggggtcgatcatgaatgtccgaagagtggccttttcccgtagccctgcgccccctttctgtggctggatggggagacaggtcagggccccccaccctctccagcccctgcagcaaatgactactgcacctggacagcctcctcttttctagaagtctatttatattgtcattttataacactctagcccctgcccttattgggggacagatggtccctgtcctgcggggtggccctggcagaaccactgcctgaagaaccaggttcctgcccggtcagcgcagccccagcccgcccacccctgcctcgagttagttttacaattaaaacattgtcttgttttgaaaaaaaa

SEQ ID NO: 363355 - DNA, 579 bp, Homo Sapiens
  misc_feature (20)..(20): n is a, c, g, or t
  misc_feature (125)..(125): n is a, c, g, or t
atttggcctcgaggccaaanattcggcaacgagctgactgcttctcaagatccagaacattccttgacagagtatattcaccatttagaagtgatcccagcaaagattgggaggggtactaccangattctacttcaaagaaatcctgccacccgatgattaaacagtgaataaaatgtcatggctctttcctgcgacaattctatttgaggaaaagatttgtttttcccttttcccaaggaagctcgtgggacagcatgggcactactcttcatgtgcggtgacaccagcccccagatgccttgaattaagtgtcctcacctttatgcatgactgcaaagccagctggagcattttctatggagcctccgtatgttttaggcccatgaccttcgtgaggtgacgggcactcactcccatgagccctggctgtgtgctgttgtgtgcctatcggcagatccatccttcctgcctccaaggaggatacacagagaatggcttcctgttgttttgtttattttcttaacgtgtacagatggaaacttcatttaaaaataaaaaccaaaccactccaaaagg

SEQ ID NO: 363356 - DNA, 475 bp, Homo Sapiens
  misc_feature (447)..(447): n is a, c, g, or t
attatgtgaaaaaccaaatgctttaatgaggctatcaagaacaagtcgattatttcattggatacattaatatcgatccataatatacagtgctatggaccatacagaaattattgctgcatccaacagcaggtgactattattaacattacagtaccaagcatccgcaagagacagtcatttgtcattttttatcaagaaatagggctgttttatactgttattgacatcaactttttcccagtgcatttttcaaaaatattaataagttcattcctttgtgcttttaacttcctatgtattgtatttgttcttattgctttattgtttaaaaacaaccagaaagaattttgtcatcctatgtatgaccaggttgcttgtatgctttttggcaaagtcagaaggtttggtatttccattgccctactcagaggcagatggacaatnttggcattttggtcactccatatagagg

SEQ ID NO: 363357 - DNA, 542 bp, Homo Sapiens
agagggctcacactgctgggatatcctcacccacctgggcaggtaactcgctgggcctctctctcctgcctcagctcttcccctcgatccacacgggagatcacgtcggatttggaccaaggcagccctgcccctggggaaagatacaagagttggctgtgggtgccagaatcacagggaggtctacagggaaggtgcacgcactgagcgcctaatgattggacgtacaaatggccaacgccaagacttatttgttgtgtgcttagcacactgcagagaggctgagccaacttatttgttgagtgcttaggacactgcagagaggctgagctctgacaaagctgtttaaggctccgggtctgtgctgttcgagttaactgcactgtgacagtataagaaacatcgtcttctgtgtttcgaagacttactaaagaaaaaaacagtaaaatctctcaatcatttgttaattgattattatttcagtgtgtcaagatgataagattttagatagcttgaggtgaataaaatgtattattaaaatt

SEQ ID NO: 363358 - DNA, 1679 bp, Homo Sapiens
ctggcacaccgccgtgtctaccaggacatgggccagccacttagccactacctggtgtcctcttcacacaacacctacctgctggaggaccagctagccgggcccagcagcactgaagcctacatccgggcactgtgcaaaggctgccgatgcctggagcttgactgctgggacgggcccaaccaggaaccaatcatctaccacggctatactttcacttccaagatcctcttctgcgatgtgctcagggccatccgggactatgccttcaaggcgtccccctaccctgtcatcctatccctggagaaccactgcacactggagcagcagcgcgtgatggcgcggcacctgcatgccatcctgggccccatgctgttgaaccgaccactggatggggtcaccaacagcctgccctcccctgagcaactgaaggggaagatcctgctgaaggggaagaagctcggggggctcctgccccctggaggggagggtggccctgaggccactgtggtgtcagacgaagacgaggctgctgagatggaggatgaggcagtgaggagccgtgtgcagcacaagcccaaggaggacaagctcaggctagcacaggagctctctgacatggtcatttactgcaagagtgtccactttgggggcttctccagtcctggcacccctggacaggccttctacgagatggcgtccttctctgagaaccgtgcccttcgactgctccaagaatcaggaaacggctttgtccgccacaacgtggggcacctgagcagaatctacccggctggatggagaacagactcctccaactacagccccgtggagatgtggaatgggggctgccagatcgtggccctgaatttccagacacctgggccagagatggacgtgtaccagggccgcttccaggacaacggggcctgtgggtacgtgctgaagcccgccttcctgcgagaccccaacggcacctttaacccccgcgccctggctcaggggccctggtgggcacggaagcggctcaacatcagggtcatttcggggcagcagctgccaaaagtcaacaagaataagaattcaattgtggaccccaaagtgacagtggagatccatggcgtgagccgggacgtggccagccgccagactgctgtcatcaccaaaaatggtttcaacccatggtgggacacggagtttgcgtttgaggtagttgtgcctgaccttgccctcatccgcttcttggtggaagattatgatgcctcctcccaagaatgacttcattggcccagagtaccatccccttgaacagcctcaagcaaggataccgcccatgtccacctcatgtctaagaacggggaccagcatccatcagccaccctctttgtgaagatctccctccaggactaggctggaggaagccagtggggtcccccctgagtgggctgggccctctgtccacatgtggggacagggctggtgtggctgctcccagcctcttgctcagagctaggcccccaaattgccttcagccctaacatagtgtctgctgctgcctccctggggaccaggagctagcccagtccctggagctgtccttcattccgttaggaataacactgcagccctctccaccctccggccagcgagtggtcaaggatttttataaaaatcacgat

SEQ ID NO: 363359 - DNA, 553 bp, Homo Sapiens
tttgttgactttgctgcttattggcaccagggacagagtttctagatacaattttatggattggttttaatttttatgagtttgtctctgcagtgattcggtttctcagagtctcatggcatcatagtttttccagaatgacacagtagccaccggtggatgacagcccacgggcggcacagtcacttctgcctgttgctctgacaccaacccaggcagctctgctgtggcttctcctgggctctggcattagttggtctgtgtcacattgtcagaacaggtggctgctgtgtggtgccatcgagtccctgctggttccccttgtcctgggagggtcacccattgcccaaggaagtgcatccacctggcaggtgacctggaggagtagcttccccgaggacccccaggcttggcctgtgattgcgcaaacccacatttcctaagcacactggacacccttcgagtgtgggttttaacatccctgtgagattgaatacttgtgccacacatgtcacaaaagagtatggaaataaaagaaaatttatccgaaaaa

SEQ ID NO: 363360 - DNA, 461 bp, Homo Sapiens
  misc_feature (126)..(126): n is a, c, g, or t
actttgagtaatgtgtgtgtgtgctgattacatgtctgccttgaaatgcaggtcctgagcaaccaccacagattgtgaatttataaattaacctcttactgtccaatttcccttcttacacttgtncagtgaaaatgaagaaaaatatcctaactataaattttttcaccctatttttaagtaatagccatgattgtaagtgaggctgtgtggttccttgaactttgaactgaagtctgttctgatctagccaggtattttctaaggccttctatttttattcagttgaaaccagtcccaaagggttagataaaatatatcacactgttttttgaagttttcttctgaatgttgtggcagaaacacacactcaggttcttgtctcttccatattcccactcctgtagtagcattttctctgtactaggatggaaaatttgctaaaatataaagaattgcta

SEQ ID NO: 363361 - DNA, 299 bp, Homo Sapiens
cctgggcagaccttcagctaagtttgtaccctgtccttgcgtaagtctactggcacacacacaaagcacagcttgaaaaatctcagaagaagcaagagttctcttttaataggtgctatatctagtcaattctctgctgctcccttcttcctgccccaagttaaaaatattgccctgtaagttttcctgatgtactgtgtgggaagcacatggttaagttagttgccaaagggcaattaacaagggtattgcctaattaaacaagggaaaagaaaaatcactgtggtctgtggtctctg

SEQ ID NO: 363362 - DNA, 784 bp, Homo Sapiens
cactttccagaatagcccctcacccttcttccccttctagttgatccttttcacctccctgatccccttcatttcttcaccgcggttcctcgtcataggggttctcactctgaactttccctctctactacccatggcaggaacctagtacaggtctcccacccagggccttccaccctcggctcctgtgctgggagaaacttccaggcgtggacagcccagcctgaggcattccagtgctggggcaccgtcgcctaacctggtttctagctttgccctcactccccggaaaaactgacactgacacaggggccctttccttgcccctttagctggtacctcagtggggaggcttccttaccaagaatgagttcctgaaacccagggccagagacaaggacaacttaggggaagacggggttttcggtggagccaggggcaaatcttaatgggaccagtgggggataccccagagcccatggcctgactgcacagcctgcctggaggatgggtgcgcagctctgccctccctgaggcccaggactatgccagaagcgatggggtaccgtgtaggggagccaaggccagtagtttgggggtaggagtcccctagagtctcagaagactgggctctttggagtacagggtccccggcctctcctttaagattctctccccagctggaaggccgatgactgggtggtcgggagggagacccagctctcctttctgtcccgtttgcagcactggttttgtttccttaataaatttttagttatgaaac

SEQ ID NO: 363363 - DNA, 1053 bp, Homo Sapiens
atttgagtctttaatgaaagctcctaaaataaaaatgttaccattaaccgaaaatacagggtaagtaactcaacagccaggactcacaaaatcaagcccctaaaaaccttacaagtggtttctctgggcaatattcccatgccaaatgaaaaagcacaaaaacctgctttcaagaaaaggactgtgcgtattccatcccattttatctagatatagacatcccctttcagtctgtcatcagttttggtcatatggacaaaagtttccctaagagaacatattcatatccttgccccggttaaagagaagctgataaacagcaccatttccaaaggtacaatgacttttaaaattataacccaggtagaacacagcttcattcttaatatccacctttatctaccaattctcaggttggaggtaagggagaggcatatttacacatacaaagagtagcaaaaatattaacagacacttgaaaattatattacgattaatcaagaggagggattgggcagggggttagaaaggactacataaacacaattatcaaaaaggttttgatctggaaagacccacattagcaagaccatttatatgccagctcccattttttcttttctttcccctcctccatcctccacaacaagagcacatttatttttgcagttaactaaaatctggccactgcaccgtactatgaagattgctgcatgcataccttttcctctgagtgccactgctgacccgaatgttgggtgtctgtgggccctgactatgcaggaggtaagtgtctatggtgggcacggtgactgatgcctccccacttactttagggctgccgatcttgctctttccaagtttgcctttgctgcgtcgggactgctcatggtcaaactctaagtcctccagcctctgggtcagggcgagtttttgctggatagccattcgtaacaaagtgttcagagtcttcttctcatcctctgcagctgctaactgtctctgcatctcatccaactgggtgacatattcatcacatcttgttgcaaaccc

SEQ ID NO: 363364 - DNA, 895 bp, Homo Sapiens
agcggccgcagcgccacacccgaggcatcccagaacctcacggtgccgtcctcatggcccgtcagcagcagccctcgctgtgacggctcctgggccaggtttcggcccccagtgatgggccagctcaaggcactggagacaggctgggggctctgctgctcgccagcgctcacaatgcgggcccacagcttggcggggacactggccacgtgggccgagcaagtgattgcagaggagtgcagcggggccaggtatggggcaggcacagctggccagccaggagtctgcaggtccagcaccaccagctcctcttccagcagcacagccagggcctgggggtcatcaaattcatcctcgggccgtgtgctgtgcactgtgaagaagtcgatgatgcgggaagtgaagtccagcgtcaccaatgtctcggctcgaagcacacttacacagtggcggtcaccatagctggcacggggcatgccaccgctgaagatgataaagtggcccccagattcacagttccgccacagaatcttgttaatggccttgcagggaaaggggccgtaaggtgtggtggctaccgtgggctgcagcgttgggaagctgccggcatccacagaccagacagcatagctgccatcgctgtgtgagctgaccacagtgctgctatcacgcccccagcataggctctccagctgctggttccccaggaagatgtggtccacacactgcgaggcctggttccagatgaccagcaggccccggctgtagccaatgacaatcatttgtggggtcccgcaggtgttcctggagtgactccacggggcccagtgccttcccacagcggtagtcgtctggcacgctgcgcagaacctcgctttggggcaagcgtctgccc

SEQ ID NO: 363365 - DNA, 575 bp, Homo Sapiens
  misc_feature (14)..(14): n is a, c, g, or t
  misc_feature (47)..(47): n is a, c, g, or t
  misc_feature (69)..(69): n is a, c, g, or t
  misc_feature (508)..(534): n is a, c, g, or t
cacaccacccaccntaaaaggggttaagcatctgaaaggccagattnaatcagcattccctgaagaagnagaaggcaccaatgaaagagaggagcagcgggaccattaattactggtctgcagcaagaaggcttcttggaaataactgaactattaacttttctgagtataccatggaattccactgcttgacttccagaagcatcctccatctctgcaccccacactcatacagtagctatgcacatcctggaagtctccttgactgaactttagaactaagtacacattgttccacatcacttataattaaagaataagcatttattttacagtgattcttctttttaactatgtaaaaatttgcatacatgtgactgttctaactattaatactgccagagcttaatcctagatgtcctactgataaggtttgcattctaacaacacatgtaaataacatcactttaagagtaaaaaataaatagtaaacacatttagacatgannnnnnnnnnnnnnnnnnnnnnnnnnngatttagcttaaagagaaatatctaataaagcttttagctt

SEQ ID NO: 363366 - DNA, 171 bp, Homo Sapiens
  misc_feature (106)..(106): n is a, c, g, or t
gtgtgagccaccaagcacccactaccggtgcccccccaccccacatactctctcttttctcttgctaatctgtcttttgtcagtttaactcacaggccctcatttngctaaacctataagggtagaaggaaaggtttctcttccccaacaacagaaaagaaagctggataa

SEQ ID NO: 363367 - DNA, 484 bp, Homo Sapiens
tggcgccgcggccccaggctgtcactcaggttccggttcaaggtcaggacattcagcagaacctgtgtcaggccgctgaggccccgcgcagctccattggcccccagagcgaggtaggttccacagagcccctccgcgggtcggaccactgtgggcagcaggaaagagagtggccgcttccctggctgcactgaattctccaggctgggtgcagagtggttagctgtccggttgggccaggagaagtccagcatctggctgttgagcaggatccccgagggggtgataaggccgctgccaaagggctggttcagggagctaaccatggccacaatgaagtcatcaggtcccatgatcagcacctgggcagccgtgggagctccgtctagttcatagacaggcaggagtggggcaggggctgcctgggagtcattgatatggccccggaggtaggcggcctccaccttgctgagcatgtcatccc

SEQ ID NO: 363368 - DNA, 480 bp, Homo Sapiens
  misc_feature (52)..(185): n is a, c, g, or t
ctggccctggttgatggcggcatgctgggcagtgcacgtaagacgcaccatnnnnnnnnnnnnnnnnnnnnnnnnnnnnnnnnnnnnnnnnnnnnnnnnnnnnnnnnnnnnnnnnnnnnnnnnnnnnnnnnnnnnnnnnnnnnnnnnnnnnnnnnnnnnnnnnnnnnnnnnnnnnnnnnnnnnnngtaaccattccaacccccagaaatttctctctggctgacttgatccacagcgcctccatcgccatccctgagtgccttgttgtggaaaatcttactttatcttggttctgtttggtataatcggggaaagtctgtattctttcattatgtaaaacaacttatctctcattgtttcatctcctttctgagctctgctctgccagctctctttccaaaaccaaaatggctcttcaagttattttgtaaataataatgggccatctacttcttaacataaatgaatgattttccaagg

SEQ ID NO: 363369 - DNA, 2267 bp, Homo Sapiens
  misc_feature (1306)..(1334): n is a, c, g, or t
aggctggaccggtccggattcccgcgatgtggagaagcttctcacggctctgcgggggacacctggcggcacctggcgggcgagctgggctaccagcccgagcacatagactcctttacccatgaggcctgccccgttcgcgccctgcttgcaagctgggccacccaggacagcgccacactggacgccctcctggccgccctgcgccgcatccagcgagccgacctcgtggagagtctgtgcagtgagtccactgccacatccccggtgtgagcccaaccggggagcccccgccccgccccacattccgacaaccgatgctccagccaacccctgtggagcccgcacccccaccctttggggggggcccgcctggcagaactgagctcctctgggcaggacctcagagtccaggccccaaaaccacagccctgtcagtgcagcccgtgtggccccttcacttctgaccacacttcctgtccagagagagaagtgcccctgctgcctccccaaccctgcccctgccccgtcaccatctcaggccacctgcccccttctcccacactgctaggtgggccagcccctcccaccacagcaggtgtcatatatggggggccaacaccagggatggtactagggggaagtgacaaggccccagagactcagagggaggaatcgaggaaccagagccatggactctacactgtgaacttggggaacaagggtggcatcccagtggcctcaaccctccctcagcccctcttgccccccaccccagcctaagatgaagaggatcggaggcttgtcagagctgggaggggttttcgaagctcagcccacccccctcattttggatataggtcagtgaggcccagggagaggccatgattcgcccaaagccagacagcaacggggaggccaagtgcaggctggcaccgccttctctaaatgaggggcctcaggtttgcctgagggcgaggggagggtggcaggtgaccttctgggaaatggcttgaagccaagtcagctttgccttccacgctgtctccagacccccaccccttccccactgcctgcccacccgtggagatgggatgcttgcctagggcctggtccatgatggagtcaggtttggggttcgtggaaagggtgctgcttccctctgcctgtccctctcaggcatgcctgtgtgacatcagtggcatggctccagtctgctgccctccatcccgacatggacccggagctaacactggcccctagaatcagcctaggggtcagggaccaaggacccctcaccttgcannnnnnnnnnnnnnnnnnnnnnnnnnnnnggaggagaaatctcacttttctccatgagttctttctcttgggctgagactggatactgcccggggcagctgccagagaagcatcggagggaattgaggtctgctcggccgtcttcactcgcccccgggtttggcgggccaaggactgccgaccgaggctggagctggcgtctgtcgtcaagggcttacacgtggaggaatgctcccccatcctccccttccctgcaaacatggggttggctgggcccagaaggttgcgatgaagaaaagcgggccagtgtgggaatgcggcaagaaggaattgacttcgactgtgacctgtggggatttctcccagctatagacaaccctgcaaaggactgttttgtcctgagctggccagaagggggccatgaggcctcagtgaacttgccaccccctccctggcctgttctgttttgcctgaagtgggagtgagtgtggctcccctctatttagcatgacaagccccaggcaggctgtgcgctgacaaccaccgctccccagcccagggttcccccagccctgtggaagggactaggagcactgtagtaaatggcaattctttgacctcaacctgtgatgaggggaggaaactcacctgctggcccctcacctgggcacctggggagtgggacagagtctgggtgtatttattttcctccccagcaggtggggagggggtttgggggcttgcaagtatgttttagcatgtgtttggttctggggcccctttttactccccttgagctgagatggaacccttttggcccccgagctgggggccatgagctccagacccccagcaaccctcctatcacctcccctccttgcctcctgtgtaatcatttcttgggccctcctgaaacttacacacaaaacgttaagtgatgaacattaaatagcaaagaaagg

SEQ ID NO: 363370 - DNA, 441 bp, Homo Sapiens
  misc_feature (101)..(101): n is a, c, g, or t
ggaagttggccttcccttcctagtgctatggtttctgccattggccatgatttcagggagctggctgaggccggctgaggccacacctgtgccagtggggncttccctggtgctgcagcacttgtaaaccacacacacagcctctctccctggacatacgttagcacattggcattcagtattggtggcctggcatggtaggtactacccaatgaagagtgtactatatattttcattactataggccatacttatacagacgtgtatatatatttatataagatctacctatcttaggatggaaccttggggaaaaataaaattgaggggaagtaaaaagtatgtaacacttccagttgtgagccaagattgtaaccagagagcagccaggagcttcctgtcagtaaccatgttttcaataaatactctttcatgtacaa

SEQ ID NO: 363371 - DNA, 469 bp, Homo Sapiens
acattataacaaaggactgtagcaagggctatgggagttctgaagcagaaaccatgggctaaaaccaacatacatcttaataccagataccctaatcccagtcctaacttcatttaaccttggtcacattgagtcattccaggatgagtggctcaagtatttcctcagggaaaatacttctgtgccccctgatttgagggtaagaagtagataatgaggccactgtgggtgttattttttcatgtctggacctcagcctatatcctgagactaagtggaagtgggaaaagagtacaagagaagagacaaagtggggatatttgtaaggcttagatgagatagtgtttttttagaaaaaaactttatcttaccattaagtaaaatgtttgccataggctttctggggctttctctttttaaagtcagactgttgaaggtttcttctattcttatttgttaagagttttct

SEQ ID NO: 363372 - DNA, 503 bp, Homo Sapiens
ggtcacacatggaaataagtacaaaagtaatgactaaaataggccaagttgaccgagcactttgtacataggggtattatacgactgcaaattgtgtgatgtttaattgtcacagaaagagatactcgttttaagcacttttagcctaatgtactggaaaattgcttaatggatttttatactctattggaaacatttccatattggtgaaatgccactcattcctttttctgaggagcaaatcttgagtagcaatgggaagaaagcctggcaacagccaccatttgtcttgtggacctgacatgcttattcacctagaaaaagaagaaattgctaaatgcacactgatacctcttaggtaaccacaggttttcattttgtgctgaattattagtcatttttcctttatgtttttagagtatgattcagagaccaatttattcccaaagaaaattgccattacatctactaagttttcatattaaaacattttctaccaaggg

SEQ ID NO: 363373 - DNA, 793 bp, Homo Sapiens
aagggggggccaccaggatgattattagacaaaggctctcagcccgcggacgcgcggccctcccacagagtggtacaaaagaaggtggtaccggtccgggaatctcgggatggaaaaatggggccacctcttgccagcagtagcagggctgcccacgcccctttctccccatgccccatccagcacttgggcgactcatgcctctgcctcagtgggcctgtgggagcctactggagcccagcacttactccccctgagcagcgagcctgcgtctgtctcagctgtccagcgctgagggccagggtcttgtgctgtggggctgggggatgccctcttttctatatttatttcatagaaagtctcctgcgggagcggaaatgcagtccggcctagggctcccagcccttgactgtcctcctgtgagggcctgaagctgggccagggcccgtcgcagcggagccccctctcagcagcccaccgggtccctccaggctgctgcccgtgcgtggtctttctcctccttttcaaagcaatagccgccgggtctgcaaagccctgtcagacagactgggcccttccaaggtcaagccatgtgtctgatgacattcctggtgaagcaaaggagaggaggatgggtcagccctcactgggtgtcacacactgagagaagtcctattgtaaagaaacggaaaaagtcacaaaaaagtttgtataaagacatatttttgtactacatggggactcttcctgcatgtcagcaataaaacttcctgatctggaaccccaaaaaaaa

SEQ ID NO: 363374 - DNA, 1995 bp, Homo Sapiens
aatgggttactattcttattatgcttcaggggtcagacggtgtttctccatctcactggataaatggtactgtccatcatggatgtaaagggaatcaaagttcagtcagtagataagcagtacaatgatgggctgtcccacttcggtcattagctctgtctcaccccacaagatatgaactgatagtagataaaagcagagttgggagtaagaatcctaccaaagggaaaatagaacagacacaagcaagtgaaaagaagttttacttcggtggctcaccaatcagtgctcagtatgctaatttcactggctgcataagtaatgcctactttaccagggtggatagagatgtggaggttgaagatttccaacggtatactgaaaaggtccacacttctctttatgagtgtcccattgagtcttcaccattgtttctcctccataaaaaaggaaaaaatttatccaagcctaaagcaagtcagaataaaaagggagggaaaagtaaagatgcaccttcatgggatcctgttgctctgaaactcccagagcggaatactccaagaaactctcattgccacctttccaacagccctagagcaatagagcacgcctatcaatatggaggaacagccaacagccgccaagagtttgaacacttaaaaggagattttggtgccaaatctcagttttccattcgtctgagaactcgttcctcccatggcatgatcttctatgtctcagatcaagaagagaatgacttcatgactctatttttggcccatggccgcttggtttacatgtttaatgttggtcacaaaaaactgaagattagaagccaggagaaatacaatgatggcctgtggcatgatgtgatatttattcgagaaaggagcagtggccgactggtaattgatggtctccgagtcctagaagaaagtcttcctcctactgaagctacctggaaaatcaagggtcccatttatttgggaggtgtggctcctggaaaggctgtgaaaaatgttcagattaactccatctacagttttagtggctgtctcagcaatctccagctcaatggggcctccatcacctctgcttctcagacattcagtgtgaccccttgctttgaaggccccatggaaacaggaacttacttttcaacagaaggaggatacgtggttctagatgaatctttcaatattggattgaagtttgaaattgcatttgaagtccgtcccagaagcagttccggaaccctggtccacggccacagtgtcaatggggagtacctaaatgttcacatgaaaaatggacaggtcatagtgaaagtcaataatggcatcagagatttttccacctcagttacacccaagcagagtctctgtgatggcagatggcacagaattacagttattagagattctaatgtggttcagttggatgtggactctgaagtgaaccatgtggttggacccctgaatccaaaaccaattgatcacagggagcctgtgtttgttggaggtgttccagaatctctactgacaccacgcttggcccccagcaaacccttcacaggctgcatacgccactttgtgattgatggacacccagtgagcttcagtaaagcagccctggtcagcggcgccgtaagcatcaactcctgtccagcagcctgacatgacagagcacagctgcccaaatacaaagttctttagagcactgaaagaaacacaaagccagccaggaggaacagtaactcttccttcgggtggaagctttcatcgagttgaacaggacttaaacgaatcatcagggaccggatatttcttatttctcatttggattcttaaccttgaatccaaagtgtctgcaatggacaacaattgaaggagtggcaaacttacttgtattgagagcacacgcaattcctactggtgaaattactgtttctgtttctaataaaatagaagggattccaaataaacacttgcacac

SEQ ID NO: 363375 - DNA, 615 bp, Homo Sapiens
  misc_feature (29)..(29): n is a, c, g, or t
aaagagatcgatgggtacgtttacttganagtgttggcctaaacccatagttcctgatggaggatacttcatcatcgctgatgtgtctttgctagatccagacctctctgatatgaagaataatgagccttatgactataagtatgtgaaatggatgacgaaacataaaaaacgatcagccatccccgtttcagcattctgtaactcagagactaaatcacagtatgagaagtttgtgcgtttctgcttcattaaaaaaaacagcacactggatgctgctgaagaaatcatcaaggcatggagtgtacagaagtcttgatttgtgcagaatggaataaaggtttctgttagatgacctagtatggaattgttacttagtgctgccacctgctggatgttaaaagaatgtagaagcgaggcctggaggtgaagcagccatcttccattcatgccacagctagcatgagggtgaatgtctatataataaggatggcagagcagaaagatgaaaagagactggaactctggaagcagtttgaagccactgtacctacccctaccttgataaggatgagacaaataaacccctatttgtttaagccactgtaaaaaaaa

SEQ ID NO: 363376 - DNA, 377 bp, Homo Sapiens
gggacctagtatggaattgttacttagtgctgccacctgctggatgttaaaaggtatttcagtacaactggaatttaaatatttccattgtttttccaaagcagttaacccaactcctaacaacattttcgggggatctgaccttttttttccagttgaaatgtattaacacaccttccacaatcattttataagagtcagcataacatagtggataagaaatgtgagatgtttaacctctcagtaactcggttctctcattataaaataggaataaaatcagtacctgtttcatatgaaggtcgtttctgagaattaaatggactaatgtatgcaaaaagcctggcaaacaataaacactcatctgactttaaaaa

SEQ ID NO: 363377 - DNA, 691 bp, Homo Sapiens
  misc_feature (416)..(416): n is a, c, g, or t
  misc_feature (468)..(468): n is a, c, g, or t
ctgaatggtactatacaaagcacccttttggccacattcctgtcctggagaccagccaatgtcaactgatctatgaatctgttattgcttgtgagtacctggatgatgcttatccaggaaggaagctgtttccatatgacccttatgaacgagctcgccaaaagatgttattggagctattttgtaaggtcccacatttgaccaaggagtgcctggtagcgttgagatgtgggagagaatgcactaatctgaaggcagccctgcgtcaggaattcagcaacctggaagagattcttgagtatcagaacaccaccttctttggtggaacctgtatatccatgattgattacctccctctggccctggtttgagcggctggatgtgtatgggatactggaactgtgtgagccacacgnccaaccctgcggctctggatatcagccatgaagtgggaccccacagtctgtngctcttctcatggataagagcattttccagggcttcttgaatctctattttcagaacaaccctaatgcctttgactttgggctgtgctgagtctcactgtccaccccttcgctgtccagaattccccagcttgttgggagtctacgtcacggcttgtcttgggaaccaatccgtctctctttcttttctttgaagttcccaataaaatgaaaacaggaaatgt

SEQ ID NO: 363378 - DNA, 671 bp, Homo Sapiens
accattcatgctttaatgaacacatatacatgaaaataagatggagagttctagtggttttgcccttcctcttcaacggcgaaattgctatttagaagtgggtagcgctcgctctctgatgggactgagctggcatagagacaaggttgccactgccccgtgtcctgtgatgtgacttcagagcttccaaaacgcaggcaagcacaacggatgtctcctgggcgaccatttagcacctttgatttcacttgggcttcatgacttctgttgtctgttcccggcttcttaccaagaaattcttgttcttttggttttctagattgttcttctactcttcctctgtctccgctgccaggtgagcccactcaggaggaggacgctgatcagcaggaaaacacagccggccactgctacctggtactctgttgtaaatatggacgtctccatggttgcagccatttctgtctgtatttgaaaatctgttgttgtgacgaggcaggaagtctcactctcaggacggccttcggggcttgcctgaggcttctcttcacctggaaactgactggtctccattccacctgtgcatatgagctggggctgggtccaccttgtcttcccgtgggtcattttgcagacgctctcagcaggacctctgtgtagagccctgtacc

SEQ ID NO: 363379 - DNA, 168 bp, Homo Sapiens
aacaagggggcagtcatttaatgcagaaatccagttaacataaagagacagaggttcgaacaacaggtcttcaaacaatactgcatagtgtcacgagttagctcttaagcacgtttgatctgtttatcttatgatttcgattccagtacaaagacagagaagagactt

SEQ ID NO: 363380 - DNA, 632 bp, Homo Sapiens
  misc_feature (479)..(479): n is a, c, g, or t
gcggccgcggagccgtgggtgcaggctggccggtgccaaagcgtgtggccaagctgtcaccgaagaaggcgtagagctcccggtagatgtcggccagggtcaccgaaagagaagggtcctccggccccgcgccccctggcggcagcgggaggccggacccaaagctgggttctgcaccgcccccggaggacgactcttgaaagagaaggctgtcccatggcaggtcgtccaggcgccggcaccccctgccacctgggccacccctgttgggctctgctgcctgggccttcatcttcagcagtcgctctaccgccacctgtaagagccaaggactaagataggcaaaaaattcgaggaacctgggcccatcaaatattccaaagtaagcctgcttggctgctaagctcatgcagggaagggaggctggaaggggacggtactcaccagaatggctccatagactttgtgtccatctgctnttgacctgggcattagatactgaataatcatccagcacagcctgcaagtttgtccagtaggtggacaggtgtgggtacaggactcgttctactgcctggaaggaagagaaggaatacagttagcatgtctttgatacttattccctctcaagg

SEQ ID NO: 363381 - DNA, 506 bp, Homo Sapiens
gcggccgcccggggacaagaaggagccggcggcagccccggactcggtgcggaagatgccgcagctgacggcaagcgccatagtcagcccgcacggcgacgagagcccccggggcagcggcggaggcggccccgcgtcggcctctgggcccgccgcctctgagagcaggcccttgccgcgcgtgcatcgggcgcgcggggcaccccggcagcagggccccgggaccggcacccgcgacgttttccagaagagccgtttcgccccgcgcggcgccccgcactttcgtttcatcatagccgggcggcaggctgggaggcgctgccgcgggcgccttttccagactgccttccccgcgccgtacgggcctagcccggcctcgcgctacgtgcagaaactgcccatgatcggccgtaccagccgccccgcccgccggtgggcgctctcggactactcgctgtacttgccgctctgagtcagtggccccttcgttccttgtaaataaatcc

SEQ ID NO: 363382 - DNA, 214 bp, Homo Sapiens
  misc_feature (68)..(76): n is a, c, g, or t
ctttaaagaccagtgtgatagtaggccatgcatctgagatacgatattccttggtaactagagggagnnnnnnnnntcaagtaggttcaggcttatgttgtattttgagagtctggttttatttgaacaaaaataactctacagaaagctcttgtaaataatgctcaaatttgcacccgacgatcaaatccattaaaaatgaatcttgtatatg

SEQ ID NO: 363383 - DNA, 520 bp, Homo Sapiens
  misc_feature (459)..(470): n is a, c, g, or t
aggcagggagagcatgggcaatggagacccaccaatgatccccaaccccggtgggtactggctgcctgccctgggccagggaatggctccttataccaaagatgctggcacatagcagaacccagtgcacgtcctccccttcccacccacctctggctgaaggtgctcaagagggaagcaattataaggtgggtggcaggagggaacaggtgccacctgctggacaatcacacgaaaggcaggcgggctgtgtactgggccctgactgtgcgtccactgctgtcttccctacctcaccaggctactggcagcagcatcccgagagcacatcatctccacagcctggtaaattccatgtgcctctgggtacaaaagtgcctcaacgacatgctctggaaatcccaaatgccacagtctgaggttgatatctaaaatctatgccttcaaaagagtctctgnnnnnnnnnnnnaacctggtagacggtataaaagcagtgcaaataaacacctaaccttctgc

SEQ ID NO: 363384 - DNA, 536 bp, Homo Sapiens
  misc_feature (46)..(55): n is a, c, g, or t
ttcaccacgtgaataaccagcgctccaaagtgtttttctgctttgnnnnnnnnnnttccacaagcttttaaaggtgcatttaagaatccatgtgactttagaatggaactgccggccctggcaactgtcacgtgtgctagaaggttcgatgcctctggaatgcatgtgatactcatctccaatttgtttccttgattgcatttttgttcttttagcagatctgtccctgtgggtggtgtctaagaagtcggacaccttggtttttgtgttagattgagctgggcagctgcaatcagcttctttatatgcaaattaggcacgacccatctgtggttcctggttggtggctaatgaagtgaggggagggagggatgtcaccccaaaagtaggccctcccattggctttggccaggccagacacttcacatcgtttacatggttctgtgtaattttaaagtttatgtgtataaagcgaagctgtttctgtgaaactgtatattttgtaaataaatatattgctactttgaggttcatga

SEQ ID NO: 363385 - DNA, 482 bp, Homo Sapiens
  misc_feature (19)..(19): n is a, c, g, or t
  misc_feature (33)..(33): n is a, c, g, or t
  misc_feature (84)..(84): n is a, c, g, or t
  misc_feature (157)..(157): n is a, c, g, or t
  misc_feature (160)..(175): n is a, c, g, or t
ccccaaaaacctgttgggncccaaaaccccggnaccaaatgctgctttttgaggtggcactttttcaattgccctaatccccanacctcccacagttcagtggcagggctcaggatttcgtgggtctgttttccctttctcaccgcagtcgtcgcanagnnnnnnnnnnnnnnnnccctcaaagtctgcaactttaagcagctcttgcctaatcagtgtcctcacactggccgtagaagtttttgtactgtaaagagacctacctcaggttgctggttgctgtgtggtttggtgtgttcccgcaaaccccctttgtgctgtggggctggtagctcaggtgggcgtggtcactgctgtcatcaattgaatggtcagcgttgcatgtcgtgaccaactagacattctgtcgccttagcatgtttgctgaacaccttgtggaagcaaaaatctgaaaatgtgaataaaattattttggattttgt

SEQ ID NO: 363386 - DNA, 794 bp, Homo Sapiens
  misc_feature (581)..(581): n is a, c, g, or t
  misc_feature (597)..(598): n is a, c, g, or t
  misc_feature (624)..(624): n is a, c, g, or t
  misc_feature (630)..(630): n is a, c, g, or t
  misc_feature (732)..(732): n is a, c, g, or t
gcggccgcgccaggtgctctgtgagaagtgcaagagcacgctgagccccccggaggccagccccggacccccagccgcgcccagggcccgcaggaggctgggcagcggcccggacagggagctccgcaagccggaggagccggagaacggcgagcccacggctgcggccaccgccaggaggagcaagagggagaggcgcgaggaggacagggccccggcagagcaggtcccgcggagcccggtcatcaagatctcctacagcacgccccagggcaagggagaggtggtcaagatcccctcccgcgtgcacggctctctggagcccttccgtccccagcaggccccgcaggacgacggcagccaggaccccgaggtgctggacagagagtcccgggaccggccgtcctgcgcgccctcggcctccatccccaagttgaaactgacacggcctgtgccggccggcgcggacctgccgccccctaagatccgcctgaagccccaccgtctggaggacagcgagcacgagcccgtgtaccgggccgagctggtggggagctgaagggtacctgcggacagctcgncggcgcctgtgcgacnngcctgccggtggctgccgactgtctnctgagntcggtgagacgatgactcagagtgtcccaggtcaccagacgcaagcctgctttctgtagctgcctgaggagaccgccttgccgatctggctgagggcaattncctatggagtgattatcggatatggctagtgtgtctggtaatgtatcgtccattcccaacct

SEQ ID NO: 363387 - DNA, 1184 bp, Homo Sapiens
  misc_feature (287)..(299): n is a, c, g, or t
tgaattactaaaaggccatagttgtaatttgatagcatctggtcagtggttatcactgactatcttcaataacaattactcatctaagaaactcttccttttttctttaaaatcgttggtgctgatccagacaagccctgggctgctgctcctcatcctgataggatctagcttctagactgacccctctcaagaacaaaatacagggagggacttgttctggattccctttgggcaaatgcagctgcaatactcagcaggcttggcctcaacttccagggctttgnnnnnnnnnnnnnaaatgtatactattaaagttggattattaatctaatatttgtgtttgccttggggactaataaacctcacaacctgaggatcacctcagttaaaccaaggctttgtcatcacagagctactcagcagaggtctgtctcagctgttccttgaactaaggaaggagtcagtcagctaggagagaaaagtccttttgaaagcagacagcatcatgtaccttgctgactcagctacatacataaggcctcaagccttgctgccagttcttaaaggaactgtgttctcttttcacttttcctggcttatggggcagtagagggtttccgacctcaaatgccaataccaggtaggtagaaggaccttaggctcaactgctggctcctcgtaataacacacactgtattctgtggtgggtgccactctgctctgcctgtgtcatgtcacctttcctaatccagcacatcctcgcccaagaaaaccctattttggggtcattcattctattcttatttctctcttatttgttctgatgtttcagttggacttgattccaccgcaggctctggctccagaggaagagatgggggctttgtgaactgggatgttcctccagcacctgaggggagcgtcctgtatgcagctgctgaagacattgcctgtcctagagcttgattagagcccagaggctgctggaaactggcaggtttgctggttgaagtggtctggtgctttgatttgggatctttaactggtttggtccagaccagtgcctccccaacctggagagcagctcccaacttttgagccatctccaccatctcagagtcaaattccagagagctattgtcctcgagtaggctgactttcttctccatctcctggtattg

SEQ ID NO: 363388 - DNA, 827 bp, Homo Sapiens
  misc_feature (309)..(309): n is a, c, g, or t
agcggagtgtggccactaggcttaggcggatagcctcgcagaggagcctagtggggagggggacgaagaaggaacattgggactgtgggatgtgaaatggtctcttcggaggctgccgggattgaaactgggcaaggtcccaggcccgagtagagccagagcgtgctacgcggcgatccctgagccacggggttttcagcgcccgggaagccaggcttgccaggttggggcggctggcggggcagggcttctcggtccgtcccaagtccaggtaggcgctcgcgacccgcgcgggcagggagaacgcgnctcccacagtgctcgcgaggtgcagtgcgcccctgggggctccggggcagtcgggccaggtcggcttggcgcccagggactggccggacgggctgggcctttggcgggggtggaagaggaggttgccgcgccctgccaggcccaggtgtcgtctccgggggcggggtttggagccccgcagcgggagattcccggccggactggcggacgagcgtcgagagacagaagccgaggagaggaggctaagccgggcggcgcggggagcgcactgagcaggcaaagtcgcaggggccgccagcatgttctcccgaaaccaccggagccgggtcaccgtggccagggctccgcctggagatggagttcaaacgcggcgcttccgactcagcctcttcaagcgacctgcccgaggacacggagttgcagaggaagctagaccatgagatccgggatgaagggaagggccctgtaagctgcttgggcagccttggtccaggagagcaggctctggaggccaccag

SEQ ID NO: 363389 - DNA, 1054 bp, Homo Sapiens
  misc_feature (316)..(335): n is a, c, g, or t
  misc_feature (947)..(983): n is a, c, g, or t
ttttagcaaccaggtgtctttatttttcggaaagttcgtcgctgggttaacaaaatcgcacctgccggtttgggtgacacctctggccaccatgcactgggccccaagaagagaccaccctgagccatggccctgcaggcaagcaagggacagctgcccagactcagggcccagtaacagtacagaacgaaccaactgaattcacggcttccctccaagctttgaaaggtagcagtccaggctataaaactctagaagcattgcgtaagaagtgttaagtctacaacaaatacatcttgtaaaaactcaataaatnnnnnnnnnnnnnnnnnnnnaacttgtaacatctaataacatcggaacctgcacacagggccggcccctccctggaaaccgtctccctgcctgggacacacagcaattagaagaatttgtatgaaaataccagcttgctttgaagtccaaaaaataaatctcctaaagaaaaatcctatagaaatctaattctcctgaaaaaggacaaaggaaataaaatatcttcactggaatcacctccaactattaacaaccttttaggcttggaggggatcctccagctccggggcaggctggacgtacattcttggccgtccctctatcggcgggataaaccttctcggttgtcaataagttaaaaattaaaactctccgccatgtggccagctaaatgctggaagtgttggggtgtgggaacaagagtgccaggggcccataaatagctttacaaatatacaggtccagttttaaaacaaaactgcggtgccagaaaaagccctggtcctctgcttgcatgggtgagaccccctggggcctccctccacgcccccccacgccccgcccagggccatgcctgcctcctgtgcccccagggtcgcaggcctccgttgtaccagccttttcctcttccnnnnnnnnnnnnnnnnnnnnnnnnnnnnnnnnnnnnncacagcatctatttatagaaatgtacactagtttccggaataaaccttttgcataaaaggtaaaggctccc

SEQ ID NO: 363390 - DNA, 906 bp, Homo Sapiens
  misc_feature (54)..(138): n is a, c, g, or t
gctgggtggcgaattcggcacgaggctaattttgtatttttagtagagacagcnnnnnnnnnnnnnnnnnnnnnnnnnnnnnnnnnnnnnnnnnnnnnnnnnnnnnnnnnnnnnnnnnnnnnnnnnnnnnnnnnnnnntgagccaccacgcccagccttttgtgattacttttaaaattcagctgggtttgacacttggaggcttaatttctgggaatgactggacacagcatgtggctgggaccctctgaacaacctctgacctagtggagaagcaggtggtaatgactgtaggtatggatagggaaagactaggcgggcaaatacttgtcgtgtgtcaacaggtgtattttgctaaatgtcggggacacattccaagaggctaaaaagcaaatttctgtacattacgagatttgtgagtccttacgaaaggctcagaagagggctccacctagcacaatacctgacatagaaagtggtcagtgtctgcagaatgagtcggcatgaaccgtactttccttggcagggttattaggtggtaaatacctgcagaataatgggattgtactagggtttcttctggctttagaaacccatttgtttactaatagattcccagaggataccttgatctcaccaagctatttgccagaatgtctcctgatggcctcattgaagaaagggggactatgagccagatgctggtgccctgaagatttgtagtttgtgggatagtcttaacttggcagggtttgattaacagaatgaagtctgttccttagagggaagtctttgcttgctgccctgacctgctggacactgttaattgggatgaggtcaaagaaggcatagttaccacatttgcaggagaccctaacctggaaatagtaaattacataacattca

SEQ ID NO: 363391 - DNA, 166 bp, Homo Sapiens
attgactacatgttgaaatgtatcttggatatattgaattaaatcgtacatattattcaaattgattttaccgggcttctgggctagtaggaagtgtgaaataagtgtggctcacagatttttattggataacactgccctagataataacaatacattaattgag

SEQ ID NO: 363392 - DNA, 832 bp, Homo Sapiens
ggtcctccctcaggctttctccctcagtcttggcttctccagggctctggggtgtctggagctaggcttggccctaccattctggggccatttccaccacagttggggctctcctgccttcacgcgtgggtgtctgctacttccccatctttaaaatgctgccagagcgattgcggcccctcaccttgtccacgtatcaggaatgtgaatgtgggacctttcctccatccctgttgtccggagccagctcactgtcttccacactggtgctaactggcccaggcactggagtggaatagaatgcagctggaggctacgcatggcctctgcagcacacgcagctggagagggcttctgtccctgtcagcggcagagggcgttggggctggccggggcaccttgtccctgctatggtccacgtgctcacgctgtccacctgccaggtggagtgtatgtggctgtggccctccctcgtggaggtgccgtgctttaaagaggccttagtgcccgggatgggcacagtgttttgaagggaggtgggagctcttgctctcctggtcactgcagaatgacagagaaggtgaagctccatgcatgtgtgcgcgggtgtatgtgcgctcagggtctctgtttaagtatcagctaaagatgtgcttcctccgtgtctgtcatacactgagaccaacaggctacagtgtccctgattcttggaaaagcctggagaagctggggagatgcggttcacaatgcctcggtataggaggctgtgttgagctgacattcaaatggattctttaataataatgaaactggcgagtatttattgtgcaaa

SEQ ID NO: 363393 - DNA, 538 bp, Homo Sapiens
aactatatcaattcctaatttcattctattgtgtaggagaacataatttatgtattatatccttttaaatttagagaggtttgctttatagcctagcatatggtggtgtgttctagagaatgttctatgtgcagttgagaagaatgtatactttcttgttgtgtggagtgttttatagatgtttgttaggtctagttgtttataatgttatatcttttatttcctagttgattttctgcttggttattcattatagaaagtgagacattgaagtctccaactcttatttctgtcagttgtgtgcttggtgtattgtagtgttttgttgttgggtgcatacatatttgtaattgttagcttttcctgatagattgacccttctatagttataaaatgtctctaggaattttttgttatgtctattttgtatgagattagtatagccactccagctttcttgtggctgctgtttgaatgatgtaccttttctcatccttttactgtcagtctatttgtatctttgaataaaaggtgtatc

SEQ ID NO: 363394 - DNA, 458 bp, Homo Sapiens
agatgctgcataaatgatttttgatgtcaaagacaaacacattccattgttttaaatattctattatgtaaacaatacgcagagggaccatatctactcttgtccatattatttgtgatggtaaaacatgcatttgcaataaattaagctttctgggaaggcaagcagtattggagccaaacgactgtctcggaacatgtgtgtgttatctcggttcatatcaagtccaaagctaatggagccttccccgccatccagggaggaacaccaggaccccggagtttcttcttagtgctatattttaaagttgcattgacgttttcctccccttccttttgtgcaagttggaagtagcagtgttctaaaagatggtttgacgtttttgctgttgttttatgtttttaaaaatgtatctgctttgtgtttggaaataaaaatctctattttggtctatgaaa

SEQ ID NO: 363395 - DNA, 905 bp, Homo Sapiens
gagcgagcgggcgggcgggcgagtgcgcgccccgcagcaggagcgaaatccgctatccgggtcttgccggcagccgagccgcagagttctggtcgactccagcgcttgaggcgaagtggccggtgaggccgggtgggcgggagagggaccggaggaaaggagacggggcgctgcgccaagttatcaaggccgcgatcaaagtcggaccaaggcagcgagtcgacagcaggtttccagaagtgccctaacaggactgactagcagccaggaggcgcaggaaggggcaaagagcgtgtggagagcttcgcccccggcgaggatggacgccccgggcggagggagcgctcgggttgcaacacccagtctggctgcacagctcgtaacccctgccctttggcggcaaacaagacgcatctaatgaccagccagccttcgtcttcctcctctgatcatcggacctattttcccccttttgtcgctctcctctttttttgtctctccaacccatgcggtaaactggtggtgcccaaggccctccatcgggtccctgagagtctcccaactgccggtccttagcgccagcctgcaagcccagacccgcctcgccaggctgcctgtgagcctatttttcatgtagctcttgccaaaagccctgatgtggtttgaagtagtggaggcttctttcactttgtgcctctcgtaccttaaccaaccctcataacctcctctctgagtagctcatggagcctctaaaagagaagtccatgttctcatagacattgtgttttctcactcttaaaactcctcattgtcatagctactcccccaatccccccatgctgtcctaacttcgaagtcagttgactaccagaagtccacgaaagcctataaattaaacttggtta

SEQ ID NO: 363396 - DNA, 449 bp, Homo Sapiens
cctaacctttcttctgggtccttcctcagatctttgagtcacgatagaaaaggagctcgagttctttgtgtaggaaagttaagcttcctgcctgcggtgttcttgcaattgccttaggaattcacaagctctaggagttctgaacggaaggcagacgagaggcactttatccagtcccagaaagaatctctaaccgtgtgactgagaagtcatctagaaaaacttatatttttaatgtaaaaacaaatggggcttaccagacctcacagagtattggacgtctacaagtgcttttatattttgtaactgtaaagaagtttcatatgcacagaagagcagttggaaatctggtcgactgcaataaaacaagatgacctttgcatgtacaaagatgttgcattcagactatgaaaatagcaaataaagctttggtgcaagttgcattggaa

SEQ ID NO: 363397 - DNA, 842 bp, Homo Sapiens
ggtgaaattgaaggtgcctaactgctcaaaaaacaaaatcagccatcatactgtaactctgagaggaatgagaggtggcacaggcacgagtgggctcagcccgtggtgagtgaggagaactgaggaatcctagggtgcgcatcctgcatcctggctgcacgtttgctgcagagtatgtttttctttcttgcctcccttcagttttcttcagttgcgttcagtgtatcttctggaaccaatagtgccctgtgttctcaagtctctaaaatgctaagatctgagcaaagtcaagcagcttacactaggcttttttacagctgtgcttgagaacatttccgagtggaccagggccttgaggagcctgtttttcagcaaattcaacagatgtgtgcagtgattccctccgttttgtatttgacaccttcatttaaaatgctaagatgcaatatcattcacttcaaagtggggaaaatgcagaattgtgtttcctttttatctgtgtgattccttaagaaacatgtttttaaaatatgtgttctaaatggttttttattctgtattactgctttggccatgtggctctcatgactttcattgtaccagattctcagctccctgaaacatggggacgagaagctctggaattacagcaagatttttgttccatgagcgcaatactgtatcattaacatttttaatggtatggattttatagcatctgtgtatgtttgcaaatattaagttattacatgttttaaaatgagcgtttttcatcttaaattttatatgtttgcaaatatatttttttaataaaatttcaaaaccaagttttagcacctact

SEQ ID NO: 363398 - DNA, 577 bp, Homo Sapiens
  misc_feature (479)..(479): n is a, c, g, or t
  misc_feature (547)..(547): n is a, c, g, or t
gaagattgtggatgtaataggagagaagatctataaggatggagaacgcataatcactcagggtgaaaaggctgatagcttttacatcatagagtttggctccagcgtggatctgggcaacctcgggcagtaggtgtgccacaccccagagccttcttagtgtgacaccaaaaccttctggtcagccacagaacacatacagaaaacagacatgacagaactgttcctgccgttgccgccactgctgccattgctgtggttatgggcatttagaaaacttgaaagtcagcactaaaggatgggcagaggttcaacccacacctccactttgcttctgaaggcccattcattagaccacttgtaaagattactccaacccagtttttatatctttggttcaaaacgggcatgtctctccaacaatttaagtgcctgatgacaaagtccaaagtataaacatgctcctttcctctcttggntgctactcttgcttttgggaagttaccacaggggtctggcaggaaacctgtttgtattaactgttggnacattttctaatgggttttcaaagggggga

SEQ ID NO: 363399 - DNA, 383 bp, Homo Sapiens
ctcaggagaccagcggcgccgctgcccttgagcgggcctgcgcctccgtgagggaagagttgctgccagtgctgcagttttctgaacctgggaaacgtgctgctcagacttcatccgggtctcattcaggatgcttcgatgttggttggaagagagttagaccgaaaatgttttgactggcgtcgctatgacaaggtcatccgtcattgttggatagattgatagcacccaagtttaaagcagacaccacgagggaaagcccacggcgctgtggtcccggaggctaaccaggcagtgtccgcagacctacagcaactccatcgggaggagaggatgaagttccaggcccgtttcaattaatctgctcgcagaactgccgaaga

SEQ ID NO: 363400 - DNA, 491 bp, Homo Sapiens
cacacctcaaattttctttatttctcaaacacgaaaattcttcggtgagaaaatgttttctttttccaattaaaggttaaaaattccttttccaaatcatgttgattttgctctttgctttttcgttgtctgagaaattgttggcgtagatttggcttctggtatgtgtttctgattgcttcctgttgagcacaaagtgagagctgccactgagcagccctgccaggggtgctgtttcaggctgggcatcgccaggcggcctccctgcaaaccaagggctgggggcaaaggggcatgatccagggtcccccagggtgggctcagctccagggagaggccacccacgtggcagccccacctcttgagagcccccagtgccggagcagaaaggaccctggacccagaggcagatactgcggggtggtagaaaaggtagagtaggctgtggcaatggaataaaacccgattaaaaacgttaagaactgcgttaa

SEQ ID NO: 363401 - DNA, 537 bp, Homo Sapiens
cttatgggagctttaaggagacttcatggtggttccatgcaggtggttctgccatccctgctgatttagcctggtgcctgtgtgtgtccactcacgtacacgtggggtgggggaaacgtgtctacagatgacgctaaatcagttggggtctactctaaacagcattgtgtgtaagaagcatcctcaagctcccagttaagtaacttgactacttttatttgggaatgtcagactatagaagctctcttatgttttatgtccagattctgtgaccactagttactgtatcagaactcatcaggtacccacttataaatagcactgatctggctgtatactgatccatcactaacctgttttctaggacccagcgtatgtagcatttgtattgcagtttccctggcttacttgtgttttgcactgatgaattttgacagggtaattgccactttacttgtgcaatactgctgtaaataactgcagatttttaaacaatcttttatgttaattttataaaaataaaactttcaactagtt

SEQ ID NO: 363402 - DNA, 560 bp, Homo Sapiens
gagaatattcttaatgctctttcactatttgaaaatataaattaccattttaaaagaagagcaaaagcatttacccaggacaaattcagtaaaaattccctttatttcctattccaacgacctaaagcatgtgccaagaaacttcgagccttagcagcagaatgcaatgaccctgaggtgaaagagagagttgagctattaataagtaaactctgattggctgtatgttcccaaacaaatttgagtaatattttggttttgcactctggaagtaatgcacattgtaaattgcattataactttgaaactgatgttacctatgatggtctatagctggaccattttatgaacaccaaatgaattcaagcttgtactaaaaatacatgtgttgatttttatcttgtctggattgagatatttttagtatgcttcatgagcagaaactgaatggattcttcataagtaaggtaatctttggtcctttgtgtggacttatgtttatacatttaagactatttttatgtcatcaataaagttgtgtgttttaagcagcagaaaaa

SEQ ID NO: 363403 - DNA, 251 bp, Homo Sapiens
  misc_feature (208)..(208): n is a, c, g, or t
  misc_feature (224)..(224): n is a, c, g, or t
aagggcaataaatgctttttattgtatgctcatttcaatgagtaacatttagaaataataatcccacataacagtagcgatcttattttacagcgtgtacatcatttacagccacataacacacaattttagtagatattccaaatttaatattctgaagttaagaaagataaaaaatttattctcaaggaactgattcttatctggngcaaaaacagaaaggngaacattatttgaaacacaaagccaca

SEQ ID NO: 363404 - DNA, 1335 bp, Homo Sapiens
  misc_feature (1081)..(1081): n is a, c, g, or t
  misc_feature (1083)..(1083): n is a, c, g, or t
  misc_feature (1085)..(1085): n is a, c, g, or t
  misc_feature (1087)..(1151): n is a, c, g, or t
  misc_feature (1156)..(1156): n is a, c, g, or t
gcggccgcggaggaggtgcggccccaaggggaggaggtgcccgctcaccgcagaccgcccgcggcagaggccgccccggtcgcgccgcggcgggagcggccggtggaggctgcgcggccgagggggagggccgggggagcggacgtcgcctctgctggtctcccacctcccgccgccccccgcccgcaggctcccaagccttagtcggcgccgagcatcccgctgccccggaccctcccgcgggcgcgcaccaggctcaactcaggctcaggactgcaggtagacatctccactgcccaggaatcactgagcgtgcagacagcacagcctcctctgaaggccggccataccagagtcctgcctcggcatgggcctcaccattgaggcagctccactgtctgtgctggtctgagggtgctgcctgtcatgggggcagccatctcccagggggccctcatcgccatcgtctgcaacggtctcgtgggcttcttgctgctgctgctctgggtcatcctctgctgggcctgccattctcgctctgccgacgttgactctctctctgaatccagtcccaactccagccctggcccctgtcctgagaaggccccaccaccccagaagcccagccatgaaggcagctacctgctgcagccctgaaggcccctggcctagcctggagcccaggacctaagtccacctcacctagagcctggaattaggatcccagagttcagccagcctggggtccagaactcaagagtccgcctgcttggagctggacccagcggcccagagtctagccagcttggctccaataggagctcagtggccctaaggagatgggcctggggtgggggcttatgagttggtgctagagccagggccatctggactatgctccatcccaagggccaagggtcaggggccgggtccactctttccctaggctgagcacctctaggccctctaggttggggaagcaaactggaacccatggcaataataggagggtgtccaggctgggcccctcccctggtcctcccagtgtttgctggataataaatggaactatggctctacngngnannnnnnnnnnnnnnnnnnnnnnnnnnnnnnnnnnnnnnnnnnnnnnnnnnnnnnnnnnnnnnnnntacgntttccttggtcggcccgccctccgccctcaaaaaaacttttcaaaaaaccatttccttttggggcgcggcggggccccccgttaagggaaaaggggaaactggggggcccaaaaacggggtttcccgcaagggaaaactccccgtgggcccaagggaactaaaggggccttgggaaatt

SEQ ID NO: 363405 - DNA, 449 bp, Homo Sapiens
  misc_feature (47)..(99): n is a, c, g, or t
attttcccttgactgctgtcctgggatggcctgctatcttgatgatnnnnnnnnnnnnnnnnnnnnnnnnnnnnnnnnnnnnnnnnnnnnnnnnnnnnnctaacacatcttcttttcaatatctaagaacttttgccactgtgactaatggtcctaatattaagctgttgtttatatttatcatatatctatggctacatggttatattatgctgtggttgcgttcggttttatttacagttgcttttacaaatatttgctgtaacatttgacttctaaggtttagatgccatttaagaactgagatggatagcttttaaagcatcttttacttcttaccattttttaaaagtatgcagctaaattcgaagcttttggtctatattgttaattgccattgctgtaaatcttaaaatgaatgaataaaaatgtttcattttacaaaaaaa

SEQ ID NO: 363406 - DNA, 529 bp, Homo Sapiens
aaagtagcagtagaaaagcagtaaagaacttacttattgaaaagcgaaagcttaaagacctttctggaggaaacttctcagaggccatgttaaggctattggaaagtccaatttaaatgacaaggttactgaccaaaaatcaaataaaatattcaagtcaccattactggcagttctggttttggaactgatcccagaattctaccttgcaggctaggagatctcttaaaatggctgttagtagctagtaatagtgcatggtggaaatagttgaagcctcaggggcagtgatgtggcctcacacatatgtggtgcctgcagttcctgtagctgttttgaagagggagggagaggtattaactctgctctaaagcagtttgggtccagaataaaggggtcagtgcctcataccccctactagggtgaaatcctaaaactgcccagggaaggcaaggaagcccttggcagataccaagatcagtggtattggaaataacttacaatcagcagcctaatgccctcacggaaa

SEQ ID NO: 363407 - DNA, 513 bp, Homo Sapiens
tttaaggggggaaaaaacattaacagcaggtttatcaaaatggatttcaaatgttcatttactacaaaagtttaagaaacacgttaaggcacagtagttttaaaattaaccacaatatgtcatgtatatatgcatctattaatattgcattcatttcaaacatcttgggccttaacctattgtatccattcatttacaatccccaagttacagtatttcatgagctctattagatccaaacatatttaagctttactagtcacatattcactgaagtgcctttcttgcagcaggactacttaaataacgccatgtttaatactgacaattatttgctaaccttaagaccacttcaagagtttatcacttaaaaaggtttaaaagcaattcttaaagcctacagattgtggttttaaactctgagtcaataagtatgaactgcaatgaattaggtgattagtaaagcaacagtatagtacacttagcagtcagtatactactatacatacgtct

SEQ ID NO: 363408 - DNA, 484 bp, Homo Sapiens
  misc_feature (154)..(154): n is a, c, g, or t
ttacttaaatcaactgtctttaattggacaataatcacatgttaaaggggtcaatttgctctaatgtgtctttagtcttgactatcttccagtgaatatacactcatgaaccacgtaaccatgtttctgtcaaagacataccacttacatgacnggtggtcccataacattgtaataccatagttttactgtacctttcctatgtttgtaaacacaaatactcaccactgtgttacaattgcctgcggtatttaattgcggtcacatgctgtacaggtgtgtggcccaggagcaacaggctgtaccatctggcctgggtgggtcataggtgtcccatctaggtttgtataagtgcactccatgatgttcacacaataaagtcaccttacaatgcatttctcagaatgtttccctatcattaagtgacatgtgactgtattatttctaactgccttatacatttgtaacttgaatattgaaatat

SEQ ID NO: 363409 - DNA, 786 bp, Homo Sapiens
  misc_feature (354)..(354): n is a, c, g, or t
  misc_feature (388)..(388): n is a, c, g, or t
  misc_feature (528)..(528): n is a, c, g, or t
  misc_feature (613)..(613): n is a, c, g, or t
  misc_feature (616)..(616): n is a, c, g, or t
  misc_feature (618)..(618): n is a, c, g, or t
  misc_feature (624)..(624): n is a, c, g, or t
  misc_feature (674)..(674): n is a, c, g, or t
  misc_feature (731)..(731): n is a, c, g, or t
cggggtcaacgcactctctttaatgggaaggggatcgtcatttcttacagcaataggtaaaaacataaatacgggtgggtgcgtgggcgggcgacggcgagatagcaaaggcccgggcgcccggccctggctcgcggaatgggcggccagatctcaggccctgcgtgcccgagctcagtcccagttccaaccgggggtgcccatggactctcggagggcactcctggggggacagctaagacaccaggctgcaggatcactcattgcacgctgcataatcgccgccacaaactctcccgtgcgcaagaacaaacgcgcgtgggacagaaaaagttcctaggtctccgcaggagntgaatgcaaaatccaggggactcagggttcatgnttgggagccccttctccccccgagagtcagggagctgttgaggtgggatcggtcagggtcgcgccacgcgggtcccttccctaccaggctcggataccatgcagcgtggacactcccgagttgctctgcggaatcccggngctctgaaccgcattcaagtccccgacgccgaagttcacgaagttgttgttgcggcggcagtggccgctgcgctggggaggcccngcngngtaagngcagtgcagctgtaccaggctgcaggcgcgcccgcgtacccgataggcgngtagcgtattaccgtaggattgaggccaccgcgtagcaggcgcgtagggcgccgatncccctagcatggctgccatcgcgcacagcactggcaccgcgatcctgcgggcagc

SEQ ID NO: 363410 - DNA, 266 bp, Homo Sapiens
aaccctgttgtgtgcgtgtgggggttaggattagtaaggtgaactgttcaggaattctctgcactagctgtgcagaagagcagataactagcgctgctctggcattaatcccaggaaccactagcagtagtggggcgccgccaatctaacatgagcacaggtgcttcatgacaaacattactagcatgttcaactgcaccatgttctggcactgtattttgaatgacattaatttattaaataaattgtatatattcaatatcaaa

SEQ ID NO: 363411 - DNA, 647 bp, Homo Sapiens
atttccccagccccaccttcccctcctgatgccctgaaagcttccggaattgactgtaaccacttggatgtaaccactgtcagcccctgccttgatgtccccatttagccatctccatggagctcctgctggagggccctgaaccctgcactgcgtggctgcccagccagctgcctcctgtcctgggaggaggcctcctgggtgtcctcatctggtgtgtctactggagggtcccacaggagaggcagcagaggggtcaggggaggtctcctgccgggggttggcctctcaagcctcaggggttctagcctgttgaatataccccacctggtggtggcccctccgatgtccccactgatggctctgacaccgtgttggtggcgatgtcccagacaatcccaccaggacggcccagacatccctactggcttcgctggtggctcatctcgaacatccacgccagcctttctggggccggccacccaggccgcctgtccgtctgtcctccctccagcagcaccccctggcccctggagtggtggggccatggcaagagacaccgtggcgtctcatgtgaactttcctgggcactgtggttttatttcctaattgatttaagaaataaacctgaagaccgtctggtgcaa

SEQ ID NO: 363412 - DNA, 1715 bp, Homo Sapiens
  misc_feature (1267)..(1267): n is a, c, g, or t
  misc_feature (1312)..(1312): n is a, c, g, or t
atgactatataagtgactataacaagcctttatcctgttttacatcagttttaacgggaataaaaagtaaaaacacatttattagtgtttcacatagctgccatgatggcaacgtgactgtgacttgcataaataatacactcaaggacattccacactccttggtggttccagcaatgcgatttactaaataaaaaagtgactattcccatgaaagaaagcatcaaaaactagttttgagaaagaagatgaaaggctcaatctctaactcctggatgccaggaagcagagtctttcagaatcaaaaacaaattaagagctcacagccccacccctcaggggtcacataagttggtactgttgcttgtaactaattcatgactttagccttttctttactcaaaattaaaactaaggacataacactcttcaaaaatacacataccctgagacagatcattaccagaatctacacagggctttgctatttaggtacagttagtacaattcatatttaaagtaatttcataaaaataacaactgttccaatcttacaagtttcgtttcctcctatcatggtcaccaaagcaatctctattgttaggattcttcattgcttgaaggtagaaactgcttagtaaaattctccagctcattttcaagttgaacagctttatttcttaagagctttgaattgttttgtattttctccaactgatctatttctgtgggtaatctagcaatttcttcttccagctgtttttgagtaatatcaacttgttggcacaggcgagcaaaagtggtagctatttgttgttttacttggtgactgcagtttgcactcgtggagctaacaatcatcctcagtttttcagttgcatagtttacaaactgctgtttaaaggctcgctccttggcatgggtggtccagctcagtctttcataaagatacaaagctccatacatagttaatgaaacagataggagtttccagcctatagttttccaaatcactcctccaacaataatgatgcccatagaagttctagatgtaacggacgccaatcctgttactaatgtaatcatgagttcttcctgtgatgcattatctggcgttgctggagtggtaggagcagtgggagtagaagctaaagatctagggagctgaaagataggctctgataatcctaggagcaccctttgagcatttctagggcccaaaaatcgatgtacaagggaagaccagcccagggaaaaacgaaatacnaataccccctggaaaacctgaaacataacttgggggtaatttagnataataactgagatcaaatttccttggcaagggatcagtgtatgtagtttatcctgtatacccagctggaagtaatggcttcaaattttcaataatttcttgctgggtctgaagcactaaggcgtttacttcatcggtgcatcgatcagccaaatttcttcccataccatcctctatgtgcttatttaattcacttttatatatttttaatacatctggattaggatgaaactctgaacaaaattcatcaaccaaaacagacagtcgacaaatttcatctgtcattgcacatgaaactttgtttgccacctcctcggtaacctccttgatttttttcttaacatccagtgttaaaaggttcatctggtttcgaataaagtccagtctatcaatttggtcttcc

SEQ ID NO: 363413 - DNA, 283 bp, Homo Sapiens
ccgggaaagccagggtgtgccgggccaagatactcacaggctggccacagctggcaaaggctctccgtggagtggactcgagtccctggagcaggcagtgtggaggcagccatcccctgtgatgactggcagctaaggaggacctcggagtggacccgagccaggaataacgaatgacccaaggccaaggaagggaggacagagaggccccaggagtgggtggagagtggagtgcgctgggacgttgtgtgcaatagagaggtctccacaccagatgtcttcc

SEQ ID NO: 363414 - DNA, 1018 bp, Homo Sapiens
  misc_feature (906)..(914): n is a, c, g, or t
cattgggaatgcgtattggttttaaaacgggacctgtaagttaaattcaacagggaaactgttggggcccaatcaagcagcctggaaagatccatggtttcgggaccgttccttgctccggagctcggggccttctttggaagaggagatgcttcatggctttgtgcccagaccggcgtggtccccaggtctctcaccttgggtgaagattcagagatgcctgtgaaaggaatttttgcccactggggcaactcagaaatacttcgatctcccaagatataagaggcagcagcaaacgtgcctattgacgtctgtttcatagttaccacttacgcgagtagacagaactcggcttttcagaaaataggtgtcaagtccactttataagaacctttttttctaaaataagataaaaggtggctttgcattttctgattaaacgactgtgtctttgtcacctctgcttaactttaggagtatccattcctgtgattgtagacttttgttgatattcttcctggaagaatatcattcttttcttgaagggttggtttactagaatattcaaaatcaatcatgaaggcagttactattttgagtctaaaggttttctaaaaattaacctcacatcccttctgttagggtctttcagaatatcttttataaacagaagcatttgaagtcattgcttttgctacatgatttgtgtgtgtgaaggacataccacgtttaaatcattaattgaaaaacatcatataagccccaactttgtttggaggaagagacggaggttgaggtttttccttctgtataagcacctactgacaaaatgtagaggccattcaaccgtcaaacaccatttggttatatcgcagaggagacggatgtgtaaattactgcattgcnnnnnnnnncagtttgtataacctctaatctccgtttgcatgatacgctttgttagaaacattaattgtagtttggaagcaagtgtgtatgaataaagataatgatcattaaa

SEQ ID NO: 363415 - DNA, 1115 bp, Homo Sapiens
  misc_feature (75)..(75): n is a, c, g, or t
  misc_feature (93)..(93): n is a, c, g, or t
  misc_feature (264)..(401): n is a, c, g, or t
  misc_feature (420)..(432): n is a, c, g, or t
  misc_feature (470)..(470): n is a, c, g, or t
  misc_feature (476)..(500): n is a, c, g, or t
  misc_feature (749)..(759): n is a, c, g, or t
  misc_feature (1005)..(1005): n is a, c, g, or t
ccttgggttcatgtccctaatataagtatcttgacaattatgagctttatacctagcaagcccacttcaggaaantacttttggagaatattntactgattattgttaaacttaatatacaattagctttattccttataaaatgtctaaaagaataatacgaagtatatataaaaggaattactgtaaactacattgccatagcaatttacataaaagtatattgttttctatctttaactcaaataaagcgtgtaataaatnnnnnnnnnnnnnnnnnnnnnnnnnnnnnnnnnnnnnnnnnnnnnnnnnnnnnnnnnnnnnnnnnnnnnnnnnnnnnnnnnnnnnnnnnnnnnnnnnnnnnnnnnnnnnnnnnnnnnnnnnnnnnnnnnnnnnnnnnncaccctcaaaaacaccaannnnnnnnnnnnnaacacccctacaaaaaaccaacgggaacaaacaaatgnacccannnnnnnnnnnnnnnnnnnnnnnnnggattcccctccctcttcttaagaccgccgccggcggcccccccgagaagtccttacacccctcctctcacaaggggcgcccaaacagcccgccctgccccaccatacctcgcgcgggcccccccaaacgacacccataaatgtgcggggcggcgggcccccgcgccgccacgccatacccacccccataccatacagtgaacgctgctcttcccccccacaatcttctttaggtctcccaacccgcgnnnnnnnnnnngccggaagccgacctggtcgactaacgccaaacatccctaaccccccgccgccgccctcatacacaaaacattcctgggaaaagacatcggggccgcgagcacacaaatttattcctcacccgccgccgcccaagatgcatcgaccatcatacacaccacgaggtgtgtgcgctttggccccgcgtctccaaaccgtgcgccccttgtcgcaaccccctccgctcctggtgggtgggccccccctnatccacgaacccacccgatcccaccatacctcccctaaatgcacaccgtctcgccgtgcccccttgttttccgcgaaccaccccggcgccgcgaatttcgacgacggtgg

SEQ ID NO: 363416 - DNA, 576 bp, Homo Sapiens
cgatgagtaaatcttggcaattatggcttgctaggtataaagctcataattgtcaagatacttatattagggacatgaacccaagtcgttaaataaaaataagatatttgtaaaaaagtgctatagaagaaggtgcacaaaaaaacatgcacttacacatactttccaaaaggatgtaaactgtacttttaggcactgtcatctcttcaaatttcctttaccaatgatatatagcacaatttttgatgtctagatggtgctgtaggaagatgactaaggcaaccacgtgcagaaaagcatgtgtgtgatgcacagaaaatataaagattgcattccaaaagtgaaggtctgcaatgatagtttgttatctgaaaggtttggagtgtcttgtcattaaaaaatgaaatatatgccactggagtcatatcacaaatggtgcctgatgtggacactctacctttaaaatgactttttaaacaggcagacatttctatgctgttttataggtggctatgtgacttcagtactttataataaatagccagtcaatacttgagagccaagatttactcatcg

SEQ ID NO: 363417 - DNA, 877 bp, Homo Sapiens
  misc_feature (682)..(695): n is a, c, g, or t
  misc_feature (800)..(800): n is a, c, g, or t
  misc_feature (846)..(846): n is a, c, g, or t
  misc_feature (857)..(857): n is a, c, g, or t
cgaacaggacaagcaagtgaacaatggcctcaccctcagtgaccttcctctgcacatgctgaacaacatcctataccggttctcagacggatgggacatcatcaccttaggccaggtgacccccacgttgtatatgcttagtgaagacagacagctgtggaagaagctttgtcagtaccattttgctgaaaagcagttttgtagacatttgatcctttcagaaaaaggtcatattgaatggaagttgatgtactttgcacttcagaaacattacccagcgaaggagcagtacggagacacactgcatttctgtcggcactgcagcattctcttttggaaggactcaggacacccctgcacggcggccgaccctgacagctgcttcacgcctgtgtctccgcagcacttcatcgacctcttcaagttttaagggctgcccctgccatccctattggagattgtgaatcctgctgtctgtgcagggctcatagtgagtgttctgtgaggtgggtggagactcctcggaagcccctgcttccagaaagcctgggaagaactgcccttctgcaaaggggggactgcatggttgcattttcatcactgaaagtcagaggccaaggaaatcatttctacttctttaaaaactccttctaagcatattaaaatgtgaaattttgcgtannnnnnnnnnnnnnatatatatagttcaaaaatactttaggtggtcagctccacattctttgttgacgtgacactaacggccaataatatggcttcttgaattatcaaattatagtttncccaattgggaaactaattggggggttggttacaaaacatttgatncctgttaaatnacattgtaccaggattattt

SEQ ID NO: 363418 - DNA, 396 bp, Homo Sapiens
aagtattaaataagtatacctattcctccttttccttttttaaaaataatattaccaaatgtccagcttatacacatttacaagacttagctagtgggctatgttagagctactaaaagatctttgacaagctaaaactaagatgcaatgaatgaggtgtaacgaacaagagagttttaagttccagaaatggttacagaagtataagacagctgtgtgggtgttttttggtttttggtttctggtttacaatctcgtcattcaacaaagatgggagttttatagaactaaaagcaccatgtaagctactaaaaacaacaacaaaaaaggctcatcatttctcagtctgaattgacaaaaatgccaatgcaaataaaaatgattactttttatttt

SEQ ID NO: 363419 - DNA, 1602 bp, Homo Sapiens
cggtccggaattcccgggatgccgcggctccggcagtcaacgcctgcctcctctcgagcgtcctcagcgcagccgccgcccgcggagccagcacgaacgagcccagcaccggccggatggagcgtccgcaacccgacagcatgccccaggatttgtcagaggccctgaaggaggccaccaaggaggtgcacacccaggcagagaatgctgagttcatgaggaactttcagaagggccaggtgacccgagacggcttcaagctggtgatggcctccctgtaccacatctatgtggccctggaggaggagattgagcgcaacaaggagagcccagtcttcgcccctgtctacttcccagaagagctgcaccgcaaggctgccctggagcaggacctggccttctggtacgggccccgctggcaggaggtcatcccctacacaccagccatgcagcgctatgtgaagcggctccacgaggtggggcgcacagagcccgagctgctggtggcccacgcctacacccgctacctgggtgacctgtctgggggccaggtgctcaaaaagattgcccagaaagccctggacctgcccagctctggcgagggcctggccttcttcaccttccccaacattgccagtgccaccaagttcaagcagctctaccgctcccgcatgaactccctggagatgactcccgcagtcaggcagagggtgatagaagaggccaagactgcgttcctgctcaacatccagctctttgaggagttgcaggagctgctgacccatgacaccaaggaccagagccccttcacgggcaccagggcttcgccagcggggccagcaacaaagtgcaagattctgccccccgtggagactccccagaggggaagcccccactcaaaacccgcttccagggtccgcttctccgatgggtccttacactcagctttctggtggcgacagttgctgtagggctttatgccatgtgaatgcaggcatgctggctcccagggccatgaactttgtccggtggaaggccttctttctagagagggaattctcttggctggcttccttaccgtgggcactgaaggctttcagggcctccagccctctcactgtgtccctctctctggaaaggaggaaggagcctatggcatcttccccaacgaaaagcacatccaggcaatggcctaaacttcagagggggcgaagggatcagccctgcccttcagcatcctcagttcctgcagcagagcctggaagacaccctaatgtggcagctgtctcaaacctccaaaagccctgagtttcaagtatccttgttgacacggccatgaccactttccccgtgggccatggcaatttttacacaaacctgaaaagatgttgtgtcttgtgtttttgtcttatttttgttggagccactctgttcctggctcagcctcaaatgcagtatttttgttgtgttctgttgtttttatagcagggttggggtggtttttgagccatgcgtgggtggggagggaggtgtttaacggcactgtggccttggtctaacttttgtgtgaaataataaacaacattgtctgatagtagcttg

SEQ ID NO: 363420 - DNA, 1226 bp, Homo Sapiens
  misc_feature (401)..(401): n is a, c, g, or t
  misc_feature (922)..(922): n is a, c, g, or t
  misc_feature (989)..(989): n is a, c, g, or t
  misc_feature (1025)..(1025): n is a, c, g, or t
  misc_feature (1034)..(1034): n is a, c, g, or t
  misc_feature (1040)..(1040): n is a, c, g, or t
  misc_feature (1055)..(1055): n is a, c, g, or t
  misc_feature (1060)..(1060): n is a, c, g, or t
  misc_feature (1071)..(1071): n is a, c, g, or t
  misc_feature (1096)..(1096): n is a, c, g, or t
  misc_feature (1121)..(1121): n is a, c, g, or t
  misc_feature (1137)..(1137): n is a, c, g, or t
  misc_feature (1156)..(1156): n is a, c, g, or t
  misc_feature (1167)..(1167): n is a, c, g, or t
  misc_feature (1204)..(1204): n is a, c, g, or t
  misc_feature (1209)..(1209): n is a, c, g, or t
tgcgctggtgggtttattgtgttttcaatggagaaatacatcatctgtttacaaaatagctcttgaaaaatacaaggagtacagatactataaaacaaagcaaactccagtcatgagacactacatacatcatgcgaaagcaacagtctgatctccaggttatgaaaactataattaaaaagtcactacacagaaaaggtccaagtttccagcttggcaaaacttgggtgcagttacatgaaacgtttaataaactgaattgttttccccaatgtgtaaacaaaatgacaagactaaatctgtgcctggtaatttcaatctaactctgaagctacacaaaacacacagacaccttgtacacttcacctgttagtatgaccatcttttttgttaggtggtgngaggaagggcaaggtgactgtgtaaagcaaagatgtgggaagtagaaatattgtttactagacattataaagtcatggtgaaaagaaagcttcgattaatgcatagcctaagggggaaaagactacactccaacttcggaaaattaatttagaaggataggggaagagattaagtaattgcagtttaacatgaaaaatgcacatgtgatagaatggagcacaatggaggattcataaaacatgctcatcagaaaaatctgttaagtcgactttgtccagattcagaaagagtaagtttatcaacatctggcatccctcatactttgtgaagatagatcttctactgcttaattatgagaaattattttattcaaagaaaggagctcttaatcttttgataaaacaaaataaaggagtagagagctgactagatgtcaagtgcttgctagaaatgatttttaaaatgcttctacacgtaaaatgtactgacaaattttgggtaaaccatttaaaaataaganttagttttaaaatcttgggagaaaatgcctttttgcccacatttaaaactgaaaatcaattttactntagatagggggttctgtgggagtgtacaaaattccntttaggagntccaantgggccctccccggntaggntatcctgtttncacagggccttgacttttagttcancccccagttttcgcctgggggcccnatttagtgttccgtgncctgtgggtcacggggccntgggtttcacnctgggcttagggaataccggcttttggtttcttcggngtggncccacctgtggcctaca

SEQ ID NO: 363421 - DNA, 809 bp, Homo Sapiens
aacctgagtgcctgcatggctttgaaatctccctgtccaaagctcacggtcctatggtgtcctggggaacggtcttgtttgggtggcatcagatcagcctcttgtagaggaaacctgccacacacacaggccagtgggaaactaggaagggtcgcaggccggacggtgcttccagggcttgagctaaccctgagcccctcatcttccctggccacaggcccagtggttccctagaaccccagccaggtccgtggtggccctgaagacccccatcaaggtggagctggtggcagggaaaacctacaggtggtgtgtgtgtggccgcagcaagaagcagcccttctgtgacggctcccacttcttccaacgcactggcctatctccactcaagttcaaggcccaagagacccgcatggtggcactctgtacctgcaaggccactcagaggcccccgtactgcgatggcacccacaggagtgagcgcgtgcagaaggcagaagtgggctccccactctgagggggctgctgctgtccagccacaggtggccttggctccaggcctctgacaggcacccccttctgtgggaaaggaaacaggtgctgagcccaagagactctggtacccactgctggctcatgaaggaagaattattccttataacctaaaaagtctccagtctgggggcagggcgggagtgggccctggttcaatgtctgctgatggggaagatggcacaaaacaagcctggccaagcaaaataaaaatcccactatcccagcttcacactcacacggaaaaacacaaaggg

SEQ ID NO: 363422 - DNA, 991 bp, Homo Sapiens
tggaccggtccggaattcccgggatcgaccatgcgcggcgcgggggcgatcctgcggccggcggcgcgtggtgcccgggacctgaacccgcggcgggacatctcctcctggctggcccagtggttccctagaaccccagccaggtccgtggtggccctgaagacccccatcaaggtggagctggtggcagggaaaacctacaggtggtgtgtgtgtggccgcagcaagaagcagcccttctgtgacggctcccacttcttccaacgcactggcctatctccactcaagttcaaggcccaagagacccgcatggtggcactctgtacctgcaaggccactcagaggcccccgtactgcgatggcacccacaggagtgagcgcgtgcagaaggcagaagtgggctccccactctgagggggctgctgctgtccagccacaggtggccttggctccaggcctctgacaggcacccccttctgtgggaaaggaaacaggtgctgagcccaagagactctggtacccactgctggctcatgaaggaagaattattccttataacctaaaagtctccagtctggggcaggcgggagtgggccctggttcaatgtttgctgatggggaagatggcaaaaacaagcctgcccaaccagactggtagtcctgcagtcactgctatgaggcccacgtgctgcctcctgctccagattttaacctctctgtgggctgggggcacctgaccagccacaggagagggcagttcagattcattctgtatggggtccccaagcccggctaaacccagagatgagaggcacccttccctttcttcgctccaacccaaagaactacaggtcccagaaagtattgcggcttttttacaaagccaggagatccggaaggtccccggggcaaagagggtacacgggcacagggactctcagacacaggggcacagcgtgcacacagtgaaggcccctaaggggtcccaacc

SEQ ID NO: 363423 - DNA, 268 bp, Homo Sapiens
gacaatgaaaaaattttattcgggtatccactcattcggtcaacaaacatttattgagcagctcctatatgccagcccatgggctaggcttgtgtgtccaaagaggcataaggttgagcccctacactccaagagtgctcagctattaggaaagacctatgcaaaaaacagtgccatcctttattacatgcagaaaacacagtggaagcactgccaacgggaggagagtatcactaataggtactttaaaaactatgtgttccagggg

SEQ ID NO: 363424 - DNA, 425 bp, Homo Sapiens
  misc_feature (42)..(42): n is a, c, g, or t
  misc_feature (114)..(114): n is a, c, g, or t
gatattatgaaaaatagagatgatttaaagtatacaggaagnatgtatgttatatgcaaataccacgattttttatcagggacttgaagtgtccatgaaatctggcaccctacnaggacatcctggaactgccccccacatagaaattgagtaggctgaaattaaaaacagggacatttaacaaacctccaatgaatccagcaggtgtagaaatcgggaaccagcagtaatacatggggacttacatgggaatctagcctttgggtcaagcaccctaagttgcttttgctccacatggggaaggagagggtgtggccaaagtaccagcaaaataaaacttgagtgatctggaacgtgaaaaataaaagacatcacgtggaagaggtttattacaaataaatgaaacaaaaatcaaaggcttgtga

SEQ ID NO: 363425 - DNA, 839 bp, Homo Sapiens
ggggcagtcctctctggggagcctgaagcaaacatggatcaagaaactgtaggcaatgttgtcctgttggccatcgtcaccctcatcagcgtggtccagaatggattctttgcccataaagtggagcacgaaagcaggacccagaatgggaggagcttccagaggaccggaacacttgcctttgagcgggtctacactgccaaccagaactgtgtagatgcgtaccccactttcctcgctgtgctctggtctgcggggctactttgcagccaagttcctgctgcgtttgctggactgatgtacttgtttgtgaggcaaaagtactttgtcggttacctaggagagagaacgcagagcacccctggctacatatttgggaaacgcatcatactcttcctgttcctcatgtccgttgctggcatattcaactattacctcatcttctttttcggaagtgactttgaaaactacataaagacgatctccaccaccatctcccctctacttctcattccctaactctctgctgaatatggggttggtgttctcatctaatcaatacctacaagtcatcataattcagctcttgagagcattctgctcttctttagatggctgtaaatctattggccatctgggcttcacagcttgagttaaccttgcttttccgggaacaaaatgatgtcatgtcagctccgccccttgaacatgaccgtggccccaaatttgctattcccatgcattttgtttgtttcttcacttatcctgttctctgaagaatgttttgtgaccaggtttgtgttttcttaaaataaaatgcagagacatgttttaagctg

SEQ ID NO: 363426 - DNA, 833 bp, Homo Sapiens; identical to SEQ ID NO: 15021

SEQ ID NO: 363427 - DNA, 544 bp, Homo Sapiens
ttaagcagcatgaccgcttcctgagctcctgctgccgcatttaggccctgtcagctgtgaggccactggtgctgagtcagagggaaaagctcagaacagccttgagcagtgaagaataaagtgtgactcatctcgtcctgcccacccctcacactggactataaataccctccctgggtctgtgtgctgttattccaaaagatgcgatgaatacccagaactaggctattcatgggctgttgcccagttcaagatctgttgggtcctgaggaagattactattttggctaaattgtttatcattaaaaccagcccagggatgtgtaaacctgcatctggagaataagacatttctttttggttaaatgatattagagaaaaaaactatccaagactgctaacaaataatcttcactttcagttatatccagcaataagttgttttccagaaaagaaagcttggaaacttacccagtttgccttccatttgggacatgactgatgtgcttcagtctttgtataataaatgcatcttcgccactct

SEQ ID NO: 363428 - DNA, 433 bp, Homo Sapiens
  misc_feature (14)..(14): n is a, c, g, or t
  misc_feature (22)..(22): n is a, c, g, or t
cctgccccacccantggtggangtgctaaactagcagggacgtggcaataggatgggaaactgggcgtgaggtgcttggggtccaatctttgtccctcagcttctcagaatccggccaacccttgtgttcccgtgccccaaactttcctcctccccactgcagtgaggcaatagtccagggtggggcctggcctccctgccctgattggggactcaggaggtgaggccctgggggcttcctgccccctccttgcccacctgcctcccccgggcagcacgggagggagagcagggtgagcacgcttgttggtttcagatgcactttctgcttgcattgccgtatctgtgcgttccttcatcctggtcctggctttatggaacaccatgtttttagcatgtttttaaataaaaacggataaagtgtcaaaagcac

SEQ ID NO: 363429 - DNA, 506 bp, Homo Sapiens
  misc_feature (80)..(88): n is a, c, g, or t
aaaccagagatctgaaacaaatcaggcaaaacattaacatctgtttaacttggcagtgaatttatgggtctctatgacannnnnnnnngtataattgtatgttttataacttaaaaaaatctttgatatctctagaatcttactttataagaattgagttggtctactaccctagaccttcctttagaggcaaattgctctcccagggttctgcatcccagccctgtccgcatttttttctcactttttctactgtaccttgatctccctctcctcctttccgctaacatccacccaacagccttcaacatgttctagtctgttgcatcttaaaacacacaccaataaataggaatttatttaattccatatagctaaccagttgttccctagccccacagagactgcactttaaacaacatgcacgctgttcctattgaggaggcatcaggccagcaacacatcacagtgcctgccctggagtaggggctttacctgatcaccta

SEQ ID NO: 363430 - DNA, 658 bp, Homo Sapiens
  misc_feature (201)..(201): n is a, c, g, or t
tattagctaattgtgccaggggctgttatatacatatatacacaaccaaggtgtgatctgaatttaatccacatttggtgttgcagatgagttgtaaagccaactgaaagagttccttcaagaagttcctctgataggaagctagaagtgtagaatgaagttttacttgacagaaggacctttacatggcagctaacagtngctttttgctgaccaggattggtttatatgattaaattaatatttgcttaataatacactaaaagtatatgaacaatgtcatcaatgaaacttaaaagcgagaaaaaagaatatacacataatttctgacggaaaacctgtaccctgatgctgtataatgtatgttgaatgtggtcccagattatttctgtaagaagacactccatgttgtcagctttgtactctttgttgatactgcttatttagagaagggttcatataaacactcactctgtgtcttcaacagcatctttctttccccatctttctattttctgcaccctctgcttgttccctcatattctgttcttccgactcctgctaacacacatgcaacaaaaaagggaagggagtgcttatttccctttgtgtaaggactaagaaatcatgatatcaaataaacatgggtgaaacatta

SEQ ID NO: 363431 - DNA, 281 bp, Homo Sapiens
gggagtttagcctcttttctgcagcaggcccagatcagctttgcacacggttggtgctgacctcaaatgcagccctagaggggcctatctctgccctgagtattgaggtgcaggcttcttcccctttgttctgtccatttccaaaaatgtgaacacacacctcctacatgtttatattattgtgtgcatagatactaccattgtaacattttttgcggattaaaaatgcactattgtattgaaaatttcaaaggaaattgtgtaataaaacatttaaaatt

SEQ ID NO: 363432 - DNA, 278 bp, Homo Sapiens
tctaagtgaagtaattcaggaatgggaaaccaaacattgtatgttctgactcataattggaagctaagctatgaacatgtaaagcataaggatgacacaatggactttggggactcaggtggaaagggtggcaagaaggtgaggaatgaaagacaaattgggtgcagtgtatactgctcgggtgttgggtgcaccaaaatgtcacaaatcatcactaaagaacttacccatgtaaccaaacaccacctgttccccagcaacctgtagaaataacattt

SEQ ID NO: 363433 - DNA, 408 bp, Homo Sapiens
  misc_feature (52)..(52): n is a, c, g, or t
  misc_feature (141)..(141): n is a, c, g, or t
  misc_feature (336)..(344): n is a, c, g, or t
gtttagtaactactctttcagtccaaggttccttaatcagtccagtctacancgggactatgacttggggggccggggctaatcctttttgctgttctgagctactaattgtcaactgctgttgtacaatactggttatgntgtaatggcgtaaatatatttattatgtttgtaaaattcattgcagatcaaggttgctcttctgtgatatatgggatattatgttttaaagaccatcttggaatacaattagagaacttagtattttgatgtactaagacctattttaagtttaatattctactttgcaaaaactttaattaaagatgttatttnnnnnnnnntgttgcttgctttgcttactagtatatggcattgttatagataattgaataaaatacaatttag

SEQ ID NO: 363434 - DNA, 585 bp, Homo Sapiens
  misc_feature (124)..(179): n is a, c, g, or t
ggtatgcagggcccctatgtgggattttttaaaaagcaaactggtgtgtattctcatgtggtttgcacagcccagcctcacagcactattgtaaaccctgctctttctgtctcgctagacagannnnnnnnnnnnnnnnnnnnnnnnnnnnnnnnnnnnnnnnnnnnnnnnnnnnnnnnacagctgaaaccaaccagcaagcccttgatgaccaagaggcgtttctttcaaagctatagggcacaaacaattgaccatagatgactccgtttgcattcttctgcagaattatttccttcagggacagattttccaacctaagaaactacctaccgtgtgtattctcttgacggggagagatgaacccttcagctgctaagatccaagaaaacgcctcactgccttaaccttaactgttcttcctggcgctaaaaagagctgtattttttaaagtgctggggcaaacaaagcaaccccaaaagagttgatgtgtgttttaaaagaaaaaacccaatgaggaacaattggagatttttatgcagaaactaaataatccttaataaataaatctctattttggaatcc

SEQ ID NO: 363435 - DNA, 445 bp, Homo Sapiens
cagccttttgggacagatagtgagtgattcttaggaacttgacattgccaagaaattttatagatgccgaagaattcttatgtgaaattcacataagcatgcccattactaaagacagtttgtataaagtaaccctaaatgtttattgaggaacctacagcttcaactgacttacgtgcagatatgtaccaggagaacatcattttagcttgggcgtctttacttggggttttcagaggatccaggaacctcactgtatgcaaagtcttgtggatgtacctgaatgtttttggaggcaggtcacatagtttctgaaagtgttctcttattttcctcaaatgtaggtaaccattgttacaagttatttaacaggagaatagtaacaatgtctaacttatgctaatgattttgtgtgctgagctcccattaattaaaatgtcttcag

SEQ ID NO: 363436 - DNA, 701 bp, Homo Sapiens
ggggcacaatgaagcacctaaaatactgcttgatattataaatttaaaacacaagtgaaagtttagccatggttttgtgcggcatcatagttatgtcaataaagtttatttaggtcatagaatatcctaaagtatcacatagttaaatttttcagtcagtgaagaccgggaggaaatcgtcagtgaattggcttgaatgttctgtggcaatccacaggtctagccaaatattgaaataggagtttagggtataatttgccttgtgatgtttggcagtcactgtttatactttaaaggttatattttaagctatttgagattgcttttgggaagatcactagatttatggaggaattagtcacaaatgacttgtagaaaatactgtcatatagttcatttcatcattttctgttgcaggaagccactccaccacagaatgctaatatgccagtggtacccagtacctcttgtatataggttattgcaaatattgttctgaaatgcttaacttcagaattacattttttaaagtaaataattgttttaaatctattttgtaaagatataaagtacaatagaatttctggagtacagattaaactatttgcactaacacacgtgacgtgcatgatttaataaaataactttactctccctacgcatggtttgagttgaatatcattgaagttcctaatgctgcc

SEQ ID NO: 363437 - DNA, 668 bp, Homo Sapiens
  misc_feature (420)..(438): n is a, c, g, or t
ccactgtgccctttaaaacgatgtggaaacctcaggtttgtggacagcacaggtggaatgacatcttgtgcttcctgaggctcccctctaccaggcacattagcttagtgcttcagatgtcagcccaagtccttgttacctccttttcctgctgcccagggaagagtgtgtgtgctggagctggagcgcttgcactcttcaggtgactattctcacctccatttcctccacatgcattaggtgaaactgaggtctaagcctcctgcaaggtctacattttaaggactcacacatcagggctctcagaaatgtacacaggtattagttctgtttgttctaaaggaaatgtgggtatctctcaggccaggacttagtgactagttttcgctagacagcaggttaatacctagatctcatttnnnnnnnnnnnnnnnnnnncaggattaaagggaactgatcaggtttgttgagttttttagcctaattccaaagcatggaagagtgctctaggtaggaaagaaagctttttcttacgatttgtagctacctactgtgcctgacttggtgcctgtgtgaggattaagcccttagtctgctcttgcaattattcaaatgacaaattaaatttgcttttgtaataacaataaaagttgtcatcttcccttttg

SEQ ID NO: 363438 - DNA, 914 bp, Homo Sapiens
aatgaaaaaggcgttcagctggggagatggaaaggaatcagggtcccgaattttaaaaagaaatgactcctagttgctgttatggagaatgaatggatagccgaccagattgagtgtgaggagcacaaagtgggagttagggaagttgcttcagaaagcttaagagggaaatgctggtagcctggatcagagtggcaatagaggtagaaaataaggagatagattctagctgataaaaatcagtaagacttgaggaatgattagatatggggaaaagtaaagaagagaggtgtcaatgacatgttggtttcctgcatttatatacatatatacatggaaatgccagtaacacatcttgtacaatagatatcaagttgttaacagaagttatctgtggaaagggaagatgaattttacataattaaaagcagacttttaaaaccacacagatatgtacaatgtttaaatattttacaatcagcaggtatacattgccttcatacttaaactcacgtgcaatttgcctccctgaaaaggataggaattatcccaaagaacagacacaagaaaagtacatgacatatttaaagaatatcaagtggtctaatgtttgcagaataagaaggaaagatgtatactggaacagagatgaggagaggattgaagctatttcagaatatggccagatcataaaggtccttctatctgaggctaaagaaatcattccttaaagagtaggaaatggggaagcaagtgaagttttcaagcaagagggcgaaaaatatcaagtttaaatttcagaaagattactcaagaggcagtataaagactgaaccaaaaggagacagaagacaggctgggagatcactcaggcaagaacttaaggcaaaatcaggggcaacagatagagaagg

SEQ ID NO: 363439 - DNA, 746 bp, Homo Sapiens
ggtattttaaacctgctcagataaagtgaaatttagcaaaaggatatcccctcccacccccaaatctaacatgccattttaaaaacagcacaaaggaacaaggaaactaaatattattttgagccatcattagtgaaatacaaacatccaaatagaaacgattgttgttccaccagaagattagaagttaaattatttccacacaataggaatttcacttcgtgtcatcggggatgtagtaggagttgcattatttgtcaaaccaaatagagatgcgtgggctgactttgctgaaatacaaaagaattgaaccttatctgaaggcgttttctaagtggcccctcccatagaagccgggaagttgtccacccctagcagaagccacattaatatttacaaaatggttataaatccttgaagacatttttgcccattttgtataagaaacaggagtaaacaaggtgtttatacttgttatgtttcattaatgaaatattattactttacatcttggggaatgtttgttttctttagaaatgaactaatgatcactacaaaggaagaattcatgacagcatttcctagagaaaaagcttaggtacgcgtctccaaaatgatggtttcctttttctacaaccttagctttttcatagcctcatttcttcttacaacttccccttggggttttttccttggatggccagttttcctttcaaaggtttattttttttggtaactttaatggc

SEQ ID NO: 363440 - DNA, 556 bp, Homo Sapiens
acaggcactgggacatcacaggcttcagtacctgaccagtattagttgcatatatcattgaacacacataccagagatgttttagaaatgtgagaaaaacatccttttggaccatttgaaataagaaagacaaacactaaacaatacaaccatgaaattgatcaccgggattgcaaatctaattgggaaaagagttgagcaaacagcttggactgtttggagttgttgccttactttttaatatgtatttataaagtattccagcaaaagaggatgtagcctctgggaaaaaacaaacatgttacagtgttttttgtagattctcgttctatatctcatcacagcgccagccctgtttttagccggaaaggattcaggataaacattattatgcattctgaattggatgcatattcctaactactgtatttgttaccaaaagtggttctacaaatgctactgaaaaaaatctggaaattcctaatgtcctgagtattaataataaagtttaaaaatgcttttatatcaaaggtgcatcgtgaccaaattgtttaag

SEQ ID NO: 363441 - DNA, 424 bp, Homo Sapiens
ggggagccgcacacggccccggcgcgcctggtagagcctcgctggccccgcgccccggagccctatattaaggccacggagcgacagcgggcagtgcgggcctggcgggaggtgggggaggtccatctcagaacaccccacccttgagcttagctgcaggcccaggccctctgctctgctcccgggctaggaggtggccctctgtctgggcgaacagccccctcctcaccgccccccgtgcaaaagtcgagccggcaaagcaaggggcgcggccccagggccctgcgcccactttgcacacccgctctccggcccgcgcccctgtttacagcgtccctgtgtatgttggactgactgtaataaatctgtctatatcgacttgtccatgtacgtttattaaaaccatagtccgagcgtgttaacc

SEQ ID NO: 363442 - DNA, 659 bp, Homo Sapiens
  misc_feature (597)..(614): n is a, c, g, or t
tgtgaacatgtgcaggagcgggtggaaagacaccccttcgtccagtgcccctaggtgccagaacacaagttctgctttccatgctcccgggagttaatcaaggcgcagggcccggccggggaggtgtactgcccgagcggagacaagtgcccgctggtcggctcctccgtgccctgggccttcatgcagggcgagatcgccaccatccttgctggagacatcaaagttaagaaagaacgggacccctaggctaccactgcctccaggctactgccctctgcccctttgccacccaccgctgccgcggataaattattccctccccgacccagcccagtgccacctctatctgtgtacatactcccttcttccacccagatgggtcccctggggtagatgcattgtgggtggggggagaaagcttgtggctcctgtccgagggggtgtttggggtcccttggcccctccagtttccctctgtcctccttggcttggctttgctgctgcttgtagttgggggagaggtgcccccctcctccttgagaagggacctcctgaaaactcgctctttataaacgaggcaaaagcatttaattnnnnnnnnnnnnnnnnnngctcccttctgctccttcaataaaccgaaagatgggttttttttg

SEQ ID NO: 363443 - DNA, 917 bp, Homo Sapiens
  misc_feature (26)..(26): n is a, c, g, or t
  misc_feature (591)..(648): n is a, c, g, or t
accttccaaaaaagctaacctggccntggtgggtgggtaatggctctgggaacggctgcaatcctaaaagcaaaaccccctcctctgagctctgaatatgggacccagtgccaggagctggaagacaaggtgtttctgccaaacggggacctccatccagagaaaaggaagaaggtgcagggtgggccaagaggcaagtgaaggttggcctgagtctgggccggaaactcagaggatgtttctcctctgctgggagctgtagtttcttatcaaaatagatattgttccaccatccccctccttggcccttcaagtgggctgaagcccttggaaagtgacataggaagtccccagatcttgcccttctcactccagaggctagtggtcacagacagctgggaatggcagccacagagggtcccctctgggagaaacagcttcaccccagcctcagggccctgggccatcactgcagtggccctgggaggtgaggaagaagctggctagaggagggggctcccacctaccttttatttaagccagtattctttgttcctgcttgtaataaaacttcagtttataggaacacgnnnnnnnnnnnnnnnnnnnnnnnnnnnnnnnnnnnnnnnnnnnnnnnnnnnnnnnnnnttgcccgacccctccttgtaggcccgcccacctcacccgcccacccttctcgctgtggcgccccccctccgatcccagcacccctcccctcttggctttctgcgctgaatgcctcccgggccacgcacaggaagacatgttgttgacccaccttcttttctaaccactgcccgcgcacacccaatccagtccaaaatggggccggtaccacgccgtggagctcccatccccccccgtctctcccccatctgcgtgaccagccacgcccg

SEQ ID NO: 363444 - DNA, 523 bp, Homo Sapiens
agatccccacggagaggtacggaatcgactgcatcatgaatgatgaatggatgcaaggggtgccataccctacacctttggaacctttcccaactggatccccaaacatttgtcggaaacccagcactccccaaggaagaagaaaatgaggtccaaaagcactttagaacatttgggcattacagaagagccatattccgaaataacccaagggagagatgctcgcagcctcaatcacaggggtctatagaattattttacatagagtccaaaggaagaaggctttggaaagtgtcccagtcatgatgctaccagaccctaaagaaagagacctcaaaaaagggtcccgtgtctacagagggataagacacacatccaaattttgctcgattttataaattgcactagactgcttgtaactaaccaagatgattgttgctgcttctaaatttttttcaaggacaacttgagtggagacatttttgtaatttttaaataaacttaaatttgagatatgcaaaaa

SEQ ID NO: 363445 - DNA, 539 bp, Homo Sapiens
tgcttcacctggccccaccaaggctgcttgcctggcccaacctaacgttctgtgccatgctaaagcttgaactgttgctcttcttcaggggaggaaatagggtggagaacgggaagggtcttgctcctaagtgttgctgctgtggcttttttgccttctccaaagacgcactgccaggtcccaagcttcagactgctgtgcttagtaagcaagtgagaagcctggggtttggagcccacctactctctggcagcatcagcatcctactcctggcaacatcaggccaacgtccaccccagcctcacattgccagatgttggcagaagggctaatattgaccgtcttgactggctggagccttcaaagccactgggatgtcctccaggcacctgggtcccatgaccagctccccgtctccataggggtaggcatttcactggtttatgaagctcgagtttcattaaatatgttaagaatcaaagctgtctttgttcaggctgctataacaaaaatataatagcctgggtggcttaaccccc

SEQ ID NO: 363446 - DNA, 941 bp, Homo Sapiens
agcggggcgtgagcggcggccaggccgctctgcttggcgctcatgtccgccctgctccggaccgggccgcgcgctgtgccccgagagccaagaaggcaggagcgaacgcgggagctagagggcagggccgaggcgctgcggccggcccagagaggcccccgcacgtccagggccgccgcccggcgccccgaggggcagtcggcgcccggcgcgctcttctcggggcggtgggcaaggctggcggcctgacgcgggcgcgggagacgaggagacgcggagaagaaggtgtcccggctgcaggcacccctcgctgtctccagcaggaaggggcgactcaggtggcggtgcgactgccgctggtttcggttctggtgcgccatgacgggccgctgccggctttctggccgccgcgcttggcgcccccgggcctccgcaccgcctagtctccggcggccgctgctaccgccgccatcctccggctcccacggcggctggcggctgagtgggaggcgcccgcccagactccgccggagccaccttccctcctcccccagccacccaagccgttattaacggagaacagaggaaaaaacgggtggcgcgcgaggggaggacgaagaatgggagggaggggaggggtggcccgcgcttcccggcaaccgtcgcttccctccccctgcgagattaatttcacaggggattaatttctcatttacaaacaaaaatgtaatcatagcctcctggtatcgcacatccatgggaatactgaatttatttggactagaaactaacacctgctggaatggtcaccagaatagaacctcttaatgaagttcaaagctgtgaaggcatgtttcttccaaaaatgctgtcatttgtaaacattcataaacatttaataatattatgattcactttaaagaattattgtaaaatactgt

SEQ ID NO: 363447 - DNA, 220 bp, Homo Sapiens
  misc_feature (58)..(58): n is a, c, g, or t
  misc_feature (99)..(99): n is a, c, g, or t
  misc_feature (111)..(111): n is a, c, g, or t
tgtttctttaaacttaaggagagaaaaacaaaaatgagattcctacactttgcctaantgagccactaccaggttttctggcagctgtggccacattanttgtgagatgantttttttctttatgttcagagtgacttttgattctgattctttatgttttgtatggagcggcacttttatctgtgttttagcagaactgttcctctgtatcctttacgg

SEQ ID NO: 363448 - DNA, 198 bp, Homo Sapiens
atgagccactgtgcctggcctcagatttctttagtttgttacctaatgtcctttttccattccaggatcccatcctacaacatgtctttttttcacacactgaaaagactttttatattactataaacatacattaaactattaaaatgaaaatattcattggttttggtagttactgtttgctgcccctcagggacc

SEQ ID NO: 363449 - DNA, 462 bp, Homo Sapiens
  misc_feature (89)..(89): n is a, c, g, or t
ggacccggggcgcaaaaccccagaatagttcccagcccatgaagaggaagagccacaaagaaatgctcctgcaactcctgcactcaagnacccaccttgggtcctgctttgccccagatgagggacccactaacaaccttcctcagcacatgtgaatgtggactggttttaaaatgcattcattctgctaggattgggctggaagctggaacagtgagagtactttttctgctcctagtcatctccctttctcagcgtgacatcctcctgcagcaagcctagtatcactagcagtagttcctgcgactcttagcaacacaacccgaatatttgctccctgcatctgggtcctccaccaggatgggcctgcgcatctgcattgctgtacagacaaacaggccttttaatttacatcctcctttaattctcattaaaatcgcagggtttttgtttgaaaaaaaa

SEQ ID NO: 363450 - DNA, 868 bp, Homo Sapiens
  misc_feature (182)..(182): n is a, c, g, or t
  misc_feature (246)..(246): n is a, c, g, or t
  misc_feature (310)..(310): n is a, c, g, or t
cagcattaatttaaccttaccctttttttcgagttcaatagtccatgttctttagctcattgttaactgagaaagttcagtacctaatagtagatcatacatgagtttatctacacagtagctaatacagcaatcaaagcagccgaaacaaaaaagagaagcttagaaactctcattttaantgtatagtgcaggtgggcatttgagctctgaatttccctgctgtatttgcccgttcagttttanaatgtgcacaagaccagcccacaatatgcagctagctgaagtgctggaaaacctggcatgcctntgacttctacaggagttcctgcccctagtgggtaagttacctattgcactgactttatgaagatatctcttccagtgcccttagtgtgagcatccccacaaaccttatgaaccagttgaatccaacctgaatgcctctccataagcccggagcccacaaatgcattttctccagggcccttggatggagggaatcaggaaggcctcctcccaaacccaaggctaggagagatgcttcctccggggtcccagggaggagaacagaaaggactgagaagaactaggaatgccctcccaaacccaaggccagcaggagggtctcctccggagttccacagatggaggaggcctaaaagaagaaatcaagtctgcaacctaaaagtgggagatcttggattttgatagcacttacccagatcctttcccagcatagtcaggaacaactggactttttcaaagggaccttggctgtacctggtgtcctgggtgacacaggaaaaggaattcaggggctgcttcagaatcccatctttgccagatacgttaactttaaaaaaaa

SEQ ID NO: 363451 - DNA, 831 bp, Homo Sapiens
ggccatgattaagaggggcagccgctccagcctttgaagactttgaaagccagagattcctggcgcaggcttggacttcctgggagctcctccaagtacccaggggcatcagagctgcctgggtgttacatggcccagggaacccaggttcagggtaggacaggcaagaccagatacccaatgtgcaaagtgaaaacactgggctccctgttaaacgatgaagaattcaagacagtgacagcattacgtcacccctggggacagaggtcagcctaaggtgacacacggggactactgtgcttccggaggctccctgtgtcctggaggagaaaagcattagagggggcagctggacaagctcccaactgcagagtcccagccctggctggggcagggccccggcctgggactcagcatttctgatatgccttaagaattcattctgttttgtacaattattttttaaaagtaaacgtgtggcgaacgcacccacgccatccgctcccggcaccctcagccgcatctgcgggcggcccctgcctccgaaagaattgctcaaccctcttttcgtggcgcgccgccccaatgcgagccggaaaagcccctaccgtgttctccccgaagaccatggggcataagcaccgggttgggatattccccaaacgaaaaaacaccccgcgtggcgaaccagccctcccgtgaaacccacccccaagcgcgttcccccggggtatctcctgggggttcccttacccgcggatgcttccgacgggcgctcgctgcacgatttaaaatcatcctcgcccccgcccctgttacccccttctatcc

SEQ ID NO: 363452 - DNA, 853 bp, Homo Sapiens
  misc_feature (770)..(782): n is a, c, g, or t
gggcaacaatgcgagagaagcccggaacccccagagatacggctgaacaggaaagaggcccagggtgcagacacagcgtaggaagtgcctcgttccggtacctgggccgggtgcaatggcgcgtgaacccctctcggacaccggggcggcaggcaccgcgtatccagaggagcagtggcctcacacctaggggcccctatccacacggtatgcctaaggcatcggggtattgctgctgtcagcgtctgctgtgcagactcatttctcaaggtggccaagccgggcaccaccgtatctcccattagaggatgtactttgtaggggtgtaagtgcaccgacgaggaggtcctcgccccaacacagtgtgtcaagctgtgctggtgccacccatctacccgctagaccggtgctgctatgggaaattcctgctagactgtcccacaggctggacccctggaagatgcatggaagcctggaaagctggtgggtggctctgacggggaaaggactgcgcccttttgctcctggttccagggagtcctgggcatcctgcggtgtcgagcaatagcctggcttcagagctgagagtgcctggggccacaggaaaggcaggaacaggaccttctctctcccaggcccaacgcaggggccctcactggctgcagctgatctgtttccttataccagatcctcagtctcactaaagacagcgatatgggagacacccagggcctggcccgccagcccaaaagatggtcatcgggaagagnnnnnnnnnnnnntgctgcagttgttctctcaagctagggcagaagaggggtgtcaagctcctcaataaacttgtctccccttc

SEQ ID NO: 363453 - DNA, 1115 bp, Homo Sapiens
gtagagattgtgtgctttgtcatgtgacccagcctggtctggaactcctgggctcacgcgattctcccacctttgcctcccaaattgctgggggattacaggcgtgagtcaccatgcccagcctaggatgagtttagtaagatttggttatgctggggagatgggaaaagccaggttaggggcacgcaggctggaggaacggggtctgtgggggtggatggatagccatggaggcagaaaggagcctctgcaggaagagtctggaagagcgaggaggaagcggtgaggcaggggagcactgtggaatggccctgaggccaggaggggctcaggatgaccaggcagaaacagagcgggtccagggtggaggggaggcccgtgcagcatgagcaggaggctagaggagacagaccatgaggcccagggagacccctcactggagactctcccgtagccttcttttcagaagtcgaaagttggtttttaatcccttccaaggcttgaatggctcattatcattgtacacaaagttttcccaacaatatttaaaatcttcatagtccatgatctccacagcgaccccttcctgactcaggctgcggagcccctcctggtaacatggatactggaagtagtagaggcgggcggtgaagatggtgagattcacgttgctgtgcctggccaggaactcggccacctcccctgcacagtctgggcaagggctccaagatgtgtaccaggtgacctggtactttgtgttaggagacagtatgtcgtcgcagaaccaagagaggaagcacctttctgcatgacaatgggtctcagaatccacctggtttcggaagacgcccgtcttccaggagacaactgagcggcgctttataccttccacggtgaagcacagccaagtttcgttccgatcgttggcttcccataggtttttaaattggaagtagaatgtgcctggatacattgccttcatcgggtttctgatctgtggattcatgttcagcctcttagatatgcttgtccctgtcccactcttttctgaagcgctgtggcttctcttcctgcttacagcgtccttgcagttgagcagccctctttaaagaccc

SEQ ID NO: 363454 - DNA, 833 bp, Homo Sapiens; identical to SEQ ID NO: 176114

SEQ ID NO: 363455 - DNA, 312 bp, Homo Sapiens
  misc_feature (36)..(36): n is a, c, g, or t
  misc_feature (58)..(58): n is a, c, g, or t
  misc_feature (92)..(92): n is a, c, g, or t
  misc_feature (125)..(125): n is a, c, g, or t
  misc_feature (141)..(141): n is a, c, g, or t
  misc_feature (169)..(169): n is a, c, g, or t
gctgtattttgcctttaaatttattaaggtaaatanaagtagttaatccttagatgtnaggttcccagaatgtgccttacatattcctgttnctgttacagtgatttaaaccagtagtatagganaaaacttaaaaaacanaaaaaccatgtagtattttctgattttnttttccatgagggaaaatatctaatttttataagactaagttgagttatacttcttggttcacattttggaaatcagagattacagattacatggccatagcttatctgtgttaaaacaataaaagcattaaatgaaaaaaaa

SEQ ID NO: 363456 - DNA, 394 bp, Homo Sapiens
gaacctgatacactgtttgtttactctcaactctttgtacaaatattattgtcctaagggccttttcccctcctgcctagaaaataggttgtgtattggttttattcaacctgctgtctgctttaggattggagaaggtacctggatccttgtggactgccactgctggctgcctcctctccaactcatcagaagagcattttgacaaagacagaggacttggaccagggcatgccctgttggggatgtttctgtcagcaaggacatggcatggaatcaagtgggctgatgtgttgttatttaaacagtaccaaagtgcattcttcaatgtatgtttgcctgcttgaagcaaggcccaagttgagaatacagtaaaggaaactcatgaaagtgg

SEQ ID NO: 363457 - DNA, 810 bp, Homo Sapiens
  misc_feature (332)..(392): n is a, c, g, or t
ggagtggaggatgtgccaaatattctcttcaaatgccaccttctcaatttataactaaaatagtgttatctgactaattcctctgaattttgatgtaagatctatataggcccccaaaatgatcgtagtacatgccagtcatttctcagtgaaataaatacaataccagagtacattatgggttttattgctttcttttatggtagacctgttaatggggaaaaaatacatcaaatcaaatagaatcttatatctgtatgttaaaatagagcacttacctgaagtcagtggcctggatcatagccctggatcatttcccagtctgtcctgtnnnnnnnnnnnnnnnnnnnnnnnnnnnnnnnnnnnnnnnnnnnnnnnnnnnnnnnnnnnnncaagtggctgcagtagatgatggctgagagcccttcctgttcccagatgccttggtccaaagaccccacccctctgctggtcctgccaacgtgttggtgctataagctgcttcagatataaaattggtttatctataatgtttgttcatttaatagcttctaaaaggcctttttgttatacagtgcttttttttctagttttatggacttgattactgtaataatgtcttgtttttagccatgtaactacaaacagaaattctcttgaagtcttagaaaatttggcatttgatataatcattgaagagaattttggtggtaaggtaaaaatcctttggcttacgcattctgttcaggcatcttattaaccataaaaactggggatcatttatttggaaaaaatgtccctaagggaaag

SEQ ID NO: 363458 - DNA, 2571 bp, Homo Sapiens
  misc_feature (1364)..(1364): n is a, c, g, or t
  misc_feature (1504)..(1516): n is a, c, g, or t
  misc_feature (2047)..(2107): n is a, c, g, or t
acccactttcagagtaggggggtagccccaaaaggaggaatctcctatggccaataaggtatcttgactttatcaaagtagaagagagggtcacttcggagtcaaatcatacactaggcctttgatgctttaattcttcttcagttcattaaaagtaactactaaggaaaggttaaaaacttcccctcaaaaaggaatcaaccccaggaagtaattatttacaacgattttcccaaattttgtacaatctgtcctggaaagcaaaccccttttaaaatctaatgtctgggctttgagtattagctcatttagggtggacaaatgcattactgttttcaaactgctcacatttattcagtatttctccaagttgctatctactcagccttatgaatgcccctcgcttttctaaggccatgtgaaaatcacggcactgcccttagccttgtgtcatctgctttttcgttctgcgatatgcccagttcccaaatcaattataggtacctggtttaggagagaggaagattttacctctcaaagggtgagatttgaaatttacactaaaaaagacaactttacattttaaggcttcacttaatgagaaattcttttttttataagtctatttttctactcagtttcagaacactaatctgattttcactctgatttttaacgtttctttaaatatttataatgtagcttctttcaaaatattttcatgaaaaattacttttattataccattatgtgcatgttattggtagcaggcatagtttattatttagtactgaaacatgctcttttacctaacagtaaacaagtatgttttgatatatatctgttaatatgcttatagtggtaagaaatggacttgaggtcccaggagatttcattttattcaccctggtcagatacaataaaggctatgagtataaatacataacttcctaaccaggtgtagggcatgttcatgaatatcaaatcttttgatgctggacccaagagaggaaaagttgtagctaaatgttgatttacttataactagacgtctatgtgagaaaatatatgtatacatatatatgatatgcagaagtcactttttttatcaggctttattctccttacaaagccacagtttaactgtctgcaacagttggtttatgttaatgatagacaaatacccagtgtttgttactttttccaactaccactgtaatgataatctttctcacgtatatacatgcaacttcttggcttcatttccatgaagctgtttcaatatattcagtatactttgtccttaatgctgcttctgttaacagtgatctctttctttttttcattcttatatcttcattagnttcatcataaaatctgtccagttgaggcctcaggaccacggcatgatttcatgactccgaagtattttacagaaacattttttaaataagggaaatattttatataccagatggttcacaagtgatggctcatagctagnnnnnnnnnnnnncttctaaaaaatgtcaggtttttaaaatcatttaccttattaaaatgaaaagtgccatacttaacttttaaaggaaagacctgacttgctttttctctatttagactgtttttgtactttactaatctttaaactatcaggaaaaaaaccaaaactttataccaatgatttagtaattttgaggcatagggtagcttacgtagtggaggatgtgccaaatattctcttcaaatgccaccttctcaatttataactaaaatagtgttatctgactaattcctctgaattttgatgtaagatctatataggcccccaaaatgatcgtagtacatgccagtcatttctcagtgaaataaatacaataccagagtacattatgggttttattgctttcttttatggtagacctgttaatggggaaaaaatacatcaaatcaaatagaatcttatatctgtatgttaaaatagagcacttacctgaagtcagtggcctggatcatagccctggatcatttcccagtctgtcctgtnnnnnnnnnnnnnnnnnnnnnnnnnnnnnnnnnnnnnnnnnnnnnnnnnnnnnnnnnnnnncaagtggctgcagtacatgatggctgagagcccttcctgttcccagatgccttggtccaaagaccccacccctctgctggtcctgccaacgtgttggtgctataagctgcttcaaacataaaattggattatccacaatgtttgttcatttaatagcttcttaaaaagcctcttttgttatacagagcttttttcttctagcctttatggactttgattactggacataaaggccttggtttttagccactggtaactaccaaacagaaattcctccttgatgtacccactaaaatcttgcatttcaaaatacactttcaataccatctttgttggcccctgaaatatattttttgggtcgcgcctcccgtgccagcgctccctattaaacattaaacaatgcggataaacttattcgacgaaacattgccctcacggtaaacgatataataatcatgtccccc

SEQ ID NO: 363459 - DNA, 831 bp, Homo Sapiens
  misc_feature (87)..(147): n is a, c, g, or t
ggttatatctgtatgttaaaatagagcacttacctgaagtcagtggcctggatcatagccctggatcatttgccagtctgtcctgtnnnnnnnnnnnnnnnnnnnnnnnnnnnnnnnnnnnnnnnnnnnnnnnnnnnnnnnnnnnnncaagtggctgcagtagatgatggctgagagcccttcctgttcccagatgccttggtccaaagaccccacccctctgctggtcctgccaacgtgttggtgctataagctgcttcagatataaaattggtttatctataatgtttgttcatttaatagcttctaaaaggcctttttgttatacagtgctttttttctagttttatggacttgattactgtaataatgtcttgtttttagccatgtaactacaaacagatattctcttgatgtcttagtaaatttgcatttgatatatcattgatgagattttgttgttatgtaatattctttggctacgcatctgtccagcatcttattaaccataatactgtgatcattatttggaaatatgtcctatggaaagaataaaagcatgtacttcacagctagcatgttcacagatttgaaagaagtttcattaaaagcaccattgctttctgtaaaagaaaaaaccaacaacaacagaccaaaagaaaaagccccgaattaataacacaatgacaaaaaccgaacataatgttagaacaaacaactaatagcatcactattggtgggcccccttggccccccaaaaatttttcaaaaccttttttttgggcccgcggcccccataagaaaacaaaagagggctcaaaccgttgtccc

SEQ ID NO: 363460 - DNA, 307 bp, Homo Sapiens
tctctctgggcctctatttctccatttgtaaaacaagtggctgcagtagatgatggctgagagcccttcctgttcccagatgccttggtccaaagaccccacccctctgctggtcctgccaacgtgttggtgctataagctgcttcagatataaaattggtttatctataatgtttgttcatttaatagcttctaaaaggcccttttgttatacgtgcgttttttctagcttttatgcgaccttggttactgtcataatgtcttgtttttagccatgaactacaacagaattctctgatgtctagag

SEQ ID NO: 363461 - DNA, 774 bp, Homo Sapiens
ggaactttccagggttttgtagtcacctagattttaagctgatagcatagtgcttcagcggttcttctaaccggggtatgcaggaacatggctgcagacacgtttgggtaaacaggcaccttctgacttcttcattgtttcctgtagttctccctcttcccacaaagctgtcagcgcagtggaagaggttgcacttctccgagagaggacaggtttctgttaagatcaccaagtagctgtgctttaattagagccagacaagctttcaaggtcctttaagtatttgatgatcaactgaacacgtttctattcaaggagaaaacaccattcagtaagaagatggagtagatatcagataaaacaattcacgtttaatatgtaaatgtaccaattatgtgattcagtttcaactttcaagtacttcctgagaggttagtacattattattgagctctcacagaaagcttaatcatagatataattaacctgatccaaatgagtaaagtggaccttagaaaggctaagtgatctttctctggctatccagctagtagtaatgaagtcaggtcttgaaccccggttctgctgactgaatttggatgcactatagtacaagcttttagcaccgaagtgtggtcctcagaccagtgcctgccaaccagatgttactggtctgtgaggaaataagtacagatactgacaggaagcttttataaacaatttattggagtgtttttgtttctgttgggtctaattaaaaaaattggagcttgt

SEQ ID NO: 363462 - DNA, 1131 bp, Homo Sapiens
agcatataccatgttaaaagcagcggtcggccggaatcccgggatatcgtcgacccacgcgtccgaaaaatgtaaatggccttcactcaagtttgagtgtttaaagttgaaagatgtgctctactaaaagttatagtaattctaacctcacattgaaatgagacagtattccttgttatacaggctgaatttgaagattagagaggatctaatgtttacttaggtaaaggggcataggttttgtagttaagatgaccagacagctaaaagctgtgatgggaagtatggactgctcctatttatagtctcagaaaatggacctttaggtctctatccgtattggcaattattagaagaaagttacacccttttgaaactacaaaagctgtcttggaatttccccctcttctccctatttatgtccccttagaatattttagggagcctataattattttctaaccaaggaaaaacttaagtctctttaagaagcaattacttttcataacatcagattgaataacccaccttgctgttcagcccacatcctactggaaacaaaaggtaagaaacccattttctggttcttgattgtttgggtctgaatttgtttttaaaactaagctaagtttaatgttttttaaaatgctgtttggaatatgaatagattccccgtaaaatgatttttcctaagttttatgctttagtaaatattcagtgctcacgtctgtgcatcatagtgcttgcgtttaatatgatttattgtagaatctcaacttttcttggtgtttgttgtctttgaaacattgtcttggtcattagggctggtgttttcacatttctgtggtcaaggtggatttcttatgtgtgcctttttgcttactttgtatatgaattttgtaatttaaattgcaagtaagttatatatatgtatttaccataaatagtattaaaagatgagaaactgttagactgaagttttgttgtaacataaccattatttccatcccagtatgaagactgcaaacgcagaaaacagattacagtcttttatccattttttgaaatccaaaaactacgaaaacaaaagattttttgttgttgagctaattaaatgtgaaccctggccag

SEQ ID NO: 363463 - DNA, 1216 bp, Homo Sapiens
  misc_feature (199)..(265): n is a, c, g, or t
  misc_feature (385)..(395): n is a, c, g, or t
  misc_feature (1196)..(1196): n is a, c, g, or t
atatgtattatatactgtattcttacaataaagtaagctagagaagagaaaatgtttgttaagattataaggaagagaaaatatatttactattcattaagtggaagtggatcatcatgaaggtcttcatccttgtcatcttcatgttgaataggctgaggatgagaaggggttggtcttgctatcttgggtggcagannnnnnnnnnnnnnnnnnnnnnnnnnnnnnnnnnnnnnnnnnnnnnnnnnnnnnnnnnnnnnnnnnntattctgactcagaatagcttaagaccctcagggtcatagaaaaataccatcataatctcttttatggtaggttggcaatataaattattaacaaactctaaaatattaccagtacctgnnnnnnnnnnnttcagccaggaaaactgtgaagtggaacatttagtcactgtttttcattcattttgaaatttttatatgtttacatatatctgttgtaaaaaataccaactttccaagtactaggaatgctgaccactaagcctgatctaaagtttatgttggggacctcaggtatacaggagtggaacagggacaggagtgaaagctttgactgaagacaaatgtgggcttatggcctatctctgtcactaatttaactatatgggcaaagtactaaacctgtgtcttcatctgtaacatagggattagacaccagtgataggagggtcttggtcagtagctaatcacagagctgcttccttaaaagccttgagtacttttgtttaaaagtttaggtctacttgaaagtctgtaaagtgctaatttttatcatcctgagagatctgtttctcccctttccagttaccagtggcattctcccaaaactgttagtatctatgttatagaaagatacttaaatgctatgataaattgtatgaaaaaaactttaaaattcagcaagcaattcttaatgaaagataaaactggccctctagtaccataattagtttagaattcagtcttttaaattatttgcaccttgagactctgtgaaatgaaaacatttaacagtaaactcttgtcccaagggagcaaagtgagagtaaatgctggtccatagtgatggggaaaaaggactgtgttcaccatgagtttttcaggatgcagcataaagcttatctaaatactacacagatcattatcttttcngccaaccaatcatatattca

SEQ ID NO: 363464 - DNA, 1211 bp, Homo Sapiens
  misc_feature (519)..(519): n is a, c, g, or t
  misc_feature (521)..(607): n is a, c, g, or t
  misc_feature (660)..(675): n is a, c, g, or t
  misc_feature (906)..(916): n is a, c, g, or t
  misc_feature (1035)..(1078): n is a, c, g, or t
gtcagtcaggatgctattgaagacagcagacaggcccggactgagaccgtggttgatgactgggacgaagagtttgaccgagggaaggaaaagaaaattaaaaaatttaagagagagaagaggagaaacttcaacgccttccagaaacttcagactcgacggaacttctggtctgtgactcacccagcaaaggctgccagcctcagctatcgccgctgactgtgcccctgtggaaggagatgatcaagcggtgctgattcacgagagtggaagcctccagagcttggggctttctggctgctcttcattgacctgtgtgttcccagcacacgaacagcgcccctaacggagatttgttcagcgactgaatatacacctgtaaacgagtagcatgtatacattgattttgattacaaatggttctgtattatataccaccgttctgactgcttttttcacttatagcttggaaattgtcttctgttggtaatacagaaatctgtttcagtcttttgaaanannnnnnnnnnnnnnnnnnnnnnnnnnnnnnnnnnnnnnnnnnnnnnnnnnnnnnnnnnnnnnnnnnnnnnnnnnnnnnnnnnnnnnntttgtcgggccgccccggcccctgaaaaagttttaaaaaccttttttttgcgnnnnnnnnnnnnnnnnagaaaatttgaaaaagcctcctcgttggggccccccgggcccccctgggcacaggactaaggggcttgcaatttctccccacacaaaaaaaaccccccgggcggggcaaccagggtggtttgcttcacccaacaccaaaaaaagagccgcccgcgggggcccctcactggggttctttaaacaaaacagccaccccgagaggctttccttcgaaattttaaaatgtgaggnnnnnnnnnnnggggggatcttcttccgggggggccggggttataaaaattccattcccgcgccctctctggcccccccctgggaagagccttttgggggaaacgtattattttattgaacacctggcgnnnnnnnnnnnnnnnnnnnnnnnnnnnnnnnnnnnnnnnnnnnncgctgtgcgcaaaataataataattccgccccgcgtcgggtagaaaaacaaccggggtgggccccaaacgaaggggagaacaaaatattttccgcccccccgggtggaaaaacccacgcgggcgggggtagaa

SEQ ID NO: 363465 - DNA, 544 bp, Homo Sapiens
cctgaaggaaagactgaggccattcatctgctctggagttcatcctcgggatctgagatgcacagcctgaagacatctcatcagccatcagctcccttaagctatctttcagatcattcagagcataaggatgggcatgtgagaaagccagggatttgacaccaccctccctcccactggaggcgggaggacaacggaagcggtcagccagtttctgcgggaaacaagcaggccacacggaatagaaaaaaacgctcccccacttgttccctgatcacttcatcgtggatgtcagaccaaattgccttctcacaggacatcttggtgcatccgcgttctcaagcggaaaggacattttgcttttctgttggcaggattagtagccacgcgggtcgtccgcagcagtgctgtctttttggtttttcccttggtttcactaatgcgtgcatgtggccctctgaacgatcactggtttactttctatggatacaatctctcctccattgagaattgattttacaaataaatgtcttcgttcaacctt

SEQ ID NO: 363466 - DNA, 781 bp, Homo Sapiens
gcctctctctggagtcggctagccggggctcggggagcggggtgcgcagggctcggggcacgccttgccacctgcagcgcccgggtgggccgcgggggcctcggcgggacgcgctcggcctgtcgcaggagctaacgcaggggaatccttgcaggtgggagcatttcagagcgcacaagccatggtggccaaacagcggatccggatggctaacgagaagcacagcaaaaacatcacccagagggggaacgtagccaaaaccctgaggccgcaagaggagaaatatcctgtgggaccatggctgttggcactgtttgtttttgttgtctgtggctcagctatctttcagatcattcagagcataaggatgggcatgtgagaaagccagggatttgacaccacctccctcccactggaggcgggaggacaacggaagcggtcagccagtttctgcgggaaacaagcaggccacacggaatagaaaaaaacgctcccccacttgttccctgatcacttcatcgtggatgtcagaccaaattgccttctcacaggacatcttggtgcatccgcgttctcaagcggaaaggacattttgcttttctgttggcaggattagtagccacgcgggtcgtccgcagcagtgctgtcttttggtttttcccttggttttcactaatgcgtgcatgtgggcctctgaacgatcactggtttactttctatggatacaatcttctcctccatgagaattgattttacaaattaatgtcttcgttcaaccttt

SEQ ID NO: 363467 - DNA, 553 bp, Homo Sapiens
tacatttatgattctaatatttggcattgtgtctgtatctaatttaaacagatgttaatggacgtctggccgaaactattatacttttataagatgagctgaatcctcttactttaaaaactggtctttttatttaccctctgtggtagaagagtcaccagcaggttccaaattgatgtgtatgataggaaaaaaaccttaattttaaatataatatagagccttaaactatgccactgggtggcagaggctgtataaaacgcacttgttttcatgcaggagcggggcaagtaaggttgagcctgactgtaaacctagaactgcggaaggactgggacttttgtacaaatttcacatttattttacagcaatcatgctgcatttgtgttagtgttctttataataaaaaacaaagcagcctcctggctggctgtgttacaagtgactcttccttagacagctagaaagatgctgactttgtcaaacttgcatttatatgaaaaccttctgtctctaatatcacagaataaactttctttagatgctgttcttt

SEQ ID NO: 363468 - DNA, 519 bp, Homo Sapiens
ggaagcagtagtaagaaatttgaattaaggaatcgtaagggaatcgagattatctagtttcccctcgacattttataactgaataaacaataaaaaacaagagaagtgacagctttatagcatctgattggggaaaaacacatcttttctggggctagacagtccataaataggacttggaaatggaagtgtagggggagatcccattgtacttcagtggaaaactatgcattgtctggaatctagactctggacaaagacccttccttcctggctgtttgattttgattctatgggagctatcttgcaactctgtaagctgtaggtaactgatagcagagcaaaataattcttgtctatagacgtgtacattgtgtcttagcgtagattcacccgacctccttccccagttttgcttctattagcacatttatttcagtaattttgatctttggattctccttggacattcctcactgaaaaatgaaataaaatttttggcatgtgctcttcttttgc

SEQ ID NO: 363469 - DNA, 587 bp, Homo Sapiens
taccgccagctcaatgagaagctagtgcagctcatcgaagactatagccttgtctcctttatccctctcaacatccaggacaaggagagcatccagcgagtcctgcaggctgtggataaagccaatggatactgtttcggagcccaagagcagcgaagcttggaagccatgatgtctgccgcaatgggagccgacttccatttctcttccacactgggcatccaggagaagtacctggcaccctcgaaccagtcagtggagcaggaagccatgcagctgtagcaacaaggtggaccctggagagcaggatgcataatccagcactggggaaagtggaggctcctgatgcaggctgcagacccaagagcaagtcctcccagccagagctggcgggctggcaaggggatattcagctctgcaaaggacttctggccaaaaagccagacatggtgccaagcagaacaccccccatactgtcagtggtgtccgtgagctctgggccctgccaccagaaagtcgagcactggtcctagtcaggctgtgatgaaatgtgctacaatacaagagtttattttctactttttgtg

SEQ ID NO: 363470 - DNA, 805 bp, Homo Sapiens
  misc_feature (614)..(656): n is a, c, g, or t
cgaattgttaactttcccaaatgcagaaggagaagacttcagaaggatatagaaatgggaatgggtaactcaaagtccaggttaaacctcttcactcagtctaactcaagagtttttgaatcacacagttttaacagcattctcaatcagccaacacgttatcagcagataatgaaaagacttataaagcggtatgttttgaaagcacaagtagacaaagaaaatgatgaagttaatgaaggtgaattaaaagaaatcaagcaagatatctccagccttcgttatgaacttttggaagacaagagccaagcaactgaggaattagccattctaattcataaacttagtgagaaactgaatcccagcatgctgagatgtgaatgatgcagcaacctggatttggctttgactatagcacaaatgtgggcaataatatttctaagtatgaaatacttgaaaaactatgatgtaaatttttagtattaactacctttatcatgtgaacctttaaaagttagctcttaatggttttattgttttatcacatgaaaatgcattttatttgtctgctttgacattacagtggcataccattgtgttgaaaagcccaatannnnnnnnnnnnnnnnnnnnnnnnnnnnnnnnnnnnnnnnnnnacatctttgcactacctgtttgcctccaagagactatcagttccttggggacagggaccatgtcttattcatctttgtgtctccagcatctagtacagtgcctggtatatagtaggtgctcaataaatgttgaaaccaactgaactgcc

SEQ ID NO: 363471 - DNA, 479 bp, Homo Sapiens
cttcaccacggcccacctcatcacaggctctgccgggtcctcgctctgctcgctcaactccagcctccatgaggggcactcgcactcggctggctcccctctctttttcaaccacgtgaaaatcaagcttgctgacagtgccctggaacgcaagaggatttctgctgctcgagaaaggaaagccactaaaatcctgggcatcattctgggggcctttatcatctgctggctgcccttcttcgtggtgtctctggtcctccccatctgccgggactcctgctggatccacccggcgctctttgacttcttcacctggctaggctatttaaactccctcatcaatccaataatctacactgtgtttaacgaagagtttcggcaagcttttcagaaaattgtccctttccggaaggcctcctagtcttattcggtgatgactcttgttatcttttgtgtcctgtaacctcatcgggattgtc

SEQ ID NO: 363472 - DNA, 901 bp, Homo Sapiens
cctaggcacgcgggtgtattggagctgcccgctacacgccccatccacgatcttcctggacgagctggagtcggtgatgagtcagagaggcacagcttctgggggagaacatgaaggaagcctgcggatgaagacagagttactggtgcagatggatgggctggcacgctcggaagatctcgtatttgtcttagcagcttctaacctgccgtgggagctggactgtgccatgttacgccgcctggagaagaggattctggtcgatctccccagccgggaggccaggcaggccatgatctaccactggctgcctcctgtgagcaagagcagggccttggagctgcacacagagctggagtacagtgtgctgagccaggagactgagggctactcaggctcagatattaagctcgtctgcagggaagcagccatgcggcccgtgaggaagatctttgatgcacttgaaaatcaccagtcagaaagcagcgacttacccaggatccagttggatatagtaaccactgccggctttctggatgtgctaactcacaccaagccctccgcaaagaatctggctcagagatactcagactggcaaagagagttcgagtctgtctgaaaccacatttaccctgacctggccacaaaggcaaccacaaagacctcctagtttattaatgtccgtgggagaacaaaatgattggaatggaaaagagaaaattatttttgaagactggattaacttgagccactgtattgttttggatagctgagatatatttattaacttaccattatcgatgtcagcaaaatattgagagtttcagttacatacatatatgtgctattgggtcatacaatggagatttttctgacaattagactccataaaattttaatg

SEQ ID NO: 363473 - DNA, 450 bp, Homo Sapiens
gtcacgggacgcatggctgttccctgcagacgagcttaatatctgagcctgagtagccctcagtctcctggctcagcacactgtactccagctctgtgtgcagctccaaggccctgctcttgctcacaggaggcagcagtggtagatcatggcctgcctggcctcccggctggggagatcgaccagaatcctcttctccaggcggcgtaacatggcacagtccagctcccacggcaggttagaagctgctaagacaaatacgagatcttctgagcgtgccagcccatccatctgcaccagtaactctgtcttcatccgcaggcttccttcatgttctcccccagaagctgtgcctctctgactcatcaccgactccagctcgtccaggaagatcgtggatggggcgtggtagcgggcaagctcaaataacacccgcgtggggtaggaggt

SEQ ID NO: 363474 - DNA, 774 bp, Homo Sapiens
tgaagagggagaaactggcccgaatgggtaaggtggtgcttctccttccagggccttccagacaaggtctcctggcctctcaccattatctgggcctcagatgaggcgaaccctggaagggagttgggggtggaaggtgggaggcgcgcccagggatgagcgagatgaggagggcgcgaaccagcaatctggggctgtggttttagacccgctcagcgccctgggcgagggcaggcagcccctcggaggcaagctggcggcggccctcggcctgggagcccgcggcagcctcggcgtcggcggtcagggcgcctcccggggcccattcgtgctcggcgcaagcctgggacggctcgtccttggcctcgacgagcttacgggagcgggtgtaggccaggatgaggcctccggccaagcaggcgtagaagatcatgatgagcaggatgtagagataggcgtcgtcgcccttggcgctggtcacctcgcggcccacgaaagggtcaggcacgacccccatgcccatgctgggacgagggccagcgcccaagccgctggcattaccccggtggtgcagctcgagcaacaggcggctcagaagggttcgcagccgctggctctcgctgcagttcatggctttcggggagtgacacggcggctccaggacgctgctgacctttcccctgggcgaggggaagcgagctagcgagcgggccggccggcgggcagggctcagcagcggaaacagcggtagcacccagctctccggcgagcgcg

SEQ ID NO: 363475 - DNA, 775 bp, Homo Sapiens
attggcagcggcggcggtgtttactgggtggactctcagcagaagcggtatgttccagtaaaaggagaccatgtgattggcatagtgacagctaaatctggagatatattcaaagttgatgttggagggagtgagccagcttctttgtcttacttgtcatttgaaggtgcaactaaaagaaacagaccaaatgtgcaggttggagatctcatctatggccaatttgtggttgctaataaagacatggaaccagagatggtctgtattgacagctgtggacgagccaatggaatgggtgtcattggacaggatggtctgctttttaaagtgactctgggcttaattagaaagctattagctccagattgtgaaatcatacaggaagtgggaaaactctatccactggagatagtatttggaatgaatggaagaatatgggttaaggcaaaaaccatccagcagactttaattttggcaaacattttagaagcttgtgaacacatgacgtcagatcaaagaaaacagatcttctccagattggcagaaagttgatataggtggacttttttacaggtcagttgaggcaaaaaactatgggttttttcaggtgaacctcccccatttaaatactcagaagataaggtgtgaatgtatgtattattagagtccgaaagtatttttataagttactggttttcacccacgcttttgtgggagagaaaatcattgcaaaatcattttttttgttcggtacaataaagtttactaaaaaacc

SEQ ID NO: 363476 - DNA, 506 bp, Homo Sapiens
  misc_feature (232)..(271): n is a, c, g, or t
caatatcttaaaaatgtcctccataattggtaaaaaatatttttgctctcacattggtcaggtagcaacttgttccattcaccaaaaacacaatttggataaaaaaattaaagtgcagtaaagacgagagccaaccatttcatataaaccagagttctgtattactgtgtttacctgactcatggctacaattttaaaatggaagctataaggtctccatttgcatctatcnnnnnnnnnnnnnnnnnnnnnnnnnnnnnnnnnnnnnnnngatactttcctatcttctgatggtattacccaattaatttataaaaccctataaagaagctctattctgacaggcttagggacaaattgcttatatcaattaaatatttataaagctctcagaaatataggaattaaccccaattttttttaagttacatgtgactttgggaaatatttgttagataaaaccagtttaaaattgttgattgaataaaacagcagtattctgagtt

SEQ ID NO: 363477 - DNA, 1133 bp, Homo Sapiens
ggtccggaattctcgggatcccgaagccccctgagattgcaaatggctatgtggagcacttgtttcgctaccagtgtaagaactactacagactgcgcacagaaggagatggagtatacaccttaaatgataagaagcagtggataaataaggctgttggagataaacttcctgaatgtgaagcagtatgtgggaagcccaagaatccggcaaacccagtgcagcggatcctgggtggacacctggatgccaaaggcagctttccctggcaggctaagatggtttcccaccataatctcaccacaggggccacgctgatcaatgaacaatggctgctgaccacggctaaaaatctcttcctgaaccattcagaaaatgcaacagcgaaagacattgcccctactttaacactctatgtggggaaaaagcagcttgtagagattgagaaggtggttctacaccctaactaccaccaggtagatattgggctcatcaaactcaaacagaaggtgcttgttaatgagagagtgatgcccatctgcctaccttcaaagaattatgcagaagtagggcgtgtgggttacgtgtctggctggggacaaagtgacaactttaaacttactgaccatctgaagtatgtcatgctgcctgtggctgaccaatacgattgcataacgcattatgaaggcagcacatgccccaaatggaaggcaccgaagagccctgtaggggtgcagcccatactgaacgaacacaccttctgtgtcggcatgtctaagtaccaggaagacacctgctatggcgatgcgggcagtgcctttgccgttcacgacctggaggaggacacctggtacgcggctgggatcctaagctttgataaaagctgtgctgtggctgagtatggtgtgtatgtgaaggtgacttccatccaggactggggtcagaagaccatagctgagaactaatgcaaggctggccggaagcccttgcctgaaagcaagatttcagcctggaaaagggcaaagtggacgggagtggacaggagtggatgcgataagatgtggtttgaagctgatgggtgccagccctgcattgctgagtcaatcaataaagagctttcttttgaaccaaaa

SEQ ID NO: 363478 - DNA, 449 bp, Homo Sapiens
tcttagtcgccgctctctctctcacctctcagggaaagggggggacataggggcgtcgcggggccccggcgaatgcgccccccgccgcctctcgggctgcgccgcctcgcggggatgaagcaccggccgtgaagatggaggtgacctgccttctacttctggcgctgatccccttccactgccggggacaaggagtctacgctccagcccaggcgcagatcgtgcatgcgggccaggcatgtgtggtgaaagaggacaatatcagcgagcgtgtctacaccatccgggagggggacaccctcatgctgcagtgccttgtaacagggcaccctcgaccccaggtacggtggaccaagacggcaggtagcgcctcggacaagttccaggagacatcggtgttcaacgagacgctgcgcatcgagcgtattgcacgcacgcaggacggccgc

SEQ ID NO: 363479 - DNA, 499 bp, Homo Sapiens
ggaaccatggggcacagccccgggcgaccctcgggccggcgggggccttccgcttcctggcgtctttcttcccccgccccgccggctgctggggaagcggcgggcgcccagtgcctggaggtcgctccctcgcctcctctggctgcgggaacggagaggcggcggcggccggagcagggtgggcggcctgagccgagagcccggccggcccccgcgaggaatatggcgacctgcggcgaccggagcagcagcggcgtcagttgctgcaccgccgacttcttggagcagcgaaagcgactcgcgagaagacgccgccaagtggaacccgggccctgcggccctgggagggggcagcaccgacacagccatgaagccccgggcgcggcgctgggcgccaacgagagccacggcaacctccagacggcgccacagcaacctctaggcagtgcccacaccagcctacaggtggcgcccctcgcactgcacctgccgcggccgc

SEQ ID NO: 363480 - DNA, 424 bp, Homo Sapiens
atttatgcctttatttatttttaccaatagttgatatacctatataatattcacgtgccacaaaaatatgagaagattacatgtgaatattgatctccaagggtgataaagtatacaaaatgttgattaactgaagcagaaatccattgagaaatgcttataaccatcaggtattacatttacagatgttgccaagtcaaagttgaacatccacagtgggacactcatcatacaactctgtgtaatctcttaaaaaggagacagagaaatagccaagtacgtagtaataaaatctgcctaatcattctcctacgattcttctatgcttgagttcgttttataggagtcttattacagtgcacgtgtgacattccttcccgatatacatattctcaaggaaacgtggcatcctgtagcccctgct

SEQ ID NO: 363481 - DNA, 981 bp, Homo Sapiens
  misc_feature (137)..(140): n is a, c, g, or t
  misc_feature (145)..(164): n is a, c, g, or t
aattcccaagcccttgttcatggccagggtttttcttagggaaccaggtaaggcccagttccctttaccttctggggcccgcggcgccaaaagaaatggtttagaaagtttttcaggggcggaggcggccgacaggnnnnttttnnnnnnnnnnnnnnnnnnnntccaggatgttctgtgatgtttataattagaaaagttgctcggaacaggatagaaccttgggaaggctgatggggaagcagtccagactaggctggactttgaaagagggcccacaggaaggaaaggaaaggtggggcaggggggcggcggtgttctaagtcccaaggcaggttgctaggaggggtgctgactcaggctggagtgtaatctggaaacatcatctttgcccagtccctgtagggctggggcccactgggcaggtgtccccagggctgtgagacatctttatgaagttctccaggtggctgttacaggcagtgggcattctctggctgtcactgggtcttctgcaggtcctcaggcccaaaggaggagggcagcagctcctggaccgtcatgacaatatacgtaccatccggcttggtcatgtacacgggccagttggtgccaaactctctcatgacttgcctgcaggccccacatggagagataaaatcatcttgcatgtcactggcgatagcaattgccctgaaatccttgtacccttctgagacggccttctggatagcggtccgttcagcacagatgcccagcgggtagcaggcattttctatgttgcaccctttgaagattctcccctcctgggtgagcagggcagcccccacaggaaagtgactgtaggggcagtaggctgacttcttggcctcctgggagcaaaccagcagctgctggacacactcaggcttcagggtgcaggcaggacgcttctgggccatgttggtaccccgggccctcgtgccgaattcgccacccagc

SEQ ID NO: 363482 - DNA, 544 bp, Homo Sapiens
attctcagagaagaaggaaggagtggcagatagcatttcatttttactactaagggatgcctcactgtgtttctattaatgcttatctttttgccttaaattctattttgtttgatagtaatatagttgcaacaattttctggttaatgtacacatgatgttatctgtttctacccattcacttgcaattttttgcctctttatgttttttaactgtacaatgacatacagaagtttattcagtttatacaagtaatttctcagatttataaagtaaaaagctagactgccagaggaaaaattccttacattgatatcaaaatatcttctagtccccataaatcatctgcaatcacttgatagaaaaaatatccacaaccatataggtcatgcagacttttaaaatgctatttgtattcagtttgtttcaaactgagcaaaacagtgcaacttttacttttgtatacatttcaaaattatattaatgttccttctcatttcaactcatcccattaccaataaaacgggagtgagataaaagggg

SEQ ID NO: 363483 - DNA, 521 bp, Homo Sapiens
  misc_feature (499)..(499): n is a, c, g, or t
ttaacaaatacgaaaatctattaagggtggaaggaggtaagttcataatccatatagtagaataactacagccattaaaagtgataccaagtgtgtatattgatagggaaagatacttcgccatgtaatttaaaaagcaggccacaaatagacactgtcggatgctattttttttaaagtaaatacatatatgtaggaaaaatactggaagatgatatgtaaaaatattgttagcgattatatctggatctatctaattatgtgctctttatttttagagttttctatattgacttatttgtttacttataaaagaggagaaataagtgtcattttaaagctggaggacatttaaagctggagctgacattacagttgaatgtcaaacggactgatattaaatgcagagtcaggtgtcagctgggtcactatctggcagggatctaaggtgtccattaaactattgcagatgccctgctggtgccatgatggatgagcngggaagggcgccggattgccct

SEQ ID NO: 363484 - DNA, 1586 bp, Homo Sapiens
tgagatccacgccctggcatcggccagcaagcccctggcctcgtggaccacccagcaaggaattcaggaatgccgggacgtggtggaggacacggctatctggccatgaaccggttgggtgtccttagagatgacaacgatcccaactgcacatacgaaggtgacaacaacatcctgctgcagcagacaagcaactatttgctgggtctcctggcacaccaggtccacgatggagcttgcttccgcagtccgctgaagtcagtggactttctggacgcctatcccggcatccttgaccagaagtttgaggtctccagtgttgccgactgcttggactctgcagtcgccctggcagcatacaagtggctggtttgctacctgctccgagagacttatcaaaaattaaaccaagagaaaagatcaggaagcagtgactttgaagcaaggaacaaatgccaggtgtcccacggccgtccgttggcgctggccttcgtggagctcacggtggtccagaggttccacgagcacgtgcaccagccttccgtgccgccctcgctgcgggccgtgctggggcggctcagtgctctgtacgccctgtggtccctgagccgccacgcggccctgctctaccgaggaggatacttctctggtgagcaggcgggagaagtgttggagagcgccgtcctggctttgtgttcccagctgaaagacgatgcagttgccctggtagacgtgatcgctcctcctgactttgttctggactcaccgattggcagagccgacggcgagctctacaaaaacctctggggcgctgtcctgcaggaaagcaaggtgttggagcgggcatcctggtggccagagttttctgtgaacaaacctgtcataggaagtctgaaatcgaagctctagtgggactggcacacattcagccaagtctaatgaaacgaagggaactaatcagacgtggacctcaacttctgattccagaacacaccggagattgctgctgctttctgagcccgcacctgtgcgcctaaactgctgattggcctcaactgcccaggcggacgggagggaggcacccggccggctggactaatctgggatcgcggtgatttgcagcgtggaaaagaaatgcagatgatcatgtctacctgatgcgctgtgggttttttgataattagaatttcgcacattcagttttcagggttcagctcctttctctaaagtaaacagcccattgtcagggatcttctggtcagacaacctgtgattcatctagattttttaccgagctccacttcattgagaagtcaatgatgccagtctggttctttgtcaactctccctcggctttgtcacataattgaattatgtcataaccttattaatttgcacatagatcatctgaatgtcgtggtttaagacttaaggaggaacatctgtttgattactttcttttgtggaactggaaatttccatcgaggaaatgtttttttaaaaagtctaatgatttgaatgggcaattcagtctccaaccgcccccctccccctgccaccagttatatacaaatcactttattggt

SEQ ID NO: 363485 - DNA, 458 bp, Homo Sapiens
  misc_feature (442)..(442): n is a, c, g, or t
gaagcagtgactttgaagcaaggaacaaatgccaggtgtcccacggccgtccgttggcgctggccttcgtggagctcacggtggtccagaggttccacgagcacgtgcaccagccttccgtgccgccctcgctgcgggccgtgctggggcggctcagtgctctgtacgccctgtggtccctgagccgccacgcgccctgctctaccgagctgaaagacgatgcagttgccctggtagacgtgatcgctcctcctgactttgttctggactcaccgattggcagagccgaccggaaggctctacaaaaacctctggggcgctgtcctgcaggaaagcaaggtgttggagcgggcatcctgggtggccagagttttcttgttgaacaaaccttgttcatagggaagtcttgaaatcggaagcttctagtggggacttggcacanatttcagccaagtctt

SEQ ID NO: 363486 - DNA, 758 bp, Homo Sapiens
gtccgtcttttgatgggcaccggcccttctgaactgtgatgggacctgccttgctccactagtagctgggcagctcacaattcacaccttgtgtacctgccacatcccctcacttggttggaaaacatcccagaaggtcttgagtcccaccacccactgggtgtcagtccaaatgactgtataggaggcccttattttggtcacagagcaagctggccatgaacgaaggagagaagacgccacagatttccttccctctcctccaggagactctataagatagatcccccagtcctgctcagcccgtattcccatgcctccctctcattggaggagctgaccaaagcagccctaatcgggccataacacttgaccaattcagctgctggcagagggaggaaacaagtgttttcccaagtggcattgtcatctcgctttcaccctgactaaagacttgtcttaaagcagcagcccgagccgcgtcccagccccaggtgcgttagtggcggaggagagcgtggcacttcctccatggtcggcaaatggcgactctatactctccgcccgccccagggctggatggattagaaaaatgcctatttttcttgtatcgatgtagagactctattttctcccaaagacactatttttgcagctgtttgaagtttgtatattttccgtactgcagagcttacacaaaattgaagaatgttaatgttcgagttttcttatcttgtgtttagaggttgttttttgca

SEQ ID NO: 363487 - DNA, 417 bp, Homo Sapiens
tttttaagagattttttgcatattctctgccttgttcttatcaacttgaaatgttggcattttcctaaccttgttttgttggcctacaataattcagtattcatgtcaaaattgagaagtgccctaattgaatgtgtttgaatgttatccttgcacaattctttaaattgaaagataaaatgttttacctcactgttggacatacattcccaagcttttcaactctaggagaaaaagaaaatcatgttttcctgtattgtaaattttagactatttcatatacattgtattaaaactgccatatcaattttaatgtatagattttgcaaatattatgctatatgtaatacctaactgtatctgtagtgtatatgtaatatatttatgcccaataaatgttttaattctttctgactt

SEQ ID NO: 363488 - DNA, 513 bp, Homo Sapiens
gactaccaaaatggatttgatgtattccttaccttttcccaaggaatttttttcccacctgggaataaggaagagaggactagttgaaaccatttgagctggagaggcttatgggccaatatgaaagtgggccaaattcttgcaatacaccctattcaattgaaagtacagtgtctaaggataagaatacttctttaaagaccaacaattgttttaatgcaatcttaattagtaaatggtttacattttttctattgttattggttttaaaatttgctaccctgaattctgaaatattataagagttaataccaaaaatacttttaatgtctgacatctcttacatttcacatggttctttttattcattgtaaataaaagtaaacttggataaatttgagaataaactttgaattgttgcaaactatgattatcaatttgtaaatttaccctttgacataataatgtacatttttaaatgtagccattaaattctctatatttaacccaggg

SEQ ID NO: 363489 - DNA, 1123 bp, Homo Sapiens
  misc_feature (661)..(671): n is a, c, g, or t
  misc_feature (771)..(797): n is a, c, g, or t
  misc_feature (799)..(845): n is a, c, g, or t
  misc_feature (924)..(1055): n is a, c, g, or t
agcggggtcctcggctgcggcgggcaccatggtcggtggcgaggcggctgccgcagtggaggagctggtttcgggggtgcggcaggcggccgacttcgcggagcagttccgctcctactcagagagcgagaagcaatggaaggccagcatggaattcatcctgcgccacctgcccgactaccgcgacccgcccgacggcagtggccgcctggaccagctgctctccctctccatggtctgggccaaccatctcttcctaggctgcagttacaataaagaccttttagacaaggtgatggaaatggccgatgggattgaagtggaagacctgccacaatttactaccagaagtgaattaatgaaaaagcatcaaagctaagccagaagatttatcacattttcatcatcagctacaggattagaaaggaggctgggatgaatgtgacatagaccacagcagctctcttaagactcctggtattaccaacataaagaggcaggtggaatgagaaggactctgtctagattggcttttttaacattctcattttcccaggagttatcactgtaaaagtatgcatggatatttatgtatttataaatcatgcactctaagatgagttcatcaacattgtaaaagccctcttttctgttttcaggnnnnnnnnnnncttatcgacaaggtcctcactctgtcgcccaggcagaagcacaaaggtgcagtattggctccattgcagcctcgaactcctgggctcatattttcagggnnnnnnnnnnnnnnnnnnnnnnnnnnngnnnnnnnnnnnnnnnnnnnnnnnnnnnnnnnnnnnnnnnnnnnnnnnatatttttcagtttttaacgtcagaattttttgtttaaatgccttttttgggctgggcacaggggcttatccccataannnnnnnnnnnnnnnnnnnnnnnnnnnnnnnnnnnnnnnnnnnnnnnnnnnnnnnnnnnnnnnnnnnnnnnnnnnnnnnnnnnnnnnnnnnnnnnnnnnnnnnnnnnnnnnnnnnnnnnnnnnnnnnnnnnngggggccggacatctgggaatccccagccactccgggaggctgaaaccaaaaaaactggcttgaacac

SEQ ID NO: 363490 - DNA, 458 bp, Homo Sapiens
ggcggtcctctgtagcatgatcagtactatcgtgacattaaaacacaacaaaaagatcttcctatctgaagggtacagaggtgaatggctttggttttcatttatcttcttcactgccttttctcggtgtggtatttgacaagattttagctcaaagcctcaccatgaaatgattttatctgtttgtgtgtgtgtttgttttgggacaattttagatacctgagtgcactttttcagttagtcctaacttttaaaagaaggaaaaccaagagacatatctggtgtacgtgttgcagtatgaactctggttgcaatccctccccgtcccacactgccccccatttgagtacaccgcacaagtcaaacgctaggaagtttgaataaaaccaatttttctaacttgttgctcatttgttgtaactcaataaagcaaagactaaacatttttataaaaaaaa

SEQ ID NO: 363491 - DNA, 1042 bp, Homo Sapiens
  misc_feature (892)..(945): n is a, c, g, or t
  misc_feature (956)..(973): n is a, c, g, or t
cggtccggaattcccgggattacagacaagaatagagctttcaatggaaattttaaataaatgggatcaggatcttgaagcctttcattgaaaaattgtaacaggagatgaaacatggctttaccagcgcaatcctgaagacaaaacacaaagcagtggttaccaagataagtagttcagttaaagcacaagaggactggttgagagcaaaggtcatggcaacagcttttgaatgctcaaggcattttgcttgttgactttctgtagggccaaagaatggtaacgtgcttatcatgggagtgttttgagaaacttagccaaagcttcagcagaaaaatccccgagaaagaccagagagttcttcaccacaacaatgttcctgctcatccctctcatcaaacaaggccattttgcaagagttttgatgggaaatcactaggcatccaccctacagtcctggtttggcaccttctgactttttgtttcctaatcttaaaaaaatttttcagggcagtacatttttctcaagttaatgtataaagaaactgcattgatgtagataaattcccagaactctcagttctttagggatggactaaatagctggtatcatcacttacaaaagtgtcttgaatgctatagagctaatgttcaaaaatatagtttatattttttatcttttaaccatttttccacaaactttttgaagtctccttgaatatgtaccatttataaaggggaaaaattctgtgactactcatgttgacttaatgctgacttaattttctgttttgtaaatatatacaaacaagttgatacaaattttgtttatagcccttaaacaaatttgtgaaataaatgcatttcggaaaacaaactaaaacaatggaannnnnnnnnnnnnnnnnnnnnnnnnnnnnnnnnnnnnnnnnnnnnnnnnnnnnngcgggacggannnnnnnnnnnnnnnnnngcccgggcgggcaaaccccgcacccgcagcccccgccaaacgcacgcaaaaacccaccccccccacgac

SEQ ID NO: 363492 - DNA, 1011 bp, Homo Sapiens
ccggggccccaaggtttagaacccccccttccacagttaaggtagcgaggcctgggtggccgaattcggcacgagggtgtgaaagatcggcgcgcaccgcaggagcaacggttggtcctgcggctgtgatgtcggtgttgaggcccctggacaagctgcccggcctgaacacggccaccatcttgctggtgggcacggaggatgctcttctgcagcagctggcggactcgatgctcaaagaggactgcgcctccgagctgaaggtccacttggcaaagtccctccctttgccctccagtgtgaatcggccccgaattgacctgatcgtgtttgtggttaatcttcacagcaaatacagtctccagaacacagaggagtccctgcgccatgtggatgccagcttcttcttggggaaggtgtgtttcctcgccacaggtgctggaaggctttagagccaccatgcagcagtcacctggcacaccgtgctgaagatctggccacacctatcaaagccccctgtctcaactctgaacctgcaggccctgctgaaaggctttagggccacatggcgcagcgcctggtgcgcgtgctgcagatctgtgctggcacgtgcccggtgtctcagctctgaacctgctgtccctgctgagaagctctgaggggcccctccctggtaggacctgtgagggctggctggcccctgggctgccccttctcatggcttcgtgctgactccataaacattctctgttgaggatgtccagtcagggcttgacaggcccaggctcagccccccgtggctgggaaggttccctgcagtgccagtgctgcagcagggagagctgggcagaagcagcgagggggcccagctggcgagactgtagccccctcccactcccacactcactcttgcagagcctgtgtctttaagcagctggcgtgttacatctccatttaaggtttcctttgaacaaaaggtctgtggctaaaaaaagtttaaaaatctaaaaa

SEQ ID NO: 363493 - DNA, 996 bp, Homo Sapiens
gcggccgccgtgctgccgcgcactctgggctgctctgggcgctgcgggtgaagggcgactggacgctaagtgcggctgcgatggtgagcacaggctccaccaggctgaacatggagcccaggatcagcatcttcccaatcacaacgtccacaggcagctgggctagcagggacccaatgggtgtgagggcctctgagctgtccagggccccctggtcccggaggtagaggatggcggtttccaggctggctggtggtgggggctcgatgaaggggaaggttcgggggtcccccacactcatgctcttcatctgcagcaccaacgagtccagggccaccctccgaatttctgggacggggtagggggcgaaggcatcatagtccgattcggcatagaagcggaagcagactccggggcccgtgcggcccgcccggcccttccgctgctctgcgctggcctgactaatccagaactcctgcagccgttgcagcttggcctggggatcgtagctcatctccttcacctttccggaatctactacgaagcggatcccgtcaatggtgactgaggtctcagcaatgttggtggagaggatgcatttccggactccagggggtgccacatcaaataccttgtcctggtcggccacagacagggcgctgtgcagtggcagtaccacccagcgctgggtgtggctggcataggtctgggcagcctccagcacggcgctgatctccgccatgccgctgaggaagacgaggaggtcaccccgctcctcaggcgggtacttgtggtcaatggactccagcaccctcaggaaaggccgcgggtccagcttctctgacttggacgtggtcggctccgcctcctgcggctggtacacaaccgtgatggggaacagcctcccaggcaccctgtaccacaggggcattgctgaaatagctggagaagagcgagatgttgatggtggccgacatgaggatgaccttgaggtca

SEQ ID NO: 363494 - DNA, 218 bp, Homo Sapiens
cggcaacaacaatggcaggctttcagtttcccacttaatgatgctgtattttaaaaggttattgtaaactgtaattttatttttggaggtgaaaagaaacaaaagcagctgaagggccaggaagtgggtctttctagggatggggcattctgcgggatggctttttaaaatgggttttttcctttaccgagaccgaataaactgtgttgggcccctgc

SEQ ID NO: 363495 - DNA, 744 bp, Homo Sapiens
  misc_feature (718)..(718): n is a, c, g, or t
gcactgctgttccttaagtatctctcatctaatgggatcagttatctgtgttcaccaaaacagaactaagcgcaagactgaattttaaaattcccatgcaaaggctttgaaagatacagtcctccacttccccatacccaggcctgagagttattcattgagtttcttgtacactgcttctctaccccagctcatatactcataaccttccccctaccctcaggtgtgggttttgctaccaggcaggtggccagcatgaccaagcctaccacaatcatcgaaaagaatggggacattctcaccctaaaaacacacagcaccttcaagaacacagagatcagctttaagttgggggtggagttcgatgagacaacagcagatgacaggaaggtcaagtccattgtgacactggatggagggaaacttgttcacctgcagaaatgggacgggcaagagaccacacttgtgcgggagctaattgatggaaaactcatcctgacactcacccacggcactgcagtttgcactcgcacttatgagaaagaggcatgacctgactgcactgttgctgactactactctgccaatcggctacccctcgactcagcaccacattgcctcatttcttcctctgcattttgtacaaatccacgaattcttctggggtcaggtgccactgaccgggatccagttccagttcccatggtgtatgtggttnttattttaaactgcctcatagggggc

SEQ ID NO: 363496 - DNA, 1051 bp, Homo Sapiens
gggggggcttcgcgtctccttctacggatatctgtggaccttatggaagcaaagactcttggaactgtaacgcccagaaaacctgtcttatctgtcagtgcaagaaaaattaaggacaatgcggctgattggcacaatttaatcctgaagtgggaaaccctcaatgatgcaggttttaccactgcaaataatattgccaacttgaaaatcagtttattgaataaagacaagatagaactagacagcagcagcccagcctcgaaggaaaatgaagaaaaggtgtgtctggaatataacgaggaactggagaagctgtgtgaggaactgcaggccaccttggatgggttgaccaaaatacaggtgaaaatggaaaagctgtcttcaactaccaagggaatttgtgaactagaaaactaccattatggggaggagagtaaacgaccccctctgttccacacgtggcctacaacccatttctatgaggtttcgcataagctcttggagatgtacaggaaggagctgctcctgaagcgcacggtggccaaggagcttgcccacaccggggatcccgacctcaccctgagctacctgtccatgtggctgcaccagccctatgtggagagcgacagcaggctgcatctggagagcatgctgctggagacaggccaccgagctctctgacgtcctgagacggctgcggacactggctccttccacgtctcaccaggcagacagtctgcctaggacccagtgccgcaggcctggatcagaccccaggatcagaccttcttggggtcttctggccagagcttgtcaccagccccatggcctctccaggcgtgctcatgcccacaacccgcggccagccccacgtggtgccgctcagccttctctgcccctcctgggaatctgtcattcgtgggtgcttcagagtaaaatcaatgagtttctgagcagaatgagtgagtgatctagtttctataaattaggcatgctttatacattatgtttgtgtagaaaatccctggtttaatatttttactttatgcct

SEQ ID NO: 363497 - DNA, 1309 bp, Homo Sapiens
  misc_feature (544)..(619): n is a, c, g, or t
  misc_feature (679)..(680): n is a, c, g, or t
  misc_feature (696)..(710): n is a, c, g, or t
  misc_feature (1140)..(1148): n is a, c, g, or t
  misc_feature (1170)..(1170): n is a, c, g, or t
caaatctgccaccgtgggggaactgacgctggagatgcaaggtgctggtgggtctgagctggacgtcgcggtgtgtcctctgtgcccacggtctgagctagctagcgcaccgccgagttaaagaggagaaggaaaacatgctgctctggtgcacgcctgagcgtcctccatcttccaggatggcagcaatggcgctgtgcggcctcaccaggcccacgaggagcagcagcgctcggcccggagcagcaggaaggcccctctgtggagcgcccgccgtatgctccggggtggttcagtcactgcttgttgacatcaacatggcaattgcactcatgtggactgggaccgtgcgagctgccgtgtgggttagtcgggtgccaggacaatgaaatactccagcacgtgtggctgacgaatttgtttctacagaaataacagctggggacaactgcggtgatgatgtaaaaaccttcccataaaatgtaagaaaagctgatgaggctggtgacgttcagcctttgtcaataaacctgtcatgtgcggnnnnnnnnnnnnnnnnnnnnnnnnnnnnnnnnnnnnnnnnnnnnnnnnnnnnnnnnnnnnnnnnnnnnnnnnnnnnccactcaacaccatatcactccctccccaacaacgccccttaaaacccccttttcaaacnntatttttctttgcggnnnnnnnnnnnnnnngcaaaaattttcttaaaaccttcccctttggggcgccgcgcgcccccaaacaagaaaaggaacaacatgggctacaactcgtttccccaaaagcaaaccccccggggaacaagaacaaggggccggtggcatccctccccacaaaaaaaacacccccccgcgggaggacacccgcggggtgtccttaacaaaaaacacccaatagagggccccttcggcggaggtctctttttcggggcaccccttccacaaagggaggtcctcacgagggggccctcccaatattataaataatcgcaccccccgcggcgcgtgtgcacttttcccgcagaagagtgtgggtgagaaattctacaaaaacaattctctcgccccgagagtgcgagaaacccccccacaaaacctgcgtgtttatgatacccctctacannnnnnnnnaggcgcctaccaaaccaacctntgcgcggcttccggcgaaataaataatccctccccacacgaggttaaacccgcgcggttgacaacacaaacgtccctcccttacttttggcccccgctttttcaaaatcccctaacgcggggggcgaacacctactcgc

SEQ ID NO: 363498 - DNA, 231 bp, Homo Sapiens
cataatttactatttatgatgtatttaagtgttttattaaggacagagttctgttaggggtgggagggaatatttgagggagggctgggtcttagggaaaggaatggggaagcaacatttttattaagtgttactatttgcctctactttgtattgttcagaaatggcaaatacaatataaaagtgatatatggttttaatgtaataaactttaatgagttatttaaaaaa

SEQ ID NO: 363499 - DNA, 526 bp, Homo Sapiens
cttaagaatctgatacatgtatctcgtaaaacacctctgatacttacctgcgcttgtggctgtgttttctgatactatgagagccgtagtatctggataccggagagtctgcgaacttgagagaagggccgtgtctgattttccttcagtgtcccaaggaaggatcttgcacagtacccagatttggagaggtgccaagtgaatgcttcggtggactgaatgaatacaaatcaaaaataatgatgcagcgggaatggatgcagtaagattgctgtggcctatgcagttcacacagttcacactctgcatgttgaggagtaagtggacagatctcttaagcccaggggctagcaaaccggtctgtgggccaatttactcaccgtctgtttttgtacagcttgtgagctaaaaatggtttttaaaaaggttgaatacaatcaaaagaataatattttgtggcatgagaaaagcatatgaaattcaaattttagtgttcataaataaaattttattggaacctaaaaaa

SEQ ID NO: 363500 - DNA, 467 bp, Homo Sapiens
  misc_feature (96)..(150): n is a, c, g, or t
  misc_feature (157)..(297): n is a, c, g, or t
caggcatcttaaccttaccatctgagcttcagctgaaatctgtttataggcaacattgaaagtaccagattggggccaggtgtagcggcccacacnnnnnnnnnnnnnnnnnnnnnnnnnnnnnnnnnnnnnnnnnnnnnnnnnnnnnnncaagacnnnnnnnnnnnnnnnnnnnnnnnnnnnnnnnnnnnnnnnnnnnnnnnnnnnnnnnnnnnnnnnnnnnnnnnnnnnnnnnnnnnnnnnnnnnnnnnnnnnnnnnnnnnnnnnnnnnnnnnnnnnnnnnnnnnnnnnnnnnnngtaatgtctctttttaacactgaatatgttaggtggtttttcttgatggatttagggttaacctagttaataataaattgtttccaggtaattatcaagttttgtcattttataaatctgaagagttaatattgtcatcgatacaaataaagtgaaatctgactgaggct

SEQ ID NO: 363501 - DNA, 2078 bp, Homo Sapiens
gggcgaggcctgggtggcgaattcggcacgaggctcgtccgctcgcgctgcccaccgcggctccagcagctccaggcgcggttccccggcccgcgccgctcccggccccccggctcgggcgcctcccgccgcagcgcaggctcccccgccggccgggctcctgcgcggcgcggctcggctcatgcccccgggcgcggggcacacaggccggccggcagccgctgggaaataggcccccgggggcggtggcggcggcggggccatggcgcggagaccccgggcgccggccgcctccggggaggagttctccttcgtcagcccgctggtgaaatacctgctcttcttcttcaacatgctcttctgggtgatttccatggtgatggtggctgtgggtgtctacgctcggctaatgaagcatgcagaagcagccctagcctgcctggcagtggaccctgccatcctgctgatcgtggtgggtgtcctcatgttcctgctcaccttctgtggctgcattgggtccctccgcgagaacatctgcctcctgcagacgttctccctctgcctcaccgctgtgttcctgctgcagctggccgctgggatcctgggcttcgtcttctcagacaaggcttcgagggaaagtgagtgagatcatcaacaatgccattgtgcactaccgagatgacttggatctgcagaacctctattgattttggccagaaaaagtttagctgctgtggagggatgtcctacaaggactggtctcagaacatgtatttcaactgctcagaagacaaccccagtcgagagcgctgctctgtgcctgactcctgttgctggcctactcctgaccaggcagtgatcaacactatgtgtggccaaggtatgcaggcctttgactacttggaagctagcaaagtcatctacaccaatggctgtattgacaagttggtcaactggatacacagcaacctattcttacttggtggtgtggctctaggcctggccatcccccagctggtgggaattctgctgtcccagatcctagtgaatcagatcaaagatcagatcaagctacagctctacaaccagcagcaccgggctgacccatggtactgagaatccatcctgcacctcctcaccatggaaactggcaagcctcataaacgaacagcagtgggtgctgaaagcagcaccaaatggagatttggattccagccccccagtgacagcccagtgggaagaagcaaactccagatgggcagaaggcagggtgcacaggtggctccagtctcaggaggatgcgcctcctctcccccatcccagccctcagcattgtgccagagtgatacccttaagtgttgaggtttatgttttcagtttgtctgggaaacagcagttgcacagagagttgggggtactgctgctgccttttcaccgaggcactgccaccacacagctctagcagggatgctcctgagcttggcggacatacttagatcctaacgtgccagtgagacctggctgtggagagtagcactggcagccctgcctggactccacttggcatgataccagctccagaagggaaaggagtggagcaggcagtgaggagagagcctgggggtcggctggggacagccgtatgtgctaggtaggagtggagggagatatgtttaccaaatgcctgtcctgccatcctcccaggtagtcagagtgagctacatcctgccccgccttcatttccatggaaacatggcagctaggacacggggtacaacagcagccaaattcttccccacctcccttacttcgaaaaaaagtttggaaccctggtccctatactctgcagtcagaagtgggactgagccatacatgcccttgaattcctccctgtctggccctccctctccagcaagcagggttttctttaacttggcagtgtgcagaggagaagtggtaacacccccaccccattcccctgcatcggagctcagtattcctacagggtaagaggtaggaatcttgctgggacgaggggagccagaagtggcaataaaagcgtgttgacctgggctaaa

SEQ ID NO: 363502 - DNA, 974 bp, Homo Sapiens
  misc_feature (918)..(927): n is a, c, g, or t
ggtcaaagaagctgtggattcagttcaagtccaatgaagggaacagcgctagagggttccaggtcccatacgtgacatatgatgaggactaccaggaactcattgaagacatagttcgagatggcaggctctatgcatctgagaaccatcaggaaatacttaaggataagaaacttatcaaggctctgtttgatgtcctggcccatccccagaactatttcaagtacacagcccaggagtcccgagagatgtttccaagatcgttcatccgattgctacgttccaaagtgtccaggtttttgagaccttacaaatgactcagcccacgtgccactcaatacaaatgttctgctatagggttggtgggacagagctgtcttccttctgcatgtcagcacagtcgggtattgctgcctcccgtatcagtgactcattagagttcaatttttatagataatacagatattttggtaaattgaacttggtttttctttcccagcatcgtggatgtagactgagaatggctttgagtggcatcagcttctcactgctgtgggcggatgtcttggatagatcaagggctggctgagctggactttggtcagcctaggtgagactcacctgtccttctggggtcttactcctcctcaaggagtctgtagtggaaaggaggccacagaataagctgcttattctgaaacttcagcttcctctagcccggccctctctaagggagccctctgcactcgtgtgcaggctctgaccaggcagaacaggcaagaggggagggaaggagacccctgcaggctccctccacccaccttgagacctgggaggactcagtttctccacagccttctccagcctgtgtgatacaagtttgatcccaggaacttgagttctaagcagtgctcgtgnnnnnnnnnngcagaaagaattagaaataaataaaaactaagcacttctggagacat

SEQ ID NO: 363503 - DNA, 868 bp, Homo Sapiens
  misc_feature (41)..(77): n is a, c, g, or t
  misc_feature (312)..(382): n is a, c, g, or t
  misc_feature (386)..(409): n is a, c, g, or t
  misc_feature (606)..(667): n is a, c, g, or t
  misc_feature (697)..(822): n is a, c, g, or t
tgcgaaatatataggggactggagttaacgcggggcggcgnnnnnnnnnnnnnnnnnnnnnnnnnnnnnnnnnnnnnatcaggccaaatcggccgagctcgaattcgtcgagagcgggtcttcggcgcgggaagcaacccagagccctcctcccgcctgctctgtgtaggagacagcctgcggagcccactgccggcgcgcagagagcctagcagctcttgagtccaggaagcaagggtgggaggagggacgagccagtggcaatgacccagacccggacgacccgcattgctgagccagcggagctgcttnnnnnnnnnnnnnnnnnnnnnnnnnnnnnnnnnnnnnnnnnnnnnnnnnnnnnnnnnnnnnnnnnnnnnnntccnnnnnnnnnnnnnnnnnnnnnnnntaataattacatctgcaaagaccttatttccaggctcaagcagagtcttcctcctggtgttccagaaggagttcaaggtcctgctccatatgggacagctagattctgagggcaatgttgagatcctcatctccagaaggtgctggtgccagaaatatgacaaaaggctgattgacgggccaggcgcggtggctcannnnnnnnnnnnnnnnnnnnnnnnnnnnnnnnnnnnnnnnnnnnnnnnnnnnnnnnnnnnnngaccatcctggccaatatggtgaaaccctnnnnnnnnnnnnnnnnnnnnnnnnnnnnnnnnnnnnnnnnnnnnnnnnnnnnnnnnnnnnnnnnnnnnnnnnnnnnnnnnnnnnnnnnnnnnnnnnnnnnnnnnnnnnnnnnnnnnnnnnnnnnnncatcccacttcactccaacctgggcgaaagagcaaaacttcatttc

SEQ ID NO: 363504 - DNA, 691 bp, Homo Sapiens
aggatcattactggtggggccccagagctagctgtagaaggcaacggccccgtggaaagtaatgcagtactcaccaaggccgtcaaaggcccaacgaggattcagatgaagatgaagaaaagggagccgttgtcccccctgttcatgacatttacagagcacggcagcagaagcggattcggtagggttttaaacgcctctacagaaaactcctgtccaggattccttttgcctcaagtggtatgtttaaaagagacaacgctttgttacaaggttcttggaaacaaagttgtattgtcattggtgcctctatcacatggttcttgagaaaaaacaaaccaacctgtgtgaattttagaatacggaacagacctatgctctaagcaaaattaggttttcaaaaatgtgagaacagtacaaagtggcagaaccacattttgttccctcttcaagggtgtcttgtatgtgccgcttgaagatttgtgagtttttcaacagttttattttaaaaactggatggcttatgattgtaaagcattttatcacattttctgaaaacaattgttcttggtttgcttatgtagagtcctgccttattgtttgtttttatttatggcagaatgtatgaaatccgttttgtagtttcaaattttaaaagtcctttaaaaaataaaaggattcagaaacatca

SEQ ID NO: 363505 - DNA, 648 bp, Homo Sapiens
  misc_feature (35)..(35): n is a, c, g, or t
  misc_feature (74)..(74): n is a, c, g, or t
  misc_feature (458)..(483): n is a, c, g, or t
aaatgcaatgaatggccttctgaatcccaaattcngtaatagccaaggtgcctaggttttttcccctttccccnaacctgtctcttagccccggggaattaaaatgagaagccttagaatgggtggcccttgtgacctgaaacacttcccacataagctacttaacaagattgtcatggagctgcagattccattgcccaccaaagactagaacacacacatatccatacaccaaaggaaagacaattctgaaatgctgtttctctggtggttccctctctggctgctgcctcacagtatgggaacctgtactctgcagaggtgacaggccagatttgcattatctcacaaccttagctcttggtgctaactgtcctacagtgaagtgcctggggggttgtcctatcccataagccacttggatgctgacagcagccaccatcagaatgacccacgcnnnnnnnnnnnnnnnnnnnnnnnnnngtcccctcacaacccagtgacacctttctgctttcctctagactggaacattgattagggagtgcctcagacatgacattcttgtgctgtccttggaattaatctggcagcaggagggagcagactatgtaaacagagataaaaattaattttcaatattgaagg

SEQ ID NO: 363506 - DNA, 1111 bp, Homo Sapiens
  misc_feature (672)..(672): n is a, c, g, or t
  misc_feature (761)..(761): n is a, c, g, or t
  misc_feature (779)..(779): n is a, c, g, or t
ggccccttgccgcggtccctctcctggtcccctcccggttggtccgggggtgcgcacggggcagggcgggcgcccaggggaagctcgagggacgcgcgcgcgaaggctcctttgtggacttcacggccgccaacatctgggcgcagcgcgggccaccgctggccgtctcgccgccgcgtccccttggggacccgacggggctcagccccaaggacggagacttccattcggggaccaaccccccgggatgcggtagcggccgctgtgcagaggccgctaagcatctgctgccgtccgcctcccagatgcacgctggcttcgcggcaccatggataacgctcagcgagggtgccccgccgcccggggatgagaccggcggcctgggagaccagccgtggcgccacgcgaacgcttcgggttgccagaaccgaagtacctccctgggctggcgaactcgactctgcccataatcttggcagggaagcagccggctttcgaaaaaggcagccgcccaggcctaccccgcgccttgacgagcaagaaaaggccgaggtgcgctcgcattagacccgccgtgcaccaggcccgagataccgcgtgttcaatgggagcatgcgactcgtaccaactgcagtccgcaggaacccggtcagcctctccacctgcttcttntccgcagggtgtagagccacacgtacattaggaccctaagtgatcggcggtagaatcagcttagagaggaggagggtgcgtatacgccnaatacggcaagcaggagngggctccatcctttgtctccgggtggatccccgcataaacagatgtgtgccgcgcaacacaatagcttactagcgccggggggagcctcagtagcagatggaaatatgtaacagtgagctgcgtacactgagtggggtgagacacgcatgaacttgcgagatcaccacacataccgcgttgggtgtgcgatgggacaggcataatgggtcgcgcgctcagcgcgacggcgctatgtagcaagggacaccgctctgcagccggataggggagtctccgtgatgataaatgcaccctctctatggggtcggggaacaggcgacgtcagcgagaa

SEQ ID NO: 363507 - DNA, 622 bp, Homo Sapiens
  misc_feature (138)..(138): n is a, c, g, or t
  misc_feature (367)..(554): n is a, c, g, or t
  misc_feature (564)..(577): n is a, c, g, or t
agcagttccgactccagcagctgggaaaggaaggaaagtgaccccactttcactcctgcacagcccactggttaccaaaaccaccgtgcaagtcgggatgacagcagggacttctggccaggtgggaaaggtgcctgnaagcgggatgcgcctgtgcgtctcttggccatgatgttcttgtgggcatgttattcttggtgctgcctggggtgttgctgagcggacaggctctccagctggagtccatggagaggccagaggctggcggccctgcctgggccttcggagcctcctgcctccaccctccacctcttctaaaccatgatgtggcacattttggtgttaataaaacacaacacacaaagtnnnnnnnnnnnnnnnnnnnnnnnnnnnnnnnnnnnnnnnnnnnnnnnnnnnnnnnnnnnnnnnnnnnnnnnnnnnnnnnnnnnnnnnnnnnnnnnnnnnnnnnnnnnnnnnnnnnnnnnnnnnnnnnnnnnnnnnnnnnnnnnnnnnnnnnnnnnnnnnnnnnnnnnnnnnnnnnnnnnnnnnnnnnnatttgggggnnnnnnnnnnnnnngaaaaattttttaaaacattttttggggggcggggcccccaaggg

SEQ ID NO: 363508 - DNA, 1477 bp, Homo Sapiens
  misc_feature (65)..(119): n is a, c, g, or t
  misc_feature (1265)..(1265): n is a, c, g, or t
  misc_feature (1444)..(1444): n is a, c, g, or t
cccacccgggccgcggctacatacccagcccccggtccccgcccttcccgggtcaggccagtgcnnnnnnnnnnnnnnnnnnnnnnnnnnnnnnnnnnnnnnnnnnnnnnnnnnnnnnntcgctaggtgtgggaggctccctgggcgcgggccgggacgctgggcgcccgccttacaacccggcctgtggaggggtcccggggccgcagggccgctggtggcagtctctcctgcgccaccctggactctgcggggtgtccgactaggcttcggccgtcctccccggactgtgcgctcggcctcactccgccgctctccttgcttctctgcgtctcggggtctctgacactcggggtttctgcgccccgcccccgccccgcagacgtgtcccgggcggttgagctcctcgagcggctccagcgcagcggggagctgccgccgcagaagctgcaggccctccagcgagttctgcagagccgcttctgctccgctatccgagaggtgtatgagcagctttatgacacgctggacatcaccggcagcgccgagatccgagcccatgccacagccaaggccacagtggctgccttcacagccagcgagggccacgcacatcccagggtagtggagctacccaagacggatgagggcctaggcttcaacatcatgggtggcaaagagcaaaactcgcccatctacatctcccgggtcatcccagggggtgtggctgaccgccatggaggcctcaagcgtggggatcaactgttgtcggtgaacggtgtgagcgttgagggtgagcagcatgagaaggcggtggagctgctgaaggcggcccagggctcggtgaagctggttgtccgttacacaccgcgagtgctggaggagatggaggcccggttcgagaagatgcgctctgcccgccggcgccaacagcatcagagctactcgtccttggagtctcgaggttgaaaccacagatctggacgttcacgtgcactctcttcctgtacagtatttattgttcctggcactttatttaaagatatttgaccctcactgagtgtctgtgtgtctgtcctgcatccctgggttggtgtcttgagatgtggagggaatgcgaggagctgaggtcaggccaagccgttgagaagccttttccagagtctgagaacagaggttaagacctctccctaggtctgaaggcggagacaggccggcttccaagagacttaatccgagggcggaaggcggaggcagggacccantctgggtctgagtgctggggcagaactgaggacaacgccgcctacccttaagagcgtctgagggcgaaggccaagtcccttcctccagagtcctgaaacgcagccggagccagtgggcggcctctgtgtgggcggggcggagcgaaccattagcctcgtccgccgggggaaccctgcangccgcactactgtctgcgtgggagtcgcgggtg

SEQ ID NO: 363509 - DNA, 606 bp, Homo Sapiens
  misc_feature (256)..(268): n is a, c, g, or t
aaagcagagagaagccattcgtgatgcttagaaccaaggatggtcatgtacacaaagaccatcgagacggccattcttgtttacaaaacacttaccaagaaagcactttgtaggggaactttagtaagttcttctcatttcattatgtttcttccaaggaaacaggagagactgaattaataattctctctttcctcttaagcacttttaaaataataaagtacatcttgaaatttggggaggcatctctgatttnnnnnnnnnnnnnggctgcttgatgtatgttatgcagagacactctgcctctggtggctgcagagcaatacccaagcctcatttggaaggctcaacatttggaattgcactttaattgattaatcctcaattcatgtggccttacgggatggtgggtctgggaccccaattcattcttatctgccaaagaattatctagaagcacatcaaataccagcaccccacctgctcaatgggggtggaaaacttttgtatccctaagcatattattttatagtgtctgccatgccatgtggaaatactttatttttaacctcaggatttaaataaagtaaacactatgacatttaa

SEQ ID NO: 363510 - DNA, 713 bp, Homo Sapiens
  misc_feature (164)..(253): n is a, c, g, or t
  misc_feature (532)..(532): n is a, c, g, or t
  misc_feature (675)..(675): n is a, c, g, or t
gcggccgccctcccacagccccacacactgggagaccgcccaccgcaaaccgcggagacccccgtctagatttaaagcgcggctgcgcccggcttctgacgtccattgaatcgcgcgggcggccggcggcgagcgcggggctgcgccgggatcgctgcgccctnnnnnnnnnnnnnnnnnnnnnnnnnnnnnnnnnnnnnnnnnnnnnnnnnnnnnnnnnnnnnnnnnnnnnnnnnnnnnnnnnnnnnnnnnntgcccccaggatggtccgcgcgaggcaccagccgggtgggctttgcctcctgctgctgctgctctgccagttcatggaggaccgcagtgcccaggctgggaactgctggctccgtcaagcgaagaacggccgctgccaggtcctgtacaagaccgaactgagcaaggaggagtgctgcagcaccggccggctgagcacctcgtggaccgaggaggacgtgaatgacaacacactcttcaagtggatgattttcaacgggggcgcccccaactgcatccnctgtaaagaaacgtgtgagaacgtggactgtggacctgggaaaaaatgccgaatgaacaagaagaacagaccccgctgcgtctgcgccccggattgttccaacatcaccctggaagggtccagtctgcggggctggatggganaaccgtaccgcattgaatgtgcactccgtaaaggcaag

SEQ ID NO: 363511 - DNA, 571 bp, Homo Sapiens
  misc_feature (382)..(479): n is a, c, g, or t
  misc_feature (559)..(559): n is a, c, g, or t
ctgctaggactttttattgggtttagtgatgcagttttcaatgaaacatgctgctttcggattaatgcctctagttaaaagaaaatctacaagtacttaaaaatcaaatcaaaattattgatccccgagtggctacaatgcctctttaataaattccagtcttctttatggaattggttaacccctttattaagccctctcttgcttatgtgtcttgtattgatatttggaccctgtatacacaatactataactcaaattgtttcttctcatctagaagcaatcaaactccaaatggtgctgtaaacagaaccacacatagacacatcattcttctgaggacccttagattgaccccaggaggagccctagctgctcttcnnnnnnnnnnnnnnnnnnnnnnnnnnnnnnnnnnnnnnnnnnnnnnnnnnnnnnnnnnnnnnnnnnnnnnnnnnnnnnnnnnnnnnnnnnnnnnnnnnttgtaggagttattaagaaattattttaggcagatagagaggaaaatgggtccttgggtccttggggaagttttttgttntgtttccttttc

SEQ ID NO: 363512 - DNA, 672 bp, Homo Sapiens
  misc_feature (545)..(616): n is a, c, g, or t
  misc_feature (631)..(631): n is a, c, g, or t
tagagacttagagtggtggctgcaccatttctctgggtggcttgcgaattgtcagtctggttcctgagagctcaaactgagatggaaatgagacctgttttctctctaggccggccggggcgttccgcacaacccacttgagaggccccaccggcgtggcctttaggacggtgcctcttgtcttgtaatggccaccggccctccctcgggagacacgcggccacctgggtgggacgctgcggtgcttacctccgggacacgaggtggtcgctgggagagggctcggaaggccctgggggtcctatcaggacgcagcactggggagacgtggaatctcctcttctcacccccacaagcctcgcccgcagcgtaattctttttatttttactttcgagccatgtaaggcatgcagatggggtaggagcgttcccgcgacacgttgccagcagcgcagcgccggcccgctcgtgtggccggagcccggggaggggacagggcacgcgccgcctgacccacctgccccaccgccccacgttttcccttnnnnnnnnnnnnnnnnnnnnnnnnnnnnnnnnnnnnnnnnnnnnnnnnnnnnnnnnnnnnnnnnnnnnnnnngcctggtcatgtgtncgccttttttgtttgcagtggaaacaatttctcgccgctcg

SEQ ID NO: 363513 - DNA, 869 bp, Homo Sapiens
  misc_feature (395)..(436): n is a, c, g, or t
  misc_feature (585)..(619): n is a, c, g, or t
gcggagagcaacctgccccgggaggcgctggacacggaggagggcgaattcatggcttgcagcccggtggccctggacgagagcgacccagactggtgcaagacggcgtcgggccacatcaagcggccgatgaacgcgttcatggtatggtccaagatcgaacgcaggaagatcatggagcagtctccggacatgcacaacgccgagatctccaagaggctgggcaagcgctggaaaatgctgaaggacagcgagaagatcccgttcatccgggaggcggagcggctgcggctcaagcacatggccgactaccccgactacaagtaccggccccggaaaaagcccaaaatggacccctcggccaagcccagcgccagccagagcccagagaagannnnnnnnnnnnnnnnnnnnnnnnnnnnnnnnnnnnnnnnnntcggtgccaagacctccaagggctccagcaagaaatgcggcagccgcctctactacagcttcaagaacatcaccaagcagcacccgccgccgctcgcgcagcccgcgctgtcgcccgcgtcctcgcgctcggtgtccacctcctcgtcnnnnnnnnnnnnnnnnnnnnnnnnnnnnnnnnnnnaggacgccgacgacctgatgttcgacctgagcttgaatttctctcaaagcgcgcacagcgccagcgagcagcagctggggggcggcgcggcggccgggaacctgtccctgtcgctggtggataaggatttggattcgttcagcgagggcagcagggctcccacttcgagttcccagaaaaatgcacgcagaagataagaaaaatagaaaaaaggggaatggctgaagaagaacttatcagacctggtgat

SEQ ID NO: 363514 - DNA, 560 bp, Homo Sapiens
  misc_feature (477)..(487): n is a, c, g, or t
ataaatagaaaataagttataaatagaaaataataactgccaaattgacatataagacatccggtggtactaagtgataaaaaatgaagaaaggagagtgggggtagggaattgggggtagggactacagagttgtagtcagatgtgctatttggtatagggtggtcaggctaacctcactgaagaggtgacctgcatgcagaggggagaaaatgaggctgatattcagtgaaggaacacaaaatgcagagtggaacacccagtaacacacctatagctgatttctttgccttctctatcctgggtttcttattttgtgtattacaccttgtaagaccctcccacttcaaatgcaggggcaactgatgacttcacaaagatagtggtggttactgtggacatttggtggataatctgtttcttatatgggatacgttcccaacataatcccctaggccactcttgttacaaaatttnnnnnnnnnnncaattttttaaagtcctttgagtttctaatatgccatggatagatatgttttcaattattgcatttggagttc

SEQ ID NO: 363515 - DNA, 468 bp, Homo Sapiens
gacagtctctccctgtgctccttcatcacctttccccctctctttgatggctacagagtggtagggcctggtgcttagtcgatgaaggaatggtagccatctacagtgctgctggagatttccgccagagcgctggagaccttgcgctcagatcttctctggtgatgaagaggcgaggaatcaagtgactgatctggaagaaatatctcgcagcactgcagctaacatcacagaaatttaagtgtgttttgtgtgtgtgcccacacgtagacaaatgtgtacggtgcacacacacagtgcatcattttttaagggcagattatatatatatatgagatgtattaattcagtggttaccatttgtttgcaggaaaaagaaatgtatgggtgaaaaaatttatggttgataaatccagccaaggagattaaaaggggtttggataaattctgggaataaatgctcagact

SEQ ID NO: 363516 - DNA, 446 bp, Homo Sapiens
cagcccgcatcaagcaagccctcctgggccacctgctgatctgacagtccatcgtagtaataagagtggcagtctgcacaacctagaagtggccagaagggttgagacacgcccctgccctctctcctttgcccctcagtctcacagaggggcttctacaagacaagcagataacgatagaatcttgggcatcttggctttcggattctcagtgtggagggacgtagtaccccacacaccccttcctgtcatccttcctggcccataaagcccactagttggagagtaagtaccctcctggaagcagggagagatgatttgctggtggggctggggaaggcccatccctgagcctctgaaagtgaactccccgaccaggttggggaccagacatgcagagcccctggaagtattctctcaaatggaggcaacagaggtgattgtta

SEQ ID NO: 363517 - DNA, 636 bp, Homo Sapiens
ggacctcaaggaatttctggtggtggcctctgtcagcctcttgcagctgggccaggagactgacaagcttaaaaccagaaatcgagaatccatttctctgctcatgcgcttggtggtggaggagtcatccttcctgaccctggacatgctggagtcctgtttcccttatgtcctgcttcgaaatgcctatcgggaggtgtctcgggccttccacctaaactgaatgcctgccagtacccactgaagagccctttggaccttcctaaacccttgcccatagtggaagctgtggtcactttcgcagggggtgggaatggggtggggtcactaaggagagagggtcaggagccagagttgatgagcagatctgtggaagaacaatccagggctgagaaatcgtagagcagtgaggcaggctgggagcatggaggacagcttatggaaaaagttagggcgtggggccacatgtgtgaattttacaatgaaaaaaggagtaacgaacaagtatattttctatcttctggtgacttgagcttgagctctgacaggcatgggcctctccgaccttcatcactattcttaggataatgctggcggggcagagatgatcaatcatcatattaaatcataatgagc

SEQ ID NO: 363518 - DNA, 928 bp, Homo Sapiens
  misc_feature (117)..(117): n is a, c, g, or t
  misc_feature (371)..(435): n is a, c, g, or t
ttgcttgtctctgagttgctccctttattttgtcttgtctgttatcttatgctttgtcttcctagacttgttgttcttccgtgttgtgcctatcctcgtttgtcgttctttgcttcnctgtagttatagtagctggtgcaagtcattttttgccttctgatgtttgtgtgtgcttgtcttttcttcttttgagatactctgtcttgtttttgttcgggtggcgtgggtggtttcattgcctgtaattcctctacatctcttgggagtgctgaggcctgccctgattcgctctgctgttgcaggcttgttcgggatccagtccttgggcatctatacgtgagatccctgtctctatctaaaaatgttaattnnnnnnnnnnnnnnnnnnnnnnnnnnnnnnnnnnnnnnnnnnnnnnnnnnnnnnnnnnnnnnnnncttgcttggatggtcaatggctggagtgagccatgatctcacccctgtacttcatcctgggtgacaaagcaagaccctgtctcaaagtgaaagaacgaaagaagctgcttgtgttttctgggtaagtccacccatctgagggagtgtattctgagtggtatttcccttggcagcttagaaaatgttttttcccagaggttgaagtatggagagtttgagactctcttgttttctacactgcactctctggaattccccctccctgctgtaaaatttattgtccaatgagaatagtataattgttttcaacaaagtctctttgagccagtgaaacacgatgggtttttttgtttgcctgatcacttgctccaaccagcagcattaaatgttttccatttggataaacttgcatcgtcagcttcctaaaaccctggaggtttcccgtgggctcgttcaagaactttccagctgttgtttaaaagactttagagct

SEQ ID NO: 363519 - DNA, 818 bp, Homo Sapiens
tagataagctgagaatacacaaaagatttccaggctatttaatcaagtaatttacaatgtacacattcctgagtatacaccattgtggtgatataatttattttggaattttctccattcagcttaaaaggtgtttcttcccaagaaactgaacttttctgtcaaatgcacttgatcgaataggagaattgggttcataaaatggattcattgaaaattttatatataaatcataaacatcagtaaagaagttctttattccatcttcttgtcttatgtcatgaagcataataaacctcatatgccccgcggtgacaaatgctgacacaaaccactcgttgaacttgtccacagttttcaagtacatgttgttcgacagccacatgttctcatctacgaggtcgagagcagcatgagctatgaactggttcagatgacgatggtcgtctttggattctgccttcccagctggcaaaaactccatttcaaaaactggattatcatggtgaccaacaattacaaagtagaagcttccagacatggtcttcaatatatggctcctcgggttcttcggcggggactccgcaagtccagccagggaagagaggggcgggggcgacaaaggcaagacaaggacaccgccgtccccagtccttgtcagctgagcttctgccactgtcagttgtgcctgtgtcactaccgcctctgcgtacaaggaaccaagccgcttctcgcgcttttccgctccgtcacttcggtgacgtcatagagcgccaaaggccggaactagtgaaaaccccagagaaaatcaaatcccc

SEQ ID NO: 363520 - DNA, 911 bp, Homo Sapiens
  misc_feature (44)..(80): n is a, c, g, or t
atgtatacactcatatggggaccgggtttacgcggtggcggcgnnnnnnnnnnnnnnnnnnnnnnnnnnnnnnnnnnnnnatcaggccaaatcggccgagctcgaattcgtcgagagcggaggttcggggcgcgggtctcttccgcggaaactgacattgcgttctccgttgtcggcctcccactgcaggagccatatattgaagaccatgtctgggagcttctactttgtaattgttggccaccatgataatccagtttttgaaatggagtttttgccagctgggaaggcagaatccaaagacgaccatcgtcatctgaaccagttcatagctcatgctgctctcgacctcgtagatgagaacatgtggctatcgaacaacatgtacttgaaaactgtggacaagttcaacgagtggtttgtgtcggcatttgtcactgcggggcatatgaggtttattatgcttcatgacataagacaagaagatggaataaagaacttctttactgatgtttatgatttatatataaagttttcaatgaatccattttatgaagcccaattctcctattcgatcaagtgcatttgacagaacaagttcagtttcttgggaagaaacaccttttaagctgaatgcagcaaaattccaaaataacatgatgtcaccacaaatggtgtatactcaggaatgtgtacatggtcaagttacttgattaaaatagccttggaaaacttcagggtatgctcagcgttatctaaacctaatgaaattccttttatatttcacacacatagtacattctgtctcatgtcacgtatcaactagatcactcggctatttccttgtgaacagtgttctttcatacagagtcccttctcactcacatcctgctccctcttcttgtctcctc

SEQ ID NO: 363521 - DNA, 938 bp, Homo Sapiens
  misc_feature (730)..(739): n is a, c, g, or t
gagggtacaatgacttggatcaactgcataatgctagattaggaattccagcatttgatgataaatttatcaatctttcctataattcttatactgcactaaattacattttgggaaattttagctaatcttttcaaattaaaggcacccaacattaatgacagatcttctctaatatgaaaagcatcaaaacattccctttcaagcactttgaatggatgaaaattgccatataattttcccacctacctaaccattccatgtaagttaactgagcagtctaacaatgttgtacagaaggttgacagactatgtgcaccaagaatatttaagttgtgcagttagcaagaactagccatttcaaatatactcaaatgttttgtaaataaaaattttgactcctataattttgttcaaactgatgtcgtttaaaataattagattttatttgaattttaaaagtaatctgttgtaaattagatgttactttgttgactctgtgattcaatgtacactcagccatattcctgtggggaaatatcaatcttactgactttcatggcatgagccagagattcatagtttcctttaggactataagtatgaagacaaaacacaccaaaataaaatgctagtgaagaaattagaaacctattgtataaaatgtatttttaaaatcttaagatatatgtgatttacactgcctgttaatctagtctctttgtgattnnnnnnnnnncataatatttgttaagactcagacaccaaatatttgtgatgtttgtatagcaccatcgttatatgtgatttcaaagggtaagcatctctgtcgtaatcatgtaagcccacagaagaataaattcctgaggttatgtacaaccaactctcagaattcagacttcctgcagctgccatatcaccaataaatgagaattgtg

SEQ ID NO: 363522 - DNA, 414 bp, Homo Sapiens
acatgcgccaatcaagcaaagatatttttgtgcattcaaggaacccagagaggaaagccagtggcagatggagacgtataaagcagggatcctgttatgaaaagccctaaaaaatagggtatagagtttgggccatatttcagaggtaataagaaagcattctgcatttttaaagtaaggtttaaaaatgtttctaattagagatccagcaaagttggtgtgagaggataaagactgatatacataatctgaggagttcatgaaaattccatgtaaagcctgtagtatgaattggtcctaggagacagacagcttcaggggcataaagaactttaagcacttttccaaaaagagtgaagggctggagaataaattgtgaactaaaatatattttgcgcttgagaccaaaaaaaa

SEQ ID NO: 363523 - DNA, 882 bp, Homo Sapiens
  misc_feature (707)..(716): n is a, c, g, or t
aaaactgaatggtcacatttaattgctttttggaccattgaatagttgggaagtaagaattttttaattggcatgagacggttcctcaactgttaaattaaccaactttgacctgtctttagaaaaaggcttatttgtatgattttgggctaactccccggggaccatattaaatgacaaaaatgctcctttgggtgacacaccctacaaagtatttgctgttacgaacataaacgcccacattcttaatatctaatatttttgaccagtgatgttttatgctgtcatctgaaccttagagaagcagtgtcagaggaaaccttggtgtcacatgtgtcttagcaaaagggttaccatgatcgagggtcatgtgaccaaaagatgctccagagaagcttgagaatttgtttcaagtcgggaggagggttggagatacaaaaatcactctcctctacaggactcttcagctgtctatgcaagaaattccgttttctctttcagcacctggaaagacacagcagcccaccgaggcgataggtgattcactaagcacaagaggaatgttttctaagcaaggcgtcccttgcctctcaaacaaatgccctccaagtttgttagggtttctattcctgcaacttgtggtatcaaaaccacttcctggaattgtcaaagcactgccaaaataaatgtttttcccccttctaagnnnnnnnnnntgacagtgctcatatttgacacttgtgtattggactctcttttgaatgaataaaaaggaaaaggggtttggtgtaattcctgatggggtgcgtgttgtttttcatgccatggtttgtgaattttaattgtggtttcccatttcgttgttgtaactgggcagaaatt

SEQ ID NO: 363524 - DNA, 445 bp, Homo Sapiens
taaacataactaactcccattttttatttaaaggggccctttaccctattccctgcaccctaggcctaggaataactttaagagccactgagataaaacgcaaaaacaggaatcatgcccgtttgcaaaactaactctgggattaaaggggaagccatgtaaacagcctaactgtttttgttaaaggtttataggaatgaggaggtttggctattgtcacatgacagactgttagccaaggacaaagaagttctgcaaacctcccctggacccttgctggtgtccagatgtctgcggttgtcagccccttcctttcccccgacctaaacataaaagacaagcaaagcccgcataattttaagacggttctttaggacattagtccaccatcttcttggtttgctggctctccgaaataaagtccctttccttgctccaaaaaaaa

SEQ ID NO: 363525 - DNA, 506 bp, Homo Sapiens
aacaacaacctaatctcatcctgttttgatgcaagggttctcttctgtgtcttgtaaccatgaaacagcagaagaactaacataactaactccatttttatttaaggggcctttacctattcctgcacctaggctaggataactttagagcactgagataaaacgcaaaaacaggaatcatgccgtttgcaaaactaactctgggattaaaggggaagcatgtaaacagctaactgtttttgttaaaggtttataggaatgaggaggtttggctattgtcacatgacagactgttagccaaggacaaagaagttctgcaaacctcccctggacccttgctggtgtccaaatgtctgcggttgtcagccccttcctttcccccgacctaaacataaaagacaaggcaaagcccgcataattttaagacggttctttaggacattagtccaccatcttcttggtttgctggctctccgaaataaagtccctttccttgctccaaaaaa

SEQ ID NO: 363526 - DNA, 2246 bp, Homo Sapiens
ttgtctgaagctgccccttgacaataactgttcttcctgcctctgcgcagtccataactggatcggggagacctctccaattctgaggggctcaatgcaagtattaattacattccccctctggtcaaagaaataaccagttaaatgcagcaactagtagttagtatataggctacgtcccacccccacccaccccctcagcattccatctcctgcccccagatctattcagttaatgtctctaggtctaagtggtccgcaggttggagcctggggggttgctgatggatttctgcaaattgcttgatgttgaaattctgcaaggaggcagttcccacaggttgaaactggccaagtggctgtggttgctgggccacccgtcccactccattgagcgccaaatggggtagctggaaagccatactgctgtggggggcacatagacttggtgaagtgacctagagaggtagctgatgctgcagagatgggggcagagccacccaggttcgaggtcatggagatgcacagttgcccaggtgcagagaacttccttgccattccagggccctcataattcatgtgccctttgcttcctctcctgcctgagagattcatggcatctcgggcccaattgtctaccaacttgtgcaagtcatctgtgaatgtgcccttcctgctggacgtcatggcaggaggctgagcttgggcggcttggctgttcactgttgccccaacagtgtttgtgctgctggttccttgacctggaacaaaaaggcttggtactgaaatggcaccatcactggtgaaggctgaataaaggttgtcactggagggagatggcttaaggggctgtaacagctgattctgcccggactctgggatgttgccaggagggtggagggtctgctgggggtgcaagactgaagctgcactctgaccagacaggttacctgaaagctgggggcttttattccccaaggaactgcttcgactagatttgctgcctttgcttttagtgggtcgtcgtcttctccctgaaaggggagcagctgggggaataataacagcagggggcaccttgcccagtttggtatacaaagattcaatttcatgcttctggcgactctgcaggtcctgaatctctttgagatgtttatctcgtagtcgtcgcagctctaactttaagtcttcatcttcgatatctgactcattgtcgctactcatgtaagaggagttaaatgaattactaaggctttgacttagattctggctaggaaggctctttgagctcagctgatggggcgagtgtggactaccggaaccatcatccacatccctacttaaaaaagcggcctccgggtcagaagacggcccatttagatgtgaaggctctgacagttcaggcttctctttctttggtatcacagcaggaagaacagcttgttccaaatccataaaaggaggagatgccactggtccttctttctttgtgtcagtgatcttgtcctcagtttttgatacagagaaacgacccactttgtttgctgtagttgtcacctgaaaacgtccaaccttggtaggctgcccagtgtctgactttgcctctgaggcagtagttttgtgggcactctctggcacatctgaagagataccagggatggttatgccattcggctctggtttcaccaaggtactctctggactactacttgatagcactgaggactctgaggtgctggattcaaaatgaacagactttgcatcttctgacttatttttaccctctttctgggcaccgtctgctgcaacagaaacctgaaatcgtcccatcttaaaaacaccagctcctgaactagttgctaggacagggccttctttgacttgagaaacacccttctgaggctgtgttcctgcttctgtgattgctgttggagccgccatggacacaggaccaaccgcagaagtcactgtgataatctctggactaagtgtccttctcaattgagcatcaagatcctctagaggttgctgggactgggttagagaaggtcctgcaaaaggtggcagctgctcgctgggtagagtacctgctggaagttcagtacccactggcagcaccggagccttagttagaggtggcttgcagggagcagttccaggtttcactcctgatgtagtagtgctgactggggtagaaacttgcccaggtatgaccactggtgtaactggcaaagcaactgttccta

SEQ ID NO: 363527 - DNA, 582 bp, Homo Sapiens
tgtggtgcttggaaaatgtttttaaccttgaccatgtattatgtttataattaaaaacccaaagaaccagctcatgtttggaaaaggaatcttccactgaaacatttggatacccgacgttctccctggacacttggcccggcaatagttggggtctcctgggaagctgagtgctggcttctagcctctccagttccctcagactctgtcttcagctcgggcccctccgttctgtctccctcgactccaagtcaggaactaccgtgggcttcctgccctcaccccacaccctcaagaccatcccactgtttgcctgcttgccccctgccatttcgcactcagccctgggtgcctgtgaagcctggccccactgcctgccgggggttcctgcagcacccccctactccaggctccccatctccctgaagcttccagggtagcagctggtgggacactgatctgtgagctctggaatgtctgcttagaattttgagaggcaggaactgctctgtctttgtaactactcaaggccaactgtcacatgaaggaatgaataaagagtttttactgacttgtgcaaaa

SEQ ID NO: 363528 - DNA, 457 bp, Homo Sapiens
ggcttcaatgggtcaacggggaaaagaaattattcggcatcccctggaggcatgccacaaggcatggtcccagccaggacggagataacaccatcttcaaggcctgggccaaggagacagggaaatacaccgaaggcgtggatgaagccgatccggccaagtggaaggccaacctgcgctgtgcccttaacaagagccgggacttccgcctcatctacgacgggccccgggacatgccacctcagccctacaagatctacgaggtctgctccaatggccctgctcccacagactcccagccccctgaggattactcttttggtgcaggagaggaggaggaagaagaggaagagctgcagaggatgttgccaagcctgagcctcacagatgcagtgcagtctggcccccacatgacaccctattctttactcaaagaggatgtcaagtggccgcccac

SEQ ID NO: 363529 - DNA, 1115 bp, Homo Sapiens
  misc_feature (175)..(219): n is a, c, g, or t
  misc_feature (235)..(235): n is a, c, g, or t
  misc_feature (253)..(253): n is a, c, g, or t
gtgttcctaggggggtaccaaaaggccggccttttggggccccgttttaacaaattttgagaaaggaagttatttagccttgccaagaaatcaggggtataccgcggagggggccccagggtttcctgggcccccaaagtggggaggttcccggaaacccgtccagggttccccnnnnnnnnnnnnnnnnnnnnnnnnnnnnnnnnnnnnnnnnnnnnncccagcacccccgggncggcttcagagtgggcgnctgcagagtgggcggcccacttgacatcttctttgagtaaagaatagggtgtcatgtgggggccagactgcactgcatctacagagagtgcgtgtggacggctgtcagtgccacctccacgaactgcttcgcaggcacacctcctcccagccctgggccaccactagcctccccatctagcccccttccaggtacctatggtacctatagcttctcttgtaataactagacctcccaaccaccacctcccggccccaacctgtgaggctcaggcttggcaacagtcctctgcagctcttcctcgttcttcctcctcctctcctgcaccaaaagagtaatcctcagggggctgggagtctgtgggagcagggccattggagcagacctcgtagatcttgtagggctgaggtggcatgtcccggggcccgtcgtagatgaggcggaagtcccggctcttgttaagggcacagcgcaggttggccttccacttggccggatcggcttcatccacgccttcggtgtatttccctgtctccttggcccaggccattgaagatggtgttatctccgtcctggctgggaccatgccttgtggcatgcctccaggggatgcagaataatttcttttcccgcgttgacccattgaagccctgggtactggcagctgttcacctgggccaccagccagggcttcagccgcacgcggcggggtggggtgggagccactgggatggactggttcatggcagaggggtctgtctgcggtgcgcctgcgtggctgcgccagggagcaccggccgggcggcgggaccaagcagagctctgcccaggctgcgccatcccgaaaattccggaccggtcc

SEQ ID NO: 363530 - DNA, 324 bp, Homo Sapiens
  misc_feature (66)..(66): n is a, c, g, or t
  misc_feature (162)..(162): n is a, c, g, or t
tagagagggcacccaatggtcatactaatgtttgccatagcagtctcttctaggtctagacttganagcatatggaagggtccttgggctagagccaacccaaacccaggctgactccccttttaatacttctaattttccctgaagatctggtcttctccnccaccaccactaccctattacataagagaaaaggattgaagaatgctcttgaaaagaatgtgatgctttcccatacaaggaatatactcaaggaaaaatttcatggcacaaaatgctgattctgtccaatttatcccatgaataaattgtgtacacatatat

SEQ ID NO: 363531 - DNA, 530 bp, Homo Sapiens
ggcaacattttattacgattattattcagcagcacattctgaggggggaacaattcacaccaccaataataacctggtaagatttcaggaggtaaagaaggtggaataattgacggggagatagcgcctgaaataaacaaaatatgggcatgcatgctaaagggaaaatgtgtgcaggtctactgcattaaatcctgtgtgctcctcttttggatttacagaaatgtgtcaaatgtaaatctttcaaagccatttaaaaatattcactttagttctctgtgaagaagaggagaaaagcaatcctcctgattgtattgttttaaactttaagaatttatcaaaatgccggtacttaggacctaaatttatctatgtctgtcatacgctaaaatgatattggtctttgaatttggtatacatttattctgttcactatcacaaaatcatctatatttatagaggaatagaagtttatatatatataataccatatttttaatttcacaaataaaaaattcaaagttttgtac

SEQ ID NO: 363532 - DNA, 520 bp, Homo Sapiens
  misc_feature (81)..(81): n is a, c, g, or t
  misc_feature (127)..(127): n is a, c, g, or t
aatctatggttggtttcagtgtttgaaaaatactcttggaacccagcgctaatttgaaggcccttcactattgatgcattnttaataagcaatcaccgaggacttggtacccacggggacatttttntgatgatcattgctggcatgaagctgttgcggacatcattctgcaacccggtttaccagtttattaacttgagcttcactgtcatctttttccactttgactacaaagatatttcagagagcttcttactggatttcttcatggtgtccattttatttagcaaggcaagtgaattagctattttcttcattttaacattttaaagggggctgttcttatcaaatgttttaagagtttaaaacttattctttataaaaaaaattatgggaggatatgaaattgaattatacatgtatgttaaactcttgctaccatttggggaaaactgcccatggaatgtaagtatgccatgttatttgctaaaaatcactaattaaaatgaattagccatta

SEQ ID NO: 363533 - DNA, 407 bp, Homo Sapiens
gagctgcttcacatataaatgtctatagctagtagcctggccctttaatgtttaatttgaatagataaatctgttttccgtgaattatcttgaaagttttaaacagaatgacctcatagtttttaataaagaatattatttacctaaaatgtgctagtagcatcttgcccagccataaagcaataaacttctcaataatcttaattttgatatttgaataaataatggaaactttctgtattaagggcatgtatcccatcaattggaatcagtaccttaacagaaaaaggcagctcttcaatggaattaacgtgatataaaatgtttgatataggcagtacttttataaaaaaagataagctggaaattgctccgtgtaattttttaaataaaaagtcaattatggt

SEQ ID NO: 363534 - DNA, 382 bp, Homo Sapiens
tagtttgtagataactgctatagagatcagtaccattgcatattttgcatagtgtagaaccagtggtcattaatttttaaaactaccttatgcaagtgtagttttcaaggaaataaatacatagatgcatatacaattaaacaagaaaatgaaaacagtttaaaataggataaggaaatatacagatagaatactgagagtaataaatatggagagtgggtcagaattgtaacattgataggcattgcataaaccctgcagcatttttaagttaaacttgctctcattttgggtatcaagaaaattgcaggaaaacacaactagctctataatgagtattgcatataagaaaaagagactggacatggtggctcactccttt

SEQ ID NO: 363535 - DNA, 754 bp, Homo Sapiens
  misc_feature (697)..(709): n is a, c, g, or t
cacattgccagtaatcattggtgtatcacagtacctgtaatacggggtcagtagcctgcactttatcttttgccctgggaccaacgaccctaaagagaggataaaggtggccgttgccatgttgacggtgaaaggcataatccggttcatcattggcttcagcgcacccatgtccatcggttgctgtcagttatgggcttattgccaccaagatccacaagcaaagagtgattaagtaacagtcgtcccttacgggtcctatcatatgtcccagcagccttttttctatagatggtccccatatcagatgagtggcccttatagccacagtcagaatcagtgagttattgcaaggcatgtacaaagaaattggtattgcagtggatgtgacaagtgccctggccttcttcaacagctgcctcaaccccatgctctatgtcttcatgggccaggacttccgggagaggctgatccacgcccttcccgccagtctggagagggccctgaccgaggactcaacccaaaccagtgacacagctaccaattctactttaccttctgcagaggtggcgttacaggcaaagtgaggagggagctgggggacactttcgagctcccagctccagcttcgtctcaccttgagttaggctgagccacaggcatttcctgcttattttaggattacccactcatcagnnnnnnnnnnnnngcctttgtgtcccctgatttggggagaataaacagatatgagttt

SEQ ID NO: 363536 - DNA, 1308 bp, Homo Sapiens
cattcaaacttttttatttacaataatatttaacagtctttatgggcttaaatgtagtagatatcacctgtgcatcaagcattacacttcattcctttaagatgtgcttcatcctcactcaagctgcttgccaccctccgatgtctggtccagtctactcttgttactcttcaccatgtagatgaagtaggcaagggtctctttttcattcacaggtatgttcctgaagtgtcgactcacagtttctgctaactgggccttattgaagcctggtctggtctgcaacttgtagtgtcgtttataacgtcgtagggtgttcacctgcagctggaacagatcaacctcaggaatgtcagtgtcgtgctcgggagaatctccgccatcgtcacttgtcttcctcttccttttatttcggacactctggatgaaatttttgtgaaaatcacagatatataggtgccttacgctcttgtcgatgtccagcttgagtttcttctgcgagatgctcttctggaccctcttgctgaaggaggcgttgcccgcgggccggacgcagcgctcgccgtcctcgatgaggcagcagctctggccgtagcccggggcggcggcagctggggcggcggggggcccttcgcggctgtcctcctccgtgctgaagccgttcatctccccgccccggaccggtccctctgggggagggtccccggtaggccactccgcggccgcgcttgccgcggggcaggtcgctgagacccccgcagccgagggtcccagagtccgtctccagcccgggccagtgccctgccccgcgtccgagaggcccggctccctcggcccccggccctccgcctccggaagcccccttcctcccggctcgaggccccggggtcggctcccgcggctcgcagggccccgccgggggtcacccggaggagccttctgccgggggcccagaaccgtaaccctgcagcgggggtgtccgggagggcgtcccaggaaacagccgctccccaaggactccgggcctgggttgccagggggtttcgaaggcccctgccggctcccgccttctttcggcagcggggcaaactcgctgccgggcagctcccccggggtggcgcggcctcctcgcgcggggcccggcctcgaacccgcggcacccgggccccgcggctcgtccggcccactccacccctgcagccactcggctgcgccccgagtcccgcggcagcccctgggccgcccggccgccgcccgccgaacgctcccctcgtgccgaattcgccacccaggcctcgctacttagga

SEQ ID NO: 363537 - DNA, 911 bp, Homo Sapiens
  misc_feature (601)..(655): n is a, c, g, or t
  misc_feature (758)..(852): n is a, c, g, or t
gcggccgcggcagccatggccgagggggcagccagagggtctcacgggcagctccgggctctgctcctgcttcaccatgatggagcacagtttgtgtcccagcgcccatgctccatgctctgcatcttgggtggtgtcctccatcttgatgggcacaagggggctctggggcgctgagtcgccgctcagggagtagctgtgctccgcctggatgcctggcgtaggggagtccagttccatgtccaatagagggctcttctcatccagcacagggtcatcaaagaagctgctgaacaggtcattggagaagtcctccatgttctccgtaaagtggtccaggtgctcaggaaagtgcgcattgttgaggaagtccgactcgttcagatcccccaagtccaggaagctggatccggggaacagcctgtcggccgggaagggttccaagacggcgtccatcgcagccggctcccgggacccccttccactgggcttccctcactccagggcggcggcgcgcccagtccagagctcctgcctgagcgctggcaaacgggcggggggcaggtccggggcgaagccccgggggaggggcggacggagnnnnnnnnnnnnnnnnnnnnnnnnnnnnnnnnnnnnnnnnnnnnnnnnnnnnnnntaggagcgggatgggctcaggggccccgggcgcaccgtgggcattcagccgactccacctcctcctgctcctcctggggcacagctggcttccatggggagcnnnnnnnnnnnnnnnnnnnnnnnnnnnnnnnnnnnnnnnnnnnnnnnnnnnnnnnnnnnnnnnnnnnnnnnnnnnnnnnnnnnnnnnnnnnnnnncctctcctctgtctctgcgtctccctccgcacgtcttctgtcaatcccgggaattccgg

SEQ ID NO: 363538 - DNA, 265 bp, Homo Sapiens
ctgattgagaattatgtaaattccaatacaatgtcagtttttaaaagtcaaagttagatcaagagaatatttcagagttttggtttacacatcaagaaacagacacacatacctaggaaagatttacacaatagataatcatcttaatgtgaaagatatttgaagtattaattttaatatattaaatatgatttctgttatagtcttctgtatggaattttgtcacttaagatgagctgcaaataaataatcccttcaatagaaa

SEQ ID NO: 363539 - DNA, 516 bp, Homo Sapiens
atgaccttcagctcacgagcacacctggagaaattcagaaccaggttctgaatcatcacgattgccttttgcatgaaaacatcggctggtgatgtgacttctcttcaggccatgagcctaacaccctgccggttttcatgcccgctgcagtaatggacgtttgtgtgaagaaatgaactgtggagtacaaaatgctttgagtctttccgattgctcattaattcacttttttgttacttctttccaaaatggaagtgctgaagccatggtctttctgcccctccaagctgatgaagggaagcctttgccaatggcccatggaagacacttggtttgagaaaccctgcccacttccaaagaccaaagagattaggaaaagcctggcagtattctccaactccaaacaagctctagagtgctccaggaaaagttatattcagtatatgaataagtgttattctccattattaatgtgttctgaaaatatattatgaataaatacatcaccacaccgga

SEQ ID NO: 363540 - DNA, 464 bp, Homo Sapiens
  misc_feature (15)..(15): n is a, c, g, or t
  misc_feature (42)..(42): n is a, c, g, or t
  misc_feature (54)..(54): n is a, c, g, or t
ctgtccttggacttnatgccgctgaaactctacggtgggacnggtcccggtcanaaccctggtgttactggggggaagggagggaggagggaaacctgtgctgacggagcacctcgcccgggtggttgcccctccctgggctgtgtgaccccagcctccccacccacctcctgctttgtgtactcctcccctccccctcagcacaatcggagttcatataagaagtgcgggagcttctctggtcagggttctctgaacacttatggagagagtgcttcctgggaagtgtggcgtttgaaggggctggagggcaggtctttaagatggcgagactgcccttctcagctgataaacacaagaacggcgatcctgtcttcagtaaggctccacgagaagagaggaagtatatctacacctcaaccctcctagtcaccacctgaaataaatgttagggacactactcc

SEQ ID NO: 363541 - DNA, 801 bp, Homo Sapiens
  misc_feature (47)..(48): n is a, c, g, or t
  misc_feature (107)..(107): n is a, c, g, or t
ccgaggaggagcaggggagcgacggccggggcagaagttgagaccanncagcagaggagctaggccagtccatctgcatttgtcacccaagaactcttaccatgaanaccctcctactgttggcagtgatcatgatctttggcctactgcaggcccatgggaatttggtgaacttccacagaatgatcaagttgaccacaggaaaggaagccgcactcagttatggcttctacggctgccactgtggcgtgggtggcagaggatcccccaaggatgcaacggatcgctgctgtgtcactcatgactgttgctacaaacgtctggagaaacgtggatgtggcaccaaatttctgagctacaagtttagcaactcggggagcagaatcacctgtgcaaaacaggactcctgcagaagtcaactgtgtgagtgtgataaggctgctgccacctgttttgctagaaacaagacgacctacaataaaaagtaccagtactattccaataaacactgcagagggagcacccctcgttgctgagtcccctcttccctggaaaccttccacccagtgctgaatttccctctctcataccctccctccctaccctaaccaagttccttggccatgcagaaagcatccctcacccatcctagaggccaggcaggagcccttctatacccacccagaatgagacatccagcagatttccagccttctactgctctcctccacctcaactccgtgcttaaccaaagaagctgtactccggggggtctcttctgaataaagcaattagcaaatc

SEQ ID NO: 363542 - DNA, 1142 bp, Homo Sapiens
  misc_feature (590)..(599): n is a, c, g, or t
  misc_feature (707)..(750): n is a, c, g, or t
tagattctattggtccttctctcattctccgaacttactcctttttatgggtaagtcaactaggtttacagtcccttatttttaatgcctaagttttgacagcaggaagaaaacaattttttaaaaattctcattacatagacgcacaagaatatgtcacataaagaaaatgtgtttagaatactggttttctatttacgcatgatattttcctaagtaaaattgccaagtggacttggaagtccagaaaggaaaataatttaaattaatgctggtgatcttaacaatattttgtaaaatgatgcttcccccttctccatggtctagtcaattttgtacaattaggtatctgactttacaagtttgttatcctttctaatttttactgaactgaaagcacaaagaagactacacagaaaatctggaaacagttgcaggtgttgggaggaagatgaaatcgagctgtcttttaacttttgtatgtgttttatcagaatttgctggactatgctggcaaggactttgtttacgatcaaattgtactagtgtctgcagggtttgtcagtactcgtcaaagccaagtccaattnnnnnnnnnngtctttgccctccaaaaaaaataacacccttcacctactcctaacccccggggcccaacctccaaacgcacgctcggcccgccgccggggagccatatataccagcannnnnnnnnnnnnnnnnnnnnnnnnnnnnnnnnnnnnnnnnnnnaccgccactcatgtcgactttcccccgccgccgcgccacacgcaacgacctacccccccgcccaccagagccgttccccgcccttgtggggggtggcggtcacctattctcgtgggccccccactcacaagaaaaaccgccttcttcttatatataacgacactattctccccccctgttgggggggtatacgcatgcgcaacctcccacacctctttgatacacatgacatagatagagagcccaaaaaccagtcggggggctcatcaacacagagcggcgccgttcaaactctcgagaagcagagaagaacacgtgcggggcgcgtcaccactcttatccgccaccagccgcgtgcttgtgtggcactatcctctcatcgcaccccacac

SEQ ID NO: 363543 - DNA, 1031 bp, Homo Sapiens
gcggccgccgcgtcggagttacaggctgctaccgcagggctggaggctgccgagtgccctatgggcccccagttggtggtggtaggggaagagggcttccctgatactggctccgaccattcgtactccttgtcgtcaggcaccacggaggaggagctcctgcgcaagctgaatgagcagcgggacatcctggctctgatggaagtgaagatgaaagagatgaaaggcagcattcgccacctgcgtctcactgaggccaagctgcgcgaagaactgcgtgagaaggatcggctgcttgccatggctgtcatccgcaagaagcacggaatgtgaactggtgccccggcagcctgctggactcccagaccccatccagccaggggaccgcaggccattgttgaactcctctatactcctgggcactggttgacagtactgaggcttaaggcagctggactctcttgctggtgacctggcatcctcaattgtttcctcctgaagtggaagctggggccttagactctgccctggtgacaccagcaattatgactttgtctacccttcctccccagttattgttgcagattctggttaagcagaggcttcagaaccactgaacttgaaacttaccctctagggatgcaggtgggatgtccagggactataggtttgggaaaaccataccttaaggttggtcagcagtcagacaactctaatgtgtgtagtgataagagattcaagtaacatcagttctcctccttttcatgcttttccttcccaggtgcagcctgtgattctgatggggactggtaaatctgtgcctctgcctcctaggacttattttcccaggaggccatttacaaggggatctggatgacctgctgatggagatccagcttgccagggacttaggtttatcctgttttgtttgctactggttacaaattctattttctgtacaattagtcagactaaagttttcactgtgtttgtttggcaaaacaaattaaacaaaaagtaaggtttctacc

SEQ ID NO: 363544 - DNA, 632 bp, Homo Sapiens
  misc_feature (137)..(145): n is a, c, g, or t
tttgctctaaagggggtagagggggcgctataaggtaaatacaggccccatttcaagatttttaggactatattaatggcattgggttgttttctctgcaacagagagggaattccaatacttaatcaatgctcttnnnnnnnnnttaaaacaatattctagtactcccctttgtcacaaacagaaactgaaagtgtcttaacaccatcaaccagcacattgtgggtgatgccatgtccatcttctgagtacctgccatcaaactgagcctctacaatgacatcaggactgacattatagctatacaaggactgttgcgggagatggggtccacaaagctcctcggggatatatgattcatacgcagattctgtttctttgtcattgctctctggttaaactaccttccaatgctcctcgggaagcattttcacgaccaccagatccccatttaaggctctattacgagcaacaaccccatcaataaaaatgtctcgatcaccatccggggaaggaatgaaggcttcatgaaacttctctggattaattctcaatacaccctggatgagtgttcctctcttcaagccttctgagacatgctccttggacatgtaaagttgaaatatggctct

SEQ ID NO: 363545 - DNA, 611 bp, Homo Sapiens
atccacggctcatttcagatccatgagaaggccttggaagaagcaaaagaaaaattaagaaagtcaagagaggaaattcgagcagaaattcagacagagaaaaataaggtagtccaagaaatgaagataaaagagaacaagccactgccaccagtccctattcccaaccttgtaggaatacgtggtggagacccagaagataatgacataagagagaaaagggaaaaaattaaagagatgatgaaacacgcttgggataactataggacatatgggtggggacataatgaactcagacctattgcaaggaaaggacactcccctaacatatttggaagttcacaaatgggtgctaccatagtagatgctttggataccctttatatcatgggacttcatgatgaattcctagatgggcaaagatggattgaagacaaccttgatttcagtgtgaattcagaggtgtctgtgtttgaagtcaacattcgatttattggaggcctacttgcagcatattacctatcaggagaggagggaagaggaagaacgtctgagaaataaaattcgagctgataatgacaagtccttggaagaagcaaaataattaagat

SEQ ID NO: 363546 - DNA, 352 bp, Homo Sapiens
  misc_feature (83)..(83): n is a, c, g, or t
tgaagaaacttaagcttgtcaagagttacttggaacatttaattctcaaaaaagctgttaaagaaaaagatgatacaagaagnaaatatttacctgacagttggataacataaaatcaaggaaagagatactgcagacaaaccaagagaccttgatcctgaaaaaaataattggctatgcagacagcagtggagaattgatgatactcatgaaatggaaaattcagataaagcagacttggtgttagcaaaagaacaaaacatgaagtgtatataaaaccgggctcttgctttttgctttactaatgtgaagaaacagccgcattctaataaaaatcaagtttgatatattc

SEQ ID NO: 363547 - DNA, 328 bp, Homo Sapiens
ctggagctgatcttagaaacctctgcacagaagctgctttgctggctctgcaagaaaatggactagacgcaactacagtgaaacaagagcactttctaaaatcacttaagactgtaaaaccgtcgttaagttgcaaggacttggctttatatgaaaacttatttaagaaagaaggattttctaacgtggaaggtatttaaaaatcaccttaaactcttgttcagttcacattaattgaaatgtgaacttgcctgtcgtttgcaacttcacacttttagaatttgtgtttatatttcctgtaagtgaataaataaaacaaaacaaaaca

SEQ ID NO: 363548 - DNA, 595 bp, Homo Sapiens
  misc_feature (564)..(564): n is a, c, g, or t
ccgcgctccccgcgcggctccagcggatcgcggatcccggccgggccccgcagggaccatggcagccgggagcatcaccacgctgcccgccttgcccgacgatggcggcagcggcgccttcccgcccggccacttcaaggaccccaagcggctgaactgcaaaaacgggggctacttcctgcgcatacacccccacggccgacttgacggggtccgggagaagagcgaccctcacatcaagctacaacttcaagcagaagagagaggagttgtgtctatcaaaggagtgtgtgctaaccgttacctggctatgaaggaagatggaagattactggcttctaaatgtgttacggatgagtgtatcttttttgaacgattggaatctaataactacaatacttaccggtcaaggaaatacaccagttggtatgtggcactgaaacgaactgggcagtataaacttggatccaaaacaggacctgggcagaaagctatactttttcttccaatgtctgctaagagctgattttaatggccacatctaatctcatttcacatgaaagnagaagtatgatttagaaatttgttaatgaga

SEQ ID NO: 363549 - DNA, 370 bp, Homo Sapiens
gacattaaagagacatttataatgtagggaaaaaagacacaggaaatgaagctgggcttccagtctgttcccctttcaccgccccattagtgtcccgttagctgtttccctgctaagggctggggcatctggccaggcctaactttggctttggccaacaatgtcagggcattgagtcccacatagacaaaagcagctgccacttgaagcccagcctgttgcaatctggggaattagcaggctgggggttgcccatcagtgtcttctgaatgcaccggtgtgccctgtcaaggggtctggtcggagagcaggggggagaagtactttcttctgtggcccggtgcagtggctcacgcttgtaatcccagca

SEQ ID NO: 363550 - DNA, 626 bp, Homo Sapiens
  misc_feature (65)..(77): n is a, c, g, or t
ttgcagtgagccaagttcgtccactccactccagcctgggttgacagagcaagactctgtctcgnnnnnnnnnnnnnccatgaaggatgagtactagagtcagtaatagaagtagttcagcattatttaactacaacacaatgctgcaaatatttcacagtaattatcaaaatttaatgggctctaatttaaaatgttatttaataagtatagattttaattgagaattatctttgagtagatgtaatcacaaagtgcattaactcttgttggaatattttatggctattccaaagtatagagtgcctaaattttgtgttgaaaatgtctttcatgacggtattaagttttctgaaattacacatggcttttaaaatttctaatgtatccaagatgtgcaatgttgttaggatctcattcttcagtgcatgaaaagctactaccctcagaacattttgtgttaattgtacctgcaagaacacctcaggcaagccaagaagaaatgaaacccaaataaaacttgaaaatgcaccttaaaaatatatatacatataatagttttgaaatgggattctgctttattttgatggaatggccattaaatacacattttgagataaaaaaaa

SEQ ID NO: 363551 - DNA, 780 bp, Homo Sapiens
  misc_feature (24)..(24): n is a, c, g, or t
  misc_feature (61)..(61): n is a, c, g, or t
  misc_feature (70)..(70): n is a, c, g, or t
  misc_feature (130)..(130): n is a, c, g, or t
tcagattcacggttctgtaacccngtgctgtgacgttccatctcttctaaccagccatgcnttcccttcntctgccatacccttaagcgccctcagattagatgaaaaacttgctcctggtggatcccanggaccctcaggacctcgaggttactgcagtcagatgccatctcatcccctgtgggggccaaagtttttatgtgggcagatgctgtggtcaggaactaggcatgctttctggcaatgcactcaccagacaaaaatcccttgatgtaaatcccatgttaatttattaaatttcagtcagaaggtcagcatttacatgacagaatgtatgtagagagttggggtgtctggtaggcaaactgcaaggcagttgagatagttggattaagaggctagacgagacatagaatactattggtatgtgtgcaatttcacgaatattaaattatgtttcgaagtccagttgtcattcccgcattcagatttcatttgctgttgctttatacgttacgtacccaaggacattgcctcagggttgcaaactctttaaaggaaaatttatccatatatccatgtattatatagaagaataaaaattgagtttacttcacccgacctgatttttttataccagcttggaaattcctcttgaacctacgtctccatatgtcacatcatgacaggactagcctgaacaaaagccatgtctatctaagcggaggctgttgacttcattcagtttgcatattgtatatagcaacacaaacacttgac

SEQ ID NO: 363552 - DNA, 655 bp, Homo Sapiens
  misc_feature (551)..(559): n is a, c, g, or t
ggaattctaaggttcatcgaccgtaaaaagacattttccaagctggcccaaggagaatacattgcaccagagaagatagaaaatatctacaacaggagtcaaccagtgttacaaatttttgtacacggggagagcttacggtcatccttagtaggagtggtggttcctgacacagatgtacttccctcatttgcagccaagcttggggtgaagggctcctttgaggaactgtgccaaaaccaagttgtaagggaagccattttagaagacttgcagaaaattgggaaagaaagtggccttaaaacttttgaacaggtcaaagccatttttcttcatccagagccattttccattgaaaatgggctcttgacaccaacattgaaagcaaagcgaggagagctttccaaatactttcggacccaaattgacagcctgtatgagcacatccaggattaggataaggtacttaagtacctgccggcccactgtgcactgcttgtgagaaaatggattaaaaactattcttacatttgttttgcctttcctcctannnnnnnnnaacctgttaaactctaaagccatagcttttgttttatattgagacatataatgtgtaaacttagttcccaaataaatcaatcctgtatttcccaaa

SEQ ID NO: 363553 - DNA, 468 bp, Homo Sapiens
gattcctttcttgtccaaacaaagggagttgctctaaagcgagcatcagttaaaatgtaggggaaaatgtattctgtatgtagtgtagataaaactttgtgaatggacaacagttacatagtgtcttggtagcaccagccagtgtttcccagcccagagtttactgacttgtaattctctatccaggacatcaggagtgagggatggaaaaggggataaaaggcctggagccacactctatatggctgaggaaggagctagggaaagagatagacacaatggggtgaaaacaattttgccgcccctgcctggaaactgctggtggggaaatgatggtgaagggtgtttgcttgaactcatgagacggtccaaatctcataaactagccttctcaaaatcccagcaatataaagcactgtttttcttcagtcgtttaaataaacttgtaaaaacattgaagtttaaaaa

SEQ ID NO: 363554 - DNA, 663 bp, Homo Sapiens
ggggagctacaacaggcaggcaggggtggggggtggcaatcatttttcttcctatacatacaaaggatattgtcaaaaatggcgttcttctcttgtggcctgttattctgattgctgctgtatacagttttgtcactctttagtttttagttaagcatactgatagactttcctctaaaagccattcactccagattttacctggggaatattctacatactgcttactttctctataaaactcatcaataaatcatgaaaggcactgagttttgtaaatcaggaccctaaatgtttaattgtaaataagtttcagataattattatagctttgcgttgaagtttgttgttttttttctcaactagttaagtcaactgcttctgaaataactctgtattgtagattatgcagatctttacaggcataaatatttaaactgtaatatgctaacttgaagagattgcaataaagctgcttcagctaaccctgtttatgtttaaatactagggtttgttctatattttatacatgcattttggatgattaaagaatgcctggttttcgtttgcaatttgcttgtgtaaatcaggttgtaaaaaggcagataaattgaaatgtttgtggtatgaggaaataaaagaatggaattagctttcattcag

SEQ ID NO: 363555 - DNA, 556 bp, Homo Sapiens
aagggggacctcacctcctgtgcacagcccacccactttcctctgcttccctggcacagcccaggcatagacgagctggcgttggacccagttcttcccccttttcagccccacagctgctgccacaggggccaactagggccaggtggaaggggagctgagaagccaacccctagcccaggggtgctgtgggaactgggatccaatttgtagcttcctgcctggcttcagagagcccagcaaccttctaggcctgctttccagacttctgagatagcctgggatgagcaatcctgttatagtacatctggaccttccctacctgggctctggggaggctgtgggcctggagagggaaaaggagggagggggtgtctgcaccacctgggaagatagcacaaggcctaatgaggtcaccctgactccccaccccagcatttcattcataccagataatagctgcattactgccaactgaccttataaccctctgcaccttcaaaaagattcatggtttttaattgctgcttttaataacatttgttaaagttaaaaa

SEQ ID NO: 363556 - DNA, 474 bp, Homo Sapiens
ttataactttaacaaatgttattaaaagcagcaattaaaaaccatgaatctttttgaaggtgcagagggttataaggtcagttggcagtaatgcagctattatctggtatgaatgaaatgctggggtggggagtcagggtgacctcattaggccttgtgctatcttcccaggtggtgcagacaccccctccctccttttccctctccaggcccacagcctccccagagcccaggtagggaaggtccagatgtactgtaacaggattgctcatcccaggctatctcagaagtctggaaagcaggcctagaaggttgctgggctctctgaagccaggcaggaagctacaaattggatcccagttcccacagcacccctgggctatggggttggcttctcagggaccccctgaacgctcacaggtagagagggggtcaggcctagcaatggaaaaacagctcctgcaggcctgctgc

SEQ ID NO: 363557 - DNA, 835 bp, Homo Sapiens
tgggaaaatgaggccgagatgcagagagaagtggaggccaaagaacagagaatttcatgatatatggggggcgtgattccatagtttctgaggccagcttcataagagccctttggttacataacccatcccaggtgatcatagaaggacctcaaaggaaaaggtgaggggtttggacatttcctgagaatccatgggggaaccattcagggtttggggcaggtgtcaaccacaagaacattaaacaggctctttaggcagcaaagttgggagtggtgttgaagtaactgggaaaactccacagaggctcagcgtccacctctacctgacaccctgccagcaacctgggtgatttccgcaggtgtctgaaccccgatctctcagtgttatggcccccaccaccaggaaggcctccttttctctcttctatagccactcactcctgggccccactgtgaacccagaaatgccacaccatggaagccacacactctgctgtctccttctgtcctcattcctgtccttctcacagtcagtccctcttggctcttcctagagtccctttcattccctcatttccacttcctgccgctgtactgtcacctgtggccctggatttgcactcttggtccaacaccctcaactccaacacctctgtctttctgccccatccactagacaaaagctgactctggaaaacattaggcactcagaatcaagggttctggggtcagatggataattgccatcatcctcaccaagttgccactggactttcttgcccctaaatccactgggctttgtttgcaactttctgataatttataattatttc

SEQ ID NO: 363558 - DNA, 439 bp, Homo Sapiens
acacataatggtatctcttattaaaattaaccagttatatacaaaaatacttgaacatttattatagaaaacctctataaccagcctcaacagcatatacctgctgaatggtttcattaagagaatataaaaaagtggtcactgccttccaggtaagctaccaacaaaacaaacatggttaaactaaaatgagcttcccaacaaaagagggaaaatatttaacagtatgatttaaaatacagttcatatctattgtcaattgagtgttataaacagtcagtaaaagaaaaaacaaagatataaaatacattactacatacaaggtgcttttttcacacttctacaactggcattagcatccctatctagacctaagatgctatgttgcaatattcaagctagagaagtctacagcaatcctccttcaagagaaagacgc

SEQ ID NO: 363559 - DNA, 765 bp, Homo Sapiens
ggtagtcaaagtaaaggtttatccttgcatcagaatggtttaaatcttgcaatttgcatatacaaagagttcagcaacattcactggcattataatcagagcaagatcaaattataaatgtaatcaaagaaaatatgatagttgaaactgtaataacatacatacattataaagactgcacataagttaaacacaacttagttaaacaaacaaacaaaaaagtatcagtaattatacacttaaaagaataacatggggatgtctccaaatgctgaaacacaggtgtcaggctcatttaaaaaagtgtttaaaaacacataaaaataccttttaaaacactggtatgcattcttcattcatatagcacatggagagaaaccgtaaaggcagtcacatagtgaccagatcacacacagatcagaatggtcgtcttctaatcactatttggcatttgaacccaactgcatgcaacaaaggaaagtgtgaaaggaacaatggtgtcggcactgggctgtttgggggctgttttgttatgtacaatggactttctttgactgaaggaaacaagagatgaactttccaggttgcacggagaagattctgagtccctcagggattgattcccccagcgtgaggtgctccaaggcccaggagatcctgtgatctggggccttggtagaggccatgaggctgtaatgacctccccgctaaagggcgaacgctgtcccggacagtggaggggagagtcttgcatcctggggaaag

SEQ ID NO: 363560 - DNA, 398 bp, Homo Sapiens
  misc_feature (16)..(16): n is a, c, g, or t
  misc_feature (68)..(68): n is a, c, g, or t
  misc_feature (147)..(147): n is a, c, g, or t
cccccccagggcccanaggaaagaaagaatgccaaaccccaaggttttaaaaagggtatttttaaggngtttttaaaaacaccttttttaaaatgagcccggaacacccgtgtttccagccatttgggagacatccccccatgttantcctgttaagtgtataattactgatacttttttgtttgtttgtttaacctaagttgtgtttaacttatgtgcaggcctttataatgtatgtatgttattacagtttcaactatcatattttctttgattacatttataatttgatcttgctctgattataatgccagtgaatgttgctgaactctttgtatatgcaaattgcaagatttaaaccattctgatgtcaaggataaacctttactttgactacc

SEQ ID NO: 363561 - DNA, 699 bp, Homo Sapiens
  misc_feature (430)..(507): n is a, c, g, or t
aaaaccagaatcttttaaaattaagtacattcaaatgtgcagatttcttaaacctcatttagttgagctttgataggtgaaacgcacgttttgaacaactctggtaacaaagaaaaacattaaattgattataggtatgttatatttaaagaccagttgtgaaattagctatattgtgctcaaagtatgttactgacatttctccgtcgttaaaaggaactgctccattctagttttttataatagtctgtattatgtatatagcctgatagtgctgaatttctgaattgaccttcatcttatttactcaataatattcatttgacaaatacttattaagtgcatatatgtgtcaggaactgtactagatgctgaggatatagcagtaagcgcaacagaccaagctaacagcttagtaaagggtgaggtnnnnnnnnnnnnnnnnnnnnnnnnnnnnnnnnnnnnnnnnnnnnnnnnnnnnnnnnnnnnnnnnnnnnnnnnnnnnnncaaattggtatccatgtataattcatttccgtgcattttcttgtgtgaagaaagctcagtaaaagtatttcttaggtttctgtaattctagttctctactcgattttcttctgcaattttctgagccagaacccttcttagaaggcatattagagactttaaaagttaaataataaaataaatctcttcttt

SEQ ID NO: 363562 - DNA, 817 bp, Homo Sapiens
  misc_feature (509)..(534): n is a, c, g, or t
acacacaaagacgacaaaaattatggctatgtacgaggctgggtggtgaatcaggcagaggcaggctccactgcatactatggttgttcagtcacaagccaggagtgctgcaccgcccagtggtccccctcgggctccaggaccccactgagaccctctcggaggcagaagcacttcacccctcagagtcctacaagtccaaccagtggacctggaattggccaatgggctcaggagagggctgtgttgctctctcaactcatgtacgccccagctcttgagtgctggatctttctacttgtgccactatgggcactaggtctgtagtgtccctgtgtgcttccagtactgcactttgaccccaaggtctcatgacttcatttcctgaagggtcaccaaggtgtcagctcagtggctaggaaaaaccatttccagccttagcctaaacagtggcacatagatctctcccacatagagcccagagggatgagaggagagagcaactgtannnnnnnnnnnnnnnnnnnnnnnnnngcaggcccatggtcagctctggtctagatgtatctaggcttagggagccctgggaccctgccagtctcagttcatctcttaccaggagcaaggccctctgaagcatgggccgtgccagctgtgccctagtgataagggtaagaggcaagatgcaggtcactgcctattctctgccattcatctaggtccatgctgtcaggtggacaaaagcaagctcattgcaacaccatgaatggtggaggtggaaccactctctcgaaggataacaaatggggaacacggg

SEQ ID NO: 363563 - DNA, 510 bp, Homo Sapiens
  misc_feature (465)..(465): n is a, c, g, or t
agggcagcgagaaggagaaaccccagcccctggagcccacatctgctctgagcaatgggtgcgccctcgccaaccacgccccggccctgccatgcatcaacccactcagcgccctgcagtccgtcctgaacaatcacttgggcaaagcacggagcccttgcgctcaccttcctgctccagcccaagttcaagcacaatttccatgttccacaagtcgaatctcaatgtcatggacaagccggtcttgagtcctgcctccacaaggtcagccagcgtgtccaggcgctacctgtttgagaacagcgatcagcccattgacctgaccaagtccaaaagcaagaaagccgagtcctcgcaagcacaatcttgtatgtccccacctcagaagcacgctctgtcttgacattcgccgacatgggtcaaagttcttccccaaaggccaccaccccaaaggccagcttcttnttccagggttcccccccttgaagttgggaattggatgttaggggg

SEQ ID NO: 363564 - DNA, 910 bp, Homo Sapiens
cctggtgtttaatggagacaggctgggtaagttgacgacggttcaggtggctttgaggggcaatcaaggccatctctccagaggcatcgtggggatgccagattggggaatcctccatgacctggcagacaggcaccaggaagctttaagcccagcaactggagcactgctgacccctggtggccacttcagcccactgggaacttctcatcggcctggacctggctcagtttccccgtgggtgtcagacagtaggtaccacctactccagggccttcactagggcttcattggcctcaatacggatctggatctcagcccgtgctgcctcgtccgccgcacctgacagttctgactgcgccttctccaggttggcccgggctgcccccaggtccagcatgtccagtgtcacagcttcttcagctagtaactgcacagaggagtcggcattcacagtgacggagccgctgctcacaaagtacttagtcgtggtgccgtcttctgtgtgaaccactaccagcccaggccgtaggacctgtagtgtggggacatgggatgccaagatgccaaaggctccagtcagcgtaggcacgtccacttgcttgacgttggcactgtcaaagaacacctgcgtcggggaggcaaaggtgaaggacatctgtccgggcccggcggcgggggcaggtgcagcggcggcctcggcgtatgtacgcgcctgaagcatcaggcggcgcaggcccgggtgacgaagcagtgaggcgggcaacatggtggcggaaaagtcagtggactctagttcgcgggcggccgacacactgggcaagcgaggcggccttcagggagggagaaggacgacgcgcggtgccttctgggaggcgcagttcccacaagaacgcacgcgcacaggatt

SEQ ID NO: 363565 - DNA, 299 bp, Homo Sapiens
  misc_feature (44)..(61): n is a, c, g, or t
gagaaggggtctgtctccagcctgggagggtgagactccatctnnnnnnnnnnnnnnnnnnggcaacccctggtctaagataagagataaaacatcaggtggtgaggttgaggtttggggcttggtagcagttgccccagtcatgagatgactcacttaacccgtctcctttaagtgagctgggctgggaggcttcctacaggggaagaggcccctctggggagctgactcagccaggctccctgaacttttttccttgtcccatcctggggtcaataaaactgaatgttgcatattct

SEQ ID NO: 363566 - DNA, 450 bp, Homo Sapiens
gagtctcagattgaaatttaataagcatttgaagtgaagcagatagctctggtgataacgctttataggtttgcaacaaagcaaaacaaaacgaggcttagtgatgtgtcttggcactatttagataaagtccaggatgcaaacctgtggactggctgtcctgccatcctcaccaaaacccccaaccaggtaaagctgatcattccaaaggcaggtgcgatggcccatgcgtttcatcccacgatctgcacaggggaagtggaaccacaaaggaggagatgtgcctgttggatacgggcagagggtggttattgaggcagtagcactttgtcattcacagaattcaacatgaccaagggcttgcccattgtttttctgctcacgtgatttgtaggcctcttcaaatgcttaatattctgtgtactccgttaactcctgtcaactattatt

SEQ ID NO: 363567 - DNA, 1630 bp, Homo Sapiens
  misc_feature (705)..(705): n is a, c, g, or t
tttgagtctcagattgaaatttaataagcatttgaagtgaagcagatagctctggtgataacgctttataggtttgcaacaaagcaaaacaaaacgaggcttagtgatgtgtcttggcactatttagataaagtccaggatgcaaacctgtggactggctgtcctgccatcctcaccaaaacccccaaccaggtaaagctgatcattccaaaggcaggtgcgatggcccatgcgtttcatcccacgatctgcacaggggaagtggaaccacaaaggaggagatgtgcgagtatcatagatgtagagatcattgcagatggtgtctctagctctggtcagagtttctccaccaaacagcacagcaaagggcccgaccacagaacatgagtgatgccgtagtccatggggccccttctgggacccctgcccactgctcacaagccttgcaagctgttccatcaaatgaggagcaacaggtggttcctccttggggagaaagaaaggacttaattttcccatgactccaatgcccagctacttctggttcagctaagttgcaacctccaaagagcaatagctgatgacctggatggggtccaggagtttggagcagggccgcacagtgacctgagcgtgaggctgtgtggcagccttcttgcttgtagcaataggtgcacacgcagaaatccaccgctgaatggatanatgctgcaaaagcgtaactgccaccgcccttgccaaggatggatggagaagaggcatggggcagtgcggtaggtgggataagagggagggtaatactgtagagagctcagctagcttaaacatggtaggttcccctggaaggagggtgctagagtgaggaggtggataaattgcctgagaaatctgcttaggcttttgtttttcgagagtgtgaactgagagtgaaagctgtgtggcagccttcttgcttgatagcaaataggtgcgggcgctggggtccagccttaatgtgtagatgcttccatagcgtcgctgagtgtggataccgccctcccggccagccacctgcagctctcggtcagagattcgggtgcaggtgtgactactgaggccggcgggggggcagtcaccaggggtccctgtccacgcctcccacacaccgcgctctgtgtccagtgcggtcactgtggccaagcggcgagacccgtcccagccgcccaccacgcagagccaacgcccgtccacgggtgccgcgtcgtggtgactgcgcggggggctgccccgggctcccaatcgtacggcctggcccctagctgggtcgaaaaccaccgtatcgctgctgggctctctcgctcctcctgctaggagaccacctacgagatagaaccgtccccgcagttcggtgcatgaatggaaagctctagccaaaagcgcgtcccgcgccactggcctccaggcccagcctgagcctgcggcccgacccgggggcacggccaccgccatgggccccggggagagggagggcggtggggtctgcggcttggaacgagcccctacatggcaggccaggcacctcgccttccgcgggcttccccgggaacctccccctaccgacgccagccggggttcccacctcaagtcccgc

SEQ ID NO: 363568 - DNA, 482 bp, Homo Sapiens
  misc_feature (65)..(324): n is a, c, g, or t
  misc_feature (347)..(373): n is a, c, g, or t
tgggctacctgctaggcagcttgtggtgaacaatcataatctctaaaaaataccttgtctggacnnnnnnnnnnnnnnnnnnnnnnnnnnnnnnnnnnnnnnnnnnnnnnnnnnnnnnnnnnnnnnnnnnnnnnnnnnnnnnnnnnnnnnnnnnnnnnnnnnnnnnnnnnnnnnnnnnnnnnnnnnnnnnnnnnnnnnnnnnnnnnnnnnnnnnnnnnnnnnnnnnnnnnnnnnnnnnnnnnnnnnnnnnnnnnnnnnnnnnnnnnnnnnnnnnnnnnnnnnnnnnnnnnnnnnnnnnnnnnnnnnnnnnnnnnnnnnnnnnnntgaagaaacaagcctccctctcnnnnnnnnnnnnnnnnnnnnnnnnnnncctcctctgggataagtagtgctccgtctgtctcatgggcacatattagtgtcgtaatgccaaatactaaggttattgtaagcataaacattgaagataattgctagag

SEQ ID NO: 363569 - DNA, 1056 bp, Homo Sapiens
tccatgcaccgcttgatgggggtcaacagcaccgccgccgccgccgccgggcagcccaatgtctcctgcacgtgcaactgcaaacgctctttgttccagagcatggagatcacggagctggagtttgttcagatcatcatcatcgtggtggtgatgatggtgatggtggtggtgatcacgtgcctgctgagccactacaagctgtctgcacggtccttcatcagccggcacagccaggggcggaggagagaagatgccctgtcctcagaaggatgcctgtggccctcggagagcacagtgtcaggcaacggaatcccagagccgcaggtctacgccccgcctcggcccaccgaccgcctggccgtgccgcccttcgcccagcgggaccgcttccaccgcttccagcccacctatccgtacctgcagcacgagatcgacctgccgcccaccatctcgctgtcagacggggaggagcccccaccctaccagggcccctgcaccctccagcttcggggaccccgagcagcagctggaactgaaccgggagtcggtgcgcgcacccccaaacagaaccatcttcgacagtgacctgatggatagtgccaggctgggcggcccctgcccccccagcagtaactcgggcatcagcgccacgtgctacggcagcggcgggcgcatggaggggccgccgcccacctacagcgaggtcatcggccactacccggggtcctccttccagcaccagcagagcagtgggccgccctccttgctggaggggacccggctccaccacacacacatcgcgcccctagagagcgcagccattctggagcaaagagaaggataaacagaaaggacaccctctctagggtccccaggggggccgggctggggctgcgtaggtgaaaaggcagaacactccgcgcttcttagaagaggagtgagaggaaggcggggggcgcagcaacgcatcgtgtggccctcccctcccacctccctgtgtataaatatttacatgtgatgtctggtctgaatgcacaagctaagagagcttgc

SEQ ID NO: 363570 - DNA, 1180 bp, Homo Sapiens
  misc_feature (1071)..(1071): n is a, c, g, or t
  misc_feature (1080)..(1080): n is a, c, g, or t
  misc_feature (1145)..(1145): n is a, c, g, or t
gaagaaaaaaaatattagacccaggtccattttattaataatatgatctataatctcttgacattacaagtagtttttacagttaaatttcacactgaagacaaacactgtttggcttagggagcagaaagctgagtaacttacatcctttatatcagacactatattttaacagtttaagaaaaccttttacactttctggatttaagcatcaatatgtaagttgtttcctttacaggaaactgaaattagtaagaattaagtgaatatactgacagatggctcatttgggaacatgaaacctagagcaaagccaagcttctataactcataaagtcaaaggtaaaacattctggattcttcaaacctaaatgggcacttgttattttccacttttcttcaaccatgagctaagccctaactaaaatcaaagttgataaagattaagtggtaaacaaaaaaattattaaagctgtccttaactcctgtctgagtgttttttaagatatagatatgctttccacagcattccattttggctgcctcaagcaccagcacatgcagtttgtgaatcaatctgtagtaactgtgttctagcatttatacagaatggaagttcaaccaaacccagccccatatgaacagccaagggaacacacttcagtgtaggactacagagcttctctgataagctacagttaagttgtagctataaaggaatatgacaaaggaaagtctgggtgctaacatgcagaaaggcattttcaaaaatgcaagctaggacttagcagttactaatagactattctagtgggggaaaaggtttccttgcaaccatctgtatctggtataccatacacaccgatggaagctcatcctttattgcaattttgttttcaaaatacatcaacacaggcaaactagaaggctcccaacttcataaataacttttaagtaatagtactacaatatgtaagcacttttaggaagaaaactcctacttccttagaagaaataatataatcctcttttctttgtgtaaaatgatgggcacaataaacatgtggtttnccacaattncttactaagctaaaaacagtctcaaagttaccttatcataagaactaaattcacttatgcactanctagaaattgtcaccaaacattaaggcaacagttt

SEQ ID NO: 363571 - DNA, 590 bp, Homo Sapiens
gtaatatggatacttgaaggactttatataaaaggatgactcaaaggataaaatgaacgctatttgaggactctggttgaaggagatttatttaaatttgaagtaatatattatgggataaaaggccacaggaaataagactgctgaatgtctgagagaacccagagttgttctcgtccaaggtagaaaggtacgaagatacaatactgttattcatttatcctgtacaatcatctgtgaagtggtggtgtcaggtgagaaggcgtccacaaaagaggggagaaaaggcgacgaatcaggacacagtgaacttgggaatgaagaggtagcaggagggtggagtgtcggctgcaaaggcagcagtagctgagctggttgcaggtgctgatagccttcaggggaggacctgcccaggtatgccttccagtgatgcccaccagagaatacattctctattagtttttaaagagtttttgtaaaatgattttgtacaagtaggatatgaattagcagtttacaagtttacatattaactaataataaatatgtctatcaaatacctctgtagtaaaatgtgaaaaagctttgaa

SEQ ID NO: 363572 - DNA, 951 bp, Homo Sapiens
agtagaagggaagagggaaatggagagcatccttatgactttacaaagggtggaaatgaggatggagggatacagaagtctgcacagctgtaaaggttttatagatgtctttgccttcccttctgaggaagggaagaagtaatgaaagcacatgtgaataaccccttccatcccattcacagcatcgcactcccagtccttaaggcaaagggaggcagtgctgaagcattggtggtgcagtgtaaagagacaagacctgatcatctgatcacacttgtgccaacttgattcatattgggcattactaacaacccctggtcaaggtaaataggttgaacaatcaataacattatccctgcctgcatacatgtgaacaaaagctatagaggacatgcaaattctacagtcattcctcatatgctttagacagagtgcagctactggaatcttccagatttcagtgttttaaaatcagagctctgaatacacaaaaggaaagagaaatggagcagctgacatattttaagctcacagtgatactcagtgacaggagcacagagctctaatgtccacaggatgttgtagggtagggtctctcagtaaatcaagtcccttacctatgttctgacactgaggctcttggagctatgggttagaaatccaggaggcaatatgtctttattctaatgaagtcctcatcttgcactcagaggcccactagtttgcccttctatatattaagtaaaaccaagagaaattaagaggatgatggcttctttctgtcacatgggtgctaaaccttttacaaacacttgatacttctatagagggaccaaggacctcaagtcctgggcagtctccttactgtgctactcactactgtctcaacactgtagtgagtctgtctttaacacatttccttccaataaagataaaaccacttaaactctt

SEQ ID NO: 363573 - DNA, 257 bp, Homo Sapiens
gctacacttcctcttcctctgaactcatgtgcaaaatatgctacgctgcatcttcagggaaagcctcgcggcccctgacagcagccgctggagcggtgggcccgcccagctctccccgcgccccctcggagttccgcccggtcacctccacgcggccgagctgcaagcgaccctggcagcctcagaacccaggggtcaggggctcatcgatcctccctcccagcccctcctaatcaaggttgtgtgctgtcaggaag

SEQ ID NO: 363574 - DNA, 561 bp, Homo Sapiens
  misc_feature (198)..(198): n is a, c, g, or t
gccacctcaaacaagcacaagttgaccccggaatatctggagctcaaaaagtaccaggccattgcttctaacagtaagatctattttggcagcaacatccctaacatgttcgtggactcctcatgtgctttgaaatattcagatattaggactggaagagaaagctcactcccctctaaggaggctcttgaaccctcntggagagaacgtcatccaaaacaaagagagcacaggttgatgcaagaggtggaaatgttctccatatcaagatgtggcccaaggggttaagtgggaacaatcattataccggactcttcagatttacagagaacttacacttcatctgttccacctctcctgcgatagtcctgggtgctccactgattggaggatagagccagctgtctgacacacaaatggtcttttcaggccacagtcttatcaagtatcctatatgtattcctttctaaactgctactcatgaatgaggaaagtctgatgctaagatactgcctgcactggaatgttaaacactaaatatataacaagctgtgttttcct

SEQ ID NO: 363575 - DNA, 1160 bp, Homo Sapiens
tattttcagtagcagagtaaggcaaggttttaatcgagttgcataagacacactttgcatagctatttaattgcccaatgtaaaactttaatgccatttctaatgcttttattcatttttgaagtatgagtttgtagggacaaagaatgtatgttatcgtatacaagacccccacagactcttttcagcagaaagttatgcttctagttgccttaccatgtttcttgcacaactgtccatggtcctcaagggtgttggaaacattatgtctattaaatgggcctcttttcctttgctgtgcacttgatgggtgaactggattggggtgtgcacatccaggacgaggaggagagacctgtagaagtttaaagatagtttgtaaatatcttctaatgcttgtttttagtccttttatgttggagaagttcatggtatgtagtttaatgcaaaatgaaaccattttatttcaatgttattaaaaaggtttgttttattaggacgtaactgcattgttgcactgttttgtgcctgttcaaaggctttttgttttgcacagtgaatgtaaagtacagtgataatgtttagattgtcatctacttttttagaaaaaaaatatccaacttgggaattgttgttttaaagggctcaatccaaggaaagttagggggtgccaaataacggtagccagttaaaaaccgcaagttggcgtttctttaatcgtcctggtggaggagtatcccttacaccattttgtccaactccacaggggattttttcgtgtggaatgggccggaaaattcgtttgtgggcaattccactaaagatgggatcgcaggcccccctttaagccattgttaccctcctggggtcttgcctttcaagaataaaagaagaatttcctccaaactagcctttttttaccgaccccctcttccttggaaaacggacttgggagctctttctttatgtgtaaagacaaatatgtctttgttttacccttctccccctaaaaaatttaaatgggagtgggcacaaaaattgaagaggtctcttcttaacgcctcctgcccagagacatattctcagtgtaccacatacaatatccttttgttaaaaacgaaatattaaaatatagaggttggtgccaaaagtcttctccc

SEQ ID NO: 363576 - DNA, 414 bp, Homo Sapiens
agcgttcgcccagccctgagcgaggccccgcagggcgccccctgactctgaggtatgagtactgtagtagtcgcgccctgaccctgctgagcagcgtgtttggtgcgtgtggactgctactggtaggcatcgcggtcagcactgactactggctgtacatggaagaaggcacagtgctaccgcagaaaccagaccaccgaggtcaagatggccctgcacgccggcctctggcgagtctgcttctttgcaggtccggagaaaggtcgctgtgtggcctcagaatattttcttgaaccggagatcaatttggtgacggaaaacacggagaatattctgaagacagtgcgcacggccacccccttacccatggtcagcctcttcctcggtgtcacggggccttgtacggggtaccga

SEQ ID NO: 363577 - DNA, 1139 bp, Homo Sapiens
tttgttttcccgccaagcggaaaaggttttattttgtaattattgtgatttcccgtggccccagcctggcccagctcccccgggaggggcccgcttgcctcggctcctgctgcaccaacccagccgctgcccggcgccctctgtcctgacttcaggggctgcccgctcccagtgtcttcctgtgggggaagagcacagccctcccgccccttccccgagggatgatgccacaccaagctgtgccaccctgggctctgtgggctgcactctgtgcccatgggcactgctgggtggcccatcccccctcaccaggggcaggcacagcacagggatccgacttgaattttcccactgcaccccctcctgctgcagaggggcaggccctgcactgtcctgctccacagtgttggcgagaggaggggcccgttgtctccctggccctcaaggcctcccacagtgactcgggctcctgtgcccttattcaggaaaagcctctgtgtcactggctgcctccactcccacttccctgacactgcggggcttggctgagagagtggcattggcagcaggtgctgctaccctccctgctgtcccctcttgccccaacccccagcacccgggctcagggaccacagcaaggcacctgcaggttgggccatactggcctcgcctggcctgaggtctcgctgatgctgggctgggtgcgaccccatctgcccaggacggggccggccaggtgggcgggcagcacagcaaggaggctggctggggcctatcagtgtgccccccatcctggcccatcagtgtacccccgcccaggctggccagccccacagcccacgtcctgtcagtgccgccgcctcgcccaccgcatgccccctcgtgccagtcgcgctgcctgtgtggtgtcgcgccttctcccccccggggctgggttggcgcaccctcccctcccgtctactcattccccggggcgtttctttgccgatttttgaatgtgattttaaagagtgaaaaatgagactatgcgtttttataaaaaatggtgccctgaaaaccaacaaaaaaaagggagccgctcgggatctagaactagtcgacgcgtggtcgacgatatcccgaaactccggaccgtacca

SEQ ID NO: 363578 - DNA, 501 bp, Homo Sapiens
  misc_feature (416)..(450): n is a, c, g, or t
gcggccgccaggtgcgtctccagactcccggcggcgtcgggcaggggatggttgctccgccgcaacggccgccagtgcgtacagtgaggcgccttgcagcgcagcgcggtgcaggctccacgggcccagacaccccgcgcgctgcacatccgggtcctggtgtgcagatggggcgtgggctcggcaaccagctggctgggggcgcccggcggagaaaagcgggacccctgctcccaaattccttggagatcgtacagccctcacctctttgcaggcgccccccccatcctgcctccccacccatgggaaaccttggatctgcaccagttgggacctcttctccaaagcgctccttggctttggagctaagtggcttcgtgcccgtagaagtggatttcaaacttcaataatcaagnnnnnnnnnnnnnnnnnnnnnnnnnnnnnnnnnnngtagagacgaggatctcattatgttatccagggtggtctcgaatgtctggg

SEQ ID NO: 363579 - DNA, 281 bp, Homo Sapiens
tgagcacattttaaaacataaattcaacagctggacctgctatgcagagcaattcaggcggagggaaaggctcatgcacactctccaagtactgttaggtatgagttctaaatttctcttcaaagaatcaatatgtcagtatgttcagttctttgccttctactgttaaacttaacttcctcgtaaagcaacctttttccattacctgctccaccctgactcattctgattacctgctcattctccaccctggcttactctgatttcctgctctgccctgt

SEQ ID NO: 363580 - DNA, 825 bp, Homo Sapiens
gcggccgccagccggggcgatggcggggctctggctggggctcgtgtggcagaagctgctgctgtggggcgcggcgagtgccctttccctggccggcgccagtctggtcctgagcctgctgcagagggtggcgagctacgcgcggaaatggcagcagatgcggcccatccccacggtggcccgcgcctacccactggtgggccacgcgctgctgatgaagccggacgggcgaggtaagggccggcgctcctcctggagcgcaacggggtccgcagccccgttcccaccctccgatcagccaggaacccgctgcttgtggcgctggccgcaggagagaggagcctgtcaccctgtggagaatgcactcccagttctagtcgttgccccttggcacccgccgacactgctagtgccccatcccaaagtgagcattttctttgtgtgtagcacaggatgcggtatttccaaacccctgccctcggtcttttcccacctcaccgctgctcagctctcaaagccctgccgtttcctcctgccttggcttgggaagccttaggaacagaagctccctgggagcacagagcggttttaaactggccaacaccttaacgcccagagccgccctcctctcgctgccacttgggaaaaataagagactagaggatcactggacgcttcctcccgggcatcacaagacttgactgctgcttcagttcccgctagaacctttcataactttaggccctttaaaggatgtacataattaacaattaagaagacggcagggccttccaggcagagtttctttggaaggggtgtcaaacg

SEQ ID NO: 363581 - DNA, 795 bp, Homo Sapiens
cggcacgagagagccctgcccagccgcccaggagccggccccgagtgaggacagaaaccccttccccgtcaagctccggtccacctccctctcgctcaaatacagggatggcgcctctcaggaggtgaagggtgtgaagaggtacagtgccgaggtccggttagaaaggtcgctgaccgtgctcccgaaggaggagaagtgtcccctcgggacggcccccgcccttcgaggcaccagggcccccagcgaccaaggaaaggggaaggcccggccccccgagccgctcagctccaagccgcccctgccccggaagccgcttctgcagagcttcacgctcccgcaccagcccgcgccccccgacgccggcccgggagagcgggaacccaggaaggagcccaggacggcggagaaaaggccgctgcgcaggggagctgaaaagagtctgccgcctgcagcaacagggcctggagctgatgggcagcctgcgccaccctggatcaccgtcactcggcagaagcggagggggaccttggaccagccacccaaccaggaagacaagcctggggcacgggaccctgaaagtctgaaccaggaaagcaagccaaggtgcccgagagaggccaggagcctgtgaagcaagctgactttgttcgcagcaagtctttcctgataacccctgtgaagcccgctgtggaccggaagcagggggcaaagctcagattcaaggaggggctgtcatagaggaatctcattgtcccatcagaacttggctcagtctggagtgatgatggagca

SEQ ID NO: 363582 - DNA, 524 bp, Homo Sapiens
tcccctcctggtgctgacccctcccggggggctcctataggggggagatttgaccggcaggcttctgcggagggctgcttctacaacgctgactacctggcggcccgagcccggctggcaggtgaactggcaggccaggaagaggaggaagccctggaggggctggaggtgatggatgttttcctccggttctcagggctccacctctttcgggccgtagagccagggctggtgcagaagttctccctgcgagactgcagcccacggctcagtgaagaactctaccaccgctgccgcctcagcaacctggaggggctagggggccgtgcccagctggctatggctctctttgagcaggagcaggccaatagcacttagcccgcctgggggccctaacctcattacctttcctttgtctgcctcagccccaggaagggcaaggcaagatggtggacagatagagaattgttgctgtattttttaaatatgaaaatgttattaaacatgtcttctgccaaaaaaaa

SEQ ID NO: 363583 - DNA, 703 bp, Homo Sapiens
taaaaaattcttgatgtgaattccactgttacctgaccatgtatattcagatgaatgtactctttcttgttccttgttaccagattaatctgagagaatgtggattcatcctgtcatctttctcatactcaaatacttaaaatggttcttttgcccaaaagtctcagagtcttcattttggtacagtggagtcacaacttgtaaggtggttaggttttaaagaccgtgcctaaggacaaaattgagcatgctcagaatggtccttgaaaatctcctaaattaccaataaatttctctttgtagtcttaaagtttaaatccctgtggagtgatatgtaggtatgaatatattatgcttatattaagtacaaaaatacaaactgcatatcaagagattcttatagcattaataatttccatgcatgtgtctttttccagtaggtatggttgaatttatgtaaatttattgctaatcccatcccttacgatctagagtataaactgcgcaagggcagaagtttttatctggtttgttcatggatgtattctaagagctgagaacagggcctggacacaataagcattcaataaatatttactgaatgaatgaactcctacctatattcctatttataatttggctccactttatcctactttagctcccattcaattcaataaaaaaaacatttttttgaacacat

SEQ ID NO: 363584 - DNA, 283 bp, Homo Sapiens
aatgctacccagggaaatattttcatatcatttttaagtggcctgcctcaatgtatatttatttcttttgaaacaaaaaggttctggaaactgtttttctgtagctttaaatgaataggtgaggaaaatctatatgggatgtaatttttttgttcagtctcttaaaaaatactttgttttggtacatttggttgtgcttgtggggaaaataaaaacgcagagatccttatatatttatgttaaagtaatattttattatctacataaaacagaaatgcacaat

SEQ ID NO: 363585 - DNA, 145 bp, Homo Sapiens
aacagtgtgtcgagtctttgcaaagaaacctttagatgtggttcatagatatatgaatacgtatctgtgtaaaacagtgagtgtgcagtgtgtaaatactttaaattattatgctagaaaaataaagttacataccttgctgtga

SEQ ID NO: 363586 - DNA, 542 bp, Homo Sapiens
agcgggtcattgccgcggcgccttgagtctccgggccgccttgccatggctgcccgtggtgtcatcgctccagttggcgagagtttgcgctacgctgagtacttgcagccctcggccaaacggccagacgccgacgtcgaccagcagagactggtaagaagtttgatagctgtaggactgggtgttgcagctcttgcatttgcaggtcgctacgcatttcggatctggaaacctctagaacaagttatcacagaaactgcaaagaagatttcaactcctagcttttcatcctactataaaggaggatttgaacagaaaatgagtaggcgagaagctggtcttattttaggtgtaagcccatctgctggcaaggctaagattagaacagctcataggagagtcatgattttgaatcacccagataaaggtggatctccttacgtagcagccaaaataaatgaagcaaaagacttgctagaaacaaccaccaaacattgatgcttaaggaccacactgaaggaaaacaaaaagaggggacttcg

SEQ ID NO: 363587 - DNA, 540 bp, Homo Sapiens
  misc_feature (74)..(74): n is a, c, g, or t
  misc_feature (152)..(152): n is a, c, g, or t
ttgtttatgtgtgatagtggttctgtcatcatcattcatgttttttaaggcctggtcataaaactttaaatttnactagtgtagcttaatgtatattctaaaaagagaatgcagtaactaatgccctaaatgtttgatctctgtttgtcaanactttttcaaaattatttttttctgtaaagtataatatataaaacttcttgcttaaattgaatttctatattagtggttaattgcagtttattaaagggatcatcatcagtaatttcagagcaactgttctagtgttttgtgtttttaaaacagaattaggaatttgagagatctgattatatttttcatatgaatcacagctgttgacaatgtcccatatatttaagaaattatatcatactgatactatttgtaacattttgatttgatttaatctccagggacagaaataattcattggtaaagtggtaataatgcgttttttaaaaatgctttgagaggtaattacttgcatatgagagaaataaaacatttggcacattgtta

SEQ ID NO: 363588 - DNA, 602 bp, Homo Sapiens
gggcggtttcaccatgttggtcaggctgttctcgaactcctgacctcaggtgagctgcctgccttggctcccaaagtgctgggattacaggcgtgcacctgcgcctagccgtcacatatctaaacaagcatgaaaggggttcatttttgtcttcttcttgcctgccgtcagcatggtggaaatggctctgcctatgctcatgcttctggtgcccaatgccttgcactgtgccattcaacactatgaagagaaacaagtagccacacctcaaaataatgtggctgtcaactggcctaaataaacctacacaaaccagtacttgccttttgctggaaacattgattatgtgctcctcacgtagtagaaagcggtatcctgattagtctaacagttgtgttagactttagggccagtattgtcagcatttatttatttatgtacctttgttatgatgggatatttttcatttgaaacttgttcataaaaatgtcaatgacattgatgactgatttgtacatatttttcatatagttttgtttaaaaaataattcacgcaaaatcttgaagtcatttttgctattgaaataaaccttaattaaaat

SEQ ID NO: 363589 - DNA, 556 bp, Homo Sapiens
gggggacttgacttgctaccaacaactgctgtgcaattctgctgagcaggaatatcatgagctgttcaataatgacggacgcattggttgagatgaagtttccagtaaggaagtgacagtgcaatgtggatatttatggctgtaaaataggaagagctttagttcccaggctgaacctgccactgctggagccatttcaacaaggcatcctcacaacaaagaagagatgtgatttggtaccatttcacaccagcaggtgtctggacgaaaacatcaatgtgaataagggccaagtgcagtcctgtcttgattaaattacttaataatattattaaataataataggtctgggcagtattgtttttaacctgactcatccagctgtccttcaaatagctccgtctccctctacccagaactgatttttaaaaagaagtaatttttctccctgggctgggaaaaccctaatgaactgaaacacacttttactttaaaatttttctgtctggcgtttttgtaatcatactattaaatgactctggagtcatgttaatga

SEQ ID NO: 363590 - DNA, 585 bp, Homo Sapiens
cagtataatatgtgtccagaccctgttagccttagtaaacctagtgttttacaaaataaacaagacacggaagctttcactttagaacattttttaagtaagccagaagaagagttgttcttgaatatggaaaacaatgaagaaacaagacctgttcttggttggattcctagagctggagtgaccaaacctcagaccaacctgctggagcttaagaactctttttcaaaaactggtgcacaaaagcgtttccataaatcaattctagaagaccataaagacctcagggataatgagcattcggggatgaagcaccaattctatggccataattcctattatttctataattgagatactcattcttcccttcaaaacccagcctcttgcaagaagctaaaaaatataacagaatttccttcgtattgctggattctgttttctagattaaaccacaaggaccttgttagtgaggtttacattttcaggaatttaagttagtatctggttggaggaacccagaaaaggtgatgttatgacttcttgaaaagtttaacaatttggcaataaaatattagaacctag

SEQ ID NO: 363591 - DNA, 359 bp, Homo Sapiens
ctgtaaaatacataataagtactacttaactgtgacatgaagaattggaatcccagagggcaacatttgatttgacctaagatcaggcataagatagaatttttgtcatttttcccttgcagttttattgacttagtttatgagcttggataaaataattttttgatgaatcatgtcaataaaaggaaaaataatgtaactacctcataagtctgataaaaggaagttgctagtgttttatagaatttctgaaggtggttaaatcaagtatgatttcaaaatatcaactagttccacttttgtgattgcaggatgcttcttatactaaagttctcataaataataaatcagcttatgcc

SEQ ID NO: 363592 - DNA, 534 bp, Homo Sapiens
ttccttcatcttcaaggatcagcaagggtattacacaatggcctcgttatggagatggagcatccaactgtgggaagatttccgtcccaggcccagctgtgagatacagtaagttcaagatgtcagaggccaggccgccccccctgctcgggcagcacacaacgcacatcctgaaggaggtcctgagatacgatgacagggccatcggggagctgctcagcgctggagtggtggaccaacatgaaactcactgacaaaggaaaagggctcttcctcataacctcgatccgaatacactggccaaaggcaacactttgcttggacccttctccccagttctgataccactaagaagaagatttagagtaactccagatttcttacatggcatctccagaatggctctggtattaatgaatctagtgccttttaaatgtatcccacgttttgttccctaccatcttttttttcagatgatgatttcattatggatttgtgggatttttaaaaataaagatttaatttttttcctgg

SEQ ID NO: 363593 - DNA, 535 bp, Homo Sapiens
tgagtgggtggtcagaaaatacccatgctgatgaaatgacctatgcccaaagaacaaatacttaacgtgggagtggaaccacatgagcctgctcagctctgcataagtaattcaagaaatgggaggcttcaccttaaaaacagtgtgcaaatggcagctagaggttttgataggaagtatgtttgtttcttagtgtttacaaatattaagtactcttgatacaaaatatacttttaaacttcataacctttttataaaagttgttgcagcaaaataatagcctcggttctatgcatatatggattagctataaaaaatgtcaataagattgtacaaggaaaattagagaaagtcacatttagggtttattttttacacttggccagtaaaatagggtaaatcctattagaattttttaaagaactttttttaagtttcctaaatctgtgtgtgtattgtgaagtggtataagaaatgactttgaaccactttgcaattgtagattcccaacaataaaattgaagataagctcttt

SEQ ID NO: 363594 - DNA, 486 bp, Homo Sapiens
cacaagctgggcggcggaggccacccagccgggccttcttctctctgggaccctccgccagcgcatagccgcaggccggtgtgacttctgcaccctcggttctgagggtacggtgacccctagtgggcagtttgcaaaatgtgattccttcttcccaactccccatccccccttcccttcccgtcacgtcctgtttgggggttaattcggttttttctctgttgcatcgcgcctactgtgcgtgtgcgatagcgtgtgtgggggtgagagtttgctttctggaatggtaggtgctgggaggaggagtttgatggagggcttcctggctgcttctggccctcacctcgtggaggccttcacagagaccctgtgggccctggccctgtgctggcactgtgccagtcatgaggcagctctgatcacttccccactgtggaaacaggactgacccagccttcagtgtgggctgctgaagctatcctcctc

SEQ ID NO: 363595 - DNA, 944 bp, Homo Sapiens
  misc_feature (467)..(476): n is a, c, g, or t
aaaaaagcaagaacatcaagtttaatcgcaaatttcctctttttattcatttcagacattaacaaactaaatgcagataaatgtattctacttcacaggacagtaagtgtcctagataaaaacaagcactggctccaagcagtcgcccattctagtcccgcaacggtaatctatttttcttcaaatgtcagttcttcacagtttcaatactgcagcagcaagttcttccttagatcaagaaagccgtggtccgtatttcagaaaatcttaagtagagataagtgagcaagcttctggtgccacgtgcagtttgggtgggacaattttacctgaagtcctgcagactggccatggggatgacgggggccccgtcccttgcggtgttcttcatatcgattcagggaagcgaactgtgcagtgctcgcattctatttattggtccccgtcaccccgtggggtgtcacagnnnnnnnnnngtcaatgcttcacagaggagttgttcagagcaggtcaggcaggacgaggccaggaggctttggttcgacacagttgatccagaagttggcacagctggcgtgatactggtgccctccataggccagcttgaaactgtctgtttctgagttgaatgcttttttaggatgttcttctgcaggcttctcttctttccggctcctcgagtccacattcaagaggcacactccacaggcaagctcctgagcatttttaatcccaggccgtaacatacaggaggaaaaatccagcgagttttcatctggtgtgagtgtggcgagtgacatgaagccgattaggttattccacactttatcgatgtccttcagcaactgctggagtttctcactgcacactgcagtggcttttatccccagctccacacgcttggttaccctgtacacttcaacaacacctaataaatattccat

SEQ ID NO: 363596 - DNA, 1034 bp, Homo Sapiens
ttttttttcctgctctttatttgattttattctttgaaaaaaacagatatgagaattgccgatgcacaggccaacctgtgctaccatatgtgggctttgaaaagattctggattttctgtctgtatgataatatgtgctgctgtatagagcaaggaaaacagaggtggttttccaagctccacagcccatctttatcactgccaggtaaagctctgtcccttaaaagttagatacaaccaaccaagtgacatttattgagactctactatgtgccagacctgggcaaggtaccttctcataacggtcgagctggatgactggctgggataaaggatacagccaaaacgtagggggtccaacaggaggtcgtggggaccacatgctcatccacaggacctgatctaagcttgttcatagaccttactgatgtattttccttatagaacaataagaggattgtgcttatcatttcttttccattgttgtcagtttcagtaataacatatagtcctaataaccatatatttcatttatccacaccatccagactccttactcctccccatttggactggggagaactcagtaaatgtcattggtcacaaatccactctccacgactcaccataagtcacaaaacccacgtttctgatggagttcacaggccaatgtagtcaaaaggtcacaagaacatgtcgatcgggcagtggctgcatcccgaacacactcggacatgaaatatacttcagtgatctggccagggtctcagctaagatcagcaacgcagacgaaaacaataaagacataagtaagaccaactaggaccagggcagtagaacctaggtggaggcagagaggcccagataggagttgaaggagatccaaagcagcaagaggacacaggcctgctccagaataaacacagaagcagaaagaatccgaaagctcgacataggaaatgggggagacgcaaaaggaggaagcagaaagggaacagatgggacaaaagaagaaagccaagaatcaacgcaga

SEQ ID NO: 363597 - DNA, 1353 bp, Homo Sapiens
actggtccacccgtcacagataatgtaatacatactgaaatagacaacatgaaattcaagaaatcaaggacttgagaaatgccactaatgaaaaaacaacatagatgtgaaaattgcaacacattaacttcaaaagaatagaagaatcagttcaaataaatcaagaaaatgggcaaaaacagtgaacagatactttacataaggatttccaataccctatcagtgctatcttgcgggaaatgagcaggaagccacaggaagctgcagcgtcagccgatcagcaagggttaaagacgtctcgcaatcctgaaagtaagcaagtacgctgaccacgctgtctctagaaagcgctgattggagagtgagccactcaagacctctaaaaaccactcaagccccgggcagcatccacccacgataaacctttccgcgcccctagcagcaatgcacgcctagccctgagcaccaataaggatgctcaggcaggacccggatggcgaggcggggaccttggtagcggcgccactggctgcggctgcagagtgagaacaagcaaacgccccccaccggcagggtggaaggaaaatggagtgcgttggcgctgcggaggagtcactgcggtgaggatggcccggacaccaatttgggcacccgcaggcgcagctagccggtggggcgcacctgggtctcctccggcttccgcgggatatctgcagggcgactccctccagattcagtaaacgtcctgctgggggagtccttcccctgcaaaaggcccgcccctgcctcccatgtcgtgtatgttcgacggcagggtccctgaaaggtgtcttggggtgggcatggagtcctgtgatgatcaccgaatgaggtcagggtctggcctgggtcccaggcccaggggtcccgaggccctggggcagctgggtagctctgctggccgccctgtgcggggactctctacctatgcaggtctggtcggacctggaggcagcggtgttctgctgctgcgaagaattcccaatcggccggttggggcaggggctgcacaatcctggacctcgcgggagtacaggacccgcaaaggcagcggagtcggatcatgtgccaagagcatcccggggtcccggctgctggcttggcgtgccctggtcattcgctgcggttatgtgccgttgctaccgcagagcaagcaggcccggttcttgaaccagagctgcacttgatggtctgcaaggttgggtctgacagccagggcccccgtccttgtgggctgtacctgcctctttccagcctgtctccagtccggcgggtttcctttactgtagactgcacttcctgccgccgctcttg

SEQ ID NO: 363598 - DNA, 1158 bp, Homo Sapiens
  misc_feature (58)..(88): n is a, c, g, or t
  misc_feature (974)..(974): n is a, c, g, or t
gggcgtcaggtgattctcactcctgtggatggcttcatccctgccttccttcctttcnnnnnnnnnnnnnnnnnnnnnnnnnnnnnnnacaaagagccttcatgtttttatatatttcatagaaatttttatagcagttgcaggtaaactgtcaggattggttttaaaatatttttgtaactttaaaatattctataattatgcatgtgattttaacatttaatattcaaaaataaatctcttgctggatttgagagtattgcatttttaaagtctctcttctgtaactggatgttttggcaactttgtggggagagactgctggatttcttaaagcaacgtattcctgacactggccacagaatgcctttggaaatcggatgtactgttctcttgttcacgtttagtggtgttttgctgttttgttttttaaacaaatgatgctgagaataaggagagaaatgaatgtagagagaggtagagagagaaatatgaactctaacaaaggactgaggagtgcagtctgctggttcaggctcttcaaaagatgtagaaaaagagatagaaggaaccacctatgcttaaaatactgtaaatatgcagtgaggtttggcaaaatctattccatgtgtgatttgcttgtagaaacaattttgaaaagccccttgaggaaaataaaaatccaagaagaacacttttctcccttttccatacaaattaaaacttaacagcatcaaattattgggaccagaaaccaagtaatgtataatgtggcttttgttgagttaaataagatgctatataatggagaagaatttgaaaatgcacaaaaaaatcaatctacattatcagaacctgcagtgaaattaaacttatgttaaataaaaccagtttgcaggtgcacaaactatgagggtcttgtatccacgtaacacaggtagttacaaaaacatgttattgtactgtgtaaacantgcatagtcatctcatttggttggctttgtaccttgtaccttttttagccttggcttttgttgaactagaaccctcagcacatactgtgttgtacttttgtaaatgatttttaaatggaattttgcacataatacattgtaatactgtatgataatcatgtgtgaaaataatttttgaaatatc

SEQ ID NO: 363599 - DNA, 722 bp, Homo Sapiens
gtgacgtatatcaaccttggactgtccaagcaagtgaagacgttccccgcgttacaggccgttggctcactcaatgacctccagttctttagatacaacagtaaagacaggaagtctcagcccatgggactctggagacagcaaaaatatcctggacccgcaagatcctcccttctgtggtggtcaccagccaccaggccccaggagaaaagaagaaactgaagtgcctggctcacgacttctaccaagggaaaattgatgtgcactggactcgggccggcgaggtgcaggagcctgagttacggggagatgttcttcacaatgcaaatggcacttaccagtcctgggtggtggtggcagtgcccccgcaggacacagccccctactcctgcaacgtgaagcacagcagcctggcccagcccctcgtggtgccctgggaggccagctaggaagcaagggttggaggcaatgggggatctaagaacccagtagctgcccttcctgcctgatgtgggagctgaaccacagaaatcacagtcaatggatccacaaggcctgaggagcagtgtggggggacagacaggaggtggatttggagaccgaagactgggatgcctgtcttgagtagacttggacccaaaaaatcatctcaccttgagcccacccccaccccattgtctaatctgtagaagctaataaataatcatccctccttgcctagc

SEQ ID NO: 363600 - DNA, 1194 bp, Homo Sapiens
ggctggaccggtccggaattcccgggatcaatggtaagaatggtgcctgtcctgctgtctctgctgctgcttctgggtcctgctgtcccccaggagaaccaagatggtcgttactctctgacctatatctacactgggctgtccaagcatgttgaagacgtccccgcgtttcaggcccttggctcactcaatgacctccagttctttagatacaacagtaaagacaggaagtctcagcccatgggactctggagacaggtggaaggaatggaggattggaagcaggacagccaacttcagaaggccagggaggacatctttatggagaccctgaaagacattgtggagtattacaacgacagtaacgggtctcacgtattgcagggaaggtttggttgtgagatcgagaataacagaagcagcgggaacattctggaaaaattactatgatggaaaggactacattgaattcaacaaaaaaatcccagcctggggtccccttcgacccagcagccccagataaccaagcagaagtgggaggcagaaccagtctacgtgcagcgggccaaggcttacctgggaggaggagtgccctgcgactctgcggaaatacctgaaatacagaaaaaatatcctggaccggcaagatcctcccctctgtggtggtcaccagccaccaggccccaggagaaaagaagaaactgaagtgcctggcctacgacttctacccagggaaaattgatgtgcactggactcgggccggcgaggtgcaggagcctgagttacggggagatgttcttcacaatggaaatggcacttaccagtcctgggtggtggtggcagtgcccccgcaggacacagccccctactcctgccacgtgcagcacagcagcttggcccagccccttgtggtgccctgggaggccagctaggaagcaagggttggaggcaatgtgggatttcagacccagtagctgcccttcctgcctgatgtgggagctgaaccacagaaatcacagtcaatggatccacaaggcctgaggagcagtgtggggggacagacaggaggtggatttggagaccgaagactgggatgcctgttttgagtagacttggacccaaaaaatcatttcaccttgagcccacccccaccccattgtttaatttgtagaaggtaataaataatcatccatc

SEQ ID NO: 363601 - DNA, 1618 bp, Homo Sapiens
  misc_feature (1533)..(1542): n is a, c, g, or t
aggaggcacgccagaccatgcactccctcctggacgacgcctttgccctcgtggcccccagcagccagcctgccagcaccgcaggtgtaggccccggagtcccacccggcctgcccgcaaacagcaccccttcccaggaagagaggcgagccacccagtgggggtccttctacagcccagcccagacggccaacaatccctgcagtagatacgaagactatggaatgactcccccgacgggtccattgccaagaccaggttttggccccggtttgctgcagtctacagagctggtgccccctgaccctcagcagccacaggcctccgccgaagccccatttgctgccagagggatctactcggaggagatgccgtcggtggcccggcctcggcctgtcgggggtaccacaggctcccagatccagcacctgacacaggtggggattgccagcagaattggagctcagccagtggaaatcccgccaagcagaggcagccagtatggggggccaggctggccttcgtacggggaggacgaagcggggcgaagagaggccacacacatgctcggacatcaagagtattcttcttcaccgctatttcaggtgccaaggacttcaggcagggagccctcagctccttccgggaacctcccccaccgggggactgcaaggccctgggctgggttaccccaccagctcccacggaagacctccagcctggccactcctcggcctctctcatcaaagcaatccgcgaggagctcctccgggctctcccagaaacagagcaccgtgcagaacttccacagctgatcggcctccgcctcgcagatttgccaagtatccgctttcctgtgggaagcaagaccaaaaggaaatcaactgagtgggtgtttggaagaggaaggagcaactctcgggcagcctgcccaagggagggagcaagttgcaatttagaagatgccatacgtcgtgtgacagctcatgagcctttcactgggctggcaattgtctgaacacttgggttcagttgaaatatatgtattttggccaaaagccagcagcacttcacaaaaacaaaacacaaacctaagctaacaaaatgactgcattcgtctcttttttaaaggtagagattaaactgtatagacagcatagggatgaaaggaaccaagcgtttctgtgggattgagactggtacgtgtacgatgaacctgctgctttgttttctgagaagaggtttgaagacattttattaacagcttaatttttctcttttactccataggaacttattttaatagtaacattaacaacaagaatactaagactgtttgggaattttaaaaagctactagtgagaaaccaaatgataggttgtagagcctgatgactccaaacaaagccatcacccgcattcttcctccttcttctggtgctacagctccaagggcccttcaccttcatgtctgaaatggaactttggctttttcagtggaagaatatgttgaaggtttcattttgttctagnnnnnnnnnntccctcccaaagtggggcaaaaagctttatatttatttgattatccaaaatacagatcaaagtttagatctaaaaa

SEQ ID NO: 363602 - DNA, 525 bp, Homo Sapiens
  misc_feature (28)..(28): n is a, c, g, or t
  misc_feature (383)..(383): n is a, c, g, or t
  misc_feature (405)..(405): n is a, c, g, or t
  misc_feature (410)..(410): n is a, c, g, or t
  misc_feature (455)..(455): n is a, c, g, or t
  misc_feature (492)..(492): n is a, c, g, or t
  misc_feature (504)..(504): n is a, c, g, or t
cagtcctacagagactggtgccccctgnaccctcagcagaccacaggccttccgccgaagaccccatttgctgccagagggatctactcggaggagatgccgtcggtggccccgcctcggcctgttcgggggtaccacagggctcccagatccagcacctgtacacaggtggggattgccagcagaattggagctcagccagtggaaatcccgccaagcagaggcagccagtatggggggccaggctggccttcgtacggggaggacgaagcggggcgaagagaggccgtgccaaggacttcaggcagggagccctcagctccttccgggaacctcccccaccgggaactgcagggccctgggctgggttaccccaccagctncacggaagaccttcagcctggncactnctcggcctctctcatcaaagcaattcgcgagagcttcttcggctnttccagaaacagagaacgtgcagaactttcacagctnattggcttgctngcagatttgcaagtattcgtt

SEQ ID NO: 363603 - DNA, 518 bp, Homo Sapiens
ggcaggcctccctctgggcatccctggatgcagcctctggacacatgcctcctttaaagtgtccgggtgcagctcaggttgagtggaggtagaaggagaaacagacatgtttaccacgcgttttccaaagctcctgatctttcccaagattgtaactgaaaactgctgtctcttgttttgttcgttttgggggtggtggtgctggctgggccatgcttgtgaagtgatgtgtgtctctgatttaacggattcactgttttctctgctaattgagagagcgttatttacattatttatttgttttgacacaagtgctttcagtgttttatcctagctaatggcttcttaaaggtaataaaacccttccaacgtaattggtcagataaaactttttttcttgtatgcttaaataaagcaattagtgaagcacttctatccaaaatgacttttttgtccttttttaaaaccaatttactgttactggaaactttttgtacaataaagcaatcacgcagatt

SEQ ID NO: 363604 - DNA, 642 bp, Homo Sapiens
gcaaggaatcattgaaaaccacctgtgtctcctttgggagaatgacatatctttagtatttacgtagcttattcttctatatctacatatgcaaagctttccttaacagtaaagggtacatatgcatagtgggaggagatcagacctttacaagtgaaggaaagcaacttcagaaatgaattattttctttgctttattatttttaccaagacagagaagtattgtattgagagataatctattttcataatcaatatgtgcctaaattatatttaaatcatttcactctgtactatattttcaggaattacagaatgtggtattcattcacttaaaggtacctctgtagaaataacctaaaactgcagaaggatctgaaagatctataacatggtgtgcttagaaactgcagattttagatctaatgtatactgcattaataaatgatataaagtgtttgttgaaaaggagtttcttctcttccttttgaaaatcatcactttctgtattttgcttacatttcttcaatatgtgttgacaaccagccctgtggttctgggtagcaaaggaaatacagtataacttaatttgttatggattagtctttttgaaagtaccattaaagtaaatttatttcttta

SEQ ID NO: 363605 - DNA, 551 bp, Homo Sapiens
tatttgtacttcgaattgtcggattttccatgtcctcctttctcctttgtgcccagcctgagtcagcaccatcccgcattcagaacctcccagtgaaagggcagccttcattttgagaaggtggaaggtgttagggtttgggagacagctcatccaatctcccaagtctcatggtggatttgtgactgtgagagtttccggtttaaaatctgaaaagccagatatgcctgtttccttttcccagcaccatgcctgtggaggggacagtcagacccagaggtcctttacgtgtggatggagttcacaggcgaatagaggagaggaccaggggacgtggcttgtcccttttgtccaacaaagcattatatttttaagaatggcagtcctgtttgctgaagtgttcataagataacaataggcttgaatctccaattcaaatgaatgtcaaagcacatatctttaatatgctgaatgaatatttatttttgtatccattaaaacagtatattgatctcttttattctttattaaaataaaatgctcttttttaa

SEQ ID NO: 363606 - DNA, 817 bp, Homo Sapiens
  misc_feature (50)..(59): n is a, c, g, or t
aaaaaagaatctgtgtcatcatattcacagtctaaactttgctaaagacnnnnnnnnnntacttacttggtttatccaagctacagacatgttataaagtactcaagaaattaacagcttataaaaatagtggaaaatttttcaatgggagcataaaactaaaatgaactcattatctggcaaagagttcttccaaaatgtcaagtccacaggaaggaatgtgtggccaacctcacgcatcagcccactcataggccaactgcctctgccctttgctcacgttggcttcagaggtgcagggatgttggcagatgcctgctccaggtaggccaaggagccctgagggatgtcggcgggctttttgtgctgcacgttgatgtcctccagcacctgctgccaatgcctcagctttgtcaagtgcttctggactagtgcatctttccgctgtaattcattccttagttctgacacatcctctttgataacttgctctggtttctggacagataactgcaatcttttttgtaagaaaaaacattctgtctgtcttgcaatatccagaaacttctggatacactgatcaacaccggttcgaatttcttccttgatcggtgccattgacatagtcctgactcaccagagatgcaaagcaagcctcgaaagatgactccaactcgtccaccaaagtactgctggaaggtctaggagcgcctggagctgcctgaagaagcgaagcttggcccggaaggcccggcggggcctgagggggaccgggtggctgcccagaaaacataccccctagtggaccccccatgtt

SEQ ID NO: 363607 - DNA, 619 bp, Homo Sapiens
aatgaggccctgcacagcttgacacaggcaggtgactactccatgagcgtggaccggcggctgagcacgaggctgtgatcgcccagtacgactctctccacgtagactcgactgcggagtactaccgcctccacttggagggataccacggcaccgcaggggactccatgagctaccacagcggcagtgtcttctctgcccgtgatcgggaccccaacagcttgctcatctcctgcgctgtctccgaccgaggggcctggtggtacaggaactgccactacgccaacctcaacgggctctacgggagcacagtggaccatcagggagtgagctggtaccactggaagggcttcgagttctcggtgcccttcacggaaatgaagctgagaccaagaaactttcgctccccagcggggggaggctgagctgctgcccacctctctcgcaccccagtatgactgccgagcactgaggggtcgccccgagagaagagccagggtccttcaccacccagccgctggaggaagccttctctgccagcgatctcgcagcactgtgtttacaggggggaggggaggggttcgtacaggagcaataaaggagaaactgaggtacccgg

SEQ ID NO: 363608 - DNA, 741 bp, Homo Sapiens
ccatcctaaggacagtggaggggtgcatagtggcccatggacagcagagtgtcatagtcgacggcccagtggaacagtcggccccagactctggccaggctaacttgacaagctaagggctggcagagtccagtttcagaaaatacgcctggagccagagcagtcgactcgagtgccgaccctgcgtcctcactcccacctgttactgctgggagtcaagtcagctaggaaggaagcaggacattttctcaaacagcaagtggggcccatggaactgaatctttactccttggtgcaccgcttctgtcgtgcgttgccttgctccgtttttcccaaaaagcactggcttcatcaaggccaccgacgatctcctgagtgcactgggaaatctgggtataggtcaggcttggcagccttgatcccaggagagtactaatggtaacaagtcaaataaaaggacatcaagtggatacctgacttctcaggatccttattctagctacaagtcaaagataactcctggtccagacaaaacacctggcctatcacaagctgactaaaaatctgcactttgggccagcgcaggcaacagtaactctgacaggttcaaattagacctcacactttctactcatattctagtcactggacccatctgaatcagtaatccctactgcccggtcctggagtaacttcttagagatattataacaagtggcaaaaataaaagagggatttgct

SEQ ID NO: 363609 - DNA, 828 bp, Homo Sapiens
ggtgctgtcaagcactctgtgtcacccaccagattagtataactattaattcagactgtactcctatgtttaagataatttttacaagagctggctgaagcagcacattagtaacctgacaagatttctttttcccttttcagggggaaagggtcaccttaaaaataaattattttcagggactttgggaatctaatgataaatattacacataatctatgaatagcttaatcctttatatattccttaaaataggaattcctcgacatcactcctggccacactttccttgcctgtgttgttgctatgtgtatttgaaagtaatatctgcattccttttaagatgttctgtaagtcatatttgtcagttatacagagtagtcttccttttccccacgttcagtgtaatctcactgaacagtaataatagcaatagctaacaacatctgcacagcaccttacagtttgcaaagaacgttcacacattctcatttgagttttgcatagtgaacctgttacgagatgtctcttgacgtcgatgctaaaagtgttagaatctttacatcactagagtcattgaatatgctgtagtattgaatagtgccctgactagggggaggatttggatgtgctgcatttcaagccgtgtataatcatcaaaatggggggcttgagttctttagctacttgaatccgatttacttctgttaagtgatgcttttctaaccgttttctggatggattttgtattcactatattgtagcttgtaatttgtataaatgtaccatctgatgtcattaaaaaaagtgtttgtagtgctaaaaaaa

SEQ ID NO: 363610 - DNA, 674 bp, Homo Sapiens
acattaaggtctcccgttagcatgacaagtagtgcctgtaataatgatacccgatcttattcacacatcccagtaacatcttacaggggtatgaatgaaggacccaataactccgttggcttctctgccagttctccagtcctcaggcagatgagctcaaagaattcaccaagcagattaaataaacaaccagcaaaagctgagtccaaagataacaaagagattgcctcaattttaaatgaaatgattcaatctgacaacagctctagtgatggcaaacctctggattcagggcttctgcataacaatgacagactttcagatggagacagtaaatactctcaaaccagtcacaaactagtgcagcttttgacaacaactgccgaacagcagttacggcatgctgatatagacacaagctgcaaagatgtcctgtcttgcacaggcacttccaactctgcctctgctaactcttcaggaggttcttgtccctcttctcatagctcattgacagaacggcataaaattctacaccggctcttacaggagggtagcccctcagatatcaccactttgtctgtcgagcctgataaaaaggacagtgcatctacttctgtgtcagtgactggacaggcacaaggaaactccagtataaaactagaactggatggttc

SEQ ID NO: 363611 - DNA, 375 bp, Homo Sapiens
  misc_feature (130)..(130): n is a, c, g, or t
  misc_feature (273)..(273): n is a, c, g, or t
tctgtgtgcacataagtgaaaagtggtcaaacaagagtgatgacagctgtctaaaggtttttttattcatttcacataaaaactgttatggaaagaccaaaatgtttatgaactattcttatgtaaattnacaattgtccttcactgcactttttttgtttacagtatagtaccttattttctgctgtgttaagtgggtgtcaaactccaaaaagacacacactttctataacttctattgaagatattggaatttccaatttttcatgtgtnactatgtcagaaaatgctttcgattttatttttaaatctaacatcggatggcttttccggagtgttgtaaaaacttcaatcatacataaaacatgttcttac

SEQ ID NO: 363612 - DNA, 545 bp, Homo Sapiens
cagtatggtgccaggacaggtgtcccttcagtcctctggttatgacctcaagtcctacttgggccctgcagcccagcctgtgttgtaacctctgcgtcctcaagaccacacctggaagattcttcttccctttgaaggagaatcatcattgttgctttatcacttctaagacattttgtacggcacggacaagttaaacagaatgtgcttccctccctggggtctcacacgctcccacgagaatgccacaggggccgtgcactgggcaggcttctctgtagaaccccaggggcttcggcccagaccacagcgtcttgccctgagcctagagcagggagtcccgaacttctgcattcacagaccacctccacaattgttataaccaaaggcctcctgttctgttatttcacttaaatcaacatgctattttgttttcactcacttctgactttagcctcgtgctgagccgtgtatccatgcagtcatgttcacgtgctagttatgtttttcttcttacacatgaaaataaatgcataagtgttaaa

SEQ ID NO: 363613 - DNA, 579 bp, Homo Sapiens
  misc_feature (29)..(29): n is a, c, g, or t
ttgttggctgagcgcacgtgtgtgtagcngcgcatgtggtgtagggtattatccggacataggtttctaacttttagatagaagaggagcaacatctatgccaaatactgtgcattctacaatggtgctaatctcagacctaaatgatactccatttaatttaaaaaagagttttaaataattatctatgtgcctgtatttcccttttgagtgctgcacaacatgttaacatattagtgtaaaagcagatgaaacaaccacgtgttctaaagtctagggattgtgctataatccctatttagttcaaaattaaccagaattcttccatgtgaaatggaccaaactcatattattgttatgtaaatacagagttttaatgcagtatgacatcccacaggggaaaagaatgtctgtagtgggtgactgttatcaaatattttatagaatacaatgaacggtgaacagactggtaacttgtttgagttcccatgacagatttgagacttgtcaatagcaaatcatttttgtatttaaatttttgtactgatttgaaaaacatcattaaatatctttaaaagt

SEQ ID NO: 363614 - DNA, 544 bp, Homo Sapiens
tctgaggccattaggggaaaaggaaggggtgtggtttgtctttgaaattacggttaatacttttagacagtaagtccggctggttgcagggctatttgccccgacagcatcagcctgtaacatttcttctctttcctttgtgccactgagtcgttccctggccagaggacataaatggtgctggtaggaggttatcagagtaaggaaggtagcagatataggtgcagggtgcctgtcattcactgtgttatttggtttaaatcaaagtgattctgggggaagctatgctctttcagtggataataaaattggtaactctattgtaaaacatgtcaatggtgtgtgaagaaaaatcaaccaatctgtaggtgttgataactagacagtactgtgtatgttacgtgcctgtgtggatgtgcacttccagcatggtatgtgtagcgatgtggatcatgccagagtttcatagatcctgttttggggtttgcacatggatcgtatgttaagctttttcttttcaataaatgaattttatttttaaaaa

SEQ ID NO: 363615 - DNA, 476 bp, Homo Sapiens
aacagggccaatccctactgcagctgccgaggacggccgtcaagtctgtctccacgctcatggtctctgccctgcagagcggctggcagatgtgcagctggaagtcatcagtgagttctgcctcagtcagctcccaagtgaggacgcagtcacctttgaagactccggaggctgagttgctgtgggaggtgtacctggtgctgtgggccgttcggaaacacctgcgccggctgtaccgcaggcaggagaggcacagacggcaccacgtccgatgccatgctgccccccgacccaacccggctcagtccctgaaactggatgcccaaagtcccctctagggggaaccccagacccttagagagtcctgacctcactcttacctggggtcccatatcagccccttcattccatgtattccagttgtaaaacaagtatcaaaatattgggaaataaatatcagatagttctgaaaaaaa

SEQ ID NO: 363616 - DNA, 168 bp, Homo Sapiens
gccgtgttaggaaattatttattaatttacaagacaggttttaactcagccgaggtgggaaatggtgtccctgtccctcccaaagcacagagcacagaaatgaggccgtttacatggcgagtctccgtgctggtgtttaagtcattaaaaagatactcaaagagaaaa

SEQ ID NO: 363617 - DNA, 513 bp, Homo Sapiens
  misc_feature (84)..(104): n is a, c, g, or t
  misc_feature (126)..(171): n is a, c, g, or t
ggggagccgaggagtttgtgtggaagtttgcatctgagagtgcgagagctggacggagtgttacagagccgcgatgccttctcnnnnnnnnnnnnnnnnnnnnngatacagtgtctcgctcttccnnnnnnnnnnnnnnnnnnnnnnnnnnnnnnnnnnnnnnnnnnnnnnaaaatcctggacccaaaagatcctcccacctcagcctgcctcccaggtagctgggactacagggcgcacaacacccatcgcttcttggattaaaagaaaaggatgaaacgggccccagaaagaggcggtgacgtcccagaacccatggcaggggagttgggaaaataaatatttgtattgttttaatctcccttgtggctttttttaacccccgaaacagcaaggtatttttaaaagggatgaagagagttgcttcaaatgttttgagacgttgttatttttaatatgtgagtgaatatcttagaaacaaaatgaacaagaaataaaaattttagaaaatat

SEQ ID NO: 363618 - DNA, 508 bp, Homo Sapiens
gactttccctgctccaccgtcaatcccccaactctgcccgcctctgtccccgcctcaatccccgcctccatccccgcctctatcccctggccttggcggctatttttgccacctgccagatgtgcccaggagtcccctattactgtgggctggggttgggggcacagaagccccaagcatgagaggctggagcccatggctagtggctcatccccagtgcattctccccatgacacagagaaggggccttggtatttatatttaagaaatgaagataatattaataatgatggaaggaagactgggttgcagggactgtggtctctcctggggcccgggagatcgcctggtctttcagccatgctgatgaccacaccccgtccaggccagacaccaccccccaccccactgtatgaggtggcaccagatctctgtaattttatgtagagtttgagctgaagccccgtatatttaatttaatttgttaaacatgaaagtgcatcctttc

SEQ ID NO: 363619 - DNA, 323 bp, Homo Sapiens
caccctcctgtaagcagaagtctcagggtccagacccttccctgagcccccacccccaccccaattcctgcctaccaagcaagcagccccagcctagggtcagacagggtgagcctcatacagactgtgccttgatggccccagccttgggagaagaatttactgttaacctggaagactactgaatcattttacccttgcccagtggaataggacctaaacatcccccttccggggaaagtgggtcatctgaattgggggtagcaattgatactgttttgtaaactacatttcctacaaaatatgaatttatactttgacca

SEQ ID NO: 363620 - DNA, 539 bp, Homo Sapiens
cagcatggctggagaggcaggcataggcagggaaccgagcagcaggtcagagcaggcgagctgacattctgcagcctggacggccatggcaggaagcttttagttggagagatacaggaagcctcctagggttctgagcagaagaggggcatgagctgattcacattctgaaggacctctctagctggccagtgctgaggaggttggagagagaaagggtgaaagcagagagaccagtgcagggctgttaacagggttgcaggcgagagactggggtgctgggctcccctagactaggactccagtgccctcctctcccaagagacaaaggccattgcattgaaggaggtgggaaatgattagattctgaacatatgtaattatttttcagtctttttcaaagatacaaatatttacatagttttaatcatgtaatatatacaatttaatgtcctagtgttttacttaatagtgtatcatgttttccctgttggtatgtagcctggataaatgctcttaattataaaaaattctgtcga

SEQ ID NO: 363621 - DNA, 550 bp, Homo Sapiens
  misc_feature (538)..(538): n is a, c, g, or t
catacaaattttcagtatcatttaattctttaatactttggggacatttccttttcctttaacaaaaagaatagaagtgatactatatactgctagtagaaaattaagagcttttctataaaatcctatgaaattaaaattaaatcgtcttatttttaaaaatgcaaaagaagccagacagtagacttaacaaccatgaagcaaacccacttccctctgaacaaggatttcctatgctttttagatatcccttcagaaaaggccttctctaaattaactgaacaattcggaataccaagaagtaggtagagagcaggaatgtgagcagatcatcgaatatatgtttttactccatggtgactaaaatgaagtccatagataggagcaggtgaagaagaaaacaacacaatctcctgaggacagttgtcactgacccagagcagtctgctgctgtgactctctctgcctgtgacctgagggtcagttgcttcattagatgcaatggaaataaaactgaacgggatctgaagaaaaattntaaaatggaagg

SEQ ID NO: 363622 - DNA, 1945 bp, Homo Sapiens
  misc_feature (27)..(27): n is a, c, g, or t
  misc_feature (198)..(198): n is a, c, g, or t
  misc_feature (480)..(754): n is a, c, g, or t
  misc_feature (893)..(935): n is a, c, g, or t
  misc_feature (943)..(956): n is a, c, g, or t
  misc_feature (1229)..(1238): n is a, c, g, or t
  misc_feature (1320)..(1328): n is a, c, g, or t
  misc_feature (1845)..(1845): n is a, c, g, or t
  misc_feature (1879)..(1879): n is a, c, g, or t
  misc_feature (1915)..(1915): n is a, c, g, or t
agcggcgatgagggctcttggtattangctagggggtatctcgcttcagtccataggtgaatacggtgtcaatatacggcgcaaggatgggggtgcaatcgaggaggcgggtgggcgggtggtgtaataaaggggggcgcggttgggaggctatactctgcgggtgcatgatgggcttaataaaggggtaaatgatgnatgcgcgcggggatttatgcggcgtggcggggcggcggcttaatcacgaaggcgacgataaggagtggagtttgggttcacggagtgggatataggacgcgcggcgcgggagacgctcagtggtatttcccgcgcggtataacaacgaggggacgcgcgataagaaggaaaggcgcgggcgagcgggcgtaagatcgggcgagaaaagagaaatagggggggaaaggtgatcgcgggtataagaggggcggggtgcatgagagactatatcagctgtagtannnnnnnnnnnnnnnnnnnnnnnnnnnnnnnnnnnnnnnnnnnnnnnnnnnnnnnnnnnnnnnnnnnnnnnnnnnnnnnnnnnnnnnnnnnnnnnnnnnnnnnnnnnnnnnnnnnnnnnnnnnnnnnnnnnnnnnnnnnnnnnnnnnnnnnnnnnnnnnnnnnnnnnnnnnnnnnnnnnnnnnnnnnnnnnnnnnnnnnnnnnnnnnnnnnnnnnnnnnnnnnnnnnnnnnnnnnnnnnnnnnnnnnnnnnnnnnnnnnnnnnnnnnnnnnnnnnaaagacggggagggcaaatgggttgggcggggggatatggttttatagcgctcttatatcgggggggattgcggcgggaagaggtgtccaggagtaaggggagagtgggggtttgtaaaagaagaaatttttttgtgtnnnnnnnnnnnnnnnnnnnnnnnnnnnnnnnnnnnnnnnnnnncgagaggnnnnnnnnnnnnnncggggtgttgtggtgtaactaaagcctttattctatacaactgtgaaatacagatttttacccttttggcattgcagactgtcgaattttctggaaactgtattacggtttgactggaggggaaagaaatacaatcatgctgggggtcagatctatgacaggaggggaatgcagccacccaaggcttagcacacagggcaaaatgacccagcaaaacccatttctttgctcaaaggcccctcgggcaaacacaactgagggctggtaaataannnnnnnnnnctttgccattaattcacaactattgctaaaaaatgtgcaccaaaagcacactgttgtatccaacagatagaaaggacttttnnnnnnnnngaagctggttgctctctgaggaagggagaaagaccatttcaacttattagaaatgtggccacgtctttgctcacttcttcaaagtgcaggtggcaatggcctgtccagtttccaaaagaagctgactagcagtgagggaaccctgtctctgcagttgtgcgatcagagtatcttaaatagtaaggtatggccttaggcctatcagctgcccccagccgaacctgtgaagatgtagaaaagaaaaaacgttccctgcctccctccctagtccctgctatggtggaggcaggccacacacaagctagggaggcaactggactggaatcaactgccctctgaaggcacttgtgcttctggcttcatacaggaggcttgtcttacagttttatgggggtggaccactgatttactctgaatacaaatgaccttggggagaatccaaagtattttctgccaaaagttggaagtggtttatccccaataagttaccactctatacaagaaccaaatggattcnaaggaaagtggttagaattggttagaaacagtgnaaaaggaagatctggatacagggtacaaccaaaaancctggcatataaaacctttgggaaaaacca

SEQ ID NO: 363623 - DNA, 926 bp, Homo Sapiens
ggggagcccggagctgcacgccaccggggagccaggtaccttccgcgagacgtcgaggggcgagtcctagtctcttttctccgcactggaagacttgaacacttccttctctgcagcaaagcacctgctctgagtggccatggggaagcgatacttctgtgactactgcgaccgctccttccaggacaacctccacaaccgcaagaagcacctgaacgggctgcagcacctcaaggccaagaaggtctggtacgacatgttccgagatgcagctgccatcttgctggatgagcagaacaagcggccctgcaggaagtttctactgacaggccagtgcgactttggctccaactgcagattttcccacatgtcagagcgagacctgcaggagctgagcatccaggtggaggaggagaggcgagccagggagtggctactagatgctcctgagctccccgagggccatctggaggactggctggagaagagagccaagcggctgagctcagccccaagtagcagggctgaacccatcagaaccactgtcttccagtaccccgtgggctggccaccagttcaggagctgcctccatccctgcgggcacccccacctggggggtggcctctgcagcccagagtccagtggggctgagccccttgcccccgactgacccccacgtggtcacttttctcatcagtcacaataggaagccaagcccggttcctgctacgccccatggaggctccgagaccatctgcccagcctcactgaggctcaggacacggccacaccaagtgcagccctcgtcctgggtctgcaccgggcagctctcccctcactctcctccacctgcccccctgcttcttaagaagatgggggagaaaacttccaaatgtttataaagaaagtctgtcaccacaaaaaa

SEQ ID NO: 363624 - DNA, 886 bp, Homo Sapiens
ggggagcccggagctgcagccaccggggagccaggtaccttccgcgagacgtcgaggggcgagtcctagtctcttttctccgcactggaagacttgaacacttccttctctgcagcaaagcacctgctctgagtggccatggggaagcgatacttctgtgactactgcgaccgctccttccaggacaacctccacaaccgcaagaagcacctgaacgggctgcagcacctcaaggccaagaaggtctggtacgacatgttccgagatgcagctgccatcttgctggatgagcagaacaagcggccctgcaggaagtttctactgacaggccagtgcgactttggctccaactgcagattttcccacatgtcagagcgagacctgcaggagctgagcatccaggtggaggaggagaggcgagccagggagtggctactagatgctcctgagctccccgagggccatctggaggactggctggaaaagaaagccaagcggctgagctcagccccaagtaacagggctgaacccatcagaaccactgtcttccagaacccccgggggctggccaccaagttcaggaagctgcctcccatccctggcgggcaacccccaccctgggggggtggccctctgcagccccaaaagtccaagggggggcttgaagcccccttggccccccgaattggaccccccacgggggggccacttttcctccatcccgtccaccaataagggaaggcccaagcccctgggttccttggcttacccccccatggggagggctcccgaaaaccattttggccccaggccttcacttggagggttccaaggacacccgggcccacaaccaaggggggcaagcccccccgtgccccgggggact

SEQ ID NO: 363625 - DNA, 522 bp, Homo Sapiens
atgccccattaggccaggatctgctgacataattgcctagtcagtccttgccttctgcatggccttcttccctgctacctctcttcctggatagcccaaaatgtccgcctaccaaaactggagccgctgggagtcaactggctttgccctggaatttgccagatgcatctcaagtaagccagctgctggatttggctctgggcccttctagtatctctgccgggggcttctggtactcctctctaaataccagagggaagatgcccatagcactaggacttggtcatcatgcctacagacactattcaactttggcatcttgccaccagaagacccgagggaggctcagctctgccagctcagaggaccagctatatccaggatcatttctctttcttcagggccagacagcttttaattgaaattgttatttcacaggccagggttcagttctgctcctccactataagtctaatgttctgactctctcctggtgctcaataaatatctaatcataacagc

SEQ ID NO: 363626 - DNA, 738 bp, Homo Sapiens
ctgctcttcatcatctgccggccagggccatcatcaccagccgcagccgagcatcgtgtgcacgtgcggatgctgtcctcgtggcgctcgggctcatcctcttagggacagctcttcagcccagcacaccgacgtcttctacatgatgaagcccgcgtggcatgtgtggaccaccctgtcgcagggcagcgcggcaacgctgcacatggccgtgcgcgacctgatgcgctctatctttttgtgcgacatgcacgtgtctgatgcctacatgccacagagccgaaacctgtccgcctatttcaactgggcaacgagccgcgcgctgtgctcgccgcccgcctgcagcgcctttccccgaggcaccatcagcaagcaggacgtatgcaagacactgtgcacgcggcagccattcagcctggcccgggaggcctgccgctcctacagccacgtggtgctcaaggaggtgcgcttcttcaacctgcaggtgctctacccgctgctcagcgaccccgcgctcaacctgcgcatcgtgcacctggtgcgcgacccgcgggccgtgctgcgctcccgggaggcggcgggcccgatactggcacgcgacaacggcatcgtgctgggcaccaacggcaagtgggtggaggccgaccctcacctgcgcctgattcgcgaggtgtgccgcagccacgtgcgcatcgccgaagccaacacactcaaaccgccaccctttttgggggggcg

SEQ ID NO: 363627 - DNA, 540 bp, Homo Sapiens
  misc_feature (187)..(187): n is a, c, g, or t
gcccacgtgggaagagcagcagacaagcgtgttgcacctggtgggggacaacttccgggagaccctgaagaagaagaaacacaccttggtccatgttctacgccccttggtgcccacactgtaagaaggtcattccgcactttactgctactgctgatgccttcaaagatgaccgaaagattgcctngtgcccgctgttgactgcgtcaaagacaagaaccaagacctgtgccagcaggaggcggtcaagggctaccccactttccactactaccactatgggaagttcgcagaaaagtatgacagcgaccgcacagaattgggatttaccaattatattcgagccctccgggagggagaccatgaaagactagggaaaaagaaggaagagttataattcctgcctcagaaaaagcttttccattacactgtgaatgatacctgttttgttgtttctgaatttccacatgttctgaagacaaattttttatagccgcttatggccattttgtacaattttgaaataaaattaaaccattt

SEQ ID NO: 363628 - DNA, 1800 bp, Homo Sapiens
tggcgtgcgtcgtgttggcgctcgcagtgtggtgtgtccggcgataccgtggcgcgtgcggacgcttgtgcggcgtcgctgcgcgctgtgtcgcgtgcgcgtcggtgcgtcgagtgccggcacgggttgtggtgtgctggtgcgtgcgggctgggcctctagggggcgtgccagtgggggggacgggatcgggggtatcgtctcctcgcgccgcttgagtctcgtggcgtcattccgtctggggcgcgggccggtcgtgcgtggcacgtgtgcgggtccggcttcgcggtgtactgcggacgatccggtcagcggccttggcgtgaggggcgtgcaggcgaggctgtgacagggtgctgcgcgtcctgccgtgggacgggctggaggcttcctggctcgtcggcccgctgttgcggcgagctgtgccatctgtggtcgtcgcgtgaggcggatcgaatgtgcgcgctgtggccacggggcgggtggttttcccgcggggctggtcggtactgggctgtcggagtgcgcgggccttgtggtggcacgccggtgcacgggatggtcgacggggcgggcttggtggcgcgccgcacgtcggtacctggcattgcgggtgctcaatgcgagcgcgggcagtgtacgtgcgcccgttctcggcgccgggggatcgtggagatgcgcagacgagcctcgagccggtgcgtcaccgagtttctagggaagcgtgctgacgaggctgccgagaaggccgaagcaggtgtacgtcggctccacagggcccttgctcgcgggcatcgtcgagacacgagagcctcgccacagacgaggacatggggcctgcctcgacagtgccatcagtgttaatgcgcgtctgttcgtccgtcccccgactcgcgcttgtatgactgattgaccatgagcctgagcgttcatcatgcagctgactgggtccttcatgggatccatgccggcatgtgatggaaaccaaatagcggtgaccctcatcctgttctgtctactcaccctagcagccctgcccagactcttcagcccctgctcccatccagtggccagtcgggggaggagaaacacgcgattaacactgtggcattcagccaggccccatgtcctctctgtgaaaggtttttgttcaagagccaagaacaaggcccttgggccactaccctgctaggctctggagctgtagaggcttcctgaactggaagcagggtagggctgtcgccttagatcccgcccaagcccctcattccctccttgcacagatgcatacactggggcccagcagctgcctcctgaggtgacacagcctgtaggaacatacacagctgggatcagcctgcagccatcccccgaccctgctgctaggccacggtttgcgccctggggcctcatctcccccagcccacttgttttccccccttttattccctaggcccttttcagactcctgggcccttggatactcttctcccatctcccttcacaggatgacaccctcccataccccatagctggggccagcaggttctgctgagggtggggctggtgtagggacccccaagagacccctgtcctgtcccttcaccagtcctggggaggctgggactccccctgccacaagcctgggccacagctcacattccactgctgggagaagaaacaggccgaggcccagagtggcctgcccccgggagccaaagaccccagtggccacactgggatagggtggggaggctggcagccctcttttataaatattatacataagaccaaaaaaaa

SEQ ID NO: 363629 - DNA, 1057 bp, Homo Sapiens
agaggtgtgagccactgtgcccagcccatcaatgtgttttaaagctagctgtcagggttccacttaatttaaagctgggcagggagatgtgtaatgatttcaaagttaacacctgtttgttttctaaagggcatgccaagtcctgctgtatcagggaagtattctgtgctaaaatcagcgatggttcattgctctagtctctctcacccttctaggcagtgcatcagtcagctctaaatctggtgcagagggttaacagcataacccttgttggcaaaatggaatagatgttaagacctcaaatagggatttgggatgaaacagctgcagttagcactgttatctgagcatgaaagaactggaaacgctccttacgtcgagatgttggaccttgaagccctcctgaggccaacatgcaaatctggctgtgacggttcatctgacacctgtgtaaagctgaccagcctgctctgtacagtgacaatgaggagcccctctcttccttaagtaggaatctgtgaagcaaaatgtttgctgccaaagacaaatcagactgtcagtcattaaaaacagcattagcaggatgaggatagcaatggggaagggttgtgggcaatgcagtaacagggaaatggcttcagaaatggtttgagttggaagacaacattcttcatctctcaggacttctaattccttgatgctaaaagaagaggcatggattctatgagcttccaagtccctttccactttaaccttctacaaatctttcagaggactgcctagtagcaaaggttattcctggacacaggaaagacgggcattacagggaccaaagctctgaaaggtgacttttattaccaacacactggctggaaaagggacaaaccacatcacgggtgagtgatacttctcagtcttctctactcattcaacaaaggaaatgtgggctggggcagaggtcttttttcatttaatactggaaaaatattgaagagcatccatgttcacttatggctggttttgctatagaaattggaaaataaaggccacttttttg

SEQ ID NO: 363630 - DNA, 956 bp, Homo Sapiens
cattggccccattctccaccaggagcttcacacactgcagactcctcttctcaatggcgatgtgcagagcgctgtggcctcggtaatagtcatctgtgcactgggcatttaccaggggctgaggattgccagagtcccggtcgatctgcagcagtggcagaatgcaggcattgaccccgtccttaaggttcagcacagccttcatcaggcacgtcttacctgtggagccctctgtgtattccgagtcggtgaggtacttgctggtcttgctcaggtactctggaagtccagccagatcctcggggacaccccgggagaccgcattgaagagccgatctcggtcaaatcggtttggatccggctgactggcacctgttccctttcggtagttgaggttgactcttatctgaggggcgaatttccggtcctcgccctggaactgtgactccatgggaggcagcccgctcccaaaatccagctttcctctgtccgcctcagagccatcttcttggcctccatctaatgtctccaacctgaaaactggagagctggagggtgaggtcatcctaggaggaggaggctgctcggtccagccaggacctctagtgcagataggagaatgtacaagggtcctgtcttcctgcccagtctgcgcagtcaggtagttaggacctgacatggagcacccagcaggctgaggcacagggcgtggcggctgctgggatccgcggagcttctcagtagcaggggctgcagggaggaagtgaagccgggaggggctgccggcgctgacagacagaggagcggcggaacctcacctccccagctctgagcactaagctccagcaagcaggttctggtctctcggtcaccctgcagcccacctggccagcacggcacggtggagaacgggagcttaactctcccctgtcaggacaggctagccaccagagact

SEQ ID NO: 363631 - DNA, 1876 bp, Homo Sapiens
  misc_feature (980)..(996): n is a, c, g, or t
  misc_feature (1620)..(1642): n is a, c, g, or t
agctacatcaagtttatgctattccaggcccaagaatatctcctaggctagcatattcttatttcaaaaaattagccctggttttctcagttttccatagggaatcccgaccatctgatatatttactgtgtcagtataagtaagttggggttcccctggaactataattaacatttaaaaaatctaatgctttagaagaagctcacagagtggtgatgaacccaaacaacaaagaaaccatttttaacactaggtatcttcatcagtataggtaggtgttcacaatttttgatggatcaaaaacttgctgtaatacaaatagagagtggaggtactaaaggccttgcttgtggaaactgagagaggatacactgctttatgtattactaaagttaggggagaatgaaggaaatctgacagatgaaaaattctacaggaacctcatcatcgtggaactgaactgatgataacttggaacactccagtaaattctgttgtgtaatgtaatttggagcagtgataatacagacatattttctgttccatcagaaaatcagcaggcaccagtccaaaggtaccacacctgtacatgaagaaggaaagttctaatacaagaaaactgaaaagcaccaagctttaaattcaagattaattacaatccttaactataagtgatgataaaaactaacttgaaatgtgactaaataactgatccaaactgggcattaagtggcaggattatgagaaaggataaaaaaagagatttgagaaaacacatttcttgaattttcagaaaaaaatctagactattgctttgacacttagaaattctgaggtttttcaattggaattgagcatctctgtatgtggggatgtgggcccttatcaagggataaaaatccaaacactctaacatgcctccttgactgtaaagtaatgacactggttccaaaattcacaaataatagacactactgtnnnnnnnnnnnnnnnnnataggctaagaataattctgtaccagaataaaaggagctggtccagggaactgatatttactgaacatacaaagttagtgctagaaggggcctttgagaatgcttcccgccacctgtttccagctcaagacaggtgcacagcagaagctgggagttgcctatggctgcacagctcactgaaggtagaacaatgattggtgctcagtccaattctgtctcccccatgcctagctgttaagtaattactggttcaaaactacgtgttattagtaaaacaaacaaaacagataaagacagcatttaaaactgtgttgtcagataagagaacacatccaaaatgcatgattcttacaaactaaaggaagttaatgtgcgaaaatctcaaccaaaactactatttttagtatacttgtttacgtaaatgctgattggaaatatttaaatgactatagatctgattctttcttttcctttggaaactgggattaatgtatgcccctagatcccatttattagaaatgcaaaaatactacaattttttgatggatgaaaatactcctgtaacacaaacagagaactggaggaactgaagaataactcactcatatagctctgcctcattcnnnnnnnnnnnnnnnnnnnnnnntagcagaggtattttactcagaaaataggtttcaaagaacattaatgactttcttttcccttttatgtctgcttaatcagtgttaaactgctatgggaaaagttttatagaactatataacctgaatgttggtctctttgtacacatcttttctatgactgcaaatcttcactttatgtatcatttttactgtcatattatttttgttcaataaaaactttgtgataaaaggtg

SEQ ID NO: 363632 - DNA, 1140 bp, Homo Sapiens
tttctcacatttcagttcagctcacttgttttccgtccccctccctctactgtaaaagtatgtactcagtgtttcatttcctgccggatctgattcaggtcagtgatgaagatctttgcgagctcagtggggaggcgtttcctccctttcaaaccggccctgcttagggatgcatggttggttatacacttgcttcactcggttaggcatggaggagaattcattcagacctcataggtttaaatcaaatgcatgacccttcacattttccagagatttagacagttacagtgagacaattaaacattcaccccacaagctgcacttggagatgtgtaagcagtaatgtagtcatgcgctccccatgatatgagagtgtgcagaatgccactccccacagcaggtccaccaggacctcctcagggagcatcttgcctacaaaatcacccatcccttttcccccactttcttcactttccctacgtttccactcccacacccacaaataaacaaagaaactttgagcttattttacaaaagtctttgaaatggccttcctctctccgatgctcctgggccctggtttggccccatctgtgcagtctctccgatgagtgtgaaataagccaggtttggctcatgctctccctgtgagcttgctctccccgtgagcctgccctctccatctggcctcactttgtttgtgtccctgggtcctttgtctctgatcctgggatcctggtggtttcctcctccccgcccagcttgggtccttttccccagggttcttccctatctctacatcagaatttcctgctttctcccaaatatgcatttccctggcccaggcatccattgcttcctctcatcgtgaggtccctgcagcagactgccaatgggtgtggtggccatgcccttcctccacaaacccagggaaaagctaccagtggtggctgtccccattagggaaagggagtcatcccctggcacctttcaggggggggaatgtttcagggaaggaagggaaaagtaacccagggggtcatttcctcaaattttccggggaaactggttttatccattatttggaccaagaagggaaagaaaaggctttttgccgacatccttggagaaatggag

SEQ ID NO: 363633 - DNA, 911 bp, Homo Sapiens
ggatacgaaatcacactggagagaaaccctatcagtgtaaggaatgtgggaaagccttcaatagatcttcaacgcttactcaacatagaagaattcacacaggagagaagccttatgaatgtgttgaatgtgggaagaccttcattacttcttcccatcgtagtaaacatttgaaaactcacagtggagaaaggtaaatgcaagatatgtgggaaagaatttctgtattcctcaccccacctgtgaactcctaccagagagaaaccttttgtatgtaaagaatttgggaaagcatttgctctttcctcatgcctaagtatgcatgaaagaattcacactggggagaaatactatgaatgtaaggatatgagtgttgttaccatttagcccattggttgccatctttaattattggcagtgcaaagatcatcagattagtcctaaatgccttttggaggttgtaatggctcacagattggccttagatgcatcccgagggtctgaaattaaacctacaggttctgaatacaacatcatggttacctgagtctgggcatctgtgaagaagggtcatggatggtgaggtcagtactgcaggctgcctcaccttggtgattagattcctaagatcatagcattaacaagttgtgtatgagataaatcatgcagattgaccccagcccctgttggttagtggctgccagtgtggcacatttatgtcaaaatttaccagaagccaagatgatgtaggaccccaaaggtgggttgttaagagatgctcctccaagggtctcttctgatcccacggatcctgcagagcgtgtcaggaatgaaaccatccataactgccagtgccctttcacagctgattatttctgtgtccccttgtaaaatctaagaagtgtgacagc

SEQ ID NO: 363634 - DNA, 487 bp, Homo Sapiens
  misc_feature (12)..(12): n is a, c, g, or t
  misc_feature (81)..(81): n is a, c, g, or t
  misc_feature (402)..(413): n is a, c, g, or t
aaaaaaatggcngcttaaaattggttttaaccagcctgaggttgtggaggattttttgtcccactgaatcttttgcaacangaaaagcatactttgtcagcttctaataagatagcccaggtttgaattatttgccaaaatttatataagcaaataagatctcttggtaacaattgacattgcactagaatttgaatgaaactgttgttggcatttctgtttctctttcaagtagttgtaaataatctctttttctcatataaacggaatgcataatgtcttactcttgagtcatttagtagcattgatatggtaccaagttgtatagcagagtaacaaaatcatgatttgacaatgaaatttacatattgcctcacctaaagatgttttgtctgtatgacnnnnnnnnnnnnaagtttgtcttactgttactttaaatgttttgggtaaattgtgtaatatgaaaagttcaataaaatgtcgaaat

SEQ ID NO: 363635 - DNA, 1058 bp, Homo Sapiens
  misc_feature (436)..(541): n is a, c, g, or t
  misc_feature (543)..(552): n is a, c, g, or t
  misc_feature (558)..(563): n is a, c, g, or t
  misc_feature (569)..(691): n is a, c, g, or t
  misc_feature (754)..(763): n is a, c, g, or t
  misc_feature (895)..(903): n is a, c, g, or t
  misc_feature (921)..(931): n is a, c, g, or t
gtgcccaccgttatgggggtaaattagaatggggttcccctcccaggggtaaccctgcccaagaagagatgctatagatgttactccctatactgtaaaacattgtgaaatcagattactttaaaatgatgtattacaaagttatgcaaaaaagcagttgtgactatggaagcccaaggcttatatcccagctctgtcttacactaaatatgggtacagtgtttccactctgtccataaaatgggagctaatattctccaacctgtgtgcctgacatgatggttaaagggattaaacaaaacaatagtttgtaatttattctgtcagagcaaactgctggtaaataaaagggactaagttgacgaaaaataaattttaaaaaacctaataaaacaagtttgtaatttataattgtatacaaataaaagatgttacnnnnnnnnnnnnnnnnnnnnnnnnnnnnnnnnnnnnnnnnnnnnnnnnnnnnnnnnnnnnnnnnnnnnnnnnnnnnnnnnnnnnnnnnnnnnnnnnnnnnnnnnnnannnnnnnnnnaaaaannnnnnaaaaannnnnnnnnnnnnnnnnnnnnnnnnnnnnnnnnnnnnnnnnnnnnnnnnnnnnnnnnnnnnnnnnnnnnnnnnnnnnnnnnnnnnnnnnnnnnnnnnnnnnnnnnnnnnnnnnnnnnnnnnnngggccgcggaggcggccccgaaaggtccccacacaaaaaccccccggggggcccaaagggcgnnnnnnnnnnccaattaaaaagaaaatcccggcgggactctaaaaattgttttgaaaaacctcgcctggaggctttttggggggttcttgtggggattttcttacaccggatttgggggcaatttgtttattttattttttnnnnnnnnngtgggaccaccctttatnnnnnnnnnnntggaacatttttataaacccctggcggcagaaaaaattggcccccccttggggaaaaaggtggggttgaacaaaatgtgggccaaatgggggccccaacaatttgtgttgccacctggggggaaaaa

SEQ ID NO: 363636 - DNA, 990 bp, Homo Sapiens
  misc_feature (905)..(947): n is a, c, g, or t
gcctaactccaggccagactcctttcagctaaaggggagatctggatggcatctacttcgtatgactattgcagagtgcccatggaagacggggataagcgctgtaagcttctgctggggataggaattctggtgctcctgatcatcgtgattctgggggtgcccttgattatcttcaccatcaaggccaacagcgaggcctgccgggacggccttcgggcagtgatggagtgtcgcaatgtcacccatctcctgcaacaagagctgaccgaggcccagaagggctttcaggatgtggaggcccaggccgccacctgcaaccacactgtgatggccctaatggcttccctggatgcagagaaggcccaaggacaaaagaaagtggaggagcttgagggagagatcactacattaaaccataagcttcaggacgcgtctgcagaggtggagcgactgagaagagaaaaccaggtcttaagcgtgagaatcgcggacaagaagtactaccccagctcccaggactccagctccgctgcggcgccccagctgctgattgtgctgctgggcctcagcgctctgctgcagtgagatcccaggaagctggcacatcttggaaggtccgtcctgctcggcttttcgcttgaacattcccttgatctcatcagttctgagcgggtcatggggcaacacggttagcggggagagcacggggtagccggagaagggcctctggagcaggtctggaggggccatggggcagtcctgggtgtggggacacagtcgggttgacccagggctgtctccctccagagcctccctccggacaatgagtcccccctcttgtctcccaccctgagattgggcatggggtgcggtgtggggggcatgtgctgcctgttgttatnnnnnnnnnnnnnnnnnnnnnnnnnnnnnnnnnnnnnnnnnnnagctccaaccatgaaacacttcctttgagggagagcacacctt

SEQ ID NO: 363637 - DNA, 535 bp, Homo Sapiens
agggtgtttgccagtctgagtgtcccgcggtgcccgccaacccgcttcctgactgacctgagcaaggtcttactaagcagtcccatctctgtgggaggcatgcaacgcgtgcagggagttcaggtgccggtcggcgtagccaggcctggaggccccccaggcaggaggccgcccaaaggcggggccggcgtctcgcagactaggggctgggggcggccacagacggcctcgaaaccacagcccttaccccaatcccacgagccccgccaacgaaccacaggtgctgggctttagagaacatgggaaggcggccccagacctggcgggaacgcctttccctcagagccaggccccggccccgtctgggaagctcatcttgcgaagctgagggagctcagggcaaaggccaggctagcgcggaccggaaggggccgaggctgcacgggcctctgccagaacgctcaggacatcccggcctgggtttacaacgctgttaggaaaattaaccaatgaataaagcaacgttcagtgcgca

SEQ ID NO: 363638 - DNA, 688 bp, Homo Sapiens
  misc_feature (610)..(644): n is a, c, g, or t
ggtatttaaaaattctaaaatatttaataattaatattgatgggaagactgatatacaatgcaattatttattttacaaggagattctatacatcagggaggcatcttgaagtacaatacaccaggctttcatttcttctttacattatgattgtgagtttccatataagttggtacttacatggaaagggaacacaaaatccatttttatatacataaaaacaaaacacccaaagagacttgacccccaaaatgtcttgtttcacttgaaaataacatgaatgagacgaaagatgaaccagattacttggtgacgcacagaaggcgaacaagtagctcaggaaatcaaatcctgtttcaagcttggcacattaagggtaagaaaggtagtgaaagaagggttcgaaaatatcatctcaagccacaaaaaatctggcagaagacagcctccaaatcaataagatagaatggttagaagtcaagttagagttattgtgtggctaccttatatccagacctctaatagactgagtggaattgtcacttctcttccctcagttatcccaattgttagtaaacttcaaggaggctgggcatgatgactcacacnnnnnnnnnnnnnnnnnnnnnnnnnnnnnnnnnnnagattccttgagccccggtgttcaagacgagcctgggcaatatg

SEQ ID NO: 363639 - DNA, 1853 bp, Homo Sapiens
ggctgggctccgggtccgggaattcccgcggatccagaagataattcaagttgcaatttcagtggggacatagccaaaccatatcactggtgatgccacttcttcagtattagggattctcagtcagaagagaccccctgtgtggcctgagtcccctcaggaggaaggtggacaacagagaaatgagagttttgatattttctgaaagaggaacatgtgttagagatgaagaatcttccaaggctcatgcagttgcttagaataatcattactgttatatgagaaacattttagtaatttaataaaaggataatgtttatttaaaaaacctgacttttccagagtaattttgttttgcacattcatgtttattgaagtggactaatttctataatgcaaatcagagttaaatattaaaaattgtgtaaatacaattgacataggaattacattaaaatattaggaagaaacaaggacaaatttagaccttgaatccgaagagataaagcttacttgactttcaaatggagagatgatgaaaacccactcattcagtctttcagaacaaaaagacagtcatctgataagagtatgacatggatgaaatgccctacaggggccttggacatctttaatttctgcgattatgtgaaagaggtggactttacagataatggagcagaagccaacattagtaaaaggaatcccaacttcttcccatagaattagaaacatgtgaaagtacaataaacttcttgttcaaattaccagcatcagagagcttcccatttgcatctagaccttgaatttatatttattgatcaagttctaatttgtatgtatattttgtgcatattcaccaataacagttaaaattaattatgtgttatagttaatatatgcacctaccttcttccgttagtgcatcagtaaatgtgttatttcgtcatttttccaaagagagtgtcgtaagggttttccctgtagttcttcctttatagcttttcttctgataaccatgacttcaggagctttaaaactatctatctggcatttgtgtctggcggagaactaggccatcaggcctcctgaagcctgccatcaatgttaacttgaggactggggctggcttggggcccagaaggtaaagaactatttgagcagatgtgtgtgggtggcactggattccacccaactgccaagttagtattgtgagagatttcattttacaacacaaaaataagcctgtgtcaaagattttaaaatcatggaaagttaaaatctagaaagaccttagagaaccagccaaccaactctctcattttaaaagtgaaggattcatagcacagattacttgcctaagatcatccaggaacgaagacaagaatccaaatgtacttggggacaagaattagtccccaaattcagtgttcttcctagtattaaacattgcccctttcggacaaattttggatttccattcttgttatatttcagtactcttgctggatttattttaggtttaactggtaaagaatgaacatttcagaagtgttaggattagtcagtgtcatcgcttatgtatatgaatcacttgccaaagacactggctctcctcagctgtaaccagcatgtcaaatgtgaagattattgtgtgggatcctttggtttcattgttatgatgtattttataaatgtactagttatatccttgtttatgtatttttgctgatctttcataaagcagaatggtatgtatcggattgttttaatgttatatattggattgtattcgatgttacaaaaccaatattctatggagaatgaaaaaaataaaggactaaattaactgg

SEQ ID NO: 363640 - DNA, 886 bp, Homo Sapiens
agcgggctgtcggtcggcggctaaggaggggaggcacctgcatctggggcgcggcgaatcctcgcgtgcgccaggccgcctggggtagtcgccgagactgcgccggccagcggggccgaaacctaatcaggagctgagctttgatggcggcttctggagggacaaagaaggcgcagagcggtgggaggaggctgcgagaacctagctcccgccccagccgacgtgcgagacaaaggccccggcgcggggctcttcggaaggccgggaggttcctgtgacaatgcgagtctgcgcccaacgctcccgcacagtgatgccgaggccaaatggctagagtgggcccaggcatcagcatttctgtttggcagccgggcagttgtggtgcacgttttgaggaactactaaagcctgcctgtgatgaaaaaggcaaaagctgacttcaccaaaattactcccagggagacttctgcatttggctggaaggacatttgagtaaaccgctgaggctggtggttgaaacataatcctctaagggagatcggttccgataccctgagttagggacgcttgcctgggcagagctaaggggagaatgatcaaaagccaagctctgtccccgtcagcacgtcaccctccctcactgtaatccctgactgttttctctaaatgaagaattatttagagaatataaattagaagggccgccacgtcagaattgcctgagtgggagcagtctttccagcctcgaaaaatgtttaaacaatatgcagatgacctagcacaaataaagaatgctagcaaccgctgttatgtgtgagcggtggaattgggagggctcttcccccaatcttcatcaaacagagtaaggtttagaataaaaataatg

SEQ ID NO: 363641 - DNA, 837 bp, Homo Sapiens
  misc_feature (12)..(12): n is a, c, g, or t
  misc_feature (31)..(31): n is a, c, g, or t
  misc_feature (416)..(427): n is a, c, g, or t
  misc_feature (521)..(687): n is a, c, g, or t
  misc_feature (740)..(754): n is a, c, g, or t
  misc_feature (774)..(782): n is a, c, g, or t
aaactttgtagncttctttcccttttatganggattttgataaaaagtccaaaacagggttttccttttttatcacctttgaatttggaaattttgagcacccaagctcttctgtacctatttaaagtccaccaaggggactgcagctcctagaacatgagaatcaagcctcttaattttaaactgcggaatgtggcctctgcttcctccgtcctcctgcccaaggacgacgaggattgctccagggctgctgggtagtttaccgtcccttctataggcatggagttggcactgacatcacagcttcataaccccaccaccgccagcttcccctgcctcctacatccagtctgttcttgttcatagtgagaatcctgtgttcccacttcagtgacacctgaattgtttgttgttgnnnnnnnnnnnnattgtcttcaaagaggaagggccccattaaagggtgaacttgtaataaattggaatttcaaataaacctcatgtacttgtgtttataaagaagnnnnnnnnnnnnnnnnnnnnnnnnnnnnnnnnnnnnnnnnnnnnnnnnnnnnnnnnnnnnnnnnnnnnnnnnnnnnnnnnnnnnnnnnnnnnnnnnnnnnnnnnnnnnnnnnnnnnnnnnnnnnnnnnnnnnnnnnnnnnnnnnnnnnnnnnnnnnnnnnnnnnnnntttttttgttaaaaaggggcgcccccataagggggggcttttaaataaatttnnnnnnnnnnnnnnntcttttttaaaccacccggnnnnnnnnnaaaaaaacgcccacatcggggggaattttttggggaaaaaacacctctttctttt

SEQ ID NO: 363642 - DNA, 793 bp, Homo Sapiens
caatttctccatcttgtataatggactaccatagcgtatacctctcaaactctgtaaatgattaaagacactttactcactcagcacattccaaagtacctcttcaatcaagttctatgtcagaacgcattctcgtatgttctaacgcgaactataaagactgaacgacagagagaatggattggtcgccattgccgttgtttgttttgccccctcctgagcattgtactggaagttctcaatgaaacaacaaaggcaatggtaatactgaactattagaaaaacaagatacagtaagttacgtctgacatgcagataaattattacctggaaaactaagaaaccgaataagtatcagaaccaataagcaaaattgacaatggtagccaattatcaatggaaacatttaaaaatcagaatatttacttcatgtccacatcatgaaaaaaattaccatgtatcaaatgggtcgacgcaattaatactagatatatctaataaaagaaactagaagaaaatgtagacgggcatatatgactaagaagacactttttaagcataaaaactgaaagatggaattgaacagaaaatactataatcatttacaacttgtgtgttacaaaatacacaaaacaaaatacaaatagtaaatttcccaaaggtgtatgaaagattaaagttaatattatttaaaaacattattcaaagtcttaaagacacaaatgacaaaagccaaaaggaaaatgtgtatatattggatagagttcttgaataaaaagaaatacgtaagtcc

SEQ ID NO: 363643 - DNA, 489 bp, Homo Sapiens
  misc_feature (74)..(90): n is a, c, g, or t
attaaaaaactttttaattggtttacaaaggaggctacagactacattgaaactaatctttgtacaaaaggccnnnnnnnnnnnnnnnnngtcccaaaacaccaagagacaaaaggtaggaggaaagacaagaaaggaagatacaaaaggagcaggaagaaacttacttagggacaagattagcatcatacatacctaagagtggggggtgagggggaagaacaagatgagagagcatttaaaagcatttacccacacagccctggtgataattggattggaatcaaaacaaacacagcatgagattattaagaggttttaaaaggcaacagtggtgtggactggttattgccagtgttaagagagaaataaacttgggtttttaggcaccagagattggagcaccacccatcccttccagaggatgacagacttaggaaggggaagcaggccctggggcagctgccactggtgtgtgtagatgtctcc

SEQ ID NO: 363644 - DNA, 569 bp, Homo Sapiens
  misc_feature (32)..(32): n is a, c, g, or t
ggtatactgttggtttttacgattttactcanaacttaaacttcaccattctttccattttcatttgcccctttattctttctgacttttctctaagcctgcataggagctttattctcatattcaataggataggatattgcagtctcatcctgttttctgctgtcctgcaccattaaattttatatgtcctgaaggaattcaatttaatggccaactaatatatgtatgttagggacaggtaaagagtctgtgactgagatttctggagttatataacccctgcgccaccccccaccccaactccaacttgccagaattcaccccttaacctgcaatgtgattgtatttggacatagggcaatgaggacataagaatgtgattctaatttgatacaaatggtgatcttatgagaagaggaaggagagacgtctcttcctatgctcacacacaaaggaaagtccacatgaggacacaaggagaagccaagagagcccttaccaggaattaaacctgctaatccctattttaattagaacagtgagaaaataaatatctgtatttaaaa

SEQ ID NO: 363645 - DNA, 428 bp, Homo Sapiens
  misc_feature (42)..(42): n is a, c, g, or t
  misc_feature (50)..(50): n is a, c, g, or t
  misc_feature (68)..(68): n is a, c, g, or t
  misc_feature (85)..(85): n is a, c, g, or t
  misc_feature (116)..(116): n is a, c, g, or t
aataaaagcccatgtaccagagggaaaccttcacctgttcantggggttntaagcccatagttggagnccctaaagggggaaaantagaaaatgttactttacatggctatataantttttttcctttgccatcgctgaacttgttcaagtgataatcaagagatattagaagcatttgcaggtatgatacctgataggcagtttatttttgaagaattcaataggcacctttgggattaaaacaattttaaaatttgagaaagatgaaatttgaacaattatggcctacctcgcttctccatgttgtaaaagatgatgttttatgataattctgaagaagaaagtaggtatgacttagtttacaaaaagagttctgttttatttctgttttgggtttggctctaatacagagattcacccatgaaaa

SEQ ID NO: 363646 - DNA, 472 bp, Homo Sapiens
gtaagaccagctgggatgaccttccctgggttaatcaaattcccctctagacaacacaaactgcaggcatgtgactaactttgaaagaacacccatcatgtggctgctgtcacccttgaccagctgtggtggtggttactccatctgtggttggagcgcctctttgggattcacttcaaggtcttgtgcctatttttctgcatatcttctgtgatgacaaatctctgtcccctgagtgttaatttgatttttagaaatggccaaaagtaacgtgatccaaactttttttcagtaatatggagactgagctgcatggtagttggggatcaaaaatatgtgaccttaatgagatttttatgatttctaaagtaacaataaaagcagtttttagagttgagttccagagagggcagggcaatggcagtgacatgtttgtcattttaataataaataacatctattgagtgcttgg

SEQ ID NO: 363647 - DNA, 368 bp, Homo Sapiens
agcctcctccctaaagctcatctcagcttttgatctgaatgatgatggaaacatgcagacagccctcctcagtccttactatttaatgttgtagctgggaaaaaacccagagaggttaactgatatactgggttgggactaggatgtgggttttgtgactctgaatcccatgttctcaaactacgctgccttccgaagtctggcatttgttagctcatgcttccttgtagtccagcttcttatgtgcctgttatattctccagtaagattgtaaagccccttaagggcagggacgtctttgcatctctagcactgctatagtgttctatccttagttatgaactagataaataaatggtggtggcaac

SEQ ID NO: 363648 - DNA, 536 bp, Homo Sapiens
agatggagtcacttatgtcaagggtgtgctatacatatagtatcttttaaagagctgcatctttagaagcacattgctggttatgtaagatgttctatctgaggaagtgtgctgaagtgtgactactactaataataagcagaaagcacgtggtgttgatggggatgttgtcaatgctgatggcagcagcgggcacttgctgggcatcaaaccctgttctgagtccttggaatgactttccataaacaaacccatctcccatgtcaccacatgcccctcagccctgggcagtgacttctgttagggtgatcatctcatccaggtttgtctgtgactttcccacttgtagcactggaagtcccaagacccaggaaacccctcaatcccaggcaaatcaggagagttggtcactctactccatatccacaatccattttatctatttatttgttatttttgcctttaaatttatatcctagaaaaatactttaaaagctgctagacatgtccagctgaaagaacattcttcaaagatt

SEQ ID NO: 363649 - DNA, 397 bp, Homo Sapiens
  misc_feature (227)..(301): n is a, c, g, or t
  misc_feature (353)..(353): n is a, c, g, or t
acaactacagtgattctagttcaaaatgagggaacatggaggggataaagaagtcaataacccaaaatagtttgcaaatggagctgggcaaaatccagcaggagtttcttagttaggatccacagcctgggactgaccctctgtcctgtgggtctttgcctctgggctctctgctctgcatttcttgaaaccattattatttatcatttttctcacactgttttgcnnnnnnnnnnnnnnnnnnnnnnnnnnnnnnnnnnnnnnnnnnnnnnnnnnnnnnnnnnnnnnnnnnnnnnnnnnnagccattccatggaatgaatgtatcccattcatgaattgatagatatttgantaggtaattgaatgtatattgatagatatttgaatacaagaatg

SEQ ID NO: 363650 - DNA, 421 bp, Homo Sapiens
  misc_feature (274)..(354): n is a, c, g, or t
aaaggcctaactgccccctacgtggaatgatgtgacagacatagaataacacctacagtgatccctagttcaaaatgaggcaacatggaagggataaagaagtcactgaccccaaaatagtttggaaatggagctgggcaaaatccagcagaagtttccttaattaggatcgacagccctgggaccggcccgccgtcctgtgggtctttgcctctgggctgtctgctgggcatttcttggaaccattattatctacctttttttctcgcacttnnnnnnnnnnnnnnnnnnnnnnnnnnnnnnnnnnnnnnnnnnnnnnnnnnnnnnnnnnnnnnnnnnnnnnnnnnnnnnnnnagccattcccatggaatgagtgtatcacagtttattgatcccattcttgtattgacagatacttgaa

SEQ ID NO: 363651 - DNA, 518 bp, Homo Sapiens; identical to SEQ ID NO: 884

SEQ ID NO: 363652 - DNA, 1887 bp, Homo Sapiens
  misc_feature (867)..(977): n is a, c, g, or t
  misc_feature (982)..(982): n is a, c, g, or t
  misc_feature (1389)..(1397): n is a, c, g, or t
  misc_feature (1488)..(1488): n is a, c, g, or t
  misc_feature (1518)..(1518): n is a, c, g, or t
ttcggcacgaggcgacttcacccttgaaacatcctggttcaggtgccaacggcctgtcctcgagtcaggaggcgcagctgcagcaggcggacatctgtgacactctggtggtggccgtgccatcttccctctgcccgctgcgactggtgctgctggatgctggcattgtggcggagctgcaggcccctgacctgaggaatttccgggcagatttcatggctgtggtgatggggcagggccagagagtggctgagctgatcctgcatcatgcccgggccagcgagtgcagggacgtggaggggttcaaaaccgagatggccatgctggtgacccaggccaggaagaacaccatcaccctggagaagcttcatgtgtccagccttctctctagtgtctttaagttgctgatgactcacaaggtaaagcttgagagcaactttgcctccattgtgtttgccatcatggtgttggaggggcttggccgctcactggaccccaaactggacatcctggaggcagcgaggcccttcctcctcacgggcccagtgtgccccccgtgatggggcagtggcctctgtgggcccttgtcaagagctggaggccactcccaagagcctctcctatggcagctgggacgttttaaaattgggacaccaatttcaaatgtaaccctccagtggtggaaggcacaccatggcttcctctgcttggtttgagggtctgttcaaaagctttgggccaattagggagtaaaaggagggaaggggcctatccattccattgtggaagctgggccaggtgccagggacactctccttcagggaaaatgttatgtggaggaggacgaataaatttattttgttttcnnnnnnnnnnnnnnnnnnnnnnnnnnnnnnnnnnnnnnnnnnnnnnnnnnnnnnnnnnnnnnnnnnnnnnnnnnnnnnnnnnnnnnnnnnnnnnnnnnnnnnnnnnnnnnnccaancgccacacgaaccaagaaaaaaaaccgaaccccggcacccccacgatagcataggaaaacacgtccggcggcaggcgcttgggattgctcgcagtacaaacaccacttcggggtgttcgccaccgctctttatttagtccagaaccccccgcccggaatgcccatcaacgggaaagaattcggcctccaaaaaaaacagccggtttgccattaaaaattgaagggcaccacccccggccgcgaaaaatgaagtggcgtgggaaatccccaattttagactcaccccgtcgaccatgtgattgtctccccccctccgctataggtctaacaacccagcctgggagaaacgagcgctggcccccgcctagccctgcgacccccccagaacattctatagaccaatgggnnnnnnnnngagtgtcccctaacaaagcgtggagatttctatcatgaccccttgggctaggtatacccacaaacccgaggtgcgaatgttcaaactcctntcaaacaccacgtcgagcgtcagcatccanaacaatacataatatgtagcccgcccacacggagagatatacaggtgcggcacggggaggaaacaaccactacgcacacatctggatacaaaacaagcaattctcatcattagtcgctgcgcggctactagtataccacgcgccacctgatgtgggggtgtgatgaccacctaacgggtgtaagtttgtattgtctgcctagaacagagacacacttaatgtcttggtctgatacaacaactcgccgtcgtgtgatagatgcgacacactgtgagagcacgtactgcatgttgtcgagtgccagaggacaccaaccgtctccagtatgtatcatacatatatagacgatgcagtctaattccaaccgcg

SEQ ID NO: 363653 - DNA, 415 bp, Homo Sapiens
  misc_feature (328)..(328): n is a, c, g, or t
aaaacctgaaggaatttccgggcaagttttccatggctgtggtgaatggggcagggcccaaaaagtggctgaagctgatccctgcatcatgcccgggccagcgaagtgcagggacgtggaggggttcaaaaccgagatggccatgctggtgacccaggccaggaagaacaccatcaccctggagaagcttcatgtgtccagccttctctctagtgtctttaagttgctgatgactcacaaggtaaaatcacagtttatccctgcaccttcatagattatgttgctcgtcttagagaccaccaggcagcgaatggagtcaagcccttgncgttctccgagagtcctgccctgactacaggactagtttctcccattctttccttctccaggataaagttcctcattcctgtctttt

SEQ ID NO: 363654 - DNA, 807 bp, Homo Sapiens
  misc_feature (73)..(73): n is a, c, g, or t
gcaggcccaagacacaaagtttgaggctcgggagtggctttcagctctcatgccccgcagtgtgaacagcaanaaaggatctaaaaaaataatctctttgcggtccctgagagtcctgctgaatcagccaagtgtttttgtggtatgagacagcaaaaagagatgccccagatagaggggagcttgtgtttctttcctgcagacgtaaattgacactgaagtgggcagaggtggcccaggaccatggcaccctagaagtgcagaagctggggggagaggctgcttcgaagggcaggactgggggataatcagaacctgcctgtcacctcagggcatcactgaacaaacatttcctgatgggaactcctgcggcagagcccaggctggggaagtgaactacccagggcagcccctttgtggcccaggataatcaacactgttctctctgtaccatgagctcctccaggagattatttaagtgtattgtatcattggttttctgtgattgtcataacattgtttttgttattgttggtgctgttgttatttattattgtaatttcagtttgcctctactggagaatctcagcaggggtttcagcctgactgtctccctttctctaccagactctacctctgaatgtgctgggaacctcttggagcctgtcaggaactcctcactgtttaaatatttatttattgtgacaaatggagctggtttcctagatatgaatgatgtttgcaatccccattttcctgtttcagcatgttatattcttataaaataaaagcaaaagtcaaatatga

SEQ ID NO: 363655 - DNA, 338 bp, Homo Sapiens
agtgaccttagagagtatccagttctttcatttcacaggtgaggcaactgagactcaaaggtgatgtaatttgtgcaaagattatagctaattagtagcagagccctgactgggacatagtttgaaggtgaaaaacttcaccaagctacctttcttgaaaggtccaaatgtttatgttttcaactactctttccactgtaccataactttcactacatattaaatgacactttataactaatataataggacaatcatcaatgcatatatagccagcccttcatatctgtgggttttgcatccatggattcaaccaaggaggaattgaaaacactgag

SEQ ID NO: 363656 - DNA, 858 bp, Homo Sapiens
  misc_feature (584)..(585): n is a, c, g, or t
  misc_feature (590)..(592): n is a, c, g, or t
  misc_feature (646)..(655): n is a, c, g, or t
  misc_feature (761)..(761): n is a, c, g, or t
gggatcaagctgggcagcccattgcatgccctcaactcttgcttggcaggggtaccagagactgaaagacacggcacaaatctcaatattcatctcccacatcaccttccctgggaactggacagggtgaaagtcctcaaactctgggaacaggcgagatggaacagggatttaactccccgcccacaggtccatgggagcttgaggcagtaagggggatcccaggcacccatctcaaggagtggctgggagtcttttccctaacttgtggggacaccaccagttgtcaagctactaggcagtagggtctgagggctcaggcctccacctgagaggttataacctgagagacagctctacccttcctcccagtaagaagggaaggtgggtgggcacctgagagattaagactattctcccagtcccactaccagcacccccgatccctgagactgaggggtttacgggctgtgaatggaccttcagccctgcccaccctccctccccactgctgctgagtctgtctgatgttttggttgtgtgaataaatataattcccctctagaaaataaaaaagcaaaganntgggnnncgctgggcgggccgcgctcgggccctcggaaagctttctaacaccgttcgcttnnnnnnnnnncccccaagggggaagcggaacgcggtcctagcgtgcgtcgtcggccggttctgggtccctgacgtggtcgcttcgcatcggtcgccctacggccagtgccggcgcncgggcgcacgcggacttggcgtgggccgcccggcaggtggcgttcgccgggcccgtttccccgagcccctcgccgccgccgggccagcgagcgctgt

SEQ ID NO: 363657 - DNA, 463 bp, Homo Sapiens
ttcctcaaggaaaccctgctggctaatgggcactacatctgtgtattactgtgattctctctgtaagctccccatgtggccaaggacccccctcctaccagggcacttcctgccacctcattgcactggtctcaaccattcagcctgctgctgctgcaccatgttgggctgcggtaggatagggaaggggttctgttgattgctaaatgttgcctaactttatttccctctcccacatttcatgcaagggagtggacctaacacatgacttgcattctcttcctatgttcagaaactccagggcttgcccacgtgtatgtatgagtgaccaatggagcttggaattctttatctatatgatctgtccgaaaatgagatcttttgtactggaatttgtgatgtagttgatcattcagagccaaacgcatataccaataaagacaagactgtcggataaaaaaaa

SEQ ID NO: 363658 - DNA, 181 bp, Homo Sapiens
aattggttgtttggaaaatcacatcatgcctagaatctgaaattgaattagcaagaaccgactgtttgcattttccatatatccttttatctgctctttttaaattgttaattctaataatttcaaaatgcattcactgaagaaatggacattaaaatattctaaaatttaaggaaaaaaa

SEQ ID NO: 363659 - DNA, 819 bp, Homo Sapiens
  misc_feature (266)..(266): n is a, c, g, or t
aggtacccttgggtgggaggccccgggccttaaaaggacggtggagaaaacggccacccagcccccggaattttttccccatttcaaaaggaagggggttcccacgaacagggaattttggggcccccaacaccccccctttcaaacttttcttaggcccatgcccaaggaccccaggaccattaggacgggaccccctgggtaccccagaagagggaggtcttgctccactaaccccggatcccgcctcgtggcccctgccctcntgggagcttcccattccaggagaaaaggctccacttcccagcccttccttgcccctgacatttggactcttcccttgggccgaccactctgttctcattctccttcccaccaacatccatccgtccttctcagacaaaccactcactgggtaccccacctcctctctcatatgcccaacacgaccactgcctccctgcccccacacctgcacccaaacagacacatcaacgcaccccactcacagacaccccttaccccacccccactgtacagagaccaagaacagaaattgtttgtaaataatgaaccttattttttattattgccaatcccctaagatattgtattttacaaatctccctcttcccttcgcccctcccttgttttatattttatgaagttagtgcgggctttgctgctccctggcccaggaaagagggactacctgaccctcacctggcacccccctgctgctgcccaagccgctgggcctttttaattgccaaactgctctcttcatcagctcagcacatgctttaagaaagcaaaacc

SEQ ID NO: 363660 - DNA, 737 bp, Homo Sapiens
ggattgaaaactggcactccatcctgaggaatggtctggttgttgcttctaatacacgattgcagctccatggtgcaatgtatggaagtggaatctatcttagtccaatgtcaagcatatcatttggttactcagggatgaacaagaaacagaaggtgtcagccaaggacgagccagcttcaagcagtaaaagcagcaatacatcacagtcacagaaaaaaggacagcaatcccaattcctgcaaagccgtaacttaaaatgcatagccttatgtgaagtgatcacctcatctgacctgcacaaacatggagagatatgggttgtccccaatactaaccatgtctgcacacgattctttttcgtctatgaagacggccaagtgggagatgcaaatattaatacacaagaaggaggcattcacaaagagatcctccgagtaattggtaatcaaactgctactggttaaaggaccaacatttaattaacatgattcgaaagccttcctcgggttcaaagctggattttgaacttgaagaagattataaaattattttattgttattaataaacaaaattaaccctttgaatactgattttttttcttagtatttctaagtatctcattaaatacctaaaatggtataagatttatcaattgtagggttatggaatctagtaataaaatttcaacagcacttaaactgaagtttgggttgctcatacaataaacaggttg

SEQ ID NO: 363661 - DNA, 517 bp, Homo Sapiens
cgccccaaagacggggaaatgaagaaaacgccgtttctggagctccctgagggaagcatgaggaatttcactgccttccagcaattaaattgcattcaagaattctacagtagccttggtggtctgcaacgacatttcagggattagatgctctatctcctgtctgcagacacatgagcagaacccaggatggaagaatgtaatcaccagcgtgactccagtgatggagatgaactagatgtggagactggggagcagcagagtcaactcagttatcatcttggcggccgggctgccgtccagctcacagaagccacctgatccggaaaagatttccaaagcctgctggagctgtttccatacaggcagaggccagtgtcatctccagcacctgggggacataagagaaagagccagtggcctccaagacaatctcaggtgaatacgcttgacccagacgagggaaggatcacacaaactctccgttgatgtatgtggcagttaataaatcattttc

SEQ ID NO: 363662 - DNA, 553 bp, Homo Sapiens
attccagaatccatagaggttcagctggcgaatgaaactcgtcaagttgtctgttttgaagatcctctctgcacctttccgttgaagaacctccctctggaagagatccttgtcgatgatcacggcgtctccatcatcgttccagctcacagacttgaatgtgtcttcctccacaatcgtccaaagctttcttgggaaggagagcctaaaaaggttgtggttgtcttccacgttgaccacgcgttggtttcggtcttctggtggtgagttatcttgggagcctggatcttggctcatggcttggtcctcgtgcctgtccaaaacctcgctggaatctggatttggatcaggtgaagaaccagatgggcccccgcttgttggctctccaccaacagatggggccagcttggcttcatattcctgttcagtgttctgactcgccatggagctacaccagaatcaggagcattttgtacccaaggcccttatcactgtcctagcaagtccaaaatgccttcagtcagagtaggcgtgcccaataaatactgtccac

SEQ ID NO: 363663 - DNA, 608 bp, Homo Sapiens
  misc_feature (126)..(244): n is a, c, g, or t
agagacagggtctctgtcacccaggctgggtgcaggggcacagtcatagctcactgcagccttgaactgctgggctcacgcaatcctcccgcctcagccttccaagcagccgagaccacactatgnnnnnnnnnnnnnnnnnnnnnnnnnnnnnnnnnnnnnnnnnnnnnnnnnnnnnnnnnnnnnnnnnnnnnnnnnnnnnnnnnnnnnnnnnnnnnnnnnnnnnnnnnnnnnnnnnnnnnnnagcatgaaccactctatccagctgattccatgttctctaacaccctatccacacaaatctgagatgggctcaaggatgaccacaggccttggagatctctgcagtgagcatctgtgcggctgaatctgagtaaaggattctgcttcaggctgctggccagcaggtgtctcaggagcaggctggtggagggcagctatggagagacattagctctgcctgcacttacagcctgaggaccaagcaggctctggaggcagagaaaggcctcagcaaagaagggcaggtcgacctgcaaggaagagtgagtggagggaatggggcggggcacccacagcctctgctaaggtctcatggcacttagcag

SEQ ID NO: 363664 - DNA, 1118 bp, Homo Sapiens
  misc_feature (295)..(295): n is a, c, g, or t
  misc_feature (298)..(352): n is a, c, g, or t
  misc_feature (549)..(567): n is a, c, g, or t
  misc_feature (744)..(770): n is a, c, g, or t
  misc_feature (838)..(886): n is a, c, g, or t
gcgcctccgagaacagccgcaagcccccttcggcgtcctcggccccggccctggcgcgagagtgcgtggtgtgcgccgagggcgaggtgatggctgcgctggtcccctgcggccacaacctcttctgcatggactgcgccgtccgcatctgcggcaagagcgagcccgagtgtcccgcctgccgcacgccggccacccaggccattcatatcttttcctagagcgcggaccaccacgtggccggggccatctgcgggggccaggggtgggcgccggagacggggcgggacccggngtnnnnnnnnnnnnnnnnnnnnnnnnnnnnnnnnnnnnnnnnnnnnnnnnnnnnnnncggcggccagtgtttacagatgagctttaactgccgcctcaggcgtggagacggagaccccgcagcccggcggcgcctcagcccttcaacgacagtattgagtggtcaggttacaataaaccggagagaaaaggtccgcttgcactttttttagttttcttatttttagacacccctcccctccagggtgatctttnnnnnnnnnnnnnnnnnnncacgacttttccagcgctcagcgttttttcctttcgtccgaagccgttttctgatttgacttttctcgccggccggtctcaggccgcacagacgttccagaggaggagggtgacatttttactccctttttggggctaaccacttatgcttttgtacatcaaccgtgcgcggccggnnnnnnnnnnnnnnnnnnnnnnnnnnncgttccaatcaaatttctaactttctgttaattattaatcccctttttactgcggtttctgttgtcannnnnnnnnnnnnnnnnnnnnnnnnnnnnnnnnnnnnnnnnnnnnnnnnacctcttgtgtatatgtagggcaatttatagggaaatatgtactttatggaataaattttaagaactaaaatatattttattttaaataaagtaatggacctttaatcttacccagctaaattactgattatatatttgctgagctgatttaagggttaaaaaaattgtatcaagagttttattttttgacttcaaagccttcttaataaagcctcttttctacatgtgaaa

SEQ ID NO: 363665 - DNA, 487 bp, Homo Sapiens
  misc_feature (284)..(390): n is a, c, g, or t
gcggccgccgcctgcgcccccctggactccggcgcctccgagaacagccgcaagcccccttcggcgtcctcggccccggccctggcgcgagagtgcgtggtgtgcgccgagggcgaggtgatggctgcgctggtcccctgcggccacaacctcttctgcatggactgcgccgtccgcatctgcggcaagagcgagcccgagtgtcccgcctgccgcacgccggccacccaggccattcatatcttttcctagagcgcggaccaccacgtggccggggccatctnnnnnnnnnnnnnnnnnnnnnnnnnnnnnnnnnnnnnnnnnnnnnnnnnnnnnnnnnnnnnnnnnnnnnnnnnnnnnnnnnnnnnnnnnnnnnnnnnnnnnnnnnnncagtgtttacagatgagctttaactgccgcctcaggcgtggagacggagaccccgcagcccggcggcgcctcagcccttcaacgacagtaatgagtg

SEQ ID NO: 363666 - DNA, 393 bp, Homo Sapiens
ttggcaaccagagagtatttggatgttacacaaaatatttagtttccctttctagcctaaattgggttgtttatagcacccgtctctccatttgagaaaaatggttaggatgctggtgcagggatgaggccttattaaaacagagaaggtacccaaatggtggttcaaacacaggctggctaataagctgtgaggtgacttaccaaaaaacaacaacaacaaaaacccttgaacttctgctttcaacttctactttatgctagattatttggtccaatcttcctggtctaacacctggctacatataacaacaaacatctgcttgaatgtgttggaaaggtaatgattaattgccaggctgatatattaaataaaatggaaatctcaaaagtt

SEQ ID NO: 363667 - DNA, 329 bp, Homo Sapiens
acctggagaccccagggaggcccatggtggagatcatttgtaaggaatggatcatggtctgggtttccaaaactaccctagtacagtgaatgagagaaatctgcctggaaattgtttcagaaccatgtacctttatgctttgtgattgtgaaacattgacttttttgtaaccccaaaatgaaaactgtttagtaaaggggatctattttgtgtgttttgaaacttaggtgcaatgtcccctggaaaaagctaaagaaatgtatatgttcaatgacattttaaaataaaatattatatatatgtatatacgacatattcagcaaaaaaaa

SEQ ID NO: 363668 - DNA, 451 bp, Homo Sapiens
  misc_feature (13)..(13): n is a, c, g, or t
  misc_feature (121)..(121): n is a, c, g, or t
  misc_feature (171)..(182): n is a, c, g, or t
  misc_feature (255)..(271): n is a, c, g, or t
agaaaaatttttnaattcatctcaggtttaagataaattctgcaaacattgattaaaacatgaaaggcacttaaataagcatacgtatctctgaaaacatgaaatgttatgtacatgtgtncaccattgtttggatttagagctttgaattcactaagagtttaaaatgcnnnnnnnnnnnnccatgccaaaacgtttgactgtgaaatatcaacccagaatgctctgggaaaaagttagcaaggcttcaaccgnnnnnnnnnnnnnnnnncaattgcaggctaaaaccatctctattcatatagaacccaaaaagcatgtctccttggacatgccatgtggcctctcggtttcaccaggcatcttgaaacatcgagggcaagtaaaaaagttgttcattcatacctttatcaccaatatcaagtttcttttaaaaattcaacacttcctg

SEQ ID NO: 363669 - DNA, 1474 bp, Homo Sapiens
  misc_feature (584)..(584): n is a, c, g, or t
cgtccccgcccgtcctgccagaggaaggccctggcgacagcctaccgtcgcacacggccaccaacttctccagccccatctcgccgcccagccccctcacgcccaagtacggcagcttcatcagcagggacagctccctgacgggcatcagcgagttcgcctcatcctttggcacggccaacatagacagcgtcctcattgactgcttcacgggcggccacgacagctacctggccatccctggcagcgtccccaggccgcccatcagcgtcagcttcccccgggcccccgacggcttctaccgccaggaccgtggacttctggagggcagagagggtgccctgacctccggctgtgacggggacattctgagggtgggctccttggacacctctaagccgaggtcatcagggattctgaagagacctcagaccttggccatcccggacgcagccggaggagggggtcccgaaaccagcaggagaaggaatgtgaccttcagtcagcaggtggccaatatcctgctcaacggcgtgaagtatgagagcgagctgacgggctccagcgagcgcgcggagcagccntctgtccgtggggcgcctctgctccaccatcctgcaacatgcccaaggcgctacgcaccctctgcgtcaaccacttcctggggtggctctcattcgaggggatgttgctcttctacacagacttcatgggcgaggtggtgtttcagggggaccccaaggccccgcacacatcagaggcgtatcagaagtacaacagcggcgtgaccatgggctgctggggcatgtgtatctacgccttcagtgctgccttctactcagctatcctggagaagctggaggagttcctcagcgtccgcaccctctacttcatcgcctatctcgccttcggcctggggaccgggcttgccaccctctccaggaacctctacgtggtcctgtcgctctgcataacctacgggattttattttccaccctgtgcaccttgccttactcgctgctctgcgattactatcagagtaagaagtttgcagggtccagtgcggacggcacccggcggggcatgggcgtggacatctctctgctgagctgccagtacttcctggctcagattctggtctccctggtcctggggcccctgacctcggccgtgggcagtgccaacggggtgatgtacttctccagcctcgtgtccttcctgggctgcctgtactcctccctgtttgtcatttatgaaattcctcccagcgacgctgcagacgaggagcaccggcccctcctgctgaacgtctgacatcgcggagcctcgactccggacacgcgcctgcacctgggggtctggagcaggccgaccagtgaggaccaaagggccttgttggacagggggacaggctgcctactggaatgtaaatatgtgataaaataataaatgacaagcgaaagccaaaaaaaa

SEQ ID NO: 363670 - DNA, 406 bp, Homo Sapiens
gcggccgctgtggaagtcctacagccgctgcacggacggcatcatctacgtggtggactcggtggacgtggaccggctggaggaggccaagacggagctgcacaaggtgaccaagttcgccgagaaccagggcacgccgctgctggtcatcgccaacaagcaggacctgcccaagtcgctgccggtggcagagattgagaagcagctggcgctccacgagcttatcccggccaccacctatcacgtccagccggcgtgcgccatcatcggcgagggcctcaccgagggcatggacaagctctatgagatgatcctgaaacgcaggaagtccctcaagcagaagaagaagcggtaatgcgcccggagcgaaccggggagcgagcgagtgcgtcaagaaagaatgaat

SEQ ID NO: 363671 - DNA, 1540 bp, Homo Sapiens
  misc_feature (26)..(26): n is a, c, g, or t
  misc_feature (989)..(1030): n is a, c, g, or t
  misc_feature (1384)..(1396): n is a, c, g, or t
ccgggaaaaggactggatgattatgngcccctgttatattcccagtgttgtgaccaaatgtgtaaacctagccgggggaagaccagtatggtacccataaatgagatgcgtagtttgttttctttcatgggaagtagagataaaaatatatacatttctctaattgagttgtttagagaaagaactaatgtctcatatgatgtatttacttattttaaaaaacaagaataggaatgagatgtccctgagctgtacttttctattattataaggcctttaggcatcagtgcatctgggttatcaacattttctcaaatgctgtcaatattttactgtaatttatgttcttatatttatgtatatttgttaaaactgtaaaaaaatttcacagatttttttccaatacctgtgcaagatacatgtgtagctcaaaactatttgtgatctactgtttgcatgtaagagaccaggatatgtaactcttatattttaagtgtatacatattgtgtatataacatatggatattaaaaatggggaattgcacattttaccttttggacagtaatttctatcacagttagaaggaaatgatagtcaaatacacgtttagattaaaactagtttaaaaaattataaatgaatctaatcaaaaggtgaatagtagtcaaaaggataatttaataagcattttacgttactaaattttgttcatttcaatattaactaaatttccctcatcaaagcaatctttgtgatattacttcgctattaaataaagaaaattggatgcaagacaatggagaaactgtaaaactaaacaggaccaccctttattcttaaatttgtgtgtgtccaacagttgaattgaatgtctataaggtctaaaggtagaatgtgaatattgccacagagttcattgctctcagtataagattttactttattaatgcagaaggaatatggatatatttctttaagtctgcagannnnnnnnnnnnnnnnnnnnnnnnnnnnnnnnnnnnnnnnnnaattatacagttgaaaaatatgccatttcataaagtctgaggattttcgtcaaccttactgaaacacactggtgctttcatcatcagaggtcaaattattatgataactattccattaagtttgccaaacatttgtcgtggttaccagtgcagcctgtcaaattctgctatttgacacagctttggaaagatttagttcttggtttttccgttttgtattagaatgactgttacagttttatttggctgtttaaagccaaattcagctatttaattatggtttcatggacactgttgagcaatgtacagtgtatggtgtgcttacctgtccactctagagcattgcttacaggnnnnnnnnnnnnnaagatgctgtgctgtaaaatactgtcatacttgctatttcctggtacagtgtagtttttcccctttcatttgaataaaagcatggcaccaaatgactccttttctgtttcttgaataaaatgtagtttttggtaaaattatttg

SEQ ID NO: 363672 - DNA, 477 bp, Homo Sapiens
tcatcgtgaaaatcatcggacatttctatgccagtcagatggctcaacggaagatccgagacatcctggcccaggttaagcagcagcatcagaagggacagagtaaccaggcccaggcacggaggaagtgaccagcccctccctgtcccttcgagtccaggacaacaacgggcagaaatcgagagtgtgctctccccggcaggcctgagaatgagtgggaatccgggacacctgggccgggctgtagatcaggtttgcccacttgattgagaaagatgttccagtgaggaaccctgatctctcagccccaaacacccacccaattggcccaacactgtctgccctcggggtgtcagaaattctagcgcaaggcacttttaaacgtggattgtttaaagaagctctccaggccccaccaagagggtggatcacacctcagtgggaagaaaaataaaatttccttcaggttttaaaaac

SEQ ID NO: 363673 - DNA, 587 bp, Homo Sapiens
  misc_feature (492)..(543): n is a, c, g, or t
cccccagatagccccgggaatacactgaacagctcaccacccctggctcccggggagttcgatccaacatcgacgtctatggaattaagtgccatgaaaactcgcctaggaaggaggtgtacttcatggcaattattgacatccttactcattatgatgcaaaaaagaaagctgcccatgctgcaaaaactgttaaacatggcgctggcgcggagatctccaccgtgaacccagaacagtattcaaagcgctttttggacttattggccacatcttgacgtaacctcctgcgcagcctcggacagacatgaacattggagggacagaggtggcttcggtgtaggaaaaatgaaaaccaaactcagtgaagtactcatcttgcaggaagcaaacctccttgtttacatcttcaggccaagatgactgatttgggggctactcgctttacagctacctgattttcccagcatcgttctagctatttctgacttnnnnnnnnnnnnnnnnnnnnnnnnnnnnnnnnnnnnnnnnnnnnnnnnnnnncattttaaaagtcataaattaattaaaacagatccacttcggtc

SEQ ID NO: 363674 - DNA, 579 bp, Homo Sapiens
  misc_feature (184)..(184): n is a, c, g, or t
cagaggcatgtccatttgtcattgatatctatgcagaaaaatgcaagccaaaaattaaagctgtccatatggaggcatgtagtggacaacttgagaaggccatttgtaaatctgttcttagcaacggtgatgccaaagtaatggatggctatgaaaatataatcgtgcatacttacagttgtgnacacccggataacgtcagttattgaaaacaagtccagatgagaaagtgattattcacatcagcaatgagcctaagtaaaaactgccataaacaacagaggactcaacatatttgccagtagaagtgggacccaaatctacaatggtttgtcaacatgtaatgcctttgaatgaacgacaagaatggatatattattgtatataatctcttatttcttaaataattatacttagaacttaccaaactaagaattatttcagatttagtctgttatttattaaacaactaaatgctacttaactgatgtacctaaataataatctattcaatttatatgcattttcattttatgtccatggtatgtactttattattaaaatataaataatgctttc

SEQ ID NO: 363675 - DNA, 433 bp, Homo Sapiens
cccctcctctggggaggctctgggactggagcaactgggactctcctggctgctgaccccggagccaggctctctgcttgtcctgcactacctcgccacgtctgcacaggggcttgacaagcgctactgtctccgggctacagaggacactggagctcagagctggacaaccggcctaggctcaggccgcacacggcgcagcaggccgtctgccgcactctgggggaggtcaccctggggctgctgacctgctctgtccctcgccccagcaccgtggcaatctaacaggaaggggcagggccagctccctctggaactcgggcagcgtcaaagataaggtgtcttcaaaaagctcatgcaaaacgtgcgttgtgacgaaacttgcatggctttcaagtttttttgccccaaaataaactgatactaacttgtc

SEQ ID NO: 363676 - DNA, 1287 bp, Homo Sapiens
  misc_feature (1125)..(1138): n is a, c, g, or t
  misc_feature (1162)..(1215): n is a, c, g, or t
ctgatatttgcaatgactattctccaagtgaccaatctccaagagatcaacggactagtaaaaaaactcagaatatgtactaaacggtgggtacatgaccctcagcctaggccaagcgaacaatagcactcctggtgctagcccactcttctgatgtgctagagaatgtcttctcctctctgccaaatgccaagtatgatgtgccaatgaatcgagccaaggacttagtagaactggcccctgaagtggaagggacaaagcctagtgccacagaaatgatctgggctgtgctggcagccttcaataaatcttaaagccggcaggtggatttctccttttcccctgctggctggtgactgtcagagaccccatcactgagttttgtgtgatgagatgttttcatcatgtttgcttccttttcttaatccagacttgtgatttggggagagcaacttcagggcttctccatagaccttgaccattataagcagaccttatttctccctacacttccactccataggtaaataaactgggtgaagccacacacacccaatgaacattttctcccatttggtggtttagtttcacccagtgtgcttttggataagcagaaatatctaaatgggattttgagttctccagctatagaatgtgaatgagataaaaagtgaactatctattatatttttctgagtttgttttctatcataaatacatgttttcacagcctttgtctctcagactctgctaaataatgtagcttattgaaataactgtcgctgaataaggagcaatgagaaacaaaactaatttttggagcagatggtctctggaattgcatatcctgctagtgattttctcatctttccttttctaacctaatgagaatgtcccagattcaattacctggatgtcaaagtcctagagccagaaatatattctctcatccctcttagcattctcttgctccctcattcactagggcaaatgtctaaatgaagaaaagtctctctcaacacctcgttcatgcaatcagcattagaatttgtaaggaaggaaggggggtggcatgaaaatttccattcttggggtatatgactgtcctgtttcccccaggccacnnnnnnnnnnnnnncttttgagacagggtcttgctctnnnnnnnnnnnnnnnnnnnnnnnnnnnnnnnnnnnnnnnnnnnnnnnnnnnnnnaggggctcaaagatcctcctgcctcagtctcccaactaaatgggactacaggcacgtggccacatactcagc

SEQ ID NO: 363677 - DNA, 1676 bp, Homo Sapiens
  misc_feature (549)..(580): n is a, c, g, or t
  misc_feature (1025)..(1041): n is a, c, g, or t
  misc_feature (1307)..(1324): n is a, c, g, or t
tcggtacccgatggtatccatgtggtgagtggatctcttgatacatcaatccgtgtttgggatgtggagacagggaattgcattcacacgttaacagggcaccagtcgttaacaagtggaatggaactcaaagacaatattcttgtctctgggaatgcagattctacagttaaaatctgggatatcaaaacaggacagtgtttacaaacattgcaaggtcccaacaagcatcagagtgctgtgacctgtttacagttcaacaagaactttgtaattaccagctcagatgatggaactgtaaaactatgggacttgaaaacgggtgaatttattcgaaacctagtcacattggagagtggggggagtgggggagttgtgtggcggatcagagcctcaaacacaaagctggtgtgtgcagttgggagtcggaatgggactgaagaaaccaagctgctggtgctggactttgatgtggacatgaagtgaagagcagaaaagatgaatttgtccaattgtgtagacgatatactccctgcccttccccctgcnnnnnnnnnnnnnnnnnnnnnnnnnnnnnnnntcccttgttctcagtggtgcaggatgttggcttggggcaacagattgaaaagacctacagactaagaaggaaaagaagaagagatgacaaaccataactgacaagagaggcgtctgctgtctcatcacataaaaggcttcacttttgactgagggcagctttgcaaaatgagactttctaaatcaaaccaggtgcaattatttctttattttcttctccagtggtcattgggcagtgttaatgctgaaacatcattacagattctgctagcctgttcttttaccactgacagctagacacctagaaaggaactgcaataatatcaaaacaagtactggttgactttctaattagagagcatctgcaacaaaaagtcatttttctggagtggaaaagcttaaaaaaattactgtgaattgtttttgtacagttatcatgaaaagcnnnnnnnnnnnnnnnnngccaaccattgccaatgtcaatcaatcacagtattagcctctgttaatctatttactgttgcttccatatacattcttcaatgcatatgttgctcaaaggtggcaagttgtcctgggttctgtgagtcctgagatggatttaattcttgatgctggtgctagaagtaggtcttcaaatatgggattgttgtcccaaccctgtactgtactcccagtggccaaacttatttatgctgctaaatgaaagaaagaaaaaagcaaattannnnnnnnnnnnnnnnnnctgctgtgacgttttagtcccagactgaattccaaatttgctctagtttggttatggaaaaaaagactttttgccactgaaacttgagccatctgtgcctctaagaggctgagaatggaagagtttcagataataaagagtgaagtttgcctgcaagtaaagaattgagagtgtgtgcaaagcttattttcttttatctgggcaaaaattaaaacacattccttggaacagagctattacttgcctggtctgtggaaaaactttttctttttgagggctggggtgaatggaatgaacgtacatccgtaaaaatgacaaaatatttttaaaaatttttttaaacccccaattt

SEQ ID NO: 363678 - DNA, 434 bp, Homo Sapiens
tccttgtcctccgggaaatgccagattccctacagttaaaaatcctgggaatatccaaaaacaggaccagtgttttaccaaaacattgccaaggtccccccaacaagcatccagagtgcctgtgaccctgtttaacagttccaacaagaactttgtaattacccagcctcagatgatggaactgtaaaactatgggacttgaaaacgggtgaatttattcgaaacctagtcacattggagagtggggggagtgggggagttgtgtggcggatcagagcctcaaacacaaagctggtgtgtgcagttgggagtcggaatgggactgaagaaaccaagctgctggtgctggactttgatgtggacatgaagtgaagagcagaaaagatgaatttgtccaattgtgtagacgatatactccctgcccttccccctgc

SEQ ID NO: 363679 - DNA, 578 bp, Homo Sapiens
gcggccgcgctatggacccctgaccccgtggggtcgctcggactcttaacgtgtggactgaccgctactgactgcaccgccaatccccccgtctctgccggccccttagcatgagcgagggggacccagccgggtgacattgtgcccgttggcggattctcgatttcccctcttccccgtcctcgtcctcctcctcccccatgaagtgattctgagtatcggggggtctctggattattgttctgacgaacccctgcttgtggttggggggtatttaatctgaagcccttagggtccttcggtgtctttgagtgttttgtgtgtacatattttgctcttaaagtttataaatatacgtatattgagagtgtccacgtctcctcgctgaaccttatgaatcccttggcaccatgtcctgtgtgcattataaattttcctctaaactcaactatgataccgtcacctttgatgggctccacatctccctttgcgacttaaagaagcagattatggtgagagagaagctgaaagctgccgactgcgacctgtatatcaccaatgcgcagactaaagatgat

SEQ ID NO: 363680 - DNA, 957 bp, Homo Sapiens
ggggtccgttgatgggaggcctcgtccaacaccgtgagggaggcagaggtagtcagagacgccaggcgggcagagcctcagcccagtcagctgcccgacgccgcacctcacgggggtcctgggagctgtagcccaagggttccgtggatgggtggggactcccgtgggactggccataggcgtgaccaaccaggctctgctggtgggactgtggggagtggtgctcccggcagccctgggcctcagcccgggcgttccgggacaccgaggcaggggggctgctcaaaagccctccgtgccacgacgccgctgatcccaggagtcatacagcatccagcccactgaggggtaagggctgtgccccacggggacccaagaggggttagggggcagccggtggggaggtggtggagacgaggcccactgctcagcctccacattgccccacagtcgggattgggaaccgtggcgcccataggactgcagcctcagctcagacctggcctctacacgcttgggcatgcagcgcagctcaggtgacaggtagagagagggtggtggcagactggccaggataccacctggtggccccacagccccacattggagggcaggcccgctctctgataaaacccgccccagccgcgacgtgggtacttgggatacgggaagggcaggttgtcctcctcctccaggtaggaatccgggtcctcttttctgagtagcccaatcaatcatcttgtctaaggcgttctggagtccatgccacatcatagttgccacgttgatgccaatgttgacaagaacgatgaggcccagcagcaggagtaagatgtcctcggcatcgtgggggctttcttggtattgattgcaacatctcacggtgttatgccatagctggttttccatggagggggggtcctagggccacctgggccacccccctctgccccccac

SEQ ID NO: 363681 - DNA, 671 bp, Homo Sapiens
  misc_feature (367)..(367): n is a, c, g, or t
  misc_feature (370)..(370): n is a, c, g, or t
  misc_feature (372)..(373): n is a, c, g, or t
  misc_feature (517)..(525): n is a, c, g, or t
  misc_feature (529)..(540): n is a, c, g, or t
  misc_feature (590)..(625): n is a, c, g, or t
gctggtaccggtccggaattccgggatatcgtcgacccacgcgtcggcagagcctggactcaggatgacttggaactagggcttggctctcagaagtcctggattttggaaactccaaatggaatcacccttcagagacatccctggtgcctggagatgggaatgtggcctcagtgcctctgagtaggtgccatgaggcacctttgctttctgcccagagtggccatgagcaccagaacagatgatctccatttccgccagctgcctgtagccacgtggcatcctgcctgtggtctgggtgagatttactgtgaccagatgtagaataaatgtgtctcatcctgccgacgaccggctcaacaagganatnanngcttgtcggccggctccgcccttcaaaaacttttcaaaaccattccgttggggccccgggcccccaaaagggaaaggggaaaatggggcaaaactttgtttcccaaagaaaaacccggggcaaagaaaaaaggggcgggggttnnnnnnnnncacnnnnnnnnnnnncccccgggggggaaaccccaaagggttttttggagaaaaattcccccaannnnnnnnnnnnnnnnnnnnnnnnnnnnnnnnnnnncgcccctccaaaaagggaggaggtcccccccgcgcgcctccaaaat

SEQ ID NO: 363682 - DNA, 1003 bp, Homo Sapiens
cgtctcacaacttaatacaaccaaaaacccacaacaccgtactggttggtaccggtccggaattcccgggatacgagccccgcccgagctcaccgcccctgctcccctctccgaccctttgagccgtggccgttgccagatgtccacaatgggaaacgaggccagttacccggcggagatgtgctcccactttgacaatgatgaaattaaaaggctgggcaggaggtttaagaagttggacttggacaaatcagggtctctgagcgtggaggagttcatgtccctgccggagctgcgccacaacccgttggtgcggcgagtgatcgacgtcttcgacaccgacggtgatggagaagtggacttcaaggaattcatcctggggacctcccagttcagcgtcaagggcgacgaggagcagaagttgaggtttgcgttcagcatttacgacatggataaagatggctacatttccaacggggagctcttccaggtgctgaagatgatggtgggcaacaacctgacggactggcagctccagcagctggtcgacaaaaccatcatcatcctggacaaggatggcgatgggaagatatcctttgaggaattcagtgctgtggtcagagacctggagatccacaagaagctggtcctcatcgtatgagcctttttcttacaagcaccacccaacaacttctgctttcttccctatctctttcaagatttgctcaagacgtccaactgtctctctgacttatctggaagtatttctttttgtgaagccatatgtcctaacaggagcttcatcaccaactcagtgctattaattctccttctctgaatgactcagggtaccctatagggggaagaacaagtcaaatgagcatagtggggaaagaaaaggaaatggcttttataaacatcttttactttgttctcattcaaagaccaaactagaactttaaaagttcaaaaataagaaagtataccattttggctgcttaag

SEQ ID NO: 363683 - DNA, 1459 bp, Homo Sapiens
  misc_feature (88)..(182): n is a, c, g, or t
  misc_feature (687)..(687): n is a, c, g, or t
  misc_feature (1280)..(1310): n is a, c, g, or t
gcggccgcacagcctcttcaggcctggcagcaggtacatgtcggcgacgctcagcacatcataggctgcctcgggggacagctgggtnnnnnnnnnnnnnnnnnnnnnnnnnnnnnnnnnnnnnnnnnnnnnnnnnnnnnnnnnnnnnnnnnnnnnnnnnnnnnnnnnnnnnnnnnnnnnnngcgggggctgtcagaatggtggcacagggagcaagctgcagacagagacaaggggagctctgcgaccacattacaagccacgtgccatgtgccatgccacctcctttacctgggtaacccatgcatctgcacaaggccttaggaagtgacgacgagagctatccccatgttctagaggcacagagcagttaagtaactggcccaagatcacaaagctcacccagtgtcacacagctcaaccagtatcaacccaggttaagagcccaagccacactctgagacaaggtgcccttggggtggcgaggctccttgaagagggagcttctccagggtgggcaaaggtaacccctgctacaggggccagagagctgggctgagctgcaggagatgcccagtagagggggtgggaaagatggaggctgaggggctgtcaggccgcgcggagggatggacaagggagctgccactggagatagagcagcagtagggactgccctctgtctcncagcatgcttcctccccttcccccacaaaacagggccctggccacagaatgacttcccaagcctcccttggtggcaggtaagcacgaagttctctccaggggaacatgagaagtggtgcaatgtccggtggcttctacaaaaacagcattgcttgccctgccttcctcttcctcctagagcatgagtttgcctaggacccaatctccatggccaaacgcgatgccccaggcaggatgggtaagctacggcctgtggaccaaatccagcctgtttgtgcaagtaaagttttattggaatgcagcctcacccacgtcatctctgtactgtctctggctaccttttgcgctacagagttgagtagctacaacagggccatatggcccacagaacctgaaacactcaccttcagagaaaaggtttttgaccttcacccttaggcatacaggggcaagatggagggatgacctgatcttccgcaagccacttgccctggggcacccacctcagtcagaagtgaaggagaaacaaactcccctcttctttaagccaccagatatggggattgctttatagtgcgcgcgcacgcgcacgnnnnnnnnnnnnnnnnnnnnnnnnnnnnnnncctggcagagcaaaccttcagcactctgctgctgccctgcagccttggcttacggacaccttggggcagctggagacagaggcaggcagcaagggaagaggagactgggaacccagaaccccagggatctgcagcaccacagagaggag

SEQ ID NO: 363684 - DNA, 1731 bp, Homo Sapiens
ttgggggctggcttgtgcattggggggagggggctcatcccaaatggatcctcccctggggtctccaggctcatggagggaagagaagccccactgagcccctcgcaccccccatgaagccctcaatgtgcagggagcaggaagaagagctgcacacaaacgcatacacatgcttgtctccaagagagctcctggcccctggggctgcccagccaggggctcaacagtccagaccgatggacacgagcaggtcctcgagtgcccgcagacgctgctgcgcctcctctatggcgctgtaggtctgcaccgtgctggccacgtggaagcggatgtcgtccaccagcgggatagagtccgtctcctgccgggctgccacagccgctgcctcctccttcaccgcctccacgaagtcctcccgctccaccagcttctcaatgaccttggccatgtactcagtgcactggtcctcaagccgcgccaggcggaagagcttggccacgcgccacacacccaccacagtgtcctcgtctagcatctgagccaggctgcggccgcacagcctcttcaggcctggcagcaggtacatgtcggcgacgctcagcacatcataggctgcctcgggggacagctcagtgtggtcgctgtacatgtagtagagcacgtgagtgaagacgtcgggtgagatgccatgcagggtgacggctggggggccccctgaggtcgctggctcctcgctctctcggaagtggtcatccagcagggctcggaagtagtcactgcggccacagaaaaaggccttgtggcagaggaagctgcagccagccactcggaagcagatgtcagggcagctgttgaagccgtcaggacaagggaagggcagctcccaaagatcacctcggagctcggggggcagggcacaatcggccagcagcgccatgtcctcccggaggcgggggtctgcaggtgggggctcgatggtcagcaccttcacacacgtgcctggcttagacgccacaaactcagacaccttctcgcacttggcctccaggtcgctgagcaggtcccacagctggcattgcttggccaggcgctcacagtcactcacatgctctacgccaatgtccaggcggcctgtgtacaggtactgcagcagggccccaaaggccacggggttgatcagtgggtgcctgagaaccacgacactcttgcccttccatttggtgtccagcatgttggcaaagtaggcactacgtgcacccaggacgcagcgatgcacccggaatggcttcccgtgtactacaaagaccacgtcactgtggatgccctgctctagaagccgctgcaagaagtcgtcatagtaatcccgcctcctgcaggaagccgtgacctgcttgtaatcgcgtagagcccggcggatggggtcactcagtgccccatagaggcagcgctcaccatcgaaggtgttggcctcgcagcgggctccattggccagaaggtagagtaccagctcctcgtgcccacacaagcaggcatagtacctccacgtctcgctgctccagcaggtacctgggcaggaaggaggtcagagcctgggtcaggacgggttcatggtcgcactcggcccacatcccccttcctgcagctggcgaacaggtcgctggtgtccatggcgcggaggatggtacccgagccgaacgacctcgggcggcgaagccgcatcccgggaattcc

SEQ ID NO: 363685 - DNA, 790 bp, Homo Sapiens
  misc_feature (88)..(88): n is a, c, g, or t
  misc_feature (603)..(603): n is a, c, g, or t
gccccagggaacagatgggagggcctcagcatgtggttgggacaagctcttcctgagcaggcacactagtcctctctcttgcaacccnacccgagaggcagctggaaccaccccggggggaccatgaagtgtctagaggtgaaaggtcagcccagccacacctaggtgtactgctgtccagaaggacggcccactccctctcctcctaccctggacccagggggtcacctgtgtacaggtactgcagcagggccccaaaggccacggggttgatcagtgggtgcctgagaaccacgacactcttgcccttccatttggtgtccagcatgttggcaaagtaggcactacgtgcacccaggacgcagcgatgcacccggaaatggcttcccgtgtactacaaagaccacgtcactgtggatgccctgctctaagaagccgctgcaagaagtcgtcatagtaatcccgcctcctgcaggaagccgtgacctgcttgtaatcgcgtagagcccggcggatggggtcactcagtgccccatagaggcagcgctcaccatcgaaggtgttggcctcgcagcgggctccattggccagaaggtagagtanccagctcctcgtgcccacacaagcaggcatagtacaagggggtgctgtcccacttgtcccgcacattcacctccacgtctcgctgctccagcaggtaccgcactcggcccacatcccccttcctgcagctggcgaacaggtcgctggtgtccatggcgcggaggatggtacccgagccgaacgacct

SEQ ID NO: 363686 - DNA, 654 bp, Homo Sapiens
tataaatagctttattatgttgggtacataccatctgtctttgaaagcattgaaactttggtaaacttttcttttaggtatttgacaccgaaatctcagtttgggtcagcctcacactctgaagctgtacaagaagtcaggaaagactccgtatctaaggtatgttgatactgaagatgttctgagttttgctggttcattaatgctgtagattagtgctatccatagttttctaccttttaacaaaaagcccctatagttaatcaaacaccctgtctgagtcctcttaggctcacctagagaaaaagcactttttctccaaaggaaactacaattttttaaataaatatactacaaaaagcaaagtttttctctaagagagtgaatattttcgcctttgcagttagtgtgatctgtgtcacagcttctcagctacgctggtgtagtgtgaaagcatctatagataatatgtaaacacatcagcttgaatgcattccagtaaaactttgtttacaaaaacaggcaggaggctggatttggtccatgagccatagattactgatccttgacctatgtaatccaaactcacaaaactgaataggttatacctggcaccagcttcacttagaatgttacaagatggagctgaatgcg

SEQ ID NO: 363687 - DNA, 1327 bp, Homo Sapiens
  misc_feature (780)..(780): n is a, c, g, or t
  misc_feature (817)..(817): n is a, c, g, or t
  misc_feature (891)..(934): n is a, c, g, or t
tacaggtcatcccctagtgacttctgagcacaccagaaggagacacatccaggtagcaaaccatgtgatttcttctgactctatttcctcttctgccagtagtttcctgagctcaaactctactttttgcaacaagcagaatgtacacatgttaaacaagggcatacaagcaggtaacttggagattgtgaacggtgccaaaaaacacactcgagatgttgggataactttcccaactccaagttccagcgaggctaaattggaagagaacagtgatgtgacttcttgggtcagaagaaaaacgtgaaggagaaaatgctctttaccggttatcctgaggacagaaagttaaaaaagaacaagaagaattcccatgaaggagtttcctggtttgttcctgtggaaaatgtggagtctagatcaaagaaggaaaacgtgcctaacacttgtggccctggcatctcctggtttgaaccaataaccaagaccagaccctggagggagccactgcgggagcagaactgtcaggggcagcacctggacggtcggggctacctggcaggcccaggcagagaggctggcagagacctactgaagccatttgtgagagcaacccttcaggaatcgcttcagtttcacagacctgacttcatctcccgctctggggagcggataaagcgcctgaagttaatagtccaggagaggaagctgcagagcatgttacagaccgagcgggatgcactattcaacattgacagggaacggccagggccaccaganatcgcatgtgcccgctgcccaagagagtcttcctggnctatccagaagaacaagcctatcagcaagaaggaaatgattcagaggtccaaacggatttatgagcagcttccnnnnnnnnnnnnnnnnnnnnnnnnnnnnnnnnnnnnnnnnnnnnataagtcataccggctgcgagcccagctatataaaaagagagtgaccaatcaacttctggggagaaaagttccctgggactgacacaagtttattttcctcagagccttggaattctattttatgaacctagagaagcagaatccttacttttgtgagtctggttgaataaagcttattctttgtccatgtgtattttagaaatagtaacttctaaagagtctggaacaaagtggtgattaaaattcctaatggtttgggagcaatactttctgcatagtggccttgtccaatggcctgtgtgttacaatgatatgatcatttctcaagaataagtccctttttgtatgtgtttttatacttttagaaaataaaaactttagattaaaaaaaa

SEQ ID NO: 363688 - DNA, 873 bp, Homo Sapiens
  misc_feature (684)..(693): n is a, c, g, or t
ataaccagcggagagcctgtgtgccatgggaaggcatgactcctccatggggtgaaagaattgttaatgttacacagagcacggatcacagatgttgagcacatcactggactcagcttctatcaacaaagaaaagagccagtttcagacattttaaagttgaaaacacatttgccaacctttagccaagaagactgatatgttttttatccccaaacaccatgaatctttttgagagaaccttatattttatatagtcctctagctacactattgcattgttcagaaactgtcgaccagagttagaacggagccctcggtgatgcggacatctcagggaaacttgcgtactcagcacagcagtggagagtgttcctgttgaatcttgcacatatttgaatgtgtaagcattgtatacattgatcaagttcgggggaataaagacagaccacacctaaaactgcctttctgcttctcttaaaggagaagtagctgtgaacattgtctggataccagatatttgaatctttcttactattggtaataaaccttgatggcattgggcaaacagtagacttatagtagggttggggtagcccatgttatgtgactatctttatgagaattttaaagtggttctggatatctttcaacttggagtttcatttcttttcattgtaatcnnnnnnnnnnttaacagaagccaaaatacttctgagaccttgtttcaatctttgctgtatatcccctcaaaatccaagttattaatcttatgtgttttctttttaattttttgattggatcttctttagatttaatggttcaaatgagttcaactttgagggacgatctttgaatatacttacctattat

SEQ ID NO: 363689 - DNA, 1479 bp, Homo Sapiens
  misc_feature (434)..(442): n is a, c, g, or t
  misc_feature (587)..(646): n is a, c, g, or t
  misc_feature (817)..(902): n is a, c, g, or t
  misc_feature (941)..(958): n is a, c, g, or t
  misc_feature (1003)..(1003): n is a, c, g, or t
  misc_feature (1012)..(1020): n is a, c, g, or t
  misc_feature (1175)..(1197): n is a, c, g, or t
  misc_feature (1219)..(1219): n is a, c, g, or t
  misc_feature (1277)..(1277): n is a, c, g, or t
ttggacttatcgtacaatgacattcgatttatcccccctgaaattggagttctacaaagtttacagtatttttccatcacatgtaacaaagtggaaagccttccagatgaactctacttctgcaagaaacttaaaactctgaagattggaaaaaacagcctatctgtactttcaccgaaaattggaaatttgctatttctttcctacttagatgtaaaaggtaatcactttgaaatcctccctcctgaactgggtgactgtcgggctctgaagcgagctggtttagttgtagaagatgctctgtttgaaactctgccttctgacgtccgggagcaaatgaaaacagaataacttatttttcgttaaagtttgactgaaacacgcttctaccaaatacagtataaataattaggtagtcttaatgcctttcctannnnnnnnnccttttcacacaaaatgtacacaaagatcgcgtaaggagtatgtatttttaataaaaatttaattgtattttttcaatattacccaaaaaacaacaacgaccactacaagcccgcaaacgtgtcgtgccctcctccactgtcgtnnnnnnnnnnnnnnnnnnnnnnnnnnnnnnnnnnnnnnnnnnnnnnnnnnnnnnnnnnnntctccacggctaccccgttttcactccccttcatatcccttctctgattcacaccacgtctatttcccccccttttttcttacacgccttctagcccacgtctgggatcttttaaaccatccctccccaccccaatcgggcacccatttttcacttcctctgccttacttnnnnnnnnnnnnnnnnnnnnnnnnnnnnnnnnnnnnnnnnnnnnnnnnnnnnnnnnnnnnnnnnnnnnnnnnnnnnnnnnnnnnnntctatttcttatttcccttatacgccccgccattctctnnnnnnnnnnnnnnnnnngccctattatttaccgccgcttatatatattgccgctcgcccgtnttcacaccnnnnnnnnnatcagcgcccccctcgctctcgcgcttcaccttttccactacaacacctcccctgtcggcggtgcgcgccacgccgcctctctatcccctatatctctccgcaccccctgtctgtgccgcttgtataccgatcctgctatattataatccctcgnnnnnnnnnnnnnnnnnnnnnnnagtccacggagcataatatcgnatatcaacaccccccgccccacccggtttagtgagactaactgacaatatcccacctntccctccacttatccgccaccccctttatttctccccgtttctagcctatacaaaatacaaatacacctgcccgcgaatatgtgccccccaccattcgcctccctctttttaccgctcaccgctctctacccccacattaaatatgtccgcgcgcacgcccccgtttgttttattctccacgccccctgatcctatttattc

SEQ ID NO: 363690 - DNA, 909 bp, Homo Sapiens
agcggggggaccgcctacgggctctgccataggcggtgcaggcggacggggcgcggcgggggacacggcggccgccgcggggctcgatcgggcaacggcggcgacggcggcagcgacggatcctcctcctcccttattcccttgctcctctttcttccttttcttttcctttccggccgggcctcgtccactttccctaacggcggcctcgatcctacgtaaaggcatgacttcctggcaccacagggaaaatcgggtgcaagcccagaaactatttccccaccaccacttgttgaaaaactgatttgaaggcatctccggggttgaacaaacggaaagtgccaggatttgatgcgtctctggtttcgctctggagaccattccctgctaagtatcaagacgaaaaaaactggaaactaatccgaaccatatttatttagagtcagaatggagcgatttgtagtaacagcaccacctgctcgaaaccgttctaagactgctttgtatgtgactcccctggatcgagtcactgagtttggaggtgagctgcatgaagatggaggaaaactcttctgcacttcttgcaatgtggttctgaatcatgttcgcaagtctgccattagtgaccacctcaagtcaaagactcataccaagaggaaggcagaatttgaagagcagaatgtgagaaagaagcagaggcccctaactgcatctcttcagtgcaacagtactgcgcaaacagagaaagtcagtgttatccaggacttttgggaaaatgtggccgggaagccaacatcccaccttgaggaaggctggatccccccacaaggtccgtggctttcctatctccgccatgtggaagaatgggagggcctcacttactctaaggtcagaaccaaacttccgggg

SEQ ID NO: 363691 - DNA, 1341 bp, Homo Sapiens
  misc_feature (44)..(52): n is a, c, g, or t
ataggctaatatgggtgacaactaatagaacaccgttggttttnnnnnnnnngcaggtggtacggtccggaattcccgggatatcgtcgacccacggcgtccgggagcaggccttcgagcgcattagcgccaacggccaccagaagcaggtggagaagagtcagaacaaagccaggcagtgcaaggactcggccaccgaggcagagcgggtatacaggcagagcattgcgcagctggagaaggtccgggctgagtgggagcaggagcaccggaccacctgtgaggcctttcagctgcaagagtttgaccggctgaccattctccgcaacgccctgtgggtgcacagcaaccagctctccatgcagtgtgtcaaggatgatgagctctacgaggaagtgcggctgacgctggaaggctgcagcatagacgccgacatcgacagtttcatccaggccaagagcacgggcacagagccccccgctccggtgccctaccagaactattacgatcgggaggtcaccccgctgaccagcagccctggcatacagccgtcctgcggcatgataaagaggttctctggactgctgcacggaagtcccaagaccacttcgttggcagcttctgctgcgtccacagagaccctgacccccacccccgagcggaatgagggtgtctacacagccatcgcagtgcaggagatacagggaaacccggcctcaccagcccaggagtaccgggcgctctacgattatacagcgcagaacccagatgagctggacctgtccgcgggagacatcctggaggtgatcctggaagggaaggatggctggtggactgtggagaggaacgggcagcgtggcttcgtccctggttcctacctggagaagctttgaggaagggccaggagccccttcggacctgccctgccagtggagccagcagtgcccccagcactgtccccaccttgatagggcccagaaccaagcgtcccccagccccgagagggagcctgtcgtctcccagggaataaaggagtgcgttctgttcttggtgtgctggggtcccgttctctttttctcctgctccagtgtccgagtgctcagattcagaggaggcaaaggaagaagggaaggagcctggatgtggagctccccaactcagccgaggcttcagcgatagttggagaagaggcctggccccagttgctaggagctcccagactgccaaggagacacattcacacctgagaacaagagaacacaggggtgcaggaggactgtggcaggggcaagaaggggctcagcaggagcatgcaacctgtcagacagtctgcggatcctc

SEQ ID NO: 363692 - DNA, 375 bp, Homo Sapiens
ccactggcagggcaggtccgaaggggctcctggcccttcctcaaagcttctccaggtaggaaccagggacgaagccacgctgcccgttcctctccacagtccaccagccatcctccccttccaggatcacctccaggatgtctcccgcggacaggtccagctcatctgggttctggccaagagattgaaagcgcatgacgttggaagggcctgcagggaagggcctgcagggaggggcctggcgttcccccacccagcagtaaatgcggcatgtctcccagggtcggcagggccagccccttggggacacaggatgggggtaacccaacggaccgggcctcccatccccctcagtttgtcatcatagttctcccc

SEQ ID NO: 363693 - DNA, 482 bp, Homo Sapiens
cgtaattatcagagcagctaggcagggctgacagccaggcagactcagtgggaggcttctggcctgagtgtggccttccccagagggtggttttccaaaggcaggtggggactggggaggcctcggggggctgcttgtcattacctgaatcacagatgctcttttgtcatacacagccagcattcctctgggtttcagcaagttggcatatctttagcttcagaaggagctgggccttgctgactttcctatctggcctcttccctatctcctgtggggccaagagcttaggacagtgtctcagaaaagcctctaagtaggggggttttcccatgggattgtggtagtctgatttttcatatctattcaaatgttaagaaatattttgtttccctgtatttttctattctttagaaatttttttataatagataatttcaaacctatataaataaatccttatgtatttatcatttgacttt

SEQ ID NO: 363694 - DNA, 457 bp, Homo Sapiens
tacggcctcacccgcaccccctcagagcgcagggctgcaacccctcattatccaccacgcacagatggtacagctggggctgaacaaccacatgtggaaccagagagggtcccaggcgcccgaggacaagacgcaggaggcagaatgaccgcgtgtctttgcctgaccacctggggaacacccctggacccaggcatcggccaggaccccatagagcaccccggtctgccctgtgccctgtggacagtggaagatgaggtcatctgccactttcaggacattgtccgggagcccttcatttaggacaaaacgggcgcgatgatgccctggctttcagggtggtcagaactggatacggtgtttacaattccaatctctctatttctgggtgaagggtcttggtggtgggggtattgctacggtcttttaattataataaatatttattgaatgctaa

SEQ ID NO: 363695 - DNA, 430 bp, Homo Sapiens
  misc_feature (27)..(27): n is a, c, g, or t
  misc_feature (43)..(43): n is a, c, g, or t
  misc_feature (60)..(60): n is a, c, g, or t
  misc_feature (82)..(82): n is a, c, g, or t
aaaaaatggtgccaaataacaactgcnaaaaactggaactttnaagtggcccaggggttnaagtgaaaaaggacctggaagnaggcccctggctgccttcttaaagcaccccctgggggctaaaaaccaagccctgtgctctcttaacctcaggggcacccgggtcacaccaagcactgtcagctctgtgatcagcagctgcccgggcctgctctacctcaacctggagtcctgccgctgccttccccggggtctgaagcgggcctaccggggcctggaggaagtccagtggtgtctggagcagctgctcaccagcccctcacccagctaggcagccacagacctgggacacctcagccagcttgcccaccctccacctttgcccaatttcagatatttgagcattttgttaaaataaaacatttttagg

SEQ ID NO: 363696 - DNA, 654 bp, Homo Sapiens
  misc_feature (108)..(134): n is a, c, g, or t
  misc_feature (189)..(198): n is a, c, g, or t
  misc_feature (466)..(466): n is a, c, g, or t
tccccgtgaaggagagcccttcatttggagattatgttctttcggggagaggctgaggacttaaaatattcctgcatttgtgaaatgatggtgaaagtaagtggtagnnnnnnnnnnnnnnnnnnnnnnnnnnngtgatgtcccaacttgtaaaaattaaaagttatggtactatgttagccccataannnnnnnnnnccttttaaaacacttccataatctggactcctctgtccaggcactgctgcccagcctccaagctccatctccactccagattttttacagctgcctgcagtactttacctcctatcagaagtttctcagctcccaaggctctgagcaaatgtggctcctgggggttctttcttcctctgctgaaggaataaattgctcccttgacattgtagagcttctggcacttggagacttgtatgaaagaatggctgtgcctctgccctgtctncccccaccgggctgggagctctgcagagcaggaaacatgactcgtatatgtctcaggtccctgcagggccaagcacctagcctcgctcttggcaggtactcagcgaatgaatgctgtatatgttgggtgcaaagttccctacttcctgtgacttcagctctgttttacaataaaatcttgaaaatgcc

SEQ ID NO: 363697 - DNA, 839 bp, Homo Sapiens
aattctgggcaggggagctggagggcagaagggtatcatcgtttctcatctcctcctccctcctcttctccagtggatgttgagggagctaacagggctggcatctggggcatgaactgggatggggcaggtgggcgttagggaagctggtatcaaatggtgaccttggtggagtctcctatgtgaagagtaccctccctctccacccccagtccccatatcctggttctggcccaaggaaaatgtccattctatgaccttctcttttcctctcctctcacttctgcagctattctcacacatctaacctctaggcaacatgcactaaattcaaaagcaaggagaagcccttgccccccatcagtccaccagccctagaacctcccttgcctcaacagtcacctaataaagcccacctccatggaaaacggctgtggctttagttttgttgctttttaaaaaaatcaatctaccaatctttagcagtaagagggaaagttagacctcagctggggaactttcctgtccatgtccacagatagagcagaggacaaagccataggttggatcagaagtgtccttttaggagtcagagttgggagaaggagacatcctgggactgttcatcctagttaatgaagtgggcaattctcaggccattagggggttttagagcagaccgacatataattagtcagcatttctcagcccagccaggcctgctgctagtgtgggaggggtcctgctcaccatctgtacccctggcttgaagcctgctggtaccctggaggtgggaggagaggaagtgtatcctctagagtcagccatgagcatggcta

SEQ ID NO: 363698 - DNA, 462 bp, Homo Sapiens
tttgtgtacagtatgtacttacttaatgcagttgcattattacgtactgaaagatatgtgtttgcaggtttatttccaggatgcatttgcttgttttggtcatggcagcagtgagttggtaatcctaaaccatcacttccagcagtattcatggtatagagctgatctgtgttcatatgttgaattgtgatagtagcaaacatgaacatatgaactattgttgctcttaatagaaatacaatgtaaatatgggcttgtatattttcttccttacatttaaatataaagtagaatacgcagttttattattttcgagaaaaagaaagagaagctgctgacctttctcccccataaagtttttcaggatgatcaggtcacagtgtgtacgtaagagtcagctaattatggatattgtcatctcggtaactttgtaaaaaaacaaacaaaactggcattgttaat

SEQ ID NO: 363699 - DNA, 1186 bp, Homo Sapiens
  misc_feature (50)..(50): n is a, c, g, or t
cgcagggccgcgagaggcttcgtcgccgctgcagctccgggggctcccangggagcgtgcgcggaacctccaggcccagcagttatgaaagaaaaaaaattacattatcttgaagaactgcaggagttgagtattccagaaaatgcaatgaaataggtcagctacttgattttaaaagtcaaatactggatcttttattaaggaccccggctgcggcgaggaggaaggagccagcctagcagcttctgcgcctgtggccgcgggtgtcctggaggcctctcggtgtgacgagtgggggacccgaaggctcgtgcgccacctccaggcctggacgctgccctccgtcttctgcccccaataggtgcgccggaccttcaggccctggggtgaattcagctgctcctacatcagcttccggaaccaccaaaaattcaaattgggattttccggagtaaacaagagcctagagccctttgctcaatgctggatttaatacgtatatatttttaagcgagttggttttttcccctttgatttttgatcttcgcgacagttcctcccacgcatattatcgttgttgccgtcgttttctctccccgcgtggctccttgacctgcgagggagagagaggacaccgaagccgggagctcgcagggaccatgtatcagagcttggccatggccgccaaccacgggccgccccccggtgcctacgaggcgggcggccccggcgccttcatgcacggcgcgggcgccgcgtcctcgccagtctacgtgcccacaccgcgggtgccctcctccgtgctgggcctgtcctacctccagggccggaggcgcgggctctgcgtccggaggcgcctcgggcggcagctccggtggggccgcgtctggtgcggggcccgggaacccagcagggcagcccggggatggagccaggcgggagcccgacggagcccgcttacaccccgccgccgggggcgcccgcgctttctcctttccgggggaccaccggggtccctgggcggcccgctcctagagtatcccctccagggggccccaggcttacggcgataccccagcttttcttgtacaaaagggactcccctataagtgaagtcctatttataagacttaggcccctgggcccctccctttttaacaacgttccgtggaatggggaaaaaact

SEQ ID NO: 363700 - DNA, 602 bp, Homo Sapiens
atgcagacattgaaagggaggcaccattccagtctgggtcccggaagcgacctggttcatctcggcagctccccagtaatctccgcattctgcagaatcctatctcatctggttttaatcctgaaggcatatatgtatgacattatctgtctttagggaggagacccaacagaggtaccaaggacagtaaacttcctttttgatttgtgccaatgatgaacagaggatctattccacaagacgctgtatgttttttctctcctaaattgcataccacttggagccataccctgtgcactgatgctaaagaacaaagaaactgtgttttcacacatcaacagtgttgatatttttgtccagcagctataatgcaaagccttcgtttttatttgtagcattttgagagctttaggaaagtattatatagtgtgtatacataaataagccgtgacttaagtaagagtgaagagaaatttgtgactggcttagtttaatttatttcatgtaatcaatgtgtgaatgttgatgttttaatatttttattgacttatcctgtgactgacttacgttacatattgtgtgattatgaccatgtacgagaa

SEQ ID NO: 363701 - DNA, 900 bp, Homo Sapiens
ggagcgcgcggcgccgcggcctcgcgacgcggagcgctcccgggacgatgaggcccggtcctcccgcgtcgggggcggctgcaccggcggagtccgcctccccctcttgtacaatgccagctcgctggtcagcgtcttcagccgggcgcgcaggctccgctccgatgccttcgcctcctcgagctccttggccagacggcggcagtcctggccgcgacggccggccaccctgtgcccgaggccgcgctcctgccgcagctccagctccagcccgcgcaccagcccgcgcagcgcctcggcctcctggcgtgccgcgcgcccggccagcgcctcctcgcgcgatcggcccagctgcgcctccagctcccgcttctcggacgccaggcgcgacacctgctcccgcagatgccagatctcattctcccgggtgtcccgagtgttctggccatccagcccttgcaggcggcccagttcctccttcagtgaccggatgatgccctgcagaaccacggggtctggcttgccctggtacgggaggggcagcgggtagtgaatcctgtcaaactccacggagtagatgaggatcaggtagcagcttggagttgagctgggccgacctgggggccaaggagcctgggcggccccccatcttgcggttccgcagggactccaggtctgtgtaggtcagcaggtccagggtgactgactcactactagccagcatcgaactcgccccgccactggtcagccgtcatccggtcctccacctccagctccagcacctgcccagaaaccatcacccgcacggcatgctccacaccccggaagacgtagtccacctgcaggccagccggctggtccatggccaaggttgcttctccactagcaaccctcctcgcg

SEQ ID NO: 363702 - DNA, 877 bp, Homo Sapiens
agcggaggggaagcccaggccaggatggccacgggtcgcgcggtggccgggctcctgttgctggcggccgccggcctcggaggagtggcggaggggccagggctagccttcagcgaggatgtgctgagcgtgttcggcgcgaatctgagcctgtcggcggcgcagctccagcacttgctggagcagatgggagccgcctcccgcgtgggcgtcccggagcctggccagctgcacttcaaccagtgtttaactgctgaagagatcttttcccttcatggcttttcaaatgctacccaaataaccagctccaaattctctgtcatctgtccagcagtcttacagcaattgaactttcacccatgtgaggatcggcccaagcacaaaacaagaccaagtcattcagaagtttggggatatggattcctgtcagtgacgattattaatctggcatctctcctcggattgattttgactccactgataaagaaatcttatttcccaaagattttgaccttttttgtggggctggctattgggactcttttttcaaatgcaattttccaacttattccagaggcatttggatttgatcccaaagtcgacagttatgttgagaaggcagttgctgtgtttggtggattttacctacttttctttttctgaaagaatgctaaagatgttattaaagacatatggtcagaatggtcatacccactttggaaatgataactttggtcctcaagaaaaaactcatcaacctaaagcattacctgccatcaatggtgtgacatgctatgcaaatcctgctgtcacagaagctaatggacatatccattttgataatgtcagtgtggtatctctacaggatggaaaaaca

SEQ ID NO: 363703 - DNA, 284 bp, Homo Sapiens
gcgtggtcgcggccgaggtacaaatgcctatgcgcatctttttctcggatggtctcatttgactttcatttcgtaagggttcactctccatggtgtagatgataagctaccacatttgtgcttttaaacccattcctggcaatccccctttatcttcattttgtctttagggggataaagaagtaacactacctcatgaatagaaactatgaagccaaaaaactccttcacaagctgttcatttctttttagaatgaaaatgcaggtcctgaattctcgtgaag

SEQ ID NO: 363704 - DNA, 631 bp, Homo Sapiens
  misc_feature (525)..(534): n is a, c, g, or t
ctgagtgtggttggttacttcaggtacagtatcacattaataggggccacagtctatatccctgtttagtttgttagttaccactcaagagcagacagatattgtccactttatcccaaatcccagccagactttgttgtatgctgtgcttcattcatggggctgtgaactactgattatattctccctactcctaatgtagaatgctttattctactgccatctttctgtctgcactgtttaattaggcttactgataacaactttaattcctgaattttcctttcctcattcaggttcctatttgtaattactaagacttaaagaatagtctggtgaaattactcaaagaattaaggaaggtttgagctaaaatgaactagagaccatctagtactttagtgtaaaatatgtttaatacaagtcgttaagtccttgtaagtgactattccaatgtttattctttgtttttggaagaatgcttggagttaccatgtttttaaatgtgaaatttcatctaaattnnnnnnnnnntctctgtgatgaggctgactcacccatttggtcaagattagtgctagctgatttgctgaacctttgcctacagaattaaagtactttctcaagtttt

SEQ ID NO: 363705 - DNA, 494 bp, Homo Sapiens
aaaatatgcaaataatctttataagaagtataatgaccaataaacataagaaagttaataattcatgatcaaagtaaggcatattgaataaaaaataaaatgccctttacaccctattaaatagaaaaaaatttaaaggaatatatttagcagtagcaatgatgggctttaattggcaggtatatacattatccaatctttcttgaggccagtttctcagtgtttaactagaaccttaaagatgttaactccctttagcccagtaattccatttcttgaggaaataatcacaaatctgggcaaagtgtacagcatgtcctttgcagaattacttatggtgttgatgagaaaacactgttggtcacaccatggctggatcatcatctccaaactgggcaaaagtaatttgaagatttatatcatgctaatttacctgctttcctggaacaaatttttatccaggagtgggaataatttataccacttgtgttcag

SEQ ID NO: 363706 - DNA, 1182 bp, Homo Sapiens
  misc_feature (120)..(129): n is a, c, g, or t
  misc_feature (463)..(463): n is a, c, g, or t
aacccccacttttagaaccgggataaaaaaaattttggtatttttttctcgccggaaaaggcgcggtaaaaaataccttcgtgaaggggagaatgtttttccccacaatattttgttcgnnnnnnnnnngcaaaaaaggaagggaggtcctcctggcaccaaaaagagttcgcccaaaatgtttgggccgggtttttttccccagaattcggggagggtgtgttagaaaagaaggaggggggggccaaggggccctataagattttttaaaattgtgggggcccccctatttatagggggcccccctttttgtaaaagagaaaaattggggtaaacgggtaaaagttgggggccccctgaggggatatttttagagagggcgcccgccctttttttatggatgaggtgatggggaaggttgagggtgatgtggggagggaggggtatttggtatgggggtttnggtgtcagactcgtacaactcaatgtttatgtctgctattagggctttttccagcagtagttccccactgtttccaccatcgtggagacaggaaatcgtcctaaaaaacacatgactagaacctggggtacagtggtgcaccaccattgctattatttgtttcttggttaagaatccagttcagcctttgttgaacccttttccctctaccccaatctagggtttgccttggtatcttgtcctcaaatttgtagctgacctaccacttctgcacctactctagcactcagctcccatctctgttgtaagaaggcaatcacagacatgacattgtgcacacaaccaggccaggtgaccttcactgaaacttgcttttaagccataacatacataattattactgaagtattacttatacaagggtttcattcatctatgaagatgttgcttttttttaagaattttgaaaaggaccaatctaaatttcctttatttaaatataaaattctataaaacaggtcactgaactaaaaaatcacattttttcatatgtcagttcatggccacacatagtacaagtcttacggtacatgtcatcttctaggttttcttctggtccatactcatgttgatgaacaatcggctcccttttccacacgctgctttttactgctcgccagaattcttttacttttttatcaaaattcttttgtttcatt

SEQ ID NO: 363707 - DNA, 579 bp, Homo Sapiens; identical to SEQ ID NO: 3440

SEQ ID NO: 363708 - DNA, 631 bp, Homo Sapiens
acaccaaccatcacagccccccaccaaccttctcccaaccccaaaagcattgtccagggatatagattttaccaaaggcttcctgggaagacgagggagcaacactttagattaaatgtgatcagactttcctattagatatggctcttctgtctcttgttatccccctgacagctctgccataaagtcccttctcctcatcctacccaaacaggctgtataagtgcttctgaggtaattaaactctattcctccagtttacaaatatcacttaacaaaaaatataggcattcagccagattaaaaaactggtattcagccaaatagtgacaatcagttgttcttcaagtttttcccttgggaaccttgttgttattgcacaacttttattagcgacaatttggggcgtctctgcttaatctacaagttttcgaaatggaaaagagtatcttgcagcttcatgttcatgagctaataaaaggggtattggaaggaatctcagaagtcaccattttaagactgatgatatgttaaaataaggagtatgcagaaggtagagacttttaactgatgataaaaatggtgttcaccaaatctcatccttaagaagcagaagttctcagtggagggt

SEQ ID NO: 363709 - DNA, 367 bp, Homo Sapiens
tttttttctgcgaaaaacatttattctgagaatctaaaatctggacaaagtactggactttagaaaaagcctacacaaaattgtctcattcttccctaatacattaataatctaagaataaggaggtgaaaaaaaccctttaaaaataacattgctccagtttgtctgcaggtatgtgatttaaaatatccctgttttattgaggtataggctgcaaactttggtaaaattagaaaaattaacaaaccctttcaaaagaaagaaaatacaaacacaaagacaaccaaaccctaacgttatatctttcttggtacatatacagtaactacctaaaaaattcatttagaaaatgtgttcatttagacgt

SEQ ID NO: 363710 - DNA, 1656 bp, Homo Sapiens
ccttacggctaggtagcgaggctgggtgttgaattcggcacgaggggaggaggcggcggccgccgcccgggaaagggaaccggcgtccggggaacccccgtctggctccggccgcggcaagaagatcttcggctgctccgagtgcgagaagctgttccgctcaccgcgagacctggagcggcacgtgctggtgcacactggcgagaagccgttcccgtgcctggagtgcggcaagttcttccgccacgagtgctacctcaagcgccaccggctgctgcacggcaccgagcggcccttcccttgccacatctgcggcaagggcttcatcacgctcagcaacctctccaggcacctgaagctgcaccggggcatggactgactgccaggctgcgtgcgccctgccctccacccagcctcctggactcggcctggaccaggggacctcgggactgcgcgtgaggccccggccctccaaatccaaatccagacgcaggccctgaaatgaggggaccctgactggagaggtgggggccacctaaaaacccagcaaaggccccggagctgggggaccacaaacaaacagggtccttagctgggcgcaggggagcccaaatctagggagagactcctgagcctgaggtccctggaatgagtgtgggttagccgtaagtccccaagaccatggggactttgcagtgagcaatgggtctcccacaagtacctctcatcttgagagccctaatactaaaagatgggcacccacccccaccaagggaagactgccccattccctgagagccatcattcctaacgaccttgatctggagaatgtggagggagcatgtccctgaattttcctagatccctccaaatgccacccaccagagtcactggtgaccccagaaaatggatatagccgaaatctgcctttcccctttttcattccctgtgctgaaagagggaccagggtagatgccccctgccctcgaatcccccctccccgactgtggaatggatcgaccctaacgatcttccccgccccaaacactagaatagactggcctgaaatccccttgcccagtagaatggactgatctatgtgcacacacccccatcacatggaatgggctggtcctaggctgtggcctgccaccttccttagagtgaatagggcggacactcctctcttttcctgtaacgtgtggaccggtccacgcaattctttatcctgtgaactcatctgagtgggaggtggtggacactggggtttccttccctctctccgtagcatccgttggtctttctctccatctctgttggtttgtctgtctctgtcttcctccccaatccctaggggaagggggcatttggctagggggtgcccctgtgagcctcgaccttgccccctcgtccctctccccagtgcttccaggacccccaaataaaccttgtcctgtccgccccctggatccgcccccacacacacacaacccttgtcggccgccctcggccccccaaaaagctttcctaaaccatttcgtttgggcgcccggcggcccagaaagggaaaggtgaaacatgggtcataagcttgttttccctaagggagaacccccgggccacaggacctaagggcttctggaatttcctcccacc

SEQ ID NO: 363711 - DNA, 542 bp, Homo Sapiens
tttgcgagaaaggaaagtggaagataaaccaagtatataatttttaagaaaattgaccttttgttttaaatatggggaccttggcagtggactttatagtccttagtgcttttttactgagaaatttcctttagaacctatttttattagtttttaaaccaaagaaagccaaataccattttacatttaacaatgcttctcacatgatttttataccagataagctaaattttatctttatattagtgtgttattaatgttaaacctaattttaataaaaccttgtaaacatatttacttaattttttaatgtttgactattaggaaagattttatagactctttaaccttctataatttttactaaagagcaggttggtgctttaagaaaaacctgttatgcttttaatttactgtccagttcacagaaaaactggatgatacctctttaactttagctaatatgtttacaaacagcattttctttacaactaacgttttaaaacttgcttaaaccttcaaaacaataattctttttaact

SEQ ID NO: 363712 - DNA, 498 bp, Homo Sapiens
  misc_feature (40)..(40): n is a, c, g, or t
  misc_feature (49)..(49): n is a, c, g, or t
  misc_feature (54)..(54): n is a, c, g, or t
  misc_feature (62)..(62): n is a, c, g, or t
  misc_feature (110)..(110): n is a, c, g, or t
  misc_feature (115)..(115): n is a, c, g, or t
  misc_feature (128)..(128): n is a, c, g, or t
  misc_feature (155)..(155): n is a, c, g, or t
tttccctccctgtccttaaaagccccggaaagtgaatttnagttgtttnggaanattggaangcttggaattggccctccggggcttgaccccccagggtgccgggactnccggnatattaccagagngagctttggcatgactttattactccnaggcctatagaatcctggaaaagagcaaccatgcagcccacgcctggtcaactggaggacaaccttagtggaaaggggggaaaatctgagcctctggcctgccatgtgcacaagcataacaattgcttttgtttaacgtgcaaatggaatatttgatccatttcaaccacgcatttgcatcttggtatcctgtcttaattgccaaagtttgttttaagtctttaacttctatgatcctctagtaaaatgaatgtatgatttttataccagataagctaaattttacctttatattagtgtgttattaatgttaaacttaattttaataaaatcttgtagacat

SEQ ID NO: 363713 - DNA, 871 bp, Homo Sapiens
tgcgctcgctctgccgacgcgggccttaaaggcgcagagcccgcgcccgcgccccccgcgccgcaccagcccagcctctgccctcctggacgtctggagccgcccggttgcggccgaagaggccaaggacgttcgttttccaggggaaaaaggcgcgggtgtggagactgaagacagcgctggggtttccgcccccacacccggggcaccctttctggatggggcggtcccgccgcggtcttagtccgacttcccgcccgggcccgcggtgggagtgtgcacttccattctgtccttttatttttcaggtgtctccttgctaactcccctgacccgggcttgaacccaggtcgggcagctcaggggtgagagtttccacctggagcagatgagcagagggccacgctgagatttcagcctgtggggctttgcagaccctcccgctcctaggaaaactcaaagccctggcctgggctagggatgtaccctaggattggggacggtagtaattcctgtgtgtgcatcaaaacaccctgttaggcctcagaagccaagaaagaaattagaagctccaagaaagaaagaagtgcccagacaggagctgtcaggagtgtctgcgccgacaggctgggccggctccagctccctttgccctgcatgggtgatggctgaactggggggcacttctttaagggttatcaggtaaaatatatgtacaggtcggacagtgagtaaatgtttctgcacttttccttttggcttggagatttaaagaaacgcggttttgtttgttcagatacatcgaattttctttgtctggggtttcagggactctgtgtccagaatacattagttctggtttaagaaatag

SEQ ID NO: 363714 - DNA, 1116 bp, Homo Sapiens
ggaggtaccaatgagctttcagatgttcaacacctacccctggcctaactgctgataaccaaccataacccttgcagatgcatgcatgttttctgcaccttgctatcatttttcagtccatttttcacatgtatacatagtgattatttttaaatgcaaccctgatttcacatgcctcatgttgaaatatcgtgtggctcattgtggacttaaagtgtaacattctccttatggtatgtaaggacttttgtacaaaccaatgcctatctatctatcatttctgaaaactttttcctcctatgcaatattttctggcctctgtgaacaacttgtagttccttgagatttctattatcacttatgtttttgcaaatctgcaattgaaatgcccttgttccttgttaatgcctattgaatctatatgaacctgtacgtgtgtttctcactgtgataatataatcattgcatgttttatctttcccactagaaagcttctagaaagctaggactatcttttttgtctgtgtaatttttgcatcacaagctatatttaaatgtgggtgcagtgagtggctgttttctgccacatggagaaacatggtctgcagtgagagagaagaatgaagccatgatgaaagcaaaatcaagaaagagtcccgattgtgttccagtacctggttcttctggtcttcatgttcaggtccacctctgcccttttcatgtcttgattgttgaattcttctgtgagatactccaaatatcctaataaattctcatgtttgctttaaaagcccggaccgccccgcctacatacgatcctccaaaagggcgggccgcccctagagaatccccttcgaagggggcccaagcttacgcctaaccccagttttttttggacaaaagggggccccctacaagggggtcggtatttaaaaacctaaggccccggggcccgtccgttattacaaacctctcctggacttggggaaaaaaactgcttaggcttgggagaaatcttttgtggaaaaggaaaacccctatactttcttggggcgggaggggaactatatatttgggacacaaattcctccctctaccgtaaatattttgtttagc

SEQ ID NO: 363715 - DNA, 1969 bp, Homo Sapiens
  misc_feature (1603)..(1639): n is a, c, g, or t
  misc_feature (1723)..(1762): n is a, c, g, or t
  misc_feature (1766)..(1766): n is a, c, g, or t
  misc_feature (1772)..(1773): n is a, c, g, or t
  misc_feature (1776)..(1777): n is a, c, g, or t
  misc_feature (1779)..(1780): n is a, c, g, or t
  misc_feature (1787)..(1787): n is a, c, g, or t
  misc_feature (1790)..(1790): n is a, c, g, or t
  misc_feature (1798)..(1799): n is a, c, g, or t
  misc_feature (1801)..(1801): n is a, c, g, or t
  misc_feature (1826)..(1827): n is a, c, g, or t
  misc_feature (1860)..(1860): n is a, c, g, or t
  misc_feature (1915)..(1915): n is a, c, g, or t
gggagcgaggcctgggtggcgaactcagcacgaggcgcagcgcgggccggagggagggagggagggtgggcgaggggagaggacttgaacacacgggaccggacaggaccgaccgaggggcggcggcgaaaggcagagcgccgcgatctctgtcgggaagcgcaacctccccgggccccgcggggccgcgcagggggcgtcctcaaccccgcgcccgctccctctttccatcccctgccgcccgcaggccaccccggggcccggccatccgcgcgcgcatccccgggttcgggcccgtccctggccctcgagggagccgccgccttcatcgccacatctgcagcggccgcaccagaggccgcccgggcgggaccccagcgtgagcatcgggcgcccccctaggagtgcaccacccccggagcccccctcaacacggaccgcgcccgccgggcacacaagaatggtcactcagatactgggggccatggagtctcaggtgggggggagcccggccggcccggccctgcccaacgggccactccttggtacaaatggagccactgacgacagcaagaccaacctcatcgtcaactacctgccccagaacatgacccaggatgagttcaagagtctcttcggcagcattggcgacatcgagtcctgcaagttggttcgggacaagatcacagggcagagccttggctacgggtttgtgaactattctgaccccaatgatgcagacaaagccatcaacaccctcaacggcctcaaattacagacgaagaccatcaaggtgtcctatgccagacccagttcagcatccatccgggatgctaacctgtacgtcagcgggctccccaagaccatgagccagaaagagatggagcagctcttctcccagtacggccgcatcatcacgtcccgcatcctggtggaccaggtcacaggtgtctctcggggtgtgggattcatccgctttgacaagaggattgaggccgaagaggctatcaaaggactgaatgggcagaagccgctgggcgcagtgagcccatcacagtcaagttcgcgaacaacccaagtcagaagacggggcaggcgctgctcacccacctctaccagtcatccgcccggcgctacgcaggccccctacaccatcagacccagcgtttccggctggacaatttgctcaacatggcctacggcgtcaagagtcccctgtcgctcatcgccaggttctcgccgatcgccatcgatggtatgagcggcctggcgggcgtgggcctgtcggggggcgcggcgggcgccggctggtgcatcttcgtgtacaacctgtcaccggaggcagacgagagcgtgctgtggcagctgttcgggccttttggggcagtcaccaacgtcaaggtcatccgtgatttcaccaccaacaagtgcaagggtttcggcttcgtgaccatgaccaactatgacgaggcggccatggccatcgccagcctgaacggctatcgcctgggcgagcgcgtgctgcaggtctccttcaagaccagcaaacagcacaaggcgtgagcccaccccgcctgccctcccaccccctccccgggcagcnnnnnnnnnnnnnnnnnnnnnnnnnnnnnnnnnnnnnaggggcccaagagagacagcacaggcagccccacggacgacgcgagggccccacgtccctgcggaagccacagggtgagcactnnnnnnnnnnnnnnnnnnnnnnnnnnnnnnnnnnnnnnnntggngggagnntgnngnnggtggtntgngttgggtnntnaagtgtattggtgtggtgaattggnntttgggggtttaggatttggtatcgtgagtganggggtggttgagtaaaagttagaggggaagggataaaatgagatataagtggganggtgagctcggcgccattaaaaatatcagatagagagtaaaagtagaggtgaaa

SEQ ID NO: 363716 - DNA, 458 bp, Homo Sapiens
  misc_feature (48)..(118): n is a, c, g, or t
  misc_feature (142)..(142): n is a, c, g, or t
  misc_feature (152)..(191): n is a, c, g, or t
  misc_feature (209)..(219): n is a, c, g, or t
gggaatggctgactgtgggctgccctggacttggcccccggacagtcnnnnnnnnnnnnnnnnnnnnnnnnnnnnnnnnnnnnnnnnnnnnnnnnnnnnnnnnnnnnnnnnnnnnnnngccaactcctcggctgcacaccanctctaaaagnnnnnnnnnnnnnnnnnnnnnnnnnnnnnnnnnnnnnnnncgagatctttggagagannnnnnnnnnngcctcctacttctgtcttgaagccagacaatcgacttcagctctccctcccctccctctttctccacgttctgctcccactcgctctcctgtccccttcccctcccctcccggcggaaagccccccgaaaccaacaaagctgagccgagagaaacaaacaaaacaaacacaccgggccagacaagccatcgacaaaactttgcaaagtcaacccccaggaaaaaaatacagccttgttg

SEQ ID NO: 363717 - DNA, 461 bp, Homo Sapiens
acagattttcttgggtagggaggatgggataggccagggatgggatggaatcagttctgcctgggaaactaatccgaatcatttacctttctgtattaaccttggcctgtcctaaaaagagaacgactgtttcatcatgagttgctctgagttttgttaatgtttgtgttggtggattgacggttaaatgaagcatttagctggaatatgaactttgggagttttcatgttgtcctggatttctctttgtaaacctttaaaccttagcccctggttgattgtgttaaacccattatgagaatgttatttaaagttgtattataattgcaacctccactaattattcagtactgtagcagcaaagtattatttgtaagaatttggttatttttatacttatatccactctaagtctggcgttctagtcagtaaaatgatgcaataaaattaatatcattttc

SEQ ID NO: 363718 - DNA, 1038 bp, Homo Sapiens
ttaagttcagagtaatccttttcatggaagaatcttcaggtcaccaaagaattgaaattttaagccccagattgtactgagctgtacctgtgggaaaaggaatggccagggtattgatgatggaaaagattcaaatgaggagttagaaggcaagccctctgtgggcagccgtcttccagaaacctcgaacttatgtctgtctccacctgagaaaggagaagaaaagctggtggtgacccctgctcctgctgggccatgccatggctctgaagatgccccgtgttcttaggaggtgctcacccctggcacctaaagacatttccttctggttgttgctctttaaaaacaaaataagcccctgaacgtgcttgcaggccagtttgtgtgcctgcacttgacgaattaccttgaccaacgggccaaaggcacagagctccaaggcatcatctttccttaaaatcctgagtgtttattaaaaagggacatggtctctaggtatcttattacatttgtatttcttacatttgaaatatcctaaccgctcccttcggtttcttcttaagaacatttacatctaattatttttcgtgcaagtcttgtaggacccacatgttttcctagctttggaaatcgatttttttcattcctcttatgaggatttccctatgtcagtaaacattaactttctatttcttccatttttgctcatttgaaacccctgctgcttctagatctatttctttgcacttgtataactttgaaataaattcctcatcccttagactaagagagtgggtgtctgtgaaaattgttttctccttcataatacctaaattcctagtttgtcagtaaaatatttgtgtttggttaacaagctcttatttaagccattgagttagtataatctttattacctttgaaaaaccagagagctgaattttttgtcattctaagttgtaagtaacactgcagtcaagtcttctgatgaaatttccatatatcaaattgaaaataaagcaaaatatatttattactcat

SEQ ID NO: 363719 - DNA, 542 bp, Homo Sapiens
cttaaccctattgagacactttttccatggacaaaagcatccattcctatgacattaagcctcacttccattaataaaccccaactattcaccacccaggagcagctttggcttgggcagtaagtacccatggagagagccaagtgaaccttgggtccagcaccacagacagttccaagactgtacctacttggcagtctgtgtggcctatttttatctgatatgaacaaagacagatttaggttttatgaagttggaaactcatataatttggggagtcctctttaatacaaactgaaaaatttttaattaaaattaggtataaaaataagggtttttttgaatgagaaaagttgacaactatgataaacattatgaaatccagaaaaacaacatcatctttgtattaattactctctgatgctttttgcctacttgttttggttgcttactctttgataatctctttattagctgataacatttatatcattttctgttcataaaatttgaatataatttagtcacatagttaaaaaaaa

SEQ ID NO: 363720 - DNA, 1785 bp, Homo Sapiens; identical to SEQ ID NO: 85899
  misc_feature (947)..(947): n is a, c, g, or t
  misc_feature (969)..(969): n is a, c, g, or t
  misc_feature (1309)..(1431): n is a, c, g, or t

SEQ ID NO: 363721 - DNA, 414 bp, Homo Sapiens
tgcgccaagagctcaggagaggcgcctcccctcctcggtgtctccgcagcccgcacggccctcccgcccaagaccccggggcgaccccttcccgcgtggcggggccagcgagctcctcttgcggggcgtggacggggccggggtgcccgggcaggcgccgccccggagcccacggtccacgcgctcccagcggccacgactctctccttgataggaactggttgacttcacagaattatatggagtgactcgtcccactggattggaaactattttaagcctgaataatgttagatacaatgaattctaaacttcccttcaaagaaccagtatatcagtatgttcagtctttgttctgcattttaaagtctaacttcctcgcagttgcaataaacaactttttcccccagtttt

SEQ ID NO: 363722 - DNA, 769 bp, Homo Sapiens
  misc_feature (560)..(578): n is a, c, g, or t
  misc_feature (725)..(725): n is a, c, g, or t
acacttccgctgtaccacgcaatgatgggtggcagtgaggtggcccagaccctcgccaaggagacttttgcatccaccgcctcccagctccacagcaatgttgtcaactatgtccagcagatcgtggcacccaagggcagttagaggctcgtgtgcatggcccctgcctcttcaggctctccaggctttcagaataattgtttgttcccaaattcctgttccctgatcaacttcctggagtttatatcccctcaggataatctattctctagcttaggtatctgtgactcttgggcctctgctctggtgggaacttacttctctatagcccactgagccccgagacagagaacctgcccacagctctccccgctacaggctgcaggcactgcagggcagcgggtattctcctccccacctaagtctctgggaagaagtggagaggactgatgctcttcttttttctctttcctttttcttgctgattttatgcaaagggctggcattctgattgttcttttttcaggtttaatccttattttaataaagttttcaagtannnnnnnnnnnnnnnnnnnacctaaatttcctgttgccgggcccgccctcgggcccctcgagaaaagctttcctaaacccattccctttgcgcgccgcgggcccccgaaaggtaaagtgaaacatgaggccaaaccctggtttttcctaagccaaatcccttgggnaccctgcaccctaagtgcgcttgggaactctcctcccccccgat

SEQ ID NO: 363723 - DNA, 248 bp, Homo Sapiens
aagacaacaactaaaaaaatgcaaggaatatgtacactggaactgtagtggtagctttcagtattgtaaagagattgttctatacggacctttttgctgtttatcctgtatgtaaaaaagtcctttctagatcctatgtgaaaagaaaagtgaagcaactgaatcttcagcatgttctcatcggcggagccttcttgtgtaatgtaaactgtgccatgttattaaaaaatgtgaactaagcttgcgaa

SEQ ID NO: 363724 - DNA, 686 bp, Homo Sapiens
tttcaagacaggtcagacatttataaaacaagtgaatattcacaaacaaattgtgggagaaacacaccttcccagcaatagaaaatctctataaagtgcattttgcctgcaaccatctcttccccatgctggcccttgggtcaggatttgaggcactgttccgagggagccctcagggccacctgagctgggagaagggaggcatgaagccaccatggagctccaggctactggacataccctctctaccctgcccttccctcttggctccaggagtgcactgcctgactccactggcaggttgatctgggaacgggctggcatgctagggatggtggagaagtaggcggaggtggtcctgccaacctgtaccttagggaagagagccagcagcagacaggcaggaaaaggaatcatcctgctacccgaaggcgctgctagtgaatactaaatctgggcctcggcctttggccttcccactctcagatttgcccttccaggtttgcttgactctctttctggcagtggcccagattctctttcctctcgactggggctgagggaacaggaagcccccaacccaaatgctctgaatgcacaccatcccccgacgcgtgggtcgacatatcccggaattccgaccggtaccagcctgctttttaacaacggttcatatcaagcccccc

SEQ ID NO: 363725 - DNA, 412 bp, Homo Sapiens
  misc_feature (373)..(373): n is a, c, g, or t
gtttctacctcccctgtgacctttcctagcctcagatctgttaattcttttggccccagccctgtccctcactgtcctctgtccttggaccagaaccctggggtcagacccatctcctgtagctgtccatcacactgacaggcttcttcctgagatatcctcaggttttctcagccagagagctgcctttagagtccaactgttgtacgtatgtcaccttcactagaaatgtcccatcatcgtgggaggggagcagggcacaggggatggtgtgcattcagagcattgggttggggggcttccctgttccctcagccccagtcgagaggaaagagaatcggggccactgccagaaagagagtcaaggcaaacntgggaaggggcaaatctgaggagttgggaaggccaaagc

SEQ ID NO: 363726 - DNA, 740 bp, Homo Sapiens
  misc_feature (92)..(101): n is a, c, g, or t
  misc_feature (656)..(656): n is a, c, g, or t
  misc_feature (667)..(667): n is a, c, g, or t
  misc_feature (722)..(722): n is a, c, g, or t
cactgattaaatgatcttaactccctcagctagaactggcattactgcactccaacctgggcagcagagcaagactctgtctcaaaaggggnnnnnnnnnnttgctgatgtgacccatgaagggaactcattttcctcgtaattttggactgccacacattggtacctttagttctctgaaggcccacgtttttatcattaagacctatttgttagctagtagagctttatgttcgctgtccatgaaaccttctgtaaccacagtgactacaagtagttctttctctattgaattattaggtccagaatagaagatgtcattgtacactttatttccctcacactgtgttatgctctgatgtgctatgcttagctatctgtcagagattagtaaattataaaactcatgtgtactacttaagtttatatcttatgctagtttataagaacaattaaaaggacttagaagattaactttggtttcatggtctctgaagtcactgactgctatttcagcttgtttacccttacctagcattaagactccatctacttctgtacagtatatgaaaatttttaaactttcatttagactggtgggatagggctgaccattacaaattgtcgttatcaatttttggtccttttttttgttnaagggccaagntcttcactgtctcccagggtgggagtgcagtgggatgattatgggtccctgcagncttggaaatcctggggct

SEQ ID NO: 363727 - DNA, 406 bp, Homo Sapiens
  misc_feature (134)..(236): n is a, c, g, or t
aaacagggtctcactctgtcacccagggtggagtatgcagtggcatgatcccagctcactgaagcctaaacatactggactcgggtgatcctaccacttcagtctcccaagtagctgggactataggcatatannnnnnnnnnnnnnnnnnnnnnnnnnnnnnnnnnnnnnnnnnnnnnnnnnnnnnnnnnnnnnnnnnnnnnnnnnnnnnnnnnnnnnnnnnnnnnnnnnnnnnnattactggaataacaagtgtgagccactggacccacctccttttctgatttctgattcctacatataaaatgggtaaaatatggataacacttatcaaacatagcccaaaagttgtttaaacaatgaaataaaaatggctatgaagcacgtcacatactgaaacatactt

SEQ ID NO: 363728 - DNA, 574 bp, Homo Sapiens
atgcatataaaagaactggcagacaataaatatagagtcccccactcctgcttggtgctctctttctctctccttctctacatagagaagtgccagagcatccgtcagtagaagttacttaaggttggatgtgtcttccacatcttttgtttacccatgaagaactgtgaccatcttgttctgtgtcttgtcataaagatgggacgtgacttctttctgctcttgcttccatctggtgctgttttctgcacagcctccttgagaccttccagaaccttcttttttcctacttcgtatcacttaaccagtagctatctgggatggttccagaggctgaagtttgcagttgaataacattttaaatagtgttaagcgacttgggatctctggccctttgcgtttcagtatttgtcctttttatgcctgatgtttaacctgccacatgtttgtactgcaacatgaatcttggaaattttaatgttatgcatttcaaatgtttttggttatctgtaaactaaatgtgcccttattggctcacttgtcaataaagatgtttgtatatgtattgcccacc

SEQ ID NO: 363729 - DNA, 481 bp, Homo Sapiens
tttgatccctagtgatcacagccctgaagaaaattaaatctgaattaattttacatggccttcgtgatctttctgctgttcttactttttcgaatgtagttggggggtgggagggacaggttatggtatttaaagagaataaacattttgcacatacatgtattgtacaacagtaagatcctctgttaaaaccagctgtcctgttctccatctccatttcttcccatgctgtaaccccaggctccaccagctgttccccagtgatgttacctagcttccctctaccgttgtctactgaccatttccactacatgcctttcctaccttcccttcacaaccaatcaagtgaatacttgattattatctcttccttactgtgctttatcttttttgtttggattggttctaattaatgaaaataaaagtttctaaatttacatttttatagggtattgtaaataaaaacaaattgtatacttaa

SEQ ID NO: 363730 - DNA, 538 bp, Homo Sapiens
agctcctcccatcagctcttcctccttcagagccgaaagtagatcagaaacttcccaggagctccgagagggcagtggcagcgggagaagcggcagccaggggcgcggcggggccggagagagccggtccccgggaagacggggtctcccctcgttgcctttgtagtggagaaggtggacaagtggcagtcggcgtgatcgcaggtgagggtcgctcgggagccggccggcgccggcggggaagtggaggcgagccgggaacaaagcggagcagctccggggtccgcccgcggcgagcgctctggcggcgttgggctggccggccggccagctgcgcgccgagcacgttgtgagcctggcggcggcggcgggcgaggagccggcgctgggggagggggccgccgccgctcccgcactgccccccgcggcggggcgtcctgccccattgtgaggcggcggcaggacgagaggaggtagggcgcgctcggggggcaggggcggcggcggctccgctcgctcgacacccgggcagcggcag

SEQ ID NO: 363731 - DNA, 934 bp, Homo Sapiens
  misc_feature (438)..(452): n is a, c, g, or t
acccggggcccagcgaaccagaaggcgagacccgccgcagacgagagcaatgctggccagaagacaaaagcaaacataccgagagggcccaaaccccaggcaaccgtaacgtagaaccctcgctaaggtccaagcaacacggccatatgaccactcccacattctgctatgtgtagacaaagcctctcttaaggcaattggagattgcccatggcgaccttttgcgcaaggtctctcgccgtaagtatcccggtgcagaactaggaagaaattctgatcaggactgctctatggtttccctttcaaagacgaataacttctgtttgtttttagcagtcattagttacaacattgcagtgattaacttggcaaggcttccttccgtgtttatccctgtagccatcatttaagtcaggaacagtcagaaaaatagtttannnnnnnnnnnnnnngggtgtctgcaaaggtaaaaatccattaaaaccttaagttaaatataaatgttacaactcaatgtttgcttttagattttatacagtatttgttttgttttggttttgagtgtatataatgcagcattagcaatatggttccaatagaggagttaaatatatattgttaaaggagacctgtagcagtcaaagattttattgatttaatgacaaaggaaattaatgaaaatgtttttgtttttctgctgtaattctgcattaagctcacatgaaaatcacgattctagagtttggaatgcaaaattaattgttttaccctcaagctgggaatatttttcaaaataaatactataatatagatatcaaattattacctccccatgttatgttgaaaatttttttattaaattgataaaactttatttccattatattcataatgttctgttatacataacattaaaatgttcattaaaatcaaa

SEQ ID NO: 363732 - DNA, 535 bp, Homo Sapiens
cttctctttgaatcatatggtacaggtgccaatatgactgctgctatttagagtcagagaggtggaagtcactgggtccctttcccagtgacagagcccatgatgtctaacactactgcactttgtcagtgtgtgagtgatggcaaatacgcagtgttgtctcttggatttggtaaattccgttcctgacagtaatgaggccactgctctaaagtagtttatacagttcttcagttgtataaatagcacagagtagtttttgaaaggttaagaaaaataagtgaaaagacatacacgatatatgaaatggctccaaatgataattgttcaaacctttataaaatgtgttttcgtactcttatgctgccagaggtacttcttaaaactcttctcgtcttggttttataagcacaccacggaggtctgacagatgtgcttgcttctactacagagcaagagaatttgcactttagctatatgtgaaggatattattttaacaaattcctgattctaataaagtaattttattacatg

SEQ ID NO: 363733 - DNA, 980 bp, Homo Sapiens
  misc_feature (736)..(748): n is a, c, g, or t
tccttgagcaaggctgagaagccagactgcatggaacgcttgcagctgcaaaggagactgggttgtcggacattccactggtttctggctaatgtctaccctgagctgtacccatctgaacccaggcccagtttctctggaaagctctacaacactggacttgggctctgtgcagactgccaggcagaaggggacatcctgggctgtcccatggtgttggctccttgcagtgacagccggcagcaacagtacctgcagcacaccagcaggaaggagattcactttggcagcccacagcacctgtgctttgctgtcaggcaggagcaggtgattcttcagaactgcacggaggaaggcctggccatccaccagcagcactgggacttccaggagaatgggatgattgtccacattctttctgggaaatgcatggaagctgtggtgcaagaaaacaataaagatttgtacctgcgtccgtgtgatggaaaagcccgccagcagtggcgttttgaccagatcaatgctgtggatgaacgatgaatgtcaatgtcagaaggaaaagagaattttggccatcaaaatccagctccaagtgaacttaaagagcttatatatttcatgaagctgatccttttgtgtgtgtgctcctggtgttaggagagaaaaaagctctatgaaagaatataggaaagtttctccttttcacaccttatttcattgactgctggctgctttnnnnnnnnnnnnnggatccattgtaccgttgtcttcatcactgggaaatgattattacatagtacagaagattctttgtttttctccactgagcacttaacaattgctttctctctggcctggacattctctggcagcacctccaggatacataaattcaatggatcaatttatttgtcttcaaatggccttaacttggattgtctgtttggccaaccatgaaaattaaagagtaaagcagatgt

SEQ ID NO: 363734 - DNA, 1068 bp, Homo Sapiens
  misc_feature (62)..(86): n is a, c, g, or t
  misc_feature (1031)..(1031): n is a, c, g, or t
gggggggtgcgtgagaacgccggcggtgaccgcagccacagcggtgaccgagtgagaggaannnnnnnnnnnnnnnnnnnnnnnnntgaagtcactgctgctctgggttcgggttggcgactgaaggcggtaccggcctcccggaacagcccgggggagggcttaggtgcagaagggcaggctggccgcggccggtttggtctggggaccacgggctggagcaggtggaaatttaaaattgtttacagtcaacactgtttccagccatgggtttgtctccatctgctcctgctgttgcagttcaggcctcaaatgcttcagcgtccccaccttcaggatgcccgatgcatgaagggaaaatgaaaggctgtccagtgaatacagagccatctggcccaacctgtgagaagaaaacatactctgtgcctgcccaccaggaacgcgcctatgagtacgtggagtgtcccattaggggcactgcggctgagaataaggagaacctagatccttcaaatctgatgccaccaccaaatcaaacaccagctccagatcagccatttgcattgtctactgtcagagaagagtcatccattccgagagcagattcagagaaaaagtgggtttacccttctgagcagatgttctggaatgcaatgttaaagaaagggtggaagtggaaggatgaggatatcagtcagaaggatatgtataatatcattagaattcacaatcagaataacgagcaggcttggaaggagattttgaagtgggaagcccttcatgctgcagagtgtccttgtggtccatcattgatccggtttggagggaaagcaaaagagtattcaccaagggcacgaaatcgttcctggatggggtatgagttgccttttgataggcacgattgggatcataaaccgttgccgggacagaagttagatatgtgattgattattatgatggggggtgaagtcaacaaggactacccagttcaccatcctgggacgtccgtcctgcctttaaattcactttcngcagtatggggacgaaagaaagtcgcttggtgggcga

SEQ ID NO: 363735 - DNA, 1151 bp, Homo Sapiens
gcccagaggccgggggagcagacagggccggtgctccctctggaagcttgggtgaccggggccctggctcccacgggatggagggtgtggtcctgtggtcagagcccaagcagcactcaggagaggggagaaaggaggtgcacctggcagcccacatttttgttgctccccaaatccctccccacgtggggatgagaaccttcctgctgtgatgtgacaccttcggggacattgaccactcaaaactcagatcatctcgcccaccctggagagtgcagagctatctgtagacttaggaatacttgatgggcagcggtgcagaccccgggcacctgcgtgcagcctcctgttctcggcagcttctgtcgctggccctggggtccccacagctgcagctctcctgtgaggttgcacggcatcagaaccatcctgaccttcttagggacgtgcctggaaccacctcgtccacgtccacgtccacatgggggcctcgggaggctaggcccctcctcaaaggcccaccagcccggcgctcatgctgagccccaggcacgcagggccggccacctctctcctgaagccattggccgctcctccacccagtgcttctgcccatgcctgccccagcagcccctctgcacggtcaccatcgcctgggcctgcccacagcactggtgctcacctctacctcctgtcctcaggccgtgcggcacgacatggccagcacgcagaaggagccctcccgggacccaggaccccccgtggtggactccgcggcacatgcttcccaaggtggtcccacggagggtgttactgggcaccagtggactcgccccatggcccgttcctgggagatgagggccgtggcctgcatgaactaccagatgagtaagggaaccccaggcaggcggccctgccacagcccccaaagacactggcctcctgctccagcttccctgtcctggccccacctgtcctgttgctgccagcagggcccttgtttgggattatgaacaaacctcacagactttgaggacctggatggtcctgcattcacggcatcaacactacccgcgctgctgttagacactccgccattcctggttctctccgaaccgttctttgtacagtaaatgtaattcagctgtggt

SEQ ID NO: 363736 - DNA, 457 bp, Homo Sapiens
cgcttttggctgtcagcaccagccagacaggagcaagaaccaggaacaactcccagcatctcagaatcaaatctccactcctggatgctctagtctttcctgattacaggcccacatggagcctgtttgaaggggtcgctcccatggactgagtcagggcattgaggtctggatgtcagggctcagcagtgtccagtttacaggcctcattacagctgctcccatgaggggttcccccagcactgggcctgaagagttaagagtctctcctggacttttctgctctggggacctggttccacaatcttccgggaaggtctttctggtgtatgtgctctgtttcagtttatattctggactcctatgaagatgtttcagcaaagtcttttgctcctttttgttttatgtttagttatgtctgttgtaaaaaatcaatgtaataagtttataattaatt

SEQ ID NO: 363737 - DNA, 875 bp, Homo Sapiens
caaatacacacacaaatttacctgagatgtctagcttgcacgccaagatgtggctatatcacaaatggcagtactagaaaaataaccatgctatagtcatgtatttggttatgaaaaccatatggaaagacaaaggatgatatttaaaaacttaaaagaaaccctattctaaaacttctttgtgaggatacctggcctacttctcaaaaaccatcaattcaccccaaccaaattttcagctgatttgaaagaatttcaagaaatttgatcacttatcagaattgagccttttattcatttatcaagggagaacccaaactattactgtactattcatacctaactggcttttaaatagcattgctgtagctagagaaattaataaagttgtcagagattaagtccatcttctaacattcacatacgcattccaatttgcactaaatgtaagaatagggagataaagtttgtttctggtattttatgttaatgctatgagatatctgtcagttatcaatgaagaaaatatttgttaaagaagattatatcattttacatgaaagcagtgcattttttgcttaaacagttttcctgtatttaaatccccccaaaaaaagttccagtggctgaaaaagccaaaaataattatagtggttagtgaagtgatatttgtaattcgtagtttaatacacagaagccacctgtactaagtagtaaatagtatttggtagctacagctcttattttatgcaaaaatagtgtacaatataaaagtttaaaaatttcctgctgttttgatagggagaaaatttaggatgaagataaaatataaagacaaacgtgataatgtgataaaaactaacccaaatatatat

SEQ ID NO: 363738 - DNA, 624 bp, Homo Sapiens
  misc_feature (22)..(22): n is a, c, g, or t
cccatctctgtggcagcggcantattttacatggcctcacaggcatcagctgaaaagaggacccaaaaagaaattggagatattgctggtgttgctgatgttacaatcagacagtcctatagactgatctatcctcgagccccagatctgtttcctacagacttcaaatttgacaccccagtggacaaactaccacagctataaattgaggcagctaacgtcaaattcttgaatacaaaactttgcctgttgtacatagcctatacaaaatgctgggttgagcctttcatgaggaaaaacaaaagacatggtacgcattccagggctgaatactattgcttggcattctgtatgtatatactagtgaaacatatttaatgatttaaatttcttatcaaatttcttttgtagcaatctaggaaactgtattttggaagatatttgaaattatgtaattcttgaataaaacatttttcaaaactcaagtttttgttatatgttacatgtaacttatgatacataattacaaataatgcaaatcattgcagctaataaagctgatagactttatttccattacttatatatacatagttttttattttaataaatttatggaaagag

SEQ ID NO: 363739 - DNA, 740 bp, Homo Sapiens
tgacagtgcaaacagcattgattttattgctcgacttcggcatgggcacatacatagttaatttttaaaaaccatttatacagatgttactgataaagctcatgtaacaaatgaatgaaaatacaaagaatatcaaagctaaaacactctgtaataaatacaaatacaatgaaaatgataaaactttgtttttaaagtcagtctgagagaagaatattacataaagtgaactaattacatctagaaataaaacaactcagcatttggaacaatcatcctaacatgttaaataccacaaatggcacccgttgactgtacgcttagaaaacaagcagaaggagccactctcccaaactaaggatggttggaacagcctctaactcccaacaatccaatcagtccaatgcactggaaattcaaagcccagatttagtgttgtaaagtaaagcgaattacattgtatttgaaagaagagaatcttgtgctccggactgtaaatacatgaaagaaaaaaaggcttggtaaaaaacccattcggggcaacaaactatgtgcaaaacaaaatgtacactatacactatacactatgcactatttaaaaactacaccaagatacaaggccctctgaggcaagacttacctctctgtactgcctatgagctctacaaaggaatctctgttcataactaagcattcatgatggaaaggcaagagtatgaaaacagatatcacatatctcc

SEQ ID NO: 363740 - DNA, 513 bp, Homo Sapiens
ggttagtatttggtaccatatagtgttctctcttctcccaaaaggatgtgtatataactaaagagaaatgtaaagtgttgtaaataagatggctcatgaaggtacagtgagactgaccctcctgtgtgcagggctaggccatccctctgcatggtgaagagagacactatttttatactgtaatgccatgcggggctgggacctctctgagcagctggggattgttacctagacccaatattttttattattaaatcttgtggcttgacacatctgctgactgaaatggatgtcttagtctaggttactatttttgtcatatggaattgaataaaatgcaggatgtaatgttatttctgagttgcattccttgatttttctaatggagaaagtggaatttgaggaggtcatttgtggtgggtgtgtatccgtggtatttccaccaggaacgtcaacacagcttggcagcttagatttaagcagtgtctcagtgcatcttgattggtcttgaaa

SEQ ID NO: 363741 - DNA, 622 bp, Homo Sapiens
  misc_feature (152)..(246): n is a, c, g, or t
  misc_feature (449)..(457): n is a, c, g, or t
  misc_feature (572)..(572): n is a, c, g, or t
gctcatctcatgtaggcagagtataaagtattaccttttggaattaaaagcccctgactgttataaagtataacaacacacatcaggttttaaaaagccttgaatggcccttgtcttaaaaagaaattaggagccaggtgcggtggcacgtnnnnnnnnnnnnnnnnnnnnnnnnnnnnnnnnnnnnnnnnnnnnnnnnnnnnnnnnnnnnnnnnnnnnnnnnnnnnnnnnnnnnnnnnnnnnnnntaaaagaaaaatgggaagaaagacaaggtaacatgaagaaagaagagatacctagtatgatggagctgcaaatttcatggcagttcatgcagtcggtcaagaggaggattttgttttgtagtttgcagatgagcatttctaaagcattttcccttgctgtatttttttgtattataaattacattggacttcatatatataannnnnnnnnacattatatgtctcttgtatgttttgaaactcttgtatttatgatatagcttatatgatttttttgccttggtatacattttaaaatatgaatttaaaaaatttttgtaaaaatnaaattcacaaaattgttttgaaaaacatttttggattgtttcattctttg

SEQ ID NO: 363742 - DNA, 429 bp, Homo Sapiens
tgttggcattacagctcatccaacgccatcaagttagagtgctcgtgtctcctctcagctatttaactgtgcccctgcaaaattgttcagaatgaaaccagaaaaatctgcctcttttgcactgtagatgtctcttccatgtgccaaatgtggagattagatgctacaaatgaaaagccaaataaaaaagaagtatctgacaaaagcatgggttagagggctttcctaatctgtgtgaggtcaatccaagggatgtttacatactgtagataacctacttgaacaaaaatcagtattatagagaataaatggatgtaagaaaattacatgtacaagttttgtatatttgttaataattttggtaataaatatgatgtactgcatctcagtaccttagcacttcttttaataaaagttaaatagaaggaa

SEQ ID NO: 363743 - DNA, 548 bp, Homo Sapiens
gacatttaacatcaatattgtatatagttgaaggaggtataataaactcagtcatatatagtgaacagttcaaatgggaaagtgttctaaaacatattatttgagatttgtcatattcatctttggtttactaaatttacttagaaatatttgaaatgcaaaattgtgtggaaaccaccttatcaaattaaaatgggaagaaagtaattttaataatttttaataatcatatgtcagcattctgactacttaccacatcaaatctgggcccaaacagcctcagttaactgcataattcaggaacaaaaccagcttgctttgttgcacgcctgggcaatttcagccaggacattaggaccacttgttgtacatctgaataattatggaagttgggacatgttaaggaaaacaaatatgttcatcaccaacaatcagctgtcattttattaatctatcccttttgtgcatgcaccatttctctcttactaacagtttcatctgttcacattttccttgattcaaatattaaagttcagacaactattctg

SEQ ID NO: 363744 - DNA, 1234 bp, Homo Sapiens
  misc_feature (99)..(160): n is a, c, g, or t
agcggggctctcgccagtcccgcgggccgtgcgcggtgctgtgccgcgccctgccagacacaggtgcgcccgcctagcccgaactccgcggcggcggcnnnnnnnnnnnnnnnnnnnnnnnnnnnnnnnnnnnnnnnnnnnnnnnnnnnnnnnnnnnnnncggatggccagggctgtgcccgagaatggcggagcgagaaagcggcggcctgggagggggggccgcgtccccgcccgccgcctccccgttcctggggctgcacatcgcttcgcctcccaatttcaggctcacccatgacatcagcctggaggagtttgaggatgaagacctctcggagatcactgatgagtgtggcatcagcttacagtgcaaagacaccctgtccttacggcccccgcgcgccgggctgctctctgcgggcggcggcggcgcggggagccggttgcaggccgagatgctgcagatggacctgatcgacgcgacgggggacactcccggggccgaggacgacgaggaggacgacgacgaggagcgcgcggcccggcggccgggagcggggccgcccaaggccgagtccggccaggagccggcgtcccgcggccagggccagagccaaggccagagccagggcccgggcagcggggacacgtaccggcccaagcggcccaccacgctcaacctctttccgcaggtgccgcggtctcaggacacactgaataataattctctgggcaaaaagcacagttggcaggatcgggtgtctcgatcatcctcacccctgaagacaggggagcagacaccaccgcatgaacacatctgcctgagcgatgagctgcccccccagagcggccccgcccccaccacagatcgaggcacctccaccgacagcccttgccgccgcagcacagccacccagatggcacctccgggtggtccccctgctgccccgcctgggggtcggggccactcgcatcgagaccgaatccactaccaggccgatgtgcgactagaggccactgaggagatctacctgaccccagtgcagaggcccccagacgctgcagagcccacctccgccttcctgccgcccactgagagccggatgtcagtcagctccgatccagaccctgccgcctacccctccacggcagggcggccgcacccctccatcagtgaagaggaagagggcttcgactgcctgtcgtccccagagcggggccttgtacggggtac

SEQ ID NO: 363745 - DNA, 1229 bp, Homo Sapiens
  misc_feature (689)..(689): n is a, c, g, or t
  misc_feature (802)..(802): n is a, c, g, or t
  misc_feature (1042)..(1165): n is a, c, g, or t
  misc_feature (1168)..(1168): n is a, c, g, or t
ttgaccgtggcttaggaacaatggtccccaatcatggcggtgatgatcaagtccctgactcggagcacaatggacgccagtgtggttttcaaggaccccacgggagagatgcaggggacggtgcacaggttgctgctggagacgtgccagaatgagctgaagcctggctcagtgctgctgctgaagcagattggagtgttttctccttcacttcgaaatcactacctcaacgtgacacccaacaacctggtccatatttacagcccggattctggggatgggagcttcctcaagccatctcagcccttccccaaggattcagggagcttccagcatgatgtggctgcaaagcccgaggaaggcttcagaacagcacagaacctagaggcagaggcgtcccctgaggaagaactcccagaagcagatgacctggatggactcctgagtgagcttcctgaagacttcttctgtgggaccagtagttgagactgccccaacgcaggacaacccaccatgagcaggcagctctgggcacgtgtctggtcacatccaagggggagaagaaggccagcatgattggagagtggacacagccggggggcttctgtggttgctcccaccctgggtgttttccctgagagccccctcatctctgcgctgccctcacttttgggccttcctttgccggntggcaccagaaatccggccgggagactggctctccagccaaacaaaaaaagccctgtcacccctcgccttgggtgtccctctcctgcctcagcttaattttagaggatattgnggcctggtttttcttgtccccttcataccctagtccctggacagctgaggagatgaaaggagccacaccacaacaatggcggcctgcccctccacacaggggagaagcacgctcaggcttcctctgctttgtctcttcagacctgtggttgctctgctcatccatgcccaaggttcccaggtgcaggacagaggtgtggcctattgtaccttgttctgaaataaagcatctcctgcttcnnnnnnnnnnnnnnnnnnnnnnnnnnnnnnnnnnnnnnnnnnnnnnnnnnnnnnnnnnnnnnnnnnnnnnnnnnnnnnnnnnnnnnnnnnnnnnnnnnnnnnnnnnnnnnnnnnnnnnnnnnnnttnaaaacacccttcgacccccaaaaaacttttaaaaaccaaacctttggcaagcggggccccc

SEQ ID NO: 363746 - DNA, 535 bp, Homo Sapiens
  misc_feature (391)..(449): n is a, c, g, or t
ggtaggcagtaaataaaatagtaaatattatgtgtcctataatttgacctaagctgtgtgcctttggaatcagctctaagccagggccccccgggagtcatgttaagtaacacgtatcataaagtgacatacatcaaggttatcttatatagtcataacagtattattgggtctttcaaaaacagctggcagattgagcttttaatggctatattgatacagtagatagagcacctctaaggagtaccaggtataatgtgccatttctctcagcaacaccatttttgtgtgcagctgaccctctaacatggtatcaattctagctgaccaaagcacattctatcaggcagccaggcttggaaattaggtccatttaaagtatgtggcttannnnnnnnnnnnnnnnnnnnnnnnnnnnnnnnnnnnnnnnnnnnnnnnnnnnnnnnnnnggattgcttgggctcaggattttgaatccagcctgggcaacatagcaagaccccatctttaataaataaattatgttttgggcatt

SEQ ID NO: 363747 - DNA, 708 bp, Homo Sapiens
  misc_feature (83)..(83): n is a, c, g, or t
  misc_feature (282)..(295): n is a, c, g, or t
  misc_feature (399)..(399): n is a, c, g, or t
aggttagtccctttaataaatggaattataaacttgtcccataaatacctccacctcaaaataattgctgcacaagcagcgtngttacctcagtggttagtaaagtcctgtggtcctaataaaactatccttggggaacctcggagtaaactgatttgcagataagatacaatgctaatggttgcaatctgattgccttaggagaaaactgaagtcattctccagcaaacatctcccaaggccagctgaaccctcttgatctttagggaattcagatctttnnnnnnnnnnnnnncagtagcatcaggctgtgggcctctgcttggccaacttccgaccacacaaaaagtttttctatggaccttgtaaatcatcaacccctccttggtcttttccagntcctcagacttcactagaatccagaaacacctctatccaaaaatctacaaccctgggacacaaagaagccgagctggaggggttgggggacgacgagagaaccctgtgttaggtaaaagctggaactcatctcttttccgagccacctggtcctcagtttcccgtattatgaatgttacaaagatgagctggctcttagtcctggccgaggacaccacctgtcctggcaactacgggtgccatttccttgccgcttccgaaagcccaagttatctttaagggatgtcagctttgcaaaacccgcttcag

SEQ ID NO: 363748 - DNA, 1083 bp, Homo Sapiens
gactgcctgatcctcttttttctgcagttcaagggaaagacgagatcttgcacaaggcactctgcttctgcccttggctggggaagggtggcatggagcctctccggcttgctcatcttactctttgtcacagagctgtccggagcccacaacaccacagtgttccagggcgtggcgggccagtccctgcaggtgtcttgcccctatgactccatgaagcactgggggaggcgcaaggcctggtgccgccagctgggagagaagggcccatgccagcgtgtggtcagcacgcacaacttgtggctgctgtccttcctgaggaggtggaatgggagcacagccatcacagacgataccctgggtggcactctcaccattacgctgcggaatctacaaccccatgatgcgggtctctaccagtgccagagcctccatggcagtgaggctgacaccctcaggaaggtcctggtggaggtgctggcagaccccctggatcaccgggatgctggagatctctggttccccggggagtctgagagcttcgaggatgcccatgtggagcacagcatctccaggccatctcaaggctcccatctgccttcttgtctctccaaggagcctcttggaaggagaaatccccttcccacccacttccatccttctcctcctggcctgcatctttctcatcaagattctagcagccagcgccctctgggctgcagcctggcatggacagaagccagggacacatccacccagtgaactggactgtggccatgacccagggtatcagctccaaactctgccagggctgagagacacgtgaaggaagatgatgggaggaaaagcccaggagaagtcccaccagggaccagcccagcctgcatacttgccacttggccaccaggactccttgttctgctctggcaagagactactctgcctgaacactgcttctcctggaccctggaagcagggactggttgagggagtggggaggtggtaagaacacctgacaacttctgaatattggacattttaaacacttacaaataaatccaagactgtcatatttagctggat

SEQ ID NO: 363749 - DNA, 700 bp, Homo Sapiens
ggcagtactcccgggttataggtagcgaggcctgggtggcgaattcggcacgagggcgagatggtaattttggtggttctctacctcggcccacgccgcctgagttagaaacgctgcctccggcacagagcgggggtcgccccgctgcgcatcagccggtgggtcgctggcgctggtggcagccgtgcctgggttcccgccccgggtcgcccgccgctcccggccccgctccgctcacaatccgatggcggcggccgtgcttagggattcgacttcggttcccgtgactgcagaagctaaacttatgggctttacacagggctgtgtgacctttgaggacgtggccatttacttctcccaggaagaatgggagctccttgatgagacgcagaggctcctgtaccgcgatgtgatgctggagaactttgcacttataactgcgctggtttgttggcatgggatggacggatgaagagacacctgagcaaagtgtttctgtagaaggagtacctcaggtcaggactccagaggccagtccatccacccagaagattcaatcctgtgacatgtgtgtcccattcctgaccgacatttagcacctgaccgatttgcctgggcaggaactatacttgactggggcatgtgcggtctttcaccaggaccagaagcatcatagtgcagagaaacccttggaaagtga

SEQ ID NO: 363750 - DNA, 852 bp, Homo Sapiens
  misc_feature (577)..(639): n is a, c, g, or t
  misc_feature (647)..(728): n is a, c, g, or t
gggtgctctctggtgtttctgattttcctgcctttattctgtcttctcttgtcctatctcattccagcccacatcttctcctttcctgattacttttgttgtcctgcctcttcaggtaatggtcacagatttggctgtaggcacgttaccagccctgtggcttcttgactcttggttccctgttaactctgtttctgagaaatgtgggtatggaggtgggtgggaaagctcacttccatgaaggatgtctccatgctaggagctgcctgcaccctggcaaaggtggccagtcacgtgaaggtgggcagggcccttagcatggccacacatgtccccagggcagatcaaggggcctctcagaaccatgttccccagccaggtgaggaccattttcactgggacccaggccaaaaccatgtgggtgcacaaagccaggcactgccaagtggaacatgaggttatttccaaatcatgggagccacccaccagggagagggcaggatggaaaatcccctggagcccggtcaactttttgctcatggctagtgaaataaagttgtttgagtactacgatgcnnnnnnnnnnnnnnnnnnnnnnnnnnnnnnnnnnnnnnnnnnnnnnnnnnnnnnnnnnnnnnngccgcggnnnnnnnnnnnnnnnnnnnnnnnnnnnnnnnnnnnnnnnnnnnnnnnnnnnnnnnnnnnnnnnnnnnnnnnnnnnnnnnnnncctgcgcgtcccccgctcctccatcaaacttctttcccgccctttccctcgtggggagggagccctctccaactattccctgttactcggcgcgcgaccactcctcaccaacaaaatcacctgg

SEQ ID NO: 363751 - DNA, 482 bp, Homo Sapiens
gtagaggcaggagaaagaaaagagcaaggcactagtgagaaaaattgctatatagaatattgagaatagatacaaggagacctacaggtttacaacattaatattggccaatacttgattggacagtttaaatttttcaacctgaaaggcctttgtgccccaaagtttggtaaggagattttgtaaaaacaaacaacaatagcaataaaaaatcagggaagattaagagatttcataaggagcaagaatttataggtaatacttaaaaggtataggtatgattactattttggtgaataataggcacatggtagactgaaattcggcaacagctactgtgcaaataagcatatctgtgattatggcttatatctggttggggacccctgttgtaagccattctttttagtacaggttaagctccatttctcaatcacagttctgttattttcatctgtgggaaataatgaattctgtttcag

SEQ ID NO: 363752 - DNA, 283 bp, Homo Sapiens
agcttttcccaggtgcagcgtgaggttgatggagctggggtactgcaccccggccagcatggtctggctttgccaccaggtggtgtcggcctggttgttgtagtcggtcaggaaggctgccccgtgctgcaggtggggctgcccggcgtcgcacaggtgacaggacttggtgaccccggtcaccccggtctgcacacagtattcctcgggcggagtcccacacgtgttggtggccaccacagtcacgttgaaagcggcgaaaacgaactcgggcatgcagcgc

SEQ ID NO: 363753 - DNA, 547 bp, Homo Sapiens
tagcattggggagaatttagatcaaactaatttgtagaatcaaggaggtcaagtaaggtcacaggggcacttgggttgagccagggttttagcccaggtcttctgacaactgcctcatgtccttaccacaaaggagctgctatcctttgcctttccccaaagagtgaagactgcttaaagctcaaggatctttcttgaatttgtgaaatttgttcaggcaaggtgaaaagcaaaaacctatggttcacattgactttttgtattgatcattgtcttttgaagacaggaagtatgatcagtctctgccacttgtgctagtttttgtgtggtgtttagaaacatgggcatttgtctggatcctaattacaaataagtaacctagaattctcttcagatagtgcactaacagcaatgaatctattctaaatttcaaatatccaaattaaaatgactgtattagcataagtactgaaatggataatacaataaatgtattaatggaattgtttttgtgcatgatacagaaataaatgatagtaacgaaact

SEQ ID NO: 363754 - DNA, 294 bp, Homo Sapiens
ggtgcccagaagggtgacagatttctgaaggggaaaggattcagatatgaccttttctttagtcccaaccactagttttaacaaatgtgaattattgaaatgtgaagggacaaaaagaatcatacatttaaactgtcttgttcagcacaccaatattgtatgtcacaaatcatcatttctaaatctggattgattctgttgtgtttttgactgtttctaaagtaagtgtgtataaaagtctcctttttaaaaagatcatattattaaataaagcattttttgtagaaagtgcca

SEQ ID NO: 363755 - DNA, 570 bp, Homo Sapiens
ctgaactttgtcaattaatttgaggctatttcctatttgacccccttttcttttttgaaattccctgaaatgatgttattctagagaacttctatgtcaggttcctttggatacccttgaattcagtgtagtaatattttcagacgtttccccaataagtgtgttgaagcatacatctttacgctgctaatatgtctaaatacatatgttatcccttgatttttttaaataactgagagctctatttatttatgggattattaagttctgatgaaaatataaatgttgacttaatcagcatagtaaactgatgtttaaaattccatacttcatgcccacactaatttttaatgttattttcagtggttgccgatttccatttgatgaagaactatacagcttaaaaaaatacgttagttatatctatctagtggttgtctgttttacccaggaattcttggatatttagttttctgggtactgaagtggatgggagggggaatgattaaagaacaaattataaaagtttgaacaaatcttttcaaattaagtatataaaagtaaactttt

SEQ ID NO: 363756 - DNA, 1111 bp, Homo Sapiens
  misc_feature (598)..(598): n is a, c, g, or t
tggaccggtccggaattcccgggatcgcggccacaggagctcagcgccggcgctgcgcctcccagtcccgccgagaggggcgcactcgccgccgcggggcccgccgccgctcaccgcagccccctcctggcgacccgcaagaggactcagccgccggctgcgaccaccgtggactccctctatggaagggaatcctgggagtcccggccgtcagaggagttcccaaatccaaagggtccatctccaaggcgtcactccaggggtccgcggttcaatttgctgcccattgcaggtgatgctgtgattgttgcctgcggactgggaagcacgatggctccaaaaggccagcggggccgagaagcagggacagagaccagcatttaagggatctctggtgggggcctccctggagttctccacatgtaaatatagcgaaaaaagaaaacactacgttactagaataaacacgtcctaaaatttctgtgcaaaaacacctttttgaacagcaaagatttcacccaccaaaacaaggaagcaagaagcttccacagtgtgcaggatccgaaacaggaccggcccggcgttgggtgagagtggngggaggggttgtcggcttctccatccagcttgccatgttctgtcgtcggtttcacattttcagagagactttaccagatgcaggaaatgaggatgaaggcaactctggaaggatgcaaagaagggagagcaagcactgtacctactgtctgctgtctaaaagggctggtctcataactaaaaagtcccagtccctgagatcttgtgtgcaaccgtcagaaatagttcaggacatcaaattgcacagagaaggattcagatgaaggggaacaagaactctgtggaaaactgttggggacagtggcacgagttgtcttgcaaggtgatgtctgtcccgtggagggacacaagagcgaggacagcatggttctaatggccagggcatgtcttcttattccatgtgacagtggctggctgagttgctagtacgtttttgaaatataccctttgaaatatgttgattattctggacatctgtaaggtgggagatttgaataaaaagacttctgctgtc

SEQ ID NO: 363757 - DNA, 528 bp, Homo Sapiens
gcattcttaatttcctttttagtttaacactgtttgtttgagcttagggaagacaactaccaagaaaggccaggaacagttgactacacaatgaagattccatgcaaaatgttcaatattggatctaaaggggttcaaaatgtttcatactaaactgtttgggaatatatttgttaactctgtgtacacctaataaaattcaatgttttcttctcagaagagttcattgagaccaaactgaacctcatttattgaaaattatatgtgggatcaatgtactggcctcttgttattctttctatgtgggaggatgacccagtcatcattttccccatctgcactgtatttattgggaaattattttgtcactgctttcataaatcttcttcatgacagcccttgcccagcattaaaaaattctggcctgcttagctgattaaaggtttagtagaaatttaactgtttgtttatgcttatttcattttcatattggattctacttgaataaataaaaagttagcagaaaaa

SEQ ID NO: 363758 - DNA, 1120 bp, Homo Sapiens
gggtccggaattcccgggatccccattccctgcgacatggcccagcacctgaagagccaggagcccaggctggactttgccttctttgacaaccagccccaggccccttggggtacttgatggccccctcaagacctctggaatccagccaagtgatgcacccaaatgatccacctttcgcccactgggataaatgactcaggaaagaagagcctcggcagggcgctctgcactccacccaggaggaaggatacgtgtgtcctgctgcagtcctcagggagaacttttttgggaaccaggagctgggtctggacaaaggagtaccctgcattacgtgggatatgtgtgatcaattggggacatgcgacacacaatgagggtgtcatgacaatgcatgacacgtacggttatatgtggcagtgtgaccccttgacatgtggcgttacatgaaagccagtgtggcacgtggttctggggcatggggtggctggcatcccaagtggcaggatacatgattgttggtctatatatgacacatgacaaatgtccatgtcacaggactcatggctggccagatgacctcaggctggcccaagatctaatttattaatttttaaagcaaatacatatttatagattgtgtgtatggagcagctaagtcaggaaaagtcttccgcccgagctgggaaaggggagagtgtccatgcactgaccagtccaggggctcaagggccagggctctggaacaagccagggacttcagccattaagtcccctcctgcctcaatcctcagcctacccatcttataaacttgatgactcctcccttacttacatactagcttccaaggacaggtggaggtagggccagcctggcgggagtggagaagcccagtctgtcctatgtaagggacaaagccaggtctaatggtactgggtagggggcactgccaagacaataagctaggctactgggtccagctactactttggtgggattcaggtgagtctccatgcacttcacatgttacccagtgttcttgttacttccaaggagaaccaagaatggctctgtcacactcgaagccaggtttgatcaataaacacaatggtattccaa

SEQ ID NO: 363759 - DNA, 896 bp, Homo Sapiens
  misc_feature (613)..(642): n is a, c, g, or t
gacggcaaagtcgccgccctggccgccagcccggcctcggtggcagtggactcgggctctgaactcaacagccgctcctccacgctctcctccagctccatgtccttgtcgcccaaactctgcgcggagaaagaggcggccaccagcgaactgcagagcatccagcggttggttagcggcttggaagccaagccggacaggtcccgcagcgcgtccccgtagacccgtcccagacacgtcttttcattccagtccagttcaggctgccgtgcactttgtcggatataaaataaaccacgggcccgccatggcgttagcccttccttttgcagttgcgtctgggaaggggccccggactccctcgagagaatgtgctagagacagcccctgtcttcttggcgtggtttatatgtccgggatctggatcagattctgggggctcagaaacgtcggttgcattgagctactgggggtaggagttccaacatttatgtccagagcaacttccagcaaggctggtctgggtctctgcccaccaggcggggaggtgttcaaagacatctccctcagtgcggatttatatatatatttttccttcactgtgtcaagtggnnnnnnnnnnnnnnnnnnnnnnnnnnnnnntccggacaagtgaacacattaacatgattctgtttgtgcagattaaaaactttatagggacttgcattatcggttctcaataaaattactgagcagctttgtttgggggaggggaagtcccctacccatcccttgttttagtcctatattaaagaaaaatctggggtcctttttaaatattccttggggatggtttttccaaacccggctgggaaggtcttctttcttggccatggccccccaggaaaatggga

SEQ ID NO: 363760 - DNA, 522 bp, Homo Sapiens
ccgttagtgtgtggatagtatgtgtgtgtccgcactcatgataacttgaatgttgaaccagacatagggttcatttttgaaaggttaaaccacactgtttcaggaacttgctccaaatactacttggttatcccttcctttacccagttaagaactaaagagtgtgaatgtatgaaacacactgggttgggattttctgttgaggatatgcagggcattttggcatgaggcaaatacagaagcaagatttcattctacttggtgatttgaatcatgacagtcctcattccaatctctctttaattctctctggccctgcccacactctgtatttgaaaatcttgtttttgctctttccggagcttcacccctctacttacatattgtaaagttgtataaatctatcattgaaaggtcctctctgccagcagtggtgccaccctttggtttgctgtggtactttgctgtgtactccgtggcatcatgttactgtgtaaataaattcattttaatacacactaa

SEQ ID NO: 363761 - DNA, 785 bp, Homo Sapiens
  misc_feature (14)..(14): n is a, c, g, or t
  misc_feature (26)..(26): n is a, c, g, or t
  misc_feature (42)..(42): n is a, c, g, or t
ttaggggatgcctnaagcccagtgantcctgcctcaactccngaagaaaggagttccaagataccccctacttttgccctggaagatgtactttcctcaggcaggatgacaaaaatattccatagatcctgagaatgcagtataaacacctctgcccaaacttggtagggggagaggatggtactgtatactggctcaggggtgatactagtcagacaagcacaaggtaggaagaacagaagataaaccaaaaaacaaaatggatttctccatgtatagttatctgatgcaagggaaaatacacacaacaaagagttaaggtgtcttcaaagtatctgcctatgaataagaatttgaaactaaaaaggacaagctacattaccctcaagtatatttcatataaatcagttctcaaaaaaataccttccaggtacagacatactatttatggtacagtatatacaaatatagcagtataattcaatttattgctagaattttatttggttgttagaaaatctgtaagggtgtatatatattaaaaaaaggtgtggggtgagagtggatggaaggcagtcagaagggtgagagttattttcaagttacctaaagtgccaggctaatttgttttaacctttccaagaaagtgaaactgagcataagctataatgagataaggggacacattcatgggaaaagacttcatcttgctttaactaaattttaatacttctggaaaaaaaatttaagtttggttcacccaccaagctgaacatcatgtaaag

SEQ ID NO: 363762 - DNA, 516 bp, Homo Sapiens
tgggatggtgagtatccaatctgctgtgcatttgacaggatctctgaatggctaggtaatggatcccaagcaggctcacaaatttaaatgagggctttgtgtgcagaaagaggaataagtacagattattttcctaccactagatttttggggagagtcaccatggaatgttgacaattacttaaaatattttaagctcccttgctgaattcctgtcctgtccctgaggaatcagatggtcatacagccataggcacccacccgaaatttccctaggagttggagtaatgctagaattgaagaccttctgagtaaagggcttctctgccttctcagaggcaggagaatttgcactggttgtgttaaatgtataaaaagctatatgttcaccagtttactcatttccaatgtgtagatgaataaaatgtagtgtacaaattatttgaaaatcccagaaggaaggtacttttcaaatacagtattttttttaacaaataaacttacgatttttacagc

SEQ ID NO: 363763 - DNA, 448 bp, Homo Sapiens
aatggggacatttgccattttcttcccagaaatatgtaatcccctggctgactaggaactgttaaaacatagtgtggaactggatgatgccctccgacaaacccagagaagcccaagttggggggagctggtgccctggagtgggccctgtgcacctcacctggcggaggctgggggggctctgtcagcaggaccctagaggagactctcattcgattttaaagaagcacaacgggtcattttcctttgtatgttcctagcgcagaactgtttctaaaacaacttgaagtatagttttgttatctaagcaatttttgttttaagtaagtaagtgtactagaatgcgaagccgttatggttcaggtttttaaaaactggtacagtattgtatttgtctcatctgttgcactgtatttcaatcatctgtaattaaaatgatcatatgttt

SEQ ID NO: 363764 - DNA, 592 bp, Homo Sapiens
  misc_feature (403)..(413): n is a, c, g, or t
tccccgttttgtggaatgctttctgtgtttcctacttctggatgcctaaggagtggccagtcatactcctggctgaccactgccaggcaccgtggttttcctcactgaactcaaggagtcaccctccgtggggaggccacactcacagctccaggcctgccatttagcccttggggcttggctgtaaagttgcccaagaggattacaggagctgccagccaagtttaatttggccaccttagagaactgcagcaaggccctatcagcttcccattagacaaacaactgcatttaaattaaataaagtttgcacctctagggagtgctgacctgaaaataagaaccttctgtctgtgattatagagtacacttgcttttattaattgctgattcttagtttacnnnnnnnnnnnttagaaaagcattaccatttaccttccaaggggcaagagattctctacaatacccttcccccaaccctctcctcaaatttccaaatcctaaatactttgaagaaatttgtgtgactgtttaaaattgagtatgtccttctaactatgtctttgaaaagtatgttcaccacgacgcaggt

SEQ ID NO: 363765 - DNA, 434 bp, Homo Sapiens
attataaccttattaactatgcataggcctaagaaaggtggcaatgaactgtgcatgtaaattttaaatgggtactttgtgcaattcgttaaaagaagatactctatgaatatgattctatatattgaaatcagaaaacctaccaaacaaaaacatcagaagctgctgccataatgactattttctactgtaggctactctggaaataattcccatatccttgctttgtaagttggtaatatcactatgcatttctacacattttataaatttgatttatgcagattttgatacactgtatgtttctgtagaaattgtataaatattcaaaattttattaggataaatttgagaaacttacgtatatcttaattctgggttgcttgttttttaggtgacaaaaataaaaaattgcccttttaattcccaaaaaa

SEQ ID NO: 363766 - DNA, 828 bp, Homo Sapiens
  misc_feature (322)..(362): n is a, c, g, or t
ggatttttgacagtgttgaaaatgttcagaaggttgctctagattgagagaagagacaaacacctcccaggagacagttcaagaaagcttcaaactgcatgattcatgccaattagcaattgactgtcactgttccttgtcactggtagaccaaaataaaaccagctctactggtcttgtggaattgggagcttgggaatggatcctggaggatgcccaattagggcctagccttaatcaggtcctcagagaatttctaccatttcagagaggccttttggaatgtggcccctgaacaagaattggaagctgccctgcccannnnnnnnnnnnnnnnnnnnnnnnnnnnnnnnnnnnnnnnntccagttcatgagaatctatatttaacaagatctgcagggggtgtgtctgctcagtaatttgaggacaaccattccagactgcttccaattttctggaatacatgaaatatagatcagttataagtagcaggccaagtcaggcccttattttcaagaaactgaagaaatttcctttgggtagctgtgcctctttgggtagaaaaggctaggtacacagctctagacactgccacacagggtctgcaaggtctttggttcagctaagctaggaatgaaatcctgcttcagtgtatggaaataaatgtatcatagaaatgtaacttttgtaagacaaaggttttcctcttctattttgtaaactcaaaatatttgtacatagttatttatttattggagataatctagaacacaggcaaaatccttgcttatgacatcacttgtacaaaataaacaaataacaatgtg

SEQ ID NO: 363767 - DNA, 869 bp, Homo Sapiens
  misc_feature (42)..(81): n is a, c, g, or t
  misc_feature (336)..(402): n is a, c, g, or t
  misc_feature (440)..(578): n is a, c, g, or t
gctttagggacctgctgtttcctagcgcagccatgtgattannnnnnnnnnnnnnnnnnnnnnnnnnnnnnnnnnnnnnnnccaccacccttgccatggaggttaagcactttaacacagtgtctggcacttgggacaaaaacaaacaaacgaaaaacatttcaaaaggtatttattgagcacctgcaggcgtgacctgacagcccaagggtgggtggggtgagggcttgaggacttgggcgggacacaggctccaaactggagcttgaaatagtgtctgatgaatgttaaattatctatctatctatttatttatttatttgagacagggaaagnnnnnnnnnnnnnnnnnnnnnnnnnnnnnnnnnnnnnnnnnnnnnnnnnnnnnnnnnnnnnnnnnnntgggttcaagcgattctctttattcagccccgggagtnnnnnnnnnnnnnnnnnnnnnnnnnnnnnnnnnnnnnnnnnnnnnnnnnnnnnnnnnnnnnnnnnnnnnnnnnnnnnnnnnnnnnnnnnnnnnnnnnnnnnnnnnnnnnnnnnnnnnnnnnnnnnnnnnnnnnnnnnnntgagccacaaacccggctgattaaagttaaataaatactagttcccttctcgtccaaaggagcagggaatgggaaccgggaaggcacgaagtctctaaagcatccagaagacccctacaccagggtctggtccgctcctattcgccgcagcctttctgttccgcctgcaacccattttccagacagtaaaacggcggcgcacttctttctccgtcaggcaccaggtcataaggaacccaagagtctgtgcctctgaggcccaaattatttgctgtttcctcaggggagccg

SEQ ID NO: 363768 - DNA, 528 bp, Homo Sapiens
ctgtgatttttatgcattaaaagcacatttcatgtgtattcaaccctaagtaaagttgaatgaaacttaacagaatggaaattgctatgtctttttaaatggtccattttcaaaagacagtgttgaataaacatacctgtgtgataaaacacagaatttacatatacactgaagatgagtttttaatctcttactttaaaaagatttatttagaatcgtgaattgacataatcttgggtaatggaacggagatctgcaacatatcttttaacaacacttttttctaaattatttctaaggttgtgctaattcttttggttgtgaaaagttgaatttttctgttgccttcgttttcatcttctagtttgtctattttaataaatggccttacattaaaaaattgtaaagaaatgtataccaccaatttagaaattgttgccttttctgtaattaaactcgggtacaaattggcataacatgaaaacctatggaactagaattattattaaagaaatattagatgatcat

SEQ ID NO: 363769 - DNA, 762 bp, Homo Sapiens
  misc_feature (162)..(162): n is a, c, g, or t
  misc_feature (277)..(285): n is a, c, g, or t
  misc_feature (298)..(298): n is a, c, g, or t
  misc_feature (306)..(306): n is a, c, g, or t
  misc_feature (323)..(331): n is a, c, g, or t
  misc_feature (537)..(587): n is a, c, g, or t
aggaatgcatggttcccactccccatcccacttggaaaactccaagggggtgtggtttccctgctcacacccacaatggctgctgattggctggggaggcccccgcccttttctccctttggtccttcccctatgccatccccttggggccggtccctttgntggggatgcaccaatgaaccccacaggaagggggaaggaaggagggaatttcacattcccttgttctagattcactttaacgcttaatgccttcaaagttttggtttttttaagnnnnnnnnntatatatatattntgggtttntgggggaaaagggaaannnnnnnnnctctttggttttgataaaatgggatgtgggagtttttaaatgctatagccctgggcttgccccatttggggcagctatttaaggggaggggatgtctcaccgggctgggggtgagatatccccccaccccagggactccccttccctctggctccttccccttttctatgaggaaataagatgctgtaactttttggaacctcagnnnnnnnnnnnnnnnnnnnnnnnnnnnnnnnnnnnnnnnnnnnnnnnnnnnaccccttggaggaaataacatgagggagaaaggaaaaggggaggaaacttctcccctcccaccttcacctttagcttcttgaaaatgggcccctgcagaataaatctgccagtttttataaatgctacaacacaacacctcgacacaattaaaactaccctgtcggcccgtctct

SEQ ID NO: 363770 - DNA, 736 bp, Homo Sapiens
  misc_feature (143)..(152): n is a, c, g, or t
  misc_feature (427)..(427): n is a, c, g, or t
gccataaagtggtattaaaactggatctcttttcttccatggcactactctcattttgaagtttatgaacagtacgacagtgtattgtaaataaacttcaaaatgttacagtagccaattgaaaatgtatatcccaaaatttnnnnnnnnnngtactagcagcaataaaattgcactagttttatctggtacatacaaaaacagccatttaaaatctgatgattctgtggaattggtgtccctgttagcaatggcagagaccagcctggagcctagatctggtgcttcttctgtgctgtggtttaccccaaacctttaggttgtttattcattcagattagatagactggagccataaagttaatttgcacctagctttttggagaatagccatgattaactgctattcgtggtgggggtggggggnaaccctatgatttactatgcagatgaagagggtaggaactaaataaaggactttgtaagccaaagtggttgggctgctttgtcaaattccaccctttgcttggttccaacatggaatttctcctttaaagatttcaatatcccatcaaaagtacagttagagaatacctagtgaatttattgaatataatgctaagaatcaaaagacttgtactagtttacctctggctttggtaagtgtggctttgagtaataactgagctgtttccccgcatataaaatagaaataaataagtagtcatcatgaaaa

SEQ ID NO: 363771 - DNA, 419 bp, Homo Sapiens
catctaaatgatcagtttattgaattttagtaatgtaagttgagatcatgaaacatacaatctaattcaaaagaagaatcataggtaccaattcaacaccattagcactactttcacaatagtgacaccccacttataacactcttttttgggtctctgactgtgaacaagattgtggaaggttggttgaggttaggcctaggcattacggttaagaaataacagatgctaattagttagtggggaagtgaagctcatgtttaggccttttcataatgtctttatgctaaataaattaaatgaagtaaacagccatggctattgaactacagaatacataaaaatacattctgtgattcacctataaacaaaagagtaaagcagaatgtgtcaaattttccatagcaggtaaagcatag

SEQ ID NO: 363772 - DNA, 727 bp, Homo Sapiens
tggtaccggtccggaattccctggatgtttcttatgaaattttcaggggatagaaggaaagcgcttgtgctcctagcttaagacaataatgtgttttttctggggagctgtagttttgtgtctctgattcccaaagtgaaaagcagtgatttcattagtaggcgattacatctaggaataacatttggtaaggccagtaaaatagcaggtgctttcgttagagatatgtgtgcgtcattgtactgggtcattaaatcttaagaataaaaatagaatgacttatttagaattaatgcttattagcagtgagaacaaatgacagattgttctatttattaatttgttctaggatcttattctattttattcaaagacaagactaaatgctcttgtgatagcattctttccatgaaacaacaggaaagctgtatcatacatacagtgactggcctccagtttaaccaagaccctgaaaaaacagctctccttcagggctggagttctactgctgctttcttggtggggataaagccttcagggcatgacttccatcgtggctttaaaacagctttgcttacctggcataaaaattgagtggtacctctactgaaaccagttacataaaacactgtgaatgacacttcataaacccattgtgtaccttaaaattgttactgattgtttaagacgcatgactgtcagtggtgaataaaggaaccaaaagatt

SEQ ID NO: 363773 - DNA, 535 bp, Homo Sapiens
atgaaacaggaacccaggcctagaatcacaaaggtcctagaaaccacttggctgtctggcctctcaggtgtcagggccatccagagtgagacagcattggagggacaagtgtgcatgcagatgtcctcagacgggaaggtttgagaagggtcagatggtaggcgggcctaacaagggctccgtgctagccactgtcccgcacacagacaggatcaggtcatcttgatatggagatcagtccccaaatcactgaattgtcccagcagtgctatgccctaggtactaccaatatcactcctctatttcccagaggaggaagcagcagctagactccaggaccttggggtcatatctctcagaaagccaagagtgcaggatgagagctgtctgtctcttacctgcctgtatttgtgccccatttttaaagagcagagggcctgggccacaggaaaggtatcagcccttggtgataggcacattttttaccagtctatcatttggtcattaaatttgtttacaatatactttgctatga

SEQ ID NO: 363774 - DNA, 343 bp, Homo Sapiens
ccctcccctccccacctcccccactgcgcgttactccaggatatgccgagtgcacgtataaggtcatcttcgtcgtcaccgtggacctcccccttcctctgcacgtcgtccaacgtgggactggcgtgtcgggcttccctgggaggatctggaggttgttctctgcagagaaccagcctggctcctggcgcgcacctctgctcccttctcctcactacccacccacgcatgtaccgggaaaaaaactactatgcccttctagaccatgttctgagaaaagatcgaaaatatttaacaagagataataataaatctgatgccggtctttgtgtgtgttggggat

SEQ ID NO: 363775 - DNA, 921 bp, Homo Sapiens
gcggccgctcttgctgaaaggtggctgggagaggtcctggtcagagtcggagtcagagtcccaggaggggagtggagggctcaggcactggtgccccttgtggcctcttaggctcgaggccttgggacaggcccccgagcacaaagtgaggctgtctatggagttctgcagcacgtgcacagcagaccatatatcactcagttccttctggaggtcatccttccagcagccactggctccctgcggtatctcttcagtctccggacaggcggctgtctcatgaccctgctgcttcatcttggtcaggattttgcggcatttcacctgcgttttctgcattttctgaatgttcaccaagttctctgagatctcatcctcctgcgcttggagcttctgatagatgaaggtcacctcctcccgcaccagttccagctcctcccacaggaacttcttgctgtcccggatctcctgggccagcagctgcaggcagcgagtggtgcgggcccgctgcatctcctcactgtcacgcagggtcttctccagcccctgaaggccttgggtcagggccccatacagctcctgccggccctgctccatgccccacttgtgctcctccttctctccctggcggcctgtggggctcagcacctcttcaagctgctgaatcttgatttgctgcaagcagctctccttctccaacatggtcactgagtggttcaggaactcgaaagccttggtctgggcctgtaactggctcttgagtgactcaagttcacatcgcaggagcttctgggagtcgggaatcatcacaatggtcttggctttgactttggaagagctggtctccaagggcttcacataccacctgttcatgctctcccatcagggaccacgaagccagatcccgggaattccggaccc

SEQ ID NO: 363776 - DNA, 1211 bp, Homo Sapiens
gcgaccgctcttgctgaaggtggctgggagaggtcctggtcacagtcggagtcagagtcccaggaggggagtggagggctcaggcactggtgccccttgtggcctcttaggctcgaggccttgggacaggcccccgagcacaaagtgaggctgtctatggagttctgcagcacgtgcacagcagacctgcaagaagacaaggagctgggggcgctgggagactccacactgctcagggtgtagacagcagtacagctaaggttgggggccgtggtggggtgagtcctagggggtgagggaagtctggactcaggtgggctccaggttctggtggtcactgccagatcccgttgggggaacgggttcagaggagggttcaggggtcagactgcaggcttgggcatcaccatatatcactcagttccttctggaggtcatccttccagcagccactggctccctgcggtatctcttcagtctccggacaggcggctgtctcatgaccctgctgcttcatcttggtcaggattttgcggcatttcacctgcgttttctgcattttctgaatgttcaccaagttctctgagatctcatcctcctgcgcttggagcttctgatagatgaaggtcacctcctcccgcaccagttccagctcctcccacaggaacttcttgctgtcccggatctcctgggccagcagctgcaggcagcgagtggtgcgggcccgctgcatctcctcactgtcacgcagggtcttctccagcccctgaaggccttgggtcagggccccatacagctcctgccggccctgctccatgccccacttgtgctcctccttctctccctggcggcctgtggggctcagcacctcttcaagctgctgaatcttgatttgctgcaagcagctctccttctccaacatggtcactgagtggttcaggaactcgaaagccttggtctgggcctgtaactggctcttgagtgactcaagttcacatcgcaggagcttctgggagtcgggaatcatcacaatggtcttggctttgactttggaagagctggtctccaagggcttcacataccacctgttcatgctctcccatcagggaccacgaagccagtcctcagctgtgacgctgaagtttgatcccgcggggacaccatcgcgacgcgtgggtcgacgatatcccgaaacttccggccggtaccag

SEQ ID NO: 363777 - DNA, 799 bp, Homo Sapiens
caggatggaggagagtgtgtcttaatcaaaacccacagcttgcttggctcaggaacaacagaagagaataaagaaaatgacctcagaccttccttacctcagtcttatgcagcgaccgtagccagaccaagtgcatcttcagcctccacggtgccaggttattctgaggacggcggggcgctgcgaggagaagttattcctgaacatgagtttgcgacgggaccagtgtgtcttgatgatgagaatgagtttcctcctataatcttgtgccgtggaaatcagaagggcaaaacgaagcagtcatgatgagaagcacacctcagaaatcaggacatcccccctatcaggtggttttggagaaaacaaggaaggcggaagaatggagtgcaattgtgtgagcagaaaggggggcaggaatcccgggtgctccactgcttaaaccacaggacctggttaactcctcaccaagcttcccacgaccctggttgccaatgggcgcgggagacattgtatacacatcatgctatttaaaatacgttcaaactatagtgtaaatgctaattaaccatattggtatataaccggaattttatattaaaaggggcctcctttttaaatatatgccgtgtaaaaaatgtacttataggaacatctctttgaattgtatttcttgtatattacatacttagagagagactcttttagccaggcaaagtcttttttggctgtggctggaataaatcatttattacttgggagtcccattttggacactaataataaaatcatggcaatgcaa

SEQ ID NO: 363778 - DNA, 703 bp, Homo Sapiens
atatactgtaggagtcatcattgatgttatttttctcttatatatctgtaaagatttttggcatatgaatgtaatattaaagtcaatgatgctataacttgcgatgtttgcatcatgtcaacctttttgaaggagtgaaaaagccctactatgtttttaaatagcaagtgtaagctcagtgctagagtggatatacacaccgcatgttttcatatgtggcacttttatgtatcatgttgggttattgttctagactggactgttaaatactatgtttgaggctgggttgtcatttttataactgtcttggtgttttatggccattatttattacttttgatacacagaatgagctgcatgcatttatagagcaataagaggatgtatttaatgtgccttgtttttaactgaataagaactggaagcatgaatcaataaaactgattaaaatggtctatttgctagcattttgatgttacttgcagtcagataactttgattactgttgaagtttaaaaaaagtttgaaaatatttttacaaactgtttttgatgacacaaaagtgaaatatctacagagatagatgtaattttataagactgccagaattatttgtattaatttgttgctgtagcctttagggcatgacttctgtatttgtgcaatcctattctacaattacattcatcctattacaactcaa

SEQ ID NO: 363779 - DNA, 905 bp, Homo Sapiens
agcggaaggtcctgcctcctacctccttctgcttcggtgcgtttgcttctgaggatctccagtgtcacaacaaacacatgccagccctgttttacagggagccctggaggagttgggatagaggccacattgactgagggtagttgccagggtcctgcagttatacacaaagtccttaggataagaccatggccttgagagcatgtggcttgatcatcttccgaagatgcctcattcccaaagtggacaacaatgcaattgagtttttactgctgcaggcatcagatggcattcatcactggactcctcccaaaggccatgtggaaccaggagaggatgacttggaaacagccctgagggagacccaagaggaagcaggcatagaagcaggccagctgaccattattgaggggttcaaaagggaactcaattatgtggccaggaacaagcctaaaacagtcatttactggctggcggaggtgaaggactatgacgtggagatccgcctctcccatgagcaccaagcctaccgctggctggggctggaggaggcctgccagttggctcagttcaaggagatgaaggcagcgctccaagaaggacaccagtttctttgctccatagaggcctgagctgactggagcagagtcatttgcttcagcaggatccttgtgggccttctaagatgaagccaccctcaggtccagggaaggttgtgctggtatttggctcatgacagccaagagcagatttgtgaaatcggctcaactcccaggtgagagcaagcaaaaatcttggctgggtggaaaggaaggcaaaagagtaaaaattaaaaaggccaggcccagtaagtgtaccttgtactttataaataaacctcaagcagctcaaggttgtccttctaa

SEQ ID NO: 363780 - DNA, 550 bp, Homo Sapiens
  misc_feature (222)..(222): n is a, c, g, or t
agtttgtttagtgagggtcagggaatgtaatgaagtgccaaaaattccacttgacctacgtactctacagtcaacagaaaagcactccatttttgcagagctctgagttaaatgcactcctcaaagcagatcagctatcaactgggaaagcttaatgcggcacagttggactagaaggatagtggccaaagcctcccaagaacctcatgtcccaagcaaagncttggggattgtatttggacctacccttctgcgagctgaaaatgaaacaggaaacatggcgatccacatggtctaccagaaccagatagctgagctcatgctgagtgagtacagtaagatcttcggctcagaggaagactgacagacaagacaagctactgaatacgttcacatctgtcttgatgcctaatatttttacatttctgtaaacatatttctgaaatattttttgcctttcaagcgacagatgcctcattttgtgaaaacttaatgatgattttgtgtttaagttccaaacatttgaataaaataattgacaataaaaaaa

SEQ ID NO: 363781 - DNA, 1876 bp, Homo Sapiens
  misc_feature (723)..(723): n is a, c, g, or t
  misc_feature (793)..(793): n is a, c, g, or t
  misc_feature (1792)..(1801): n is a, c, g, or t
caggcggtacgccccggagatacgggattgtaaagccaaaccccctaaaggtctccacactgctgttaacggcacacttgacaatggcttcagcagcacgcttgtacaagtgatgtgggagtgaggtcacatgccctatctgcctggaccccttcgtggagcctgtgagcatcgagtgtggccacagcttctgccaggaatgcatctctcaggttgggaaaggtgggggcagcgtctgtcctgtgtgccggcagcgctttctgctcaagaatctccggcccaatcgacagctagccaacatggtgaacaaccttaaagaaatcagccaggaggccagagagggcacacagggggaacggtgtgcagtgcatggagagagacttcacctgtactgtgagaaagatgggaaggccctttgctgggtatgtgcccagtctcggaaacaccgtgaccacgccatggtccctcttgaggaggctgcacaagagtaccaggacgaagctccaggtggcatctagggcgaactgagaagaaagcaggagttggctgagaagttggaagtggaaattgcaataaagagagcagactggaagaaaacagtggaaacacagaaatctaggattcacgcagagtttgtgcagcaaaaaaacttcctggttgaagaagaacagaggcagctgcaggagctggagaaggatgagagggagcagctgagaatcctgngggagaaagaggccaagctggcccagcagagccaggccctacaggagctcatctcagagctagatcgaangtgccacagctcagcactggaactgctgcaggaggtgataattgtcctggaaaggagtgagtcctggaacctgaaggacctggatattacctctccagaactcaggagtgtgtgccatgtgccagggctgaagaagatgctgaggacatgtgcagtccacatcactctggatccagacacagccaatccgtggctgatactttcagaagatcggagacaagtgacgcttggagacacccagcagagcatacctggaaatgaagagagatttgatagttatcctatggtcctgggtgcccagcactttcactctggaaaacattactgggaggtagatgtgacaggaaaggaggcctgggacctgggtgtctgcagagactctgtgcgcacgaaggggcactttttgcttagttccaagagtggcttctggacaatttggttgtggaacaaacaaaaatatgaggctggcacctacccccagactcccctccaccttcaggtgccctccattgccaagttgggattttcctggactatgaggctggcatggtctccttctacaacatcactgaccatggctccctcatctactccttctctgaatgtgcctttacaggacctctgcggcccttcttcagtcctggtttcaatgatggaggaaaaaacacagcccctctaaccctctgtccactgaatattggatcacaaggatccactgactattgatggctttctctggacactgccactctccccattggcaccgcttctcagccacaaaccctgcctcttttccccatgaactctgaaccacctttgtctctgcagaggcatccggatcccagcaagcgagctttagcagggaagtcacttcaccatcaacattcctgccccagatggctttgtgattccctccagtgaagcagcctccttatatttggcccaaactcatcttgatcaaccaaaaacatgtttctgccttctttatgggacttaagnnnnnnnnnnctcctctccatctctaagatgtcgtctttggggagatctctattatatcctggatgggttgcaaaagggcttcct

SEQ ID NO: 363782 - DNA, 1042 bp, Homo Sapiens
cagaagcctggaaagcccacccagcgtgggacctctgtgggtccaggatcttggaatggcatcccatggttcaatcttctggattcaaccacataaatttaccccacccatgtcgtggacccaagcttcctaccatgtatacttagcttaaatgcaagatagtactattttgttcatcttgattggagtgagaaatgaataggtccatgcacatatatttcttttaccacaacaagatgatgaagaaataaatccataatatcgatacttttgtataagttgtgtttacagttgcggtaagaaattttataattgttgatttgctttatataatttctgcttgctttttatgatatttaaaacaaaatctaagcaacaaattttatgtctgattagatttacagaagctgcttaagtgcttagggataatttgttcatcatatttgtaagtctcccttgttaggtgtttgaagtgtttgaattggctaaattaaatttgtaattgtagtttgaaatatctaaaggaattttcttaattaagtgtttaaatgatgttaaaagtttgtgggacatttaatctatcaaatttacgagttaattgaactatgaatcaatgaacaagtaaatgtgatcttgcttttatataaaaactactaagttcataaataaaatacaaagatccataagttgagaggaaaagcaaaagagccagattctaagatctataacttaaaaaaattaaatattgattgacaatgtaagtcattgcaattatccccactagctgaaatctcacatctgagtgcttacacacaaaacaaaatgttaccctgaacatactaaacaaataaaaaaccacgtggtaattactatacacatgctcactgctggaagcattcatactgcactccaatcccggtggcgacgaatgccgcgttgtgctaccggtgaatcctcgggtgttctcttatggggatcaagtctttccttaattatcttccagggatttttcttccttttcccgagacctggaggcctccca

SEQ ID NO: 363783 - DNA, 615 bp, Homo Sapiens
gaatcaatcccgcctgtatcaggagactcctttgccaaaattcaaagaccaagaaagagaaagattgggcaggttaaagtctgtaattaaccaaacaggagacagaatttttctgagaaattgtatgtgtgctgtgagaaaaagactagcctcaaggagaatctgttcttttggcttaattgtaggaaagaatggaattgccaccaacaatggtgcgttgaaacggcaggtgcatcaggctgtagatgtgaaggaattaaaaatattttaccccaaaatacatttctttgacatattttgagatgtctgttcagaaagccagctgcagaagtagccctgcaaagttgtctttcgttgaggagatttgcatctgtagggaatctgcattgatgcagccaagtctttccttgcccagatctaggaaagattaactgagagtctgacagctgtaaaggtctgaaagaaacttttagagcttattctttctgagagctgctgcctgtaaggtttcatttacatattaagatcacctttgctagccaggcctcctcttctctccctcccataacctgtcttgcccacaataaatggatatacctctgactctaaaaaaaa

SEQ ID NO: 363784 - DNA, 619 bp, Homo Sapiens
  misc_feature (354)..(417): n is a, c, g, or t
  misc_feature (525)..(554): n is a, c, g, or t
tctcgacatgtcgagaaggtggtgcttcctcagaggcccaccattgaagaggttgattaagccaaccatgaccatgtacggattagaacctttcaatggctttccattccatgcagaataaaatccagtcttttttcttggactaaagccttatacgatctggccctgccttttctgaccttgtcttttaccacccttcccatctcaccaggtttctggtccctaagaactcacaatctgtaaatgtagtagcataagccatgggctgaaattaaaagagggtatctgtaaggaaggtgtttctggggttatttgaaggaggtgatcttacctgagtcttagagttgctgtctnnnnnnnnnnnnnnnnnnnnnnnnnnnnnnnnnnnnnnnnnnnnnnnnnnnnnnnnnnnnnnnntatatatatatttaccattcaggtcgttcagcagacactttcatgttaaggcttactaagttgcaagaaacatattataaccacaaagcaattcccttttaatggttnnnnnnnnnnnnnnnnnnnnnnnnnnnnnnccaacccaccttgaactcacacccctgctttgtcttaagcaggtagaaagcaataatgaaccttt

SEQ ID NO: 363785 - DNA, 385 bp, Homo Sapiens
gagattagcaggaagcaattcttttcccatttggagagaccccggctttgttgggccaggagatggttttgcagcagcagaagactatgaactgggctttgggagataggatctctggttgtattctggctatccacactctgaaagaggaccgtgacagagaatttgagtatcctaccaatatacctacaaaaggatgaaagaagatttggagtcaagggaaaacaagggcaataaaatagaagcttaccacctgctctcatacagttgctagaagaggactgcatatttggttctaagtttctggaagataaagccaaaatagaaacacaactcattataaaattttggtgtatccataaaataaaaacaaatgacctgtttg

SEQ ID NO: 363786 - DNA, 494 bp, Homo Sapiens
aagaaacagcgttccacgcaagtcctgcctggggtcaggccctcactgaccctcaggggagcccccaaggtgctgtctgtctagacaggctgtcccaccccagggtggctagtggccatatgcagggaatggtgcttctggctgtggcacgcactggatcacccaggtcccagcagacatggccgcccaaagtcagcaagcctcctttgtgctatgtggagctcacagcctcacatgtgaacacccgtgtctgggttgcctggggtgatcctccctcctgcgtggtggctgtctctggaaagcatcccttgccgctgccacgggcagccccagcccccgtccgtccaggctcacccacagtagtgatgcagacgtgacgtgggggaagggggctgagccctgtggctgggttctgacaactgtaacggttttgtcgagcttaggcccctttggagggagaatcaataaataacaaacaccaactacaaaaaaaa

SEQ ID NO: 363787 - DNA, 412 bp, Homo Sapiens
  misc_feature (13)..(13): n is a, c, g, or t
  misc_feature (44)..(44): n is a, c, g, or t
  misc_feature (54)..(54): n is a, c, g, or t
gcaaaagcaacantgagaaggagcagagtcagagtcgctggccnagaagacccnggcaccccaacccaccaccagacttttgctggcaaagactcgtgaagctttctccaccacccacaacagcatgtggtctgacagaattcgcttcaaagaagaaactaaaagccacctcttgcaggaaactgcactgccctcaacatccagcccctactccttggtcctccaaacccccaaactctgcaggagaaaggcagcatggtacatggggaggaagaccagactgagcgatttggaatccacatcctaatgctgccacaagctgcatgcacaaagaccttaggcacatcacttcatttctctgtacactggtttctctactatgtgtgtattaaaatatataatgtggatgata

SEQ ID NO: 363788 - DNA, 1653 bp, Homo Sapiens
  misc_feature (456)..(539): n is a, c, g, or t
ttttgttacttgtagcctgcatcgctgcttcattgattttcttatctatctcctcgttctttgtgtgtggttgtattggcttcgttttcgggtcgctcactcagtttgtttctatctttcccttgccgtctcacgtcgttattctctccgctttctgtgtgtttctgctcgtgctgctgcgatctcgcttagtgggttgtcgctgtcctcttttttcttattctatctatgcatcggcttttgttgcttgatgttgtctgtccgttggttctggtcgggttctgatagatactattatatattcttctcgtggagttgtgtgtgtgttgtggtaatgttctgatctgcatagatacggaaaactttactggtgtttgcttgtttgatcacctcgctcccccgagtatcattagccggcccgggcgccccgcccccttgttttgtttgtatttgtgnnnnnnnnnnnnnnnnnnnnnnnnnnnnnnnnnnnnnnnnnnnnnnnnnnnnnnnnnnnnnnnnnnnnnnnnnnnnnnnnnnnngttcagtttactatcatccacattatatattttaatacacacatagtagagaaaccagtgtacagagaaatgaagagatgtgcctaaggtctttgtgcatgcagcttgtggcagcattaggatgtggattccaaatcgctcagtctggtcttcctccccatgtaccatgctgcctttctcctgcagagtttgggggtttggaggaccaaggagtaggggctggatgttgagggcagtgcagtttcctgcaagaggtggcttttagtttcttctttgaagccaattctgtcagaccacatgctgttgtgggtggtggagaaagcaattctggaggctggcaaatccaaggtcaaaagcctgcatctgggtgagggcctcttcacgagtctttgccagcaaaagtctggtggtggtgggtgggctgggtcggcggctggagcattacccctactgcgggtcccgctgctggcagcgctggaaactgggtggacggcatgggttggtctcaggatttgttccgcgccttgtggagatcgctgtcaagggaagtgaaggagcacgtgggcacggaccaattcgggaacaaatactactacatcccgcagtacaagaactggagaggacaaactattcgagagaaaagaattgtagaagcagcaaataaaaaagaagtagactatgaagcaggggatattccaacagaatgggaagcttggattagaagaacaagaaagactccacctactatggaggaaatactaaagaatgaaaaacacagagaagaaatcaaaataaaaagccaagatttttatgaaaaagaaaaactccttagtaaagagaccagtgaggaactcctgcctccaccagttcaaactcaaattaaaggccatgcctctgctccatactttggaaaggaagaaccctcagtggctcccagcagcactggtaaaacctttcagccaggatcctggatgccacgagatggcaagagccacaatcaatgaatgcattatggtcaaatcttttcatgtatatggatgtgactattttaacaaataaaagaagtgaaaagtttataaactaaagaaagatggaagaaattctccagacgctt

SEQ ID NO: 363789 - DNA, 482 bp, Homo Sapiens
ggtgctgggccagagaggacggcgtggcgaaagtcagcgtccactgcagcacaggatcagatggccgtgtgctgtgcgtgcaggagcctcgccttctgtgtcttcagtcttgagccaaaatttgctcaaagactgatctcttccttgcagggaacagctttggggctgggggaactagaacccacatgttggtctaaaccctgagaaggtggcagtgaggaagtatcccctcaggtgactggatctgtgttcctccttaacatcatctgatggaatggcaatgaaaagcatggattgtggaaaatacagaaaaacataaaggaaaaaactccaatcccccgagcccaccactgttcaggacccctgcttttgtcacctactatttccctttagtttttagcagcggctggatgtgatatgtctagtttaaccagtccccttgatctttctatataataaataacacaggagtgaacatcctg

SEQ ID NO: 363790 - DNA, 1018 bp, Homo Sapiens
  misc_feature (14)..(14): n is a, c, g, or t
  misc_feature (52)..(52): n is a, c, g, or t
cggctggtaccggncccgcgttttggatatcgtcgaaccaggccgtcgccgncaaccccccgtgtcacctcccttctgttatcgctgacagctttcttgcgtctcatttgtcgccgagccccgagcgcacggtgatgctcgggtctgcccccgaccccctgccacaggccggaagccgcatgggtggcaccgtggggaagctaacccggccccgttcccccaggagtcactgtgccagccccaccacatcctggaagaggagggggccccgggaaggggcctcccccaacatcgctgctgtcgtccacgccctgctggaccggccttaggggtgaaggtgggggcacatgggcccaccccgcccgggaccccgggagcagaagacgcgcctgggctccgcgctctcagagaagcacgtggtgagggtggcctgggcctgggcacccttggcctgccggcctggctgcctctggggtcgagggtctgggtggaaggaccgcgggtgtcgcaggtgtcgtgtcagccgcaataaacagaagccagaagccctctgggtggccctcaggtgtaactgtgtctgagagcacgtgcgtcgcggggatgcgggggggccctctgtttccggaatttcaccggccaagtcgccagggagccgcccgcgggcagcccggccggggggcacgcgccacggtggccgggagacgcacagggcgccagagtacgccgcgagggcctctggggtggcgtccgcaggagggcacgtcgcgcccgcgccgcagaagggaaggctgaagacggggcagggaccgagccgtcgggaggacccacggcagggtaccggtccctggcgacccgggaaaacgcggcaatggttgcccctggtccggcgaccagacgatgacgggcgcgagaccaggaggaagacgcccgagggaacaaggcacttccgacgtgcacaagaccagggcgcacccatggcaacccagaacggaacgcaccaaggaaatcggacacccaa

SEQ ID NO: 363791 - DNA, 544 bp, Homo Sapiens
tgccgggagaaggtgggtgagaaactctgggagaagatcatcaacatcgtggaggtgatgaatcggcatgagtacttgcccaagatgcccacacagtcggaggtggataacgtgtttgacacaggcttgcgggacgtgcagccctacctgtacaagatctccttccagatcactgatgccctgggcacctcagtcaccaccaccatgcgcaggctcatcaaagacacccttgccctctgagcgtcgctggatctctgggagctccttgatggctcccagaccttggcttttgggaattgcacttttgggcctttgggctctggaacctgctctgggtcattggtgagacttggaaggggcagcccccgctggcttcttggttttgtggttgccagcctcaggtcatccttttaatctttgctgacggttcagtcctgcctctactgtctctccatagccctggtggggtcccccttctttctccactgtacagaagagccaccactgggatggggaataaagttgagaacatgagtttgggctg

SEQ ID NO: 363792 - DNA, 1038 bp, Homo Sapiens
cctaaaaaaatgtaattgtgatagaatataatcatttacaaatatgaataaacaaattataacacctttatggaaaacttaaatttgccatagaactttttaaattgagaaagttactcctttgctaattgaagtatttaaataaatttaatgtacagcagtttatggatccaagtgctacttgacaactttatgacgaagaggcatcctatccgattctttctgaactggccagttcaatgatgcagtgagatttaacacattcctcttcgcaaacagagtgcatggaattcaggttgataatctggaatctcctcaaggaaagaccaatataatggaatccagattttgttcaatagcttgtcgaactgcatgatgtaccttgaatcttttgcataatgggtcttttaatacatcggtgtagttataacataaaataattattctctgcttcttatctgatcgctagattaacaatatgacttctacgttcaataacacaacccgaactcaacagatccctctatcttccagacaaaccttgaccagataagagcactctccattattcacatacgcaagcagacatgttccacagagccctatccttatctattatagtgcaatgcacatctgatactatagcatgcataattccaaactgtcacatcgtctagtcctacacctaataaccttttgaaaacctacaacaactcggatgatacctgacaacattcccaccgtccaacaacgatatccctacccagccctacaacagtcgcactagactaagtagcaactacagagaataacacactccaagcagagcatacatagagatactaagactccatagaacacacacgaagcttcaaatatcgcgtcggcgactagtccctttagacaaagatttgactgtaatctcacaagaaagtcgatcaactggcgaaaccccatgtcatatctgacgaatggacgatgtagcacaaggtacagagactggaaccgctccaagaagtgttaggaatacgggacacg

SEQ ID NO: 363793 - DNA, 1045 bp, Homo Sapiens
ccgagcgcttccggtgcgtgtggtatggaacgccgtggactccgggcactgcctgcagacctactccctgcacacagaggcagtgcgggccgcccggtgggctccctgtggccggcgcatcctcagtggtggctttgacttcgcgctgcacctaacagaccttgaaacaggaacccagctatttagtggtcgaagtgactttagaatcactaccttgaaattccatccaaaagaccacaacatctttttatgtggaggcttcagctctgaaatgaaagcttgggatataaggactggcaaggtgatgagaagctacaaggcgaccatccagcagaccttggacatcctgttcctccgggaaggctccgagttcctgagcagcacagacgcttccacccgggactcagctgaccgcaccattattgcctgggatttccggacctctgccaaaatctccaaccagattttccacgagaggttcacctgccccagcctcgccttgcacccgagagagcccgtgttcctggcacagaccaatggcaactacctggcccttttctccactgtgtggccctaccggatgagcagacggcggcgctatgaagggcacaaggtggagggctactcagtgggctgcgagtgctccccaggcggtgacttgctggtgacgggcagcgccgatggccgggtcctgatgtacagcttccgcacagccagccgagcatgcacactgcaggggcacacacaggcctgtgtcggcaccacctaccaccccatgctgccctctgcccttcccactcagatctagatcctgctttcatttctggctagtgaagtagacttttgtgtttttgaggtttattagcaggtctgctcaggaaccaaactaatgagtagctttatattgggccaccccaatatatggctttgggggctgaaaaagcagatgtagaccccctccctcggatccttattggtgtgccctttagcactccgcagactctgcggggtgaacaggagtgatgataaaatttttcattctgac

SEQ ID NO: 363794 - DNA, 786 bp, Homo Sapiens
agaatctactaccttgaaaattccatcctttatgcccacaacatctttactactctgtgaggccttcagctctgaaatgtaatgcttgggatataaggatctggcataggtgatgagaagctacaagccgaccatccagcagaccttggacatccttgttcctccgggaaggctccgagttcctgagcagcacagacgcttccatgcacgggaccttatgctgagccgcaccatttactcgcctgggatttccggtacctctgtccgatatatctccaacctagattttccacgtggagggctactcagtggtgctgcgagtgctccaccagtgcggtgacttgtctggtgtacgggcagcgaccgtaatggccgggtcactgatgtacagcttccgcacagccagccgagcatgcacactgctaggggcacacacaggcctgtgtcggcaccacctacacagccccgtgctgccctccgtcctcgccacctgcccctggggaggggacatgaagatctggcactgagctttttgtcactgaaccttcccgatgccagctgggctcttggactcccctcttcctcaagggtagatgagaggaacgagcacagaggttggctgtgggtcctgggtaccaccttctgagcctcagtttcctcatctgtaaagtggggagaaaagtctgtttgcctcaggagtgtgaggactacactagtgaaagcgctggcgggcagccggcgatccccaataaatgtgtgttttgctgtttgttaagtgatttcagc

SEQ ID NO: 363795 - DNA, 460 bp, Homo Sapiens
  misc_feature (42)..(42): n is a, c, g, or t
  misc_feature (52)..(52): n is a, c, g, or t
  misc_feature (117)..(117): n is a, c, g, or t
  misc_feature (409)..(409): n is a, c, g, or t
gcctaggtgaatttggaggttggtgcctcccgggaactagcnaccagcttanctgcttcccttccccctggcatcacttcccataggccctggggtttctagaactgggccctggcnacccctttccccactcccacgagtgagtcggcctccagagaagactggcacaattccaactagagtcaacccatgctgccctctgcccttcccactcagatctagatcctgctttcatttctggctagtgaagtagacttttgtgtttttgaggtttattagcaggtctgctcaggaaccaaactaatgagtagctttatattgggccaccccaatatatggctttgggggctgaaaaagcagatgtagaccccctccctcggatccttattggtgtgccctttagcaactncccagactctgcggggtgaacaggagtgatgataaaatttttcattctaac

SEQ ID NO: 363796 - DNA, 565 bp, Homo Sapiens
ggaaatacagcgcttcacatcgcctgctacaatggacaggatgctgtggttaacgagttgattgactacggtgctaacgtgaaccagccaaacaataatgggttcacccctttgcattttgctgctgcctccactcatggtgctttgtgtcttgaattgttagtaaacaacggggcagatgttaacattcagagtaaagatggcaaaagtccactgcacatgacagctgtccatggaaggttcacacggtcacagaccctcattcagaatggaggtgaaattgactgtgtggataaggacggcaacactcctctccatgtggctgcaagatacggtcatgagcttttgattaacaccttaataaccagcggagctgacacagccaagtaggttaccgcaaaaatacggtggaataattgcctcaagtgggaatactgccaaaaagattcttccgtgcagtagatagttcccatttatccaggttaaggtggatctataccattatactaaatacaaattaaattttaaataaattaagtgccttttaatgacagaggcaaagaag

SEQ ID NO: 363797 - DNA, 692 bp, Homo Sapiens
gcctggcccctgccagtgcagatggacttgcgcatgcgctgcgaagatgttggtgcagcttctgcagatccatgcggctggaccaacccgcatcgtcctctcgggcttgtcccgtgcctctaccacgtgtattccttccgcaacgtccaccagatcggcatcctgaagccgcaccggcctacgtgcagctgctggagaaggccgcggagcccacgctgaccttcgaggcggtggatgtacccatgctttgccccccgctgccctggacatcgccgcactctggtgctttcctgctcagccccaccaagctgatgcgcacggtggaaggcgccacgcagcaccaggagctgctggaaacctgcccgcccaccgcgctgcatggcgcactggacgccctcacccaactgggcaactgcgcctggcgcgtcaacgggcgcgtgctggacctggtgctgcagctcttccaggccaagggctgcccccagctaggcgtgccggccccgccctccgaggcgccccagccgcccgaggcccacctgccgcacagcgccgcgcccgcccgcaaggccgagctgcgccgtgagctggcgcactgccagaaggtggcccgggagatgcacagcctgcgggcggaggcgctgtaccgcctctcgctggcgcagcacctgcgggaccgcgtcttctggctgccg

SEQ ID NO: 363798 - DNA, 882 bp, Homo Sapiens
acggatcttcaggcgatcctgaggatcctcacgatgaacatacctgctggccacacagagctaacaagatcagtctgcaaaagctactgctgaccgaaagtctgcatccaaacctattggatttgaaggggatcttcgtggaccagtccatctgatcttccagataagactccattcccaggaggtagatttggggtctgcacagggatgatggcctgatggcaggcaacgattccgaggaggccctcactgcactgatgtccaggaagactgccatctcgctgtattgaagggaaagccctgggcctggataaagccatcctccatagcatagactgctgttcatctcgacgacaccaaaaagaacgatgtacagctccatcctagtggtgggaggtggtttgatgtttcataaagctcaagaatttctgcagcacagaattctcaacaaaatgccaccatccttcaggcgaattattgaaaatgtggatgtgatcacaaggcctaaggacatggacccccggctgattgcatggaaaggaggggcagtgttggcttgtttggatacaacacaggaactgtggatttatcagcgagagtggcagcgctttggtgtccgcatgttacgagagcgggctgcgtttgtgtggtgaatggggaggaaatgtcactgccgaagaccaaaaacaagcttcttggtataaaagactcttacagaatatgtgtattgtaatttattgatctggatgcttaagtgtcatggacagtaaatgaatttgaactttatgttgaggcacatgacattggtttgaaaatataaactgcttttgagcagtttagtcagggcatttgagaataaataggaactttctcttcagttgt

SEQ ID NO: 363799 - DNA, 478 bp, Homo Sapiens
gctgcttttgcagctgggtggctgttcggtgcagggggccggtgaggaacacggtggggagcaaactgcgagggcgccgggctttcagcactcactatacctgctgtttggtttggccaggatggcctgggagtccccagggccgggcaaagactgcccccaacagacatgggcggagggaaccgtctcacccctgcctcttctcccttctctacgcagtgtcagtgggacgggagggtggtctgcccggggcttcaagctcctgtccaggaaccggacccatgtcgtacgccagtgcagccacacggccagcttcgaggtgctcatggacgtctccaggtgtgagatgggcatcttcttgtggccactatgcccgctgagcctacccccaaacctgcccctcctcaaactaaatcttccattctaagcgctttgaacgaagcaaatcaaccaattaaaaaaatatattccaggattg

SEQ ID NO: 363800 - DNA, 553 bp, Homo Sapiens
ccttctccatgtccttcaatatgggacgtcccccaacagcactcaagtccaagatggagggagaattctccagaaccttcagaaagactaatccaggagagttcaggggcaccacccccagaagcaaattcactgcaaggtgccttatatttatgttctgaagaagaagctggaagcaagggtgtacttactggggccgtctgaatggaagcattcctccgtgttcatttaaaagaacgcttaatagtaacatctggactctaatgccagctagcttgtacctcatcagtgcttagagcctaacaactttggagcgatgtatgaactaatgctttaggaaacccactctagtgttctcttgtttggccctagactcaggcttaatttgtaagtggaatagaatctcccagcaagtatgacagaactgaaaagaaggagagcaacagctggctcggtccctgctctgagtatgtgtatatatgtgtttgtctctatgtgtgtgtatatacataaatatccattaaaatgtattagtagaaactagtttcttttt

SEQ ID NO: 363801 - DNA, 557 bp, Homo Sapiens
agtttataataccaagaatgtgctgcgtatcttgtctcaataagttttaagtaacatttaaaaatattaaagcatgttatttgacctaattttttagcatttgagttgttccattaaatggagcatcttgtaaatttcaagtattttatacttgcaattgttaagagttaacaggtagttggatttgtcgcagacaatgagttaaggaatcctttcacgtttttcccaactttaaaattaaggattctcaggcccctgtgtagagcagtgaaaataagatgtgcgtatgtgtgtgtatgcctggagaattggtgtttcacttcagtgagaggattggctgtgagcttcagaccaggaaatgtgtcatcttgccaggcacctggctgagtgtgctggagtgaggatcttgaacagaaacttccttttctgttattattcactacgaagctaaaatggccaaatatataccgtgaaaattggtttcatttaacaaaagatcagatccctcctttcagctgtacacatttttaaataaaatcatattgaactaaaaaaaa

SEQ ID NO: 363802 - DNA, 854 bp, Homo Sapiens
ggatgtggatgttatgatgggaacgttcacaaagagttttggtgcttctggaggatatattggaggcaagaaggagctgatagactacctgcgaacacattctcatagtgcagtgtatgccacgtcattgtcacctcctgtagtggagcagatcatcacctccatgaagtgcatcatggggcaggatggcaccagccttggtaaagagtgtgtacaacagttagctgaaaacaccaggtatttcaggagacgcctgaaagagatgggcttcatcatctatggaaatgaagactctccagtagtgcccttgatgctctacatgcctgccaaaattggcgcctttggacgggagatcgctgaagcggaacatcggtgtcgttgtggttggatttcctgccaccccaattattgagtccagagccaggttttgcctgtcagcagctcataccaaagaaatacttgatactgctttaaaggagatagatgaagttggggacctattgcagctgaagtattcccgtcatcggttggtacctcttactggacaggccctttgacgagacgacgtatgaagaaacagaagactgagcctttttggtgctccctcagaggaactctccctcacccaggacagcctgtggcctttgtgagccagttccaggaaccacacttctgtggccatctcacgtgaaagacattgcctcagctactgaaggtggccacctccactctaaatgacattttgtaaatagtaaaaaactgcttctaatccttcctttgctaaatctcacctttaaaaacgaaggtgactcactttgctttttcagtccattaaaaaaacattttattttgca

SEQ ID NO: 363803 - DNA, 539 bp, Homo Sapiens
  misc_feature (430)..(446): n is a, c, g, or t
acatttctaaatattcataacatgcttgctcaaatcaatcaccttattttacatccgctccagggagaaatgaagacatggtcctacgttgttctgtaattattttctatgtaaattttgttccttgtcacaattatatatgtcttaggggaaaggaccatttcacatgtgtcacctcacgtgattctcaccacagccctgtgattgctcctgttttataaataatgacatagttccagttgatggccaaagccacagctaacgagaggcagagagagctcaggctcccaggagcttccactctcagaccgtgcctcccgggctgccctgagtgaaacccctgcttagcatttggcacagccagaagcagcaagctagggtcgacaacacagagaggggctgtgtaatactggctgcctctgtgctaagnnnnnnnnnnnnnnnnntcactgtgtgtttgtttattttggtgcaggcccagtgttcttgcttagacttaatactacccttcatgttaaaataaaaccaaacaaaaaccc

SEQ ID NO: 363804 - DNA, 613 bp, Homo Sapiens
gggtctggaggcacaacgcccatccttaggccaaacagtacccaaggcctcagcccacaccaagactaatctcagccaaacctgctgcttggtggtgccagccccttgtccaccttctcttgaggccacagaactccctggggctggggcctctttctctggcctcccctgtgcacctggggggtcctggcccctgtgatgctcccccatccccacccacttctacatccatccacaccccagggtgagctggagctccaggctggccaggctgaacctcgcacacacgcagagttctgctccctgaggggggcccgggaggggctccagcaggaggccgtgggtgccattcgggggaaagtgggggaacgacacacacttcacctgcaagggccgacaacgcaggggacaccgtgccggcttcagacactcccagcgcccactcttacaggcccaggactggagctttctctggccaagtttcaggccaatgatccccgcatggtgttgggggtgctggtgtgtcttggtgcctggacttgagtctcaccctacagatgagaggtggctgaggcaccagggctaagcaattaaaccagttaagtctcccccc

SEQ ID NO: 363805 - DNA, 1208 bp, Homo Sapiens
  misc_feature (45)..(45): n is a, c, g, or t
  misc_feature (47)..(47): n is a, c, g, or t
  misc_feature (99)..(99): n is a, c, g, or t
  misc_feature (105)..(105): n is a, c, g, or t
  misc_feature (120)..(126): n is a, c, g, or t
  misc_feature (964)..(972): n is a, c, g, or t
ttttatttgtcccttctcaaggcagccacttagcccacatgggananatcaagtctccagttatttctgccacaactgcttctaaggcctcctccttcncctccncatcttcctcttccnnnnnnnccttctcctcctcctctcttccccagtgacagcatcatcgtgctgtttgcctgtattggctatgccttctaactccaaccagtcacttgagaatattctttcaagattctgggccccgattcttttctgtttaaatccctaaagcaaagatctaattctcaagcaatgtctgtagttcagtgggggtgaacaatgaatatattcatgctaggaatttgtgtctgttgttgtactcacagcagcaacatgagtgtaaacagtagacaataaacttttatttaagaaaactgattcagttgtgttggaaaaaataaagaaatctgatattaaacgttttctaagatcatttgtataggttcagtgtattcataagaagtccaccctgagatgcctgtaaaagtcaaatgtaattacacttcaaactttaatcctaaattattgacagatagatagatagtgaccaacttaagggtaatcatatatgtgactaacatttgggaggaaacaggaaaacagtggtctcaaaacaacaatatcccagtctccatttgaaagagcatagatcttcggtaaatcattttgaaaactatgtgctttatttcccaaaagatcaaacttaatttttaaaagacacccttttcagaagtatgggttttcattgctgtttagtttcttaggtgtggtatgtcttacgtagcttatgcttacaaagccaaataatcgcagggcaaggcagataaaggcaggcaggatagtgacagtggctcggtgagcatccgccaagggcctcagaccactgttaccataaaaacatccacccagtgttatgacgtccgannnnnnnnncccttaagaaggtggaaatatggcttttaatacataggaaaccttcagtttttaaatgcagggcaaataaacatttttaaacagtgccagccagactgccagttctcaaacagactgaatttccaaagcacaaccttttcatgtttataaaaaatagaaatggcatttagggatacattctaggatttggctctgacttctaagttgcactcttaggaagaaggagaggatacccg

SEQ ID NO: 363806 - DNA, 729 bp, Homo Sapiens
  misc_feature (65)..(90): n is a, c, g, or t
ggatatctataagtatgtatacacattatatttaagcttttctctgggccaaactgcttcatccnnnnnnnnnnnnnnnnnnnnnnnnnnagccttatgatgaatttgtttgaagggcattttctttatgaacaaaggcttggatgcatattcctttctttctgtgaatgggtattattccctgaggaaagttgcacagtgaaaaccagtctggttgtgacccactacatgttttgtttttaatcactattacctgagttgaactttgctcaccatgtttgtacttgttggtctgtttaatgaagtttggttgatgccatcctttgcactgccgaagcgtaatcttgtgtattacttagctctctgctgatctcagtatggacagtgtaacaacaaaaccaaaatggctggacagacttcttgtgttttgtaaatataaactaggacagttctgtaggtttgttcagtgtgctagtggagtatttccttaatgtaaaacttcacttaacagagagattctttgtttagcaagcttggagtgatgataaaatggtaagaaataatataaatgttgaagaaagcatcacaacagaactataggagtctaaatttaataaatctttaaaaaaaaccagtgtctagaatatataccatgttttattatttaaaatcattgtcttaaatttttgttcaaaaaataaaaatttgaatacaatcaataaaaaagaa

SEQ ID NO: 363807 - DNA, 760 bp, Homo Sapiens
  misc_feature (48)..(48): n is a, c, g, or t
  misc_feature (495)..(510): n is a, c, g, or t
  misc_feature (522)..(612): n is a, c, g, or t
ggcctgggtggcgaattcggcacgagggggaaatggtgtgttgtattntgagagaaattataagagccatcacctccagctacaggtcattcctgtcccaatcagctgctctactactgatgacattaaagatgccttcattacccaggcacaggagcagcagatagagctgttggaaatcccagagcactctgacatcaagcagattgcacagccaggagcagcatatttttatgttgaacttgacacaggagaaaagcttttccacagaattaaaaagaattttcctttgcagtttggaagggaggtcctggccagtgaagccatccttaatgttcctgataagtctgactggaggcagtgtcagatcagcaaggaagacgaggagaccctggctcgccgcttccggaaagactttgagccctatgactttactctggatgactaaaacaaagggaagaactttttatgaactccacaggaagtactaaagcnnnnnnnnnnnnnnnnaattaaaagaannnnnnnnnnnnnnnnnnnnnnnnnnnnnnnnnnnnnnnnnnnnnnnnnnnnnnnnnnnnnnnnnnnnnnnnnnnnnnnnnnnnnnnnnnnaactccatctcaaaaataaaagaataaaagtatgtctgtcatccagctcctatgtctgttatccagctccaagtacagcttgtgtatatcaacattttcaaaaacctttaaactaccaaatgaaatccagatgtttttccatggttaa

SEQ ID NO: 363808 - DNA, 501 bp, Homo Sapiens
gaggacaggctacccctttacaaatagaatttgagcatcagtgaggttaaactaaggccctcttgaatctctgaatttgagatacaaacatgttcctgggatcactgatgactttttatactttgtaaagacaattgttggagagcccctcacacagccctggcctccgctcaactagcagatacagggatgaggcagacctgactctcttaaggaggctgagagcccaaactgctgtcccaaacatgcactcccttgcttaaggtatggtacaagcaatgcctgcccattggagagaaaaaacttaagtagataaggaaataagaaccactcataattcttcaccttaggaataatctcctgttaatatggtgtacattcttcctgattattttctacacatacatgtaaaatatgtctttcttttttaaatagggttgtactatgctgttatgagtggctttaatgaataaacatttgtagcatcctctttaaaaaaaa

SEQ ID NO: 363809 - DNA, 1322 bp, Homo Sapiens
ggacttacggctaggtacgaggcctggtgttgaattcggcacgaggccgcgctcggcgccccggccgggccactgggccacaggccacgcggccacgcagtccgagcgggagccgagccgggcggggcgagggcagctccgggaaggaacgtcccagggatggaagtgcttggatgcggtgctgctggctgcggatgtgcgcaaggagatgggatggagagcctgagttggcattcgtataaatgacctgcctggctcccaccatgagtgctgagcttaacgtgcctatcgacccctctgctcctgcctgccctgagcccggccataagggcatggattaccgggactgggtccgccgcagctacctggaactggtcacctctaaccaccactcggtacaggccctgtcgtggcggaagctctacctgagcagggccaagctgaaggcctccagcaggacctccgccctcctctccggctttgccatggtggccatggtggaggtgcagctggagacgcagtaccagtacccgcggccgctgctgattgccttcagcgcctgcaccacggtgctggtggccgtgcacctgttcgccctcctcatcagcacctgcatcctgcccaatgtggaggccgtgagcaacatccacaacctgaactccatcagcgagtccccgcatgagcgcatgcacccctacatcgagctggcctggggcttctccaccgtgcttggcatcctactcttcctggccgaggtggtgctgctctgctggatcaagttcctccccgtggatgcccggcgccagcctggccccccacctggccctgggagtcacacgggctggcaggccgccctggtgtccaccatcatcatggtgcccgtgggcctcatcttcgtggtcttcaccatccacttctaccgctccctggtgcgccacaaaacggagcgccacaaccgcgagatcgaggagctccacaagctcaaggtccagctggacgggcatgagcgcagctgcaggtcttgtgaggggccgagggccggggctgggagcggccctgtgcccggaagtcccgcagaggcggggaattgtcagatgcagacattttgcaaggctgccgggtagttcaagaccaagtttcctcttgtctttattccctagggctggtgacttctctgggattgaccgttggtccctggggctggttgtagagctgggggaagcggtgttcctggctcggttctggtcggccgggagggtcggggcgcctcctggcggggtcgcccggggggtcccgttgttgctcgcccgccgtttagtcca

SEQ ID NO: 363810 - DNA, 439 bp, Homo Sapiens
gcacagttcttcatatccacgccactctcagacaaaactagatgtcccagattgttgcatttccgtaaagtttgtcacgagacattttttaaaatctcataacccacatgttcagttatccatgcaagaaacttgactctacatgtattgctgaaagaattttcttaacagtgaaatctgatcatatatttttaccacactgccacataaagcccaagaaattcagctgacaagacagatttagcattatcaagaaatcccatttgccctgaaaaagctgtcctccattgtactgaacagacagtcctgtcgattgtgttatttagaaacatacactgaatgtgggctgaaatcatcatctttccataatgaaaactgagaaactattcacaatgcattccttataaataaatgctacatttagtaactcatttcaccc

SEQ ID NO: 363811 - DNA, 428 bp, Homo Sapiens
  misc_feature (16)..(16): n is a, c, g, or t
  misc_feature (24)..(24): n is a, c, g, or t
  misc_feature (36)..(36): n is a, c, g, or t
  misc_feature (60)..(60): n is a, c, g, or t
ggacaaaactagatgnccccagantggttgccattnccccgtaaagtttggtccacgagnacattttttaaaaaccctccataaccccacatgttccagttatcccatgccaagaaacttgactctacatgtattgctgaaagaattttcctaacagtgaaatcctggatccatatatttttacccacactgcccacatgaaagccccaagaaattccagcctgacaagaccagatttagccattatccaagaaatcccatttgccctgaaaaagctgtcctccattgtactgaacagacagtcctgtcgattgtgttatttagaaacatacactgaatgtgggctgaaatcatcatctttccataatgaaaactgagaaactattcacaatgcattccttataaataaatgctacatttagtaactc

SEQ ID NO: 363812 - DNA, 1118 bp, Homo Sapiens
  misc_feature (28)..(28): n is a, c, g, or t
  misc_feature (40)..(40): n is a, c, g, or t
agggaccagtctactacccactgggccntggtgtgtaganggggagagggtagcaaggtgcttctctacgcccatgacttgggagcaggtcttggcctccttcatgagagtctagtgccatgtccctgtcccatgatctggaccctgggactgtcttggcatcttaactgcagtttcaatgaggcagagggcaaagagagaccaagatcagaggggttcattatacccctggctagagaacccagctactgacatgcaagcagcttggggctggctggacacaggtactaggcccattgtttccaggtgaagctttcatcacagaacagtgttgtctccacctggccttagatggcacgccatgattcgggcctggatagactgcctgcgtccttaccactgatctggccaagaatgaggccctcccaacactttcactccctctccaagccttgatgggacctccacttatttaggcctcatgtgctttgaagaagctttgagagccaatgtgtcttccacgggtctcttttttgctacaagtaatcagccccatgtgttctcttaaactgagaattgcacctgggcaattcctgttttctaaggtggtctctgctgctatttaacaacccagagtaggcctctgtgaggcttcagtggcctcagaaaccagagggtccagatagggggcctgcttgggccctctgctgccaactgctcaaacctgctttagctccagccacttgtggcaaacaacctcgtttccttacaaattccagcatgtgactttggtgccgttacttgtgaaaaatctattctgttgtctttgatgtgtccaagaaaattcgtgtagtttacgtaaaaatatctgactcacaagaaagccaactgtatgtcttgtgatgggacagttcataatgtagttgctagaccactttacaaattgttcttgtcaccagatgtgttcagacattgctgtgcaattgttggggagggtagggggaaaggcgagaggagatacttattggtctttttgtttaataccttccccaagaggggacagtctggccaacttgctccagtaatgcaataaagacattgcaataaagtaaaaaaaa

SEQ ID NO: 363813 - DNA, 741 bp, Homo Sapiens
ctgggtctgagctgacttcggcctggtggcctcaccacaactccagaaagccccatggttcccctgagcaaataatcctttatgatacaggaaagagttcctaggagggagaaggtccctgcccttctcagctctgccagagtctgcagggccccagtcaacagaacaggtcagtgccacccacataccctgcactagttcagtgagttggcctcctcctgccccagacaccctgaccagccctgcagggcctggctggggccagccccagtggacttgcagaaaagtgcccagactgcctcgtgcctaacttctgccccaggggccctcctcctggtccaggcagaggagcaggcatggctaaaatcaaaagcagcctctcagcccgagtcactcacttgactgcaggctagagatgaggggcagggtgaccaggtctgagttaaagctgcccaggagaccacctggggctgccacacagcctagaggggcaaggtcatgggcaaagctccagtcagatattcccaggtcactgcagctgctcaaggccagcagtgaccattcctcagtgggctgcttccactgtcccgttggggcccctgaggaagccagagtcacttctagaggatcctggttcaaatagcccttggccagggctcgtgggatgcaagcctgcctcatcaaccaggcatctcccgactttgtgcccaggccatctggcaggggccatccttcctccag

SEQ ID NO: 363814 - DNA, 1141 bp, Homo Sapiens
  misc_feature (401)..(401): n is a, c, g, or t
ccaacactgagggcacccggtgcttcactcaaaggagggagaagctcttaatctgttatacagaccttttgctcttaagtattttaaaatagagaaatgtttctgtgctgataaatgcagtatcttagttgtattagagtggattaaaatggaaaacaatgtcctacttatactctgaatagggtggataataatgttctatgaggtgatcaccagctaatacactaaatctttgttgttacagaattctgcacagccatgggtcccggactcttattttcccccatctgttctcaatacgtttttgaaattgaaactcacccttttttttaatcaaaaacattgccagaccatttagtcctcttggaagggcctctccggtgggggcttcagtcctgttnaaaaggatgggtaccagacatcaccaggctgaatgctgggacttgtgtaccgtgagaagagtggaaagtaaagaggctggctttgaaaatgtgtcttctcaaaggctggccctactccctattgccattcagctgcattccatcatcctcttcctcactggtcgctttttataccacctcaaaagggggctgagctctgggaccaggaactgagacgcctctggacacgcaccagcagcagcgggtgcagtgagggctggctagcttctccccagtctccttaaacacccagccacggccaggggcttgttgaggttaatgagtttctgtttagtctgcttctagtcttgtgtattttctctggagtgttgtttttgcagtgcagggtgagtcggtgtgggtgtttgaatgctgctgtttgctgttttttaaaggccttctagccctcccatggggttactgcagcaggaattcttacctgtgcttcagcccagcatacagactgctgacaggtaccaagtggaatcaacgcccgctcatagtgtgctgtttgtcaacatgttcgctgcccatggttctcagctcttcgttcctcagtgctctttttcatgctttctttcttttttaatttgttccgcattttggcaaaccatctggttgtaatattgtaacatttcttattttttttccataagttgccagtgtgtttgtgttcgatttaaaaatcattatggatctgg

SEQ ID NO: 363815 - DNA, 1663 bp, Homo Sapiens
  misc_feature (692)..(720): n is a, c, g, or t
ggctggaccggtccggaattccctgcatctctgaatgtatttataactatttatttctggatggtcattatcttgtagccaaatttgacaatataaagtaaggagcaaagttacaggccagtttttacttgtttgccctgagggaaaaatccttttaaaaaaaatttctggtttttattggatttttgtattttaaatttcaaatatttttctacatcaaacctagcaaaaatggagatgacggtttctgatttataataaatactagacagttttcaggctcctgttagacaaacacattgatgaagaaattagtcttaataggattgtaggctgtgtagaaaagttggaaatatagcacttcatggagtcttgttttgaagatgacagttttctgtaactacagcttggaaactatgcaaatggtctagattcctcagagctcacatgataggatatagttagtgatgacattttgctcttcttgtgggaacacacacttcaaggaggagatagtgactttgagataggaacagtttaagatgcagtgtgagtctggcctgcgtgcggtgaggaggccccgccaagagactggtggacatctgactgtgggatgtgctctcaagtaggacgtcatcaggacagattctgaataggcatcatgagagtgctggtcagaaacggctgccacnnnnnnnnnnnnnnnnnnnnnnnnnnnnnaaaggaaggaacaatagctaggtaagatttttatcagctttctctgtctgaatccagtttttcctctgtcagtcctggaagcttgaatagaattatattgttgaagccttcaggtcacaaactgtcttttgtaacctcctgtccctcctaaaacacgccaacccctgcagtcaaatcacattagtaatctgatttgctgacagtcctgccctgcctgctcctcgttttcccacatgtcctgcatccctcccccactggagtgatttcagtgaatcagacaaggaaggatgtgtaggatcactactgcattgcaataccctgttatcctcagcaacaaaacccacatttcatacatcctttgtgtactcaggataaagactgatgtttactctctgggcactgttgtaagataggttttgtcagagcataatcattgtctgcaaagtgtttggtgcgaggaagattattgctaattttgtgaaataaagagtctagccctctccttttaatgaacttaactctcgctggcatctgtagtatcattgggagcttaggcgcacatggaaatgagagcccggcgcatggattttaatgtttttctaacaactgtggagatttgagggaatgtgtggtgaatgtaaaatacctagtttacttgccagtctcttgtgtaaattacagtaaaacaaagtaaatgaaatttaaacaaaaaataaatttgatcacaaaatgccaaaaacacccacccaaccttccgccgaaaaccatcacccagttcctctccttttgtcggcccgccctggccccccgaaaaagctttctaaaaccaatttcgtttgccgccgccggccccagtaggtaaagggaaacatgggccatagcttgctttccccaggaaaatccccgggccctgaactaatggcttgggatttctccaccaaat

SEQ ID NO: 363816 - DNA, 960 bp, Homo Sapiens
  misc_feature (379)..(436): n is a, c, g, or t
  misc_feature (626)..(634): n is a, c, g, or t
ccgcaagcagggcccagactcaacacttgcatcttaaactgtttcctatctcaaaagtcactatctcctcccttgaagtgtgtgttccccacaagaagagcaaaatgtcatcactaactatatcctatcatgtgagctctgaggaatctagaccatttgcatagtttccaagctgtagttacagaaaactgtcatcttcaaaacaagactccatgaagtgctatatttccaacttttctacacagcctacaatcctattaagactaatttcttcatcaatgtgtttgtctaacaggagcctgaaaactgtctagtatttattataaatcagaaaccgtcatctccatttttgctaggtttgatgtagaaaaatatttgnnnnnnnnnnnnnnnnnnnnnnnnnnnnnnnnnnnnnnnnnnnnnnnnnnnnnnnnnnctcagggcaaacaagtaaaaactggcctgtaactttgctccttactttatattgtcaaatttggctacaagataatgaccatccagaaataaatagttataaatacattcagagtttacatcccagattcattggaacaccaaaaaattttgaagaaattttctgtgggagtctactgcttatgggactnnnnnnnnntttataacagactgacttaaaagaagagaaaaataataaaaggctatatatgttggtccacagcttgacatttatgaaacataccagctagtattacattgcagtcaatttgtccattaatggtattactctgataattattaaaatctgttccaggtatatatattgaaaatattttcttttgcattcttgctgaagataggtacagtactttggagaaattgtactaatcccttcagtatgtctgtatgtacatatatacacaagtgtgtgtatctggatctgtagctctacatgcgctttatatacagctacagacatatgcc

SEQ ID NO: 363817 - DNA, 495 bp, Homo Sapiens
tatggctttcagtcttgtggctgcgggacttggaaatatatagaatctgcccatgtggctggcaggctgtttccccattgggatgcttaagccatctcttataggggattggaccctgtacttgtggatgaacattggagagcaagaggaactcacgttatgaactagggggatctcatctaacttgtccttaacttgccatgttgacttcaaacctgttaagagaacaaagactttaaagtatccagccccagggtgcagagaggttgattgccagggagcactgcaggaatcattgcatgcttaaagcgagttatgtcagcaccctgtaggattttgttccttattaagtgtgtgcaatctggcgcgctcctgtctggggcatctctctttcattttgcctgtggtttgtgtcgcagctgttgatagttgttttaaggattgttaggtataggaaatccacgtaaattaataaaaaaattttcattttccgat

SEQ ID NO: 363818 - DNA, 701 bp, Homo Sapiens
cgagacatgcaagttgaaatgtttctttagaaaggccatgcagcataatgatatctgttgcagtcgtcctgatgcaatatgaaattgcctaggtgctattataaacggtctggtgtcataccaaatgcaaaagcagttacagtatttccgaagttggagttctctttgtaggcctttcaaatacgtgtttgcattccatagaggtctgctcaccaactgtgcctctcaccactggttaaaattgaatttaagcctcattgacataagtcgtttcttgattgaactcttcagtttttacactggaatttctgtagttgtcttgaaagctgcatgtcacatcactgtacaccaaagtgcctttggtattaccccatgcaccgtggatagtgatttctgtgtccgttttcattttcagttgtacagtaatatggaaggcaggatgtctttccctagaggctggaagaaaagtgtatcgtacattttaaatttattttagaacaagtgcatgagatgtgtcactgatttctgttatttatttgtatgttttattattcaaagtgtatgcacttttaagaagcagaatttatatttttacgtttgaaacgttttatttctgaaacagcgttgattatatagtatacagttggaattaagagaaaagtggaaaatgtaacaaaatacaataaatttattacaagatg

SEQ ID NO: 363819 - DNA, 641 bp, Homo Sapiens
gcggccgcatggcgctggagaacggcatcaacgtgacggtgtcgcagtccaccacggtggtgaacggcaggacgcgcaggttcgcggacgtggagatgcagttcggcgcgctggcgctgcacgtgcgctacggcatgaccctggacgaggagaaggcgcgcatcctggagcaggcgcggcagcgcgcgctcgcccgggcctgggcgcgcgagcagcagcgcgtgcgcgacggcgaggagggcgcgcgcctctggacggagggcgagaagcggcagctgctgagcgccggcaaggtgcagggctacgacgggtactacgtactctcggtggagcagtaccccgagctggccgacagcgccaacaacatccagttcctgcggcagagcgagatcggcaggaggtaacgcccgggccgcgcccgccgagccgctcacgccctgcccacattgtcctgtggcacaacccgagtgggactctccaacgcccaagagccttcctcccgggggaatgagactgctgttacgacccacacccacaccgcgaaaacaaggaccgcttttttccgaatgaccttaaaggtgatcggctttaacgaatatgtttacatatgcatagcgctgcactcagtcggactgaacgta

SEQ ID NO: 363820 - DNA, 456 bp, Homo Sapiens
aagaaaaataatgtttcggagtccaggactggcaggacaggtcatcagatactcagaggctgtatctctgccctgccaaccttgacaaatggcttccaatgttaggtttgctacaagatggttactggagctctagctgcctattttgtgtttagggaagggaaaatggaggaaagggaagaagagcaaagggcgcttttaaaaagctttcccaaaagctccacccaatgacttttgcttccatctcactaaccacccacccctacctggaatggaggctgggaaatgtggcttatttgctgggtacgtgactatccctaataacaaaggggttctgacactaagacattaggggagaatgttgggtaggcagccagcactcttttaccagagggcctcctggtgtttggattttgatctcaatgtgtaaaatgacagagatgtaacaagctcaaa

SEQ ID NO: 363821 - DNA, 1430 bp, Homo Sapiens
  misc_feature (1277)..(1277): n is a, c, g, or t
ttcagctttctagatccataaagatttccataggcattagagtcattaccactctgctcctggttatcaatagtaaaattagattggtaaaaatcagagtcaaattgtgccaagtttgacatcctgagattgtgatgctgaagaggctgtatggggagaccacatggagagactgtgactacaagatgagagagaaagagatgcccgattttcaagtccccagctggtcgagtcatcccagttgaggccacagacatcacagaaacaagtcattcctgcctgactttcccaaagtgaccactccactacccggcgccaagacgcgctgatgtcacgacagcgtgcggcgtgcagacgtcggcaagctgcgccgccgcttcgggttgcttccggatctggtacttgggcagagctccccggggttcattgtcttcgcttcacaggatctgtttgagtcctgtccaccggatcctacggggggtaccttcgaaaaaaaacgggctatgctgctgttgcgtgtgggtaccctctcctgacgcctccgccgcccgggtcatgtggaccctcgtgggtcggggctgggggtgcgcacgcgctctcgcgccacgagccactggggccgcgcttctggtggccccggggccccggtccgcgccgacccttggggctgctccagagtcctgggctaccgacaggctctacagctccgcagaattcaaggaaaaacctgacatgtctaggtttcctgttgaaaatattagaaatttcagtattgttgcacacgtggatcatggcaaaagtactttagctgacaggctcctagaacttacagggacaattgataaaacaaagaataataagcaggttcttgataaattgcaagtggaacgagaaagaggaatcactgttaaagcacagacagcatctctcttttacaattgtgaaggaaagcagtaccttttaaatctcattgatacaccgggccatgttgattttagttatgaagtatccaggtcactttctgcttgccagggtgttttacttgtggttgatgcaaatgagggaattcaagcccaaactgtagcaaacttctttcttgccttcgaagcacagctatcggtaaatccagttataaataagatagatctgaagaatgctgatcctgaaaaggtttgaaaacaaaattgaaaaagtgtttggatatttccaagtgatggaatgtaattaagatttcctgctaaaacttggaaacaaatgtttgagagtgttcctttcangcaaattattttgaaaagaatcccccccctcccttaaagtggcattcgccaaaaaatctctcctggaaaagccttttgggtaattttgacctccccacccttttgtacccaggatataaaaagggtggtgggataacccccaattggttatct

SEQ ID NO: 363822 - DNA, 406 bp, Homo Sapiens
tcaccgggagactcagcagtgcggttcctgccttagcggcctgcagtgggaagctggagcagcacacagagcggcgtgggggcatctacagcccggcctggcccctcaactacccgccaggcaccaactgcagctggtacatccagggcgaccgtggggacatgattaccatcaggtaggggcacccgggggtgtcggaaggaatcaatgtgggcccacgtgcatggggtgggtgagaatgtgtgtgtgtgagcaggtgtggagggcacacgcctgagggtgtacatgtgtgtgagcaggtgtgggatcatgtgcatgtgtgtgagcatatgagtgaggcgtgtgtgaacactcgtgtgaacaggtgtatgggtgtgtgcatgtgtgtgagcatttgtgagtaggt

SEQ ID NO: 363823 - DNA, 1091 bp, Homo Sapiens
  misc_feature (799)..(799): n is a, c, g, or t
  misc_feature (972)..(973): n is a, c, g, or t
  misc_feature (1045)..(1045): n is a, c, g, or t
gctgggtggcgaattcggcacgaggagcggctgggcctgagcgtcgagactcggggccgaggcggaggagcggccgccgcgccggggcccagccggagccgccgccctcgcccttgcctttgcctgcgcggctcagaatcaccatccgcggcgcgggagacgagccggccgtcccgggccgggggacccgcccgccatggccaccaaggctcgggttatgtatgattttgctgctgaacctggaaataatgaactgacggttaatgaaggagaaatcatcacaatcacaaatccggatgtaggtggaggatggctggaaggaagaaacatcaaaggagaacgagggctggttcccacagactacgttgaaattttacccagtgatggaaaagatcaattttcttgtggaaattcagtggctgaccaagccttccttgattctctctcagccagcacagctcaggccagttcgtcggctgccagcaacaatcaccaggttggcagtggcaatgacccctggtcagcctggagtgcctccaaatctgggaactgggaaagctcagaaggctggggggcccagccagagggggctggagcccaaagaaacacaaacactcccaacaactgggacactgccttcggccacccccaggcctaccaaggaccagcaactggtgatgatgatgactgggatgaagactgggatgggcccaaatcctcttcctactttaaggattcagagtcagctgatgcaagcggcgctcagcgaagaaacagtcgtgctagttcctcatccatngaaaattccccttaacaaatttcctgggattgcgaaacctggcacgggaacagtattttgttggccaaacaactagcaaaacccaaaagagaaaattcccatcatttgttgggagattattggccccaatgtggggttttatccctaccctctactttttgaactggtgtggnnaaccaaaatcccaggaaaaggcctccccaaatggtttgggccttaaaaaagcctacactccaaattattcangcttaacccccttacttaaccccctaaatccgaatcttggtaaaac

SEQ ID NO: 363824 - DNA, 163 bp, Homo Sapiens
gctacccctgtgctcctggctattttacctccagagctgctggtgataagttggtaaaggaggacctccttaaaccatttgttaaaccatttgagactgttcctagtacttgttttaagctattttacatgatttttaatgtaataaacacatttataatact

SEQ ID NO: 363825 - DNA, 642 bp, Homo Sapiens
cacttcatccaccagccatggtacttcaccacgacgtacaatgtggtcaagccattcttgaagagcaagctgctgagagggtctttgtccacgaggatgacctttctggtttctaccaggagatcgatgagaacatcctgccctctgacttcgggggcacgctgcccaagtatgatggcaaggccgttgctgagcagctctttggcccccaggcccaagctgagaacacagccttctgaaaacatctcctgccagctgaactgtagttagaatctctgggcctctcctcaactgtcctggacccaaggctaggaaagggctgcttgagatgactgtggtccccccttagactccctaagcccgagtgagctcaggtgtcaccctgttctcaagttgggggatggggaataaaggagggggaattcccttgaacaagaagaactggggatagttatatttccacctgcccttgaagctttaagacagtgatttttgtgtaaggttgtatttcaaagactcgaattcattttctcagtcatttcctttgtaacagagttttacgacttagagtctgtgaaaacaggcaaggagcccgggttaaaatatccccctattcgcccccaaaatgcaataaaagaagat

SEQ ID NO: 363826 - DNA, 1366 bp, Homo Sapiens
  misc_feature (101)..(190): n is a, c, g, or t
  misc_feature (1330)..(1330): n is a, c, g, or t
gagaagacacagaagaaagttcaagatgcagggagagagtctgtatccacagccagtgatcagccttcccactctctggagagacaaatgaatggaaaccnnnnnnnnnnnnnnnnnnnnnnnnnnnnnnnnnnnnnnnnnnnnnnnnnnnnnnnnnnnnnnnnnnnnnnnnnnnnnnnnnnnnnnnnnnccaagaagggaatgctgaagggcttgggagacatgttcaggtttggcaaacatcgaaaagatgacaagattgagaaaacgggtaaaataaaaatacaggaactcctttacatcagaagaggagaggatacgaactgaagcaggagcaggagaggattcaagccaaaactcgagaaattagggaacgacaagctcgagagcgtgactatgctgaacattcaagattcttcatcggacattttggctgtgatgatgagttaatgtatgggggagtttcttcttatgaaggttccatggctctcaacgctagacctcagagcccacgagaagggcatatgatggatgctttgtatgcccaagtcaagaagccgcggaattccaaaccctcacctgtagacagtaacagatcaactcctagcaatcatgatcggatacagcgtctgaggcaagaatttcagcaagcaaagcaagatgaagatgtagaagatcgtcggcggacctatagttttgagcaaccctggccgaacgcacggccggcgacgcagagcgggcggcactcggtgtccgtggaggtgcagatgcagcggcagcggcaggaggagcgcgagagctcccagcaggcccagcgccagtacagctctctgcctcggcaaagcaggaaaaatgccagctcggtctcccaggactcttgggagcagaactactcccctggggaaggcttccagagtgccaaagagaaccccaggtactccagctaccaaggctccaggaacggctacctgggaggacatggcttcaacgccagggtcatgctgggaaactcaggagctccttcgccaggaacagaggcggaaggagcagcagatgaagaacgcagcctccttccgaggggcccagcaactatgactcgtataagaaagtccaggaccccagttacgcccctcccaaggggccttccggcaagatgtgcccccctccccttctcaggttgcgaggctgaacagacttcagactcctgagaaagggaggcccttctattcctgagcacgcaaataacggatgcttcatgtcgcgcaataaaagacattttcctattgaagacttgtattttggggagttttttttaaaacctcgatggtantatgggagtattttctgtttgtttgggtattccagt

SEQ ID NO: 363827 - DNA, 795 bp, Homo Sapiens
  misc_feature (636)..(636): n is a, c, g, or t
gggacagccccggtccccacgcctagaagacagcggaactaagaaaagaagaggcctgtggacagaacaatcatgtctgactccctggtggtgtgcgaggtagacccagagctaacagaaaagctgaggaaattccgcttccgaaaagagacagacaatgcagccatcataatgaaggtggacaaagaccggcagatggtggtgctggaggaagaatttcagaacatttccccagaggagctcaaaatggagttgccggagagacagcccaggttcgtggtttacagctacaagtacgtgcatgacgatggccgagtgtcctaccctttgtgtttcatcttctccagccctgtgggctgcaagccggaacaacagatgatgtatgcagggagtaaaaacaggctggtgcagacagcagagctcacaaaggtgttcgaaatccgcaccactgatgacctcactgaggcctggctccaagaaaagttgtctttctttcgttgatctctgggctggggactgaattcctgatgtctgagtcctcaaggtgactggggacttggaacccctaggacctgaacaaccaagactttaaataaattttaaaatggcgccaggcccccccacgtaaaagaaaanaacttgttcggccgccctcggcccctcaaaaaacttttctaaaccctttcgtttgggcccccggggcccacttaggtaagggaaaaatggggcctaaacctgtttccctaggaaaatcccttggccatgaactaagggcttgggatttcctcccccaat

SEQ ID NO: 363828 - DNA, 1087 bp, Homo Sapiens
ggggactaccccggggcttatcagtgttccctcaggtaacaagggttgtctttttcagatccaattggtttcttgcatacgtagtctggatttcatgagtcatctaatcttttaaaacatgaatgtcatcccaggcgatgcatcctactcttagtatgtcactgaattcgttatattaaaatatcgattggtttcatgttgtaaattactctttggtgtatccaacgttattgggttactggtgtccttttatctgagcttggattaattccacttttttgcataaatttatggggtttcgcggtaatcctaatggttcgttccagtaccaagtgtgaacagtacctgagtaagtcatcctgtataggttattttctcggggtctacgctttctccaagaattccatggatacggttggtttattgccgtgcacctaagtaatgccgcatcttacatcccataattttgccgctttgtagggcgcgttctgcccaagtctgtgagtgacccatttggtttcaggcccgttgttcggtactcccatatgttttctttgttaatgtaccgcgttctttcactgatgagtacgatgtttctgtgaagcactttgcctgaggtgtcaaattgtcatgctcttcttagccgtttttctttctactaaaatgtgttaaatgatgctaaatttattgtttgttgtggtgtctatagcaaagtttttctatcaattttcccccatcccatccccaccctggactcatttgagaagacttgagaaatgtcttaatactcacactgctgcatgtagctcttgcttatttactggtctgggaaacaggatgtgtttcctttttttaaaagccaattgacagattacacctaaatactcctccttttgtatcattcagccttttgttttagtttggtaagttttaagaaatttcagcagcaaagttgttattcagtgggcacgatggactccaaatgcctcaagttatgtatacctgtcccagatgtaaacttcattgtcctttgttggatgatattttaaatggatataaaataaattggtctaaagggcaaaaaaaa

SEQ ID NO: 363829 - DNA, 842 bp, Homo Sapiens
tatgtcttcccatttaaggtgaagatcacccctgaaagccctacatccgacggtacaagacaatcttaatgaatgcagtaagacatccaggccaggtacatctatgcaaagccagtacagggggtggcatatgtgcgctttgggctcctacataaggatggtaagaagactttctttcgggggctggacgagtcagaccaagctggtgaatggacagagccacatttccctctcaaaggcagagttccaggacgccctggagaagctgaatatgggcattactgacctccaggggctgcgcctctacgttgctgcagccatcattgagtatccaggtgggaagatgaagaaggcagagctcacatcctggtattttgtgtcatctcccatctccttggatcttagcaagaccaagcgacaccttgtgcctggggcccccttcctgctgcaggccttggtccgtgagatgtcaggctccccagcttctggcattcctgtcaaagtttctgccacggtgtcttctcctgggtctgttcctgaagtccaggacattcagcaaaacacagacgggagcggccaagtcagcattccaataattatccctcagaccatctcagagctgcagctctcagtatctgcaggctccccacatccagcgatagccaggctcactgtggcagccccaccttcaggaggccccgggtttctgtctattgagcggccggattctcgacctcctcgtgttggggacactctgaacctgaacttgcgagctgtaagcagtggggccaccttttctcattactactacatgatcccatgcccggatttcggaactcgag

SEQ ID NO: 363830 - DNA, 560 bp, Homo Sapiens
ggcaccctcattttatagtactcctttttggtacagaatcattttgccaaaatactcctgtgatacagatgcacatgataaactgtaaaatggaatttcacccattgaagagccccaaaagaacaatatggtagtgcagcatgaactaacatgcaatttctaattttcaatatccccaaattgcaaaatactaatagctaatatatatactatatgccaagtattaagtactttgtaatattatcataatctgttataaccgcactatgaggaaagtagaatagtacaattatctcactttgcagatgaagaagctgaggtatagagatcaatttacacaaaatcatataggctgttaggctctcaagtctagctcttaagagttgataaatgtggagcctttggctagtaagctttgctacttctggaaatgaatttagccttagaagtatgttgaaaactactgtttatgatttgctgttagaccaacaggtaaacagtgaactataagtcagtgtcacgaaaatatcagtgtcatgaaaaggctagagtacatggag

SEQ ID NO: 363831 - DNA, 1793 bp, Homo Sapiens
  misc_feature (491)..(500): n is a, c, g, or t
  misc_feature (1234)..(1238): n is a, c, g, or t
  misc_feature (1242)..(1242): n is a, c, g, or t
  misc_feature (1244)..(1244): n is a, c, g, or t
  misc_feature (1246)..(1246): n is a, c, g, or t
  misc_feature (1451)..(1476): n is a, c, g, or t
  misc_feature (1783)..(1783): n is a, c, g, or t
ccttccttggctaagtcttggccttcagttatcttcaaatgtaccagaacctgagccaacgcctccctgtgaaactgttgctgatctgtagtacagtaccaggaagaaacctcttttgttctctttagacatcttctacttgctcttggccttgagatcgtgtaacaaaatgaaggagggctctcttctttcttcctcatcctactcaaaaacttcccgagagcagtggtggttttgagggttttgacttctattacttttggcagcctggaaagttgtgtcttctgggaaagagacccggggaggccaggagtagctgagggtcctttctgtgcccttaaaccgcccagaggagccctattccactctggttttaggctgatctgagagggtctccctttgttcctttctggagcatttctctaacgtttattacaattaggagggggaccccacatctgtgagattctgtttcatttgaggtttacagnnnnnnnnnngtggccagatgtgttccccccatgggtgagaggcctgggcaactgcctggtgaatgtgtcttgcggcagctgcagcaagtggaggggctgaactactggccagctcactggatgatgggttaatacaacaactgcactgtaaggactcagagccacacagaacttctgagaggggctgttagcattgcgcagcatcttcagttctccagtaaatgatattgcgttcgtgcctcagctttaagcacaagtagcagcagctcctgcttgagttctgagggcatcatggccctatgattaaccagagtgatctaacctagactaaaattgggaacttatttgcaatttttgaccctgaccactaactagtgattcttctccaaaattgagaaagacagcacccattgaaacagatatgtgtgtgaaagtatatttttcaattccagatttttaattttaaggctccaggaaagaaaggagagtagaacatttttcctcattttatcaaatcctctcttgccctccctcaattcccctgtaacattcctgaagctgttcccactcccagatggttttatcaatagcctagaggtaaagaactgtctttttctctgattctttaataaattatctttatagaatatgcacaagtttttctacactcagtgttaaagtatttattaatgggaagtcaacttaatgttttgaaataaatatatgactctgtttaatgcacnnnnnccanananatagaaaaaacaaacaaacacgaaaaccccgaggcgcgaggcatgcatagcatgcaccatcctggttgtgcttgggcggggccgcccaaaaacctcgcctgaccaaatcgttatatacccccctgcccccgtgagcgcagggccccaaagggccgcaagggtcttcccacgaagtccctgggaaacgcccgacgcgggggggaannnnnnnnnnnnnnnnnnnnnnnnnnaagtgcgaccgcgctcgacgtgcgaacaaccctccattcggaccgctgcgagggcctccacatcggccttttacgccgcggcgccgcgctatgggagccgaaaggatacacggggaaaaccgcaatgggagtgtcagtgccttcgcccagcaataagcactctccgtgcgtggatgcgccttaagccggctataggaaaaccacccgcccatacccgggctcgatatacgcttcgcgatgtccccttactgaccacctcccccaagtctgccccctcgacgaaataccaatcctcccctctgggtgntacgcggcgg

SEQ ID NO: 363832 - DNA, 998 bp, Homo Sapiens
  misc_feature (752)..(764): n is a, c, g, or t
ggtcagactctcagaggatccccctcgggctcttacccttgtccttccaaggatttcccaggatatccagcgaagacatagcgtccaaagcggttcccctgagattccccgcggtttccccggtgcaatgcgagagaaaggtgcaccggggagtagctggcaaaccaggcccccgggctccgcgtggtccaacgcgtcctcgagcttcaaggggttattcgtcttccctgccataggagtcggaatccccagccgaggccctaggcccgctgcagcagtggaacgggatccccggggaggcaggtcccaggagcagaccctgcccccagcccccacagacacaccccaatctgaaagccatgcgtgtcggtgtatataggaaccatgtacagagcccagagaagccccctacatccccccgggaaataaaagaaaactagacagaaactcatctatatattctgtatctggagttccgttttgaatattaactgtgttatttttatacactttttaagccttaactcgccattgatttaccagtttaacgtttcctggggtttctttgcccatggggttctctgcccccacccccggccctttgtttgacttgcgtcgtctgatactcagtattgtagctttttgtccgcatgttactccctgtaaatacgctgttatacatactgttaacacccctttgctttttctatgggacctccaggccaccatatttagaactagttaccttattnnnnnnnnnnnnncagtctgttggcttctcagtctgcatcttggaggcagggaggtgagggcaggtgcccctcagacacttcaggaaggtagtttgcattctatttaaaaaagggagtggggagcaaatgaaaatcaaatgtggggggaaaacactaaagggggcaagaaacaaaggaattacaaaccctctgctctttgtatttctctgttgtgaagaataaactgtacctgcacccgaaaaaaaa

SEQ ID NO: 363833 - DNA, 1254 bp, Homo Sapiens
  misc_feature (188)..(301): n is a, c, g, or t
ttgaataacaaggctttaatggctcaattttcttatgattatacaaacatataaatcttgaaaaggtaacgccatttagtaaaatccataaaaataacagttttgccacagtgcagagaaaagttcattcagtttgattccccatgccctcgacaagcagctttctgattagagctggaagacacagnnnnnnnnnnnnnnnnnnnnnnnnnnnnnnnnnnnnnnnnnnnnnnnnnnnnnnnnnnnnnnnnnnnnnnnnnnnnnnnnnnnnnnnnnnnnnnnnnnnnnnnnnnnnnnnnnntttttaaaacttggaagacataaagtctatacattctacactgaatcatgaatatactacggagagtttgtagaaagtaaactttaaaatcccacactccaacatcatatatgtccataagcaggattttgcaattcacttcatactggaggtaagcaccccagctggggtcctcttgccgcagtggtcaggccgtcagagctgaggcctttcactgcaacaagggaagtagtcttcggtccgaaacaggacaggggcttcataaccggcttgctatgccatcagagggagcagacttgctaaagagcgagggcacgttcatcgtgtgcaggagcatcttgaacgccctggggaaggtgcccagactcggcctcggccttggtgacctgctcctccatcctggccacgcggccccccaccatcctcacgaaggcctccagccggtcgatcctgctgtagatgcgccgcatctcggcggccttcgcgtggatgcgcggcacgccctcgctgacgacgtgggacgagtcgccgcgaagcatgtccagcatgcccacgaactcgtccactctggtaagcaggtcctctaggctcgcgtccagggcctcgacctcgggccgcgccccggccccgggcagcaggcaggcggcgtagcccgcagcggcgcggcgaagcagcggcaggtcgcggcccggcgcgccgtcctccgcgccctcgtcctcccacggccccgaggcgctgctgtggctctgggaaacagtgccactgtccccgctccaggcggcgccctgcggctcggcctcttccgcgagcccctccggcagcgctccgccatccgaaaagctaccctccatggcccgcgaccacccgactgcgcagcgctcgcctcgtgccgaattcgccacccaggcctcgctcctagtttagtggggggatggcggagcggggcgtgggtg

SEQ ID NO: 363834 - DNA, 1226 bp, Homo Sapiens
ggaattcccgggatgaatggaggaggtgcctcacgactgtccaggggccgacagcgcccaggcgggcagaggggcttcatgtcagggatgccccaaccagcggctgtgcgcttctggagcgggggccactccggacacggctatagaggaaatcaaagagaaaatgaagactgtaaaacacaaaatcttggtattgtctgggaaaggcggtgttgggaaaagcacattcagcgcccaccttgcccatggcctagcagaggatgaaaacacacagattgctcttctagacatcgatatatgtgggccatcgattcccaagataatgggattggaaggagagcaggttcaccagagtggctcaggctggtctccagtgtacgtggaagacaacctgggggtgatgtcagtgggcttcctgctcagcagtcctgatgatgctgttatctggaggggacccaagaaaaacggcatgatcaagcagttcctccgagatgtggactggggagaggtcgactacctcattgtggacaccccacctgggacgtcggatgaacacctctcggtcgtccggtacctggccacagcacacatcgatggagcagtgatcatcaccactccccaggaggtgtcactccaggatgtccggaaagaaatcaacttctgccgcaaggtgaagctgcccatcatcggggtggtggagaacatgagtggcttcatctgtcctaagtgcaagaaagaatctcagatattccctcccacaaccgggggcgcggagctcatgtgccaggacttggaggtccctctcctcggcagagtgcccctggatccgctcataggtaagaattgtgacaaaggccagtctttttttcattgacgccccagattccccagccacgttagcctacagaagtataattcagagaatccaagagttttgtaatctccatcagtcaaaagaagagaacctcatcagttcctgaaacgagagaatgttcaggaccaagcagttaccgagcgaggcactcactgggcagcacatccagccagacccgaccagctccgggatggggtgggtcacagcaaaaggaccagatgctggtgtggtccgaagccactttctcagagacactttaatcattgagtatttgtacacttttctttagaacatatataaagggcattctctacaaatgtgccgttttaagaataaaaccccctcaaatttc

SEQ ID NO: 363835 - DNA, 1681 bp, Homo Sapiens
  misc_feature (15)..(15): n is a, c, g, or t
  misc_feature (869)..(877): n is a, c, g, or t
gaggtgtcactcagngatgtccggaaagaaatcaacttctgccgcaaggtgaagctgcccatcatcggggtggtggagaacatgagtggcttcatctgtcctaagtgcaagaaagaatctcagatattccctcccacaaccgggggcgcggagctcatgtgccaggacttggaggtccctctcctcggcagagtgcccctggatccgctcataggaatccaagagttttgtaatctccatcagtcaaaagaagagaacctcatcagttcctgaaacgagagaatgttcaggaccaagcagttaccgagcgaggcactcactgggcagcacatccagccagacccgaccagctccgggatggggtgggtcacagcaaaaggaccagatgctggtgtggtccgaagccactttctcagagacactttaatcattgagtatttgtacacttttctttagaacatatataaagggcattctctacaaatgtgccgttttaagaataaaaccccctcaaatctctcccccgaggcctgcttcacgtaaaaaacaaatgggttgtgggatcgtgggattctgctgtgtcggaagcttagtcgattgtagaaactcccgtttaagccatttctgcctgtgaagataagaaagcctaatgctggtgaatctccagcccctcgaggccaggcttctgaaagtcacctgggcagaccgtctggaacactgtctgggacaggaaactggctgtgaccttgccaatgtcactgttgcctcccatcttacaaaggatgtagccatacaggtttgcagcttggagagagatcccagcaaccaccagagccagccactttagcttcaaggaaaataaggtgctnnnnnnnnncacaatccatatcatggggcagattatgaggcccagccagaagattcgtgcttcagcttctgtggcagcaatgctattcggagagaccttcctggcttcaaagatccagtggctcttcccatcttcatctatctggttccaccatcgaaggcccaccaggagtcttccggttacattcttcacagaccagaagtccagggacaggaggagcagcaccatgacaaaacagcccacaaagctcttgctgaaccagtcgcagctcacgtaggtgacgatggcactcactcggaaaaacaggtggaaaaaggtggccaaggggtgtctgatcttggctttcctaaaggccagctcctcctcgtttccaaggaaggtcactgatctccctttaccacttcagactttgctggaggtgttagcgtggctcaatggaatgttctccccggtgcatatgacgcagaaactcaggctgtagccctggggacgcatcattaggtcagcagtccccagacggtcatgatgacactgttttttttcctccccttcgaagaatccagtactttcccgccacttgactccaaatatcttttgccctcttcgaaacacggtcatctttgaagtgaaacgtgacagcagccactgccttcccgcctagcagagatgacggccagttccctaaaggtaaaggttgggtttttccaccaccagtcactgagctccaagctcacacgcagcccacggggcaggtgtctcatgtcatcggggaatgcgtgttcctgatcttggctttcctaaaggccagctcct

SEQ ID NO: 363836 - DNA, 249 bp, Homo Sapiens
  misc_feature (57)..(88): n is a, c, g, or t
atgagccaccacacctggcttgtcatttaatattaggtctttcctctttccttttcnnnnnnnnnnnnnnnnnnnnnnnnnnnnnnnnggggagcttttgagcaattctcctggctggaatatgggtaggacaactgaaactcaaatagccgtcttggaactggaggtagtactgacaaaaagaaaaagttggggtctctgatgattttgtggaatagtcattacactagacttagagaatctaccata

SEQ ID NO: 363837 - DNA, 527 bp, Homo Sapiens
  misc_feature (465)..(475): n is a, c, g, or t
tcttctgggccttccccttgggaactggcctcatcacactgggagttggtgcttcttgtctctgggtctccagagtttgccccgcctgtgcacacctcacattccagactctagccatctcggcaggatctcctggctccttgagtgcccaggtgccaccaagaggaagggccttgtgggatacaccttgcagaatagggatcggtgtgccccgctgcgaggggccccccatgggggctgtggcccctccgcaggcaggacatcccaacccctggctgggactgaaccacccagagcggagcggctcccttttcagccttgtgagtcacctggcaggccccagctgggctggctgtccgtgtccctcagcctggctggtgattccttgcaggccagaaatgaagagtccctgtaggttttggttttgtttgttttattttgttctttcaccttttttcctcattnnnnnnnnnnngtccctgtggagtgtacttatttattttttgattaaagggaagtaaaatgca

SEQ ID NO: 363838 - DNA, 603 bp, Homo Sapiens
  misc_feature (344)..(355): n is a, c, g, or t
agtaatgcaaattaaactttaaagtatgtcttgtttgtagccaatacatggtgtatagccccaaaaaatggagggattatttttccagtagttgaacactgtcatccgtttcaggtgacagctggtcaaatcatttaagaaggagttttgccattcattttcattgttttactttggttttccccccaagggtaaacaaaaatttcaaccagcattcatgccgaacctatacccatttttcagggcctagctgtacagttatcagggatttttatttgtagtctaattttggcaaatcagggccaaatcccagtgatagttgactttggaaacaaggtttggcnnnnnnnnnnnnttattaacaaaatattctgtaagaatcaattgtctatatggaatttaggataaagaatatttacaataaagaatatttacaataaagagtttattattatttgtaagttgggggcaacaaacaataccctttatctctgtaaaatttatacacacaaaaattaacaaaagattctgtaagaattaattggctatatggaatttaggaaagaaaatttacaataaagagtatttacaataaagaaaaaa

SEQ ID NO: 363839 - DNA, 579 bp, Homo Sapiens
gcggccgccgcctgtctgtggagaaccccatggctctcctagggggtgatgccctgaagttctctgaaatgttccagaaggacctggcagctcgggcaatgaacgtcgaccccagtttttggaaccagtatgctgcagccatcactaacgggctcgccatgaagaacaacgagatctccgtcatccagaacggcggcatcccccagctccccgtgagtcttgggggcagcgccctcccccctctgggcagcatggccagtgggatggacaaagcacgcactggcagtagcccacccatcgtcagcttggacaaagcgagctcagaaacagcagccagccgcccattcacgcggtttatcgaggataacaaggagattggtatcaactagccagtgactcgctcatctgccctgcccaggcccacgttttgaagttggagcatcaggcctccgacctttcttgcctcggttctcattacactttcacccatagcagaaaacactttgtgcggctgccgagaggtggtcttgtaagcgctgcatggcgctcccttcaacagcaagcctgactgttctcgag

SEQ ID NO: 363840 - DNA, 505 bp, Homo Sapiens
gcagaggaaggagacgtaggaggaagcggccgcgtcagggggctcctggaaaatggaaaagcctgcgtctactattaaggcgtcaaattagggcactgagcttgagtggaagagatccagccatgaaatccccttccaagattttcctcgtgagccccgccctggattcccagcaagactcaaaacttacaaggtgtcagagctggcaaagaccaacttccaacccgtccgcttggcacgtgaggaaactgaagctctcggaagagaaatgacttgtacagggtcgtcactcagcagatcgaggagcgggcccaggcgctctgcctcccacttgggttcccgcctccaggaagggccctggctcccttttagccctgagccttgaagcaggttagatgcccgcgagctgtgcggaccacccagtgatttctactgctcttggcccagagccagttcctggaaggtcctggttgacagcgagccctgaatatcaatgacaatcagt

SEQ ID NO: 363841 - DNA, 1261 bp, Homo Sapiens
ggacagttccagattccatggtccatccccacggaggctgaggacattcccattgttcccaccacatctggcactatgatggaacttcgttgtgtcattgcaattattcgtcatggggatcgtactcccaagcagaagatgaagatggaagtgaaacacccaaggttttttgctctgtttgaaaaacatggtggctactagacagggaaattaaaactcaagcgacctgagcagctccaggaggtgctggatatcacaaggctgttgttggctgaactggagaaagaaccaggtggtgagatcgaggagaagactggaaaactagagcagctgaagtctgtactggagatgtatggtcacttctcaggtataaaccggaaggtacaattgacttactaccctcatggagtaaaagcttctaatgaggggcaagatccacagagggaaactctggccccatctctgttgctggtactgaagtggggtggagaactgattcctgctggccgtgttcaggctgaggagctggggcgagcttttcgctgcatgtaccctggaggacagggtgactatgctggcttccctggttgtgggctgcttcgtctccatagcactttccgccacgatctcaagatctatgcctctgatgagggtcgtgttcagatgactgctgctgccttcgccaagggccttctggctctagaaggggagctgacacccattttggtgcaaatggtgaagagtgccaacatgaatgggctactggacagcgatggggattccttgagcagctgccagcaccgggtgaaggctcggctgcaccatattctacagcaggatgcgccctttggccctgaggactacgatcagctggctcccaccagaagtacttccctgctcaactccatgactatcatccagaatcctgtgaaggtctgtgatcaggtatttgccctgatcgaaaacctcaaccaccagatccgggaacgaatgcaggaccccaggtctgtagacctgcagctctaccacagtgagacactagagctaatgctacagcgttggagcaagctggagcgtgactttcgacagaagagtgggcgctatgatatcagtaagatccctgacatctatgactgtgtcaagtatgatgtgcagaacaatgggagtctgggacttcaaggcacagaggagttgctcagtctctctaaggcactggctgatgtggtcattcccaggagtacgggatcagtcggaggagaat

SEQ ID NO: 363842 - DNA, 1201 bp, Homo Sapiens
  misc_feature (52)..(88): n is a, c, g, or t
agaaatgatagatcactatagggcgacttggagctcaccgcggtggcggcgnnnnnnnnnnnnnnnnnnnnnnnnnnnnnnnnnnnnnatcaggccaaatcggccgagctcgaattcgtcgagagcggactaagccgcagagagcgggctctgtcccgcccgctccccaggtggacgtggtcttggcatccacgccaatgagaatgtgagggcggggcctgaatagacgcaggaaatggcgacggccgcgggtctgtgagcagcgggggcggggcctggttgtggcccctccttctcccgtccccaagttccctgggtgggaacggggtcttggggtccctggctgggtggccagaccccgaagccagcgctgggaagggctgcggatgcccgggtcagaggaaggggcaggtccaaggacacgcgggtctggtcctgggcaagaaccgccccctctccgggcctgcttcagtcttcctttgcagaacaacgggccaggccccttccctctgcccccgggtgcttgaagtctagccccatcctggtccaatgcgctcttggtagcctcctttcccagctgcccgcccgccgccatgccgcccttactgcccctgcgcctgtgccggctgtggccccgcaaccctccctcccggctcctcggagcggccgccgggcagcggtccagacccagtacttattatgaactgttgggggtgcatcctggtgccagcactgaggaagttaaacgagctttcttctccaagtccaaagagctgcacccagaccgggaccctgggaacccaagcctgcacagccgctttgtggagctgagcgaggcataccgtgtgctcagccgtgagcagagccgccgcagctatgatgaccagctccgctcaggtagtcccccaaagtctccacgaaccacagtccatgacaagtctgcccaccaaacacacagctcctggacaccccccaacgcacagtactggtcccagtttcacagcgtgaggccacaggggccccagttgaggcagcagcaacacaaaacaaaacaaacaagtgctggggtactgcctcctcctcatgctggcgggcatgggcctgcactacattgcctttaaggtgattcctgttctccccggggtgatgggccagagggcaggaaggtggcgtgaatccagtgtggtccagcagtcctcaa

SEQ ID NO: 363843 - DNA, 481 bp, Homo Sapiens
  misc_feature (18)..(18): n is a, c, g, or t
  misc_feature (25)..(25): n is a, c, g, or t
  misc_feature (39)..(39): n is a, c, g, or t
  misc_feature (44)..(44): n is a, c, g, or t
  misc_feature (51)..(51): n is a, c, g, or t
  misc_feature (61)..(61): n is a, c, g, or t
  misc_feature (119)..(119): n is a, c, g, or t
aaattggttaaccccagnttttccnattcacaacttttnaaaanaaggccnattgccaaancttaaatttaccctcacttaaaggaaataaactttcggcccgctccgaggaaaccggnagggcagggttccggggccacagccggcacaggcgcaggggcaagtaagggcggcatggcggcgggcgggcaagctgggaaaggaggctaccaagagcgcattggaccaggatggggctagacttcaagcacccgggggcagagggaagggccaacagaggcatccttcagcaggagcgacaacggctagggcagcggcagccgccaccatccgagccaacccaaggccccgagatcgtgccccggggcgccgcgccctgaagggctcacctggatggggcctgcagtgcgttcccgctttgcttccttccctggacggcccgctccccgaaacgcgcgcaataaagtgattcgcagaaaaa

SEQ ID NO: 363844 - DNA, 380 bp, Homo Sapiens
aagcgtcacttctcctgctgctcctgtttgtctgatgtggcaaaaggccctctggagggctggtggccacgaggttaaagaagctgcatgttaagtgccattactactgtacacggaccatcgcctctgtctcctccgtgtctcgcgcgactgagaaccgtgacatcagcgtagtgttttgacctttctaggttcaaaagaagttgtagtgttatcaggcgtcccataccttgtttttaatctcctgtttgttgagtgcactgactgtgaaacctttaccttttttgttgttgttggcaagctgcaggtttgtaatgcaaaaggctgattactgaaatttaagaaaaaggttcttttttcaataaatggtttattttagg

SEQ ID NO: 363845 - DNA, 496 bp, Homo Sapiens
gcggccgccggcgtgtggggagaagctgcgggccgtgatgtagcggagcgcgtctcccgtgttggtgttgcccccgtggtaggcgagacgccgggcagccgccttgacctcctcctgcgagccaaagagtcccaactcgaaggccgtggtgggccggtcgctgtagcgcacgacccccacacgggtgcggtcggggcccacctcgaaggtgtccaccaggttggccacccactgccggaccttctcaaagtcctccttgcccacgctggaggaggtgtccaggaggaagaccagatcgtagtggacacttttgcaacctgcccgctgagcctggcagccgccgcccccactccacagcagcagcatccagaggaggccagccacagcgttccctcggaggccggccatggctctcctgttcttggggacaggcttctcttggccaggaagagacgctgttagggtctacagcagcatggcctggcagggaggcact

SEQ ID NO: 363846 - DNA, 518 bp, Homo Sapiens
cagagaatagcatccattcatccaccctccaccacctgtcactctcactaaagaccagaagaagtctgcctccaggtgaggtttctcagtgatggactgatagaaagagtgctggagttactctaagctcagcagaccaggctaatgctttaatagaccatgtagacaaagggcagtgaaagaactagggcagaaatgattttttacttggagaatcagactagattgtagcccacacagatgcagcctcctgaatgattggaggagtttcagtattcccagccccgccctaggctgaaatccaaaccgggaaggcaaggcaaggtgtgagcacataggtgaaggaatttccctcaagcagaggcccaagctcagaaggggtcctgtgaggcacataattcctagggtcttggctgaggcaagtctgccaaccctgaaaagccaggggatttcctgcatgttagagaatagctgaggccctggagtattttaaccactccgggaaaagtagatggagc

SEQ ID NO: 363847 - DNA, 553 bp, Homo Sapiens
gcggccgccccctgccgtggccgagcgggcgctgcgcgccatacgctaccccatgatcccaccggcacagctgttccagctgcaggcgcgctcggcagccctggcgcgccacggccccgcggtggccgacctcctgctgcaggcctaccagttccacgccgcgtcgccgctgcactacgccaagttcttcgacgtcaacggcagcgccttcctgccccgcaactacctcgcgcccgcctggggcgccccgtgggtcatcaacaacccggcccgcgacgaccgcagcaccagcttccagacgcagctgggcccgagtggccacgacgcgggccgccgggtcacctggaacgtgctcttctcgccgcgctggctgcccgtcagcctgcggcccgtttacgcggacgccgcgggcactgctctgcccgccgcgcgcccggaggacggccgaccgcggctggtggtgacgccggccagcagcggcggcgacgcggcgggcgtgagcttccagaagacggtgctggtgggggcgcgccagcagggccgcctgctggtc

SEQ ID NO: 363848 - DNA, 499 bp, Homo Sapiens
  misc_feature (455)..(455): n is a, c, g, or t
gaagggctggcgggcctcctagccggaaaatgccggcggaggccgtggtgggggcggggaggagccaccgccgcgccccagacatcgcaggaattccggacgctgcgccgggcccggcggccctgtaggctggcacctggctccggtcgggccgcccaggttttgtggcgcccgagaccagcgttgggaaattaggctggagccatcatgaaaactttttcaggcagtgcacgctcgcctgtgcctgcccatctgcttccaacctctccccacctttcggggcgcagcctgtcctgctccatcggaatgccctttagatgaatccccttgtgctgttactgtgtccttgtcgtccagctctctggttttcttttctatacaccttctcggtttccagagtcttaattcgcctgcttgtccttaaccatcaaaactctttattaatatccctgctntcgctgatttttattctccctaccccttctccctagctatgtat

SEQ ID NO: 363849 - DNA, 608 bp, Homo Sapiens
  misc_feature (354)..(398): n is a, c, g, or t
  misc_feature (464)..(479): n is a, c, g, or t
ataactttcctcctagtaatgcaggacaagtgagccccaaaactggggcttagcagaagttcttggctttggctaggaaagaacttaaggttaagttagtggtgttagatagcaacatttgcttgaacggtactgctccttgcagagcaggctaactcataggctgtgcacccaaagtcagctaagtatgggctgttggcaactgtatttatactcatgtatatccactttcaattatatgcaaattaaggggcaggctgatgtgaattgacaggcaggttaattagaactttctagaaaaggggcagtaacttccaggtcattgccatggaaaggagtggtgacttcaaggtnnnnnnnnnnnnnnnnnnnnnnnnnnnnnnnnnnnnnnnnnnnnncttatgctaatgaacaatgagggcagccagggatcacttttgtcaccatctgctgattttggccannnnnnnnnnnnnnnnactttattctgtctggacccggtgtatataaatggctacaaatccagcatccatctctccctgtggagaccatacctctaaagaggcattgatactaggaccatctaacatagattggtgctctaactc

SEQ ID NO: 363850 - DNA, 578 bp, Homo Sapiens
aacttctccagccaggactttgaatggctccccattatctgttgcgttaggcacagaccagcctggcatgggcaatatgggcaaactgatttcttgccattctgttatattttccaggtcaatggaactatttgctctttgtgctttgctgtttgtgctctgtatctttgctcatgttggctttttctatcttaaatagtctccttgactttaattgttcttacgtatgtttcagggccatttgatacggaacttcctttgtgaagcttatctgtactttttcttcccatctagatgagctgtctctcttctttaagtttaaaccaccataacattagagtctgcctttttgcgataattgccttaaatcctgcttctacccacagtataagactgaagctatttcaagacatagactgtcctcttcatcatccaactttgtacatagtaggtacttggcaaatatattttatattgaaaatagctttgaatcaggatggatgcagagataattctttatccaaacaaaatgtttatcattaaaatctataaataaaaatgtttatgtgaataataaa

SEQ ID NO: 363851 - DNA, 668 bp, Homo Sapiens
  misc_feature (71)..(286): n is a, c, g, or t
taagtcttatgataactccatgggaaactctagacgtagatagagttatctctcagctcttttatcaaagnnnnnnnnnnnnnnnnnnnnnnnnnnnnnnnnnnnnnnnnnnnnnnnnnnnnnnnnnnnnnnnnnnnnnnnnnnnnnnnnnnnnnnnnnnnnnnnnnnnnnnnnnnnnnnnnnnnnnnnnnnnnnnnnnnnnnnnnnnnnnnnnnnnnnnnnnnnnnnnnnnnnnnnnnnnnnnnnnnnnnnnnnnnnnnnnnnnnnnnnnnnnnnnnnnnnnnnnttcagcattagaggaatgcagctgagctaattaaggcaagggtcctaacccttctcccatcaccctcctaaacaaaatttggccttaaataaaagcatatcaatagcagcaacttacacatgtataacaatttgttttacagataacattttgcaacctgaggctcaaggtcacaagggctcaagttagtggttgattagcagtaaaatgtattcttaccctgagccaaacactcttaaacactttcttcttaactcctggccagttcattcatcatttaatgtgaacctcgtcagtagctacttaatcactgctttctcatgttacctccatttctgagcctagacaagatcacctgtgtcaagagatacctttcctccag

SEQ ID NO: 363852 - DNA, 685 bp, Homo Sapiens
aataggaagagagtcaggttgtgaaactagactgtgcttggaggcgatgtattaaatattctgaagcattttctaattgtcagtccttaaaatgtaagaaaatctcaagtgttaaaattgaagactgggtgtgctctctgctgaaagttcaatcaaaagcaactgtaatttcctacaaaggtaactaggtcaactcagcatttgtccctgcttactggaaacaacaaaatctcaacaatcaggccattaacttatcatgtcctatatatagtttcaaaagaaatctaaattcactcttaaagaggtactagtacaattttacacataagatgtctcctagttatttttcttagacttcaaaaggaaattaccaccatttagactacaacaatacaaccctacagcaaaagtatcttccccttcttcactagcatgtatatgcactcatctacccaacatcagggaaaaaacaaacagaacctagacacctatgtacaaagaatcacattctctccataatggcgattcattcattcttccttgtgccaacatttctcaagaatgctatcatgcatgaggtctactcacaggggtacatgacgctgctcgggatcagctctggtcagttcttcctcttcaatatcagactcccctcctgaactactgtcagtgacatctgaatcaa

SEQ ID NO: 363853 - DNA, 446 bp, Homo Sapiens
  misc_feature (19)..(19): n is a, c, g, or t
  misc_feature (64)..(64): n is a, c, g, or t
  misc_feature (106)..(106): n is a, c, g, or t
  misc_feature (108)..(108): n is a, c, g, or t
gcccgttgatgctgactcnaaaaggctgaagctgcccttgagaaaagctgcccagtgagacccnccacttcagagggacttagcaactttctgaaaagcaattccntntcagaagaattggagagatttacagcctagtgccatagccaacttgaggtgcagtgaacaggcatttgattcagatgtcactgacagtagttcaggaggggagtctgatattgaagaggaagaactgaccagagctgatcccgagcagcgtcatgtacccctgtatctccatacagccaagaataaagaaagaaagggatagatggaatgagtttcatcgtgattgggagcggttgttgagaagaatcatgtaactatgtaaaaagcatgtctgtttggtacactatttgctaatgtcagaagtgttaaatagaaataaaatttccaccatagtagct

SEQ ID NO: 363854 - DNA, 441 bp, Homo Sapiens
agccatattgaactcaccatcaactcagcacattcaactcaatcagtcaaaatcgtcttttcctgctggtaaataacactgaaattgtgggaagatgggatggtaagaacaaagtctgtctctggaagcacgggcgctgtctctgaagacaaattgatcgtaacacaagcagacccggtggaacgacctccatgctgaaccctcagctccccctgcatttggaccatggcctgatggaaggtgcgagaaaccctgtgaccacgttacagcacaggggcagcttggccaggccaccccttgggcctaatttttctccctggccaaaggggtcagactattccagtgctgtctgctccctggcctccagagtaatcaaacacacatgtttggcgctccactaatcagggaatgaaataaagctagatgtttccataaaaaaaa

SEQ ID NO: 363855 - DNA, 458 bp, Homo Sapiens
cccgccgtcccccgcgccacctcctccctcctccccgggcgagcgaggctggccaacggctcgctgagtgactgcgttacgttgttttatgtcaagttagaaaacaagtgaccgaaggctctaaccctgccctcccgctaaagagactttaaaatgcgcctgcttgatactgcggggagggttgccaggcagctgaagcttttggaggagaggaagccacttggaaatgttcgcaggacattgcatgtttctgtccttctaaacaatagaaatgagaggaaaaaactgaatattaatggaggccctactatgggagggtcacactacataggtgattctatttcatctgcccaaccaccctgcagagtactattcccagtttctgataaggaaacaggatcagagaggttaagtaatttgcctaggaccacacagctggctactaggacagcctgact

SEQ ID NO: 363856 - DNA, 484 bp, Homo Sapiens
  misc_feature (358)..(358): n is a, c, g, or t
gcggccgccacccagtggggacgcatcctatcctcatatgtgctcaagacagtgctgctggcagtgctgctgcgcaagggggcccctgggcaaggctgggacgaggagcacctgggaaggtgtttggaggagttggtgcagttccttagggactgcctgctgcgacgccatacgctcttccactgcgtcctgggccctggtggggcggctgccgaggtgggtcccctgcccaaggcactgagggaagccgccccagttgacctcctggccgctttcgacgggcacgcccgggaacttgcagcagcgcggttgctgtccacgtggcaaaggctgccccagcttctccgggcctacgggnggtccccgctaccttgccaggtgccccccaccccggagtcagcgcacccagggcttcctggaaggtgaaccgtaaaccctgacagcacccccacctgaccaaatgctcctaaagcctttcccactg

SEQ ID NO: 363857 - DNA, 661 bp, Homo Sapiens
gcggccgcccctgtccgggtgcttgtcctgcgatggcaccacaaacccagtcagaggaaggccgccgggcaccacgtccaaccctgcagtcccttccgagccagccaggcccccactgccgggccacgggctggcgctcagtccctccctcgccaggtccacgaggtcctgcagggcctggtgctccctctggctggccgaaggcgacgggcccctggagccacagcctgcagtgggggtgccgtggagagcgggtgaccttcgctcgctcagctctgagtgctcaggtggcaccagaggcggcacgggctcctgcataaggccctgggcaggccgctggggcacgagaggagggaccagcctggccgtgtagaagtcctccatggcccaggccccagtcagtgcgctgccctcccacagaaagctctgcttgcgttcaggtggaggaggacactggcccgctctttcccacccttcctttaaaatcctgctggcaggaagtggtggcgtgctagacaattccacttcctcagagaggagcagggccacacggtcctctatctgtcggcctgtggtttcagagtcctggactaacaacaatgggggggataccgggggtttcttcttgcgacttttattctactgcttctggtcttatcct

SEQ ID NO: 363858 - DNA, 1152 bp, Homo Sapiens
gagaggagagtaaatatgaatgcggctgagggaccagagctgggatcggaagaaaacacaggtgaaaaggagcagaaagagactgctaaccccagtccctgagccaagtcagaaatccaagtccttttatagcatccaggagccaaatgtagtgaaatccacacatcatatcgttcttatctgcaaagtgctgtcatctggcgctgaaagcaccaggactgggctgaattgggcccgaagtgcctgaagggtgtcactttaggtctggagagtcaagaggagacgccaccttggcctacagagttgagagcgagcatcatcttggcctggaggggtgtgcaggaaatgccaccttggtccagggagttgggaggaagatcccctgccttgggttaagaggggccatcattttgggccccccaaattgcagtcaggttgggaagtagaatcatggctaggcccgcggccccgggtctttctcaggctcggtccctggcacgccgcggatgtccggcagcaggcggcagccagccacgatgtccagacgctcggccagcgcacaaaggtccccgcgcgccaggcgcacgctgtgggccgccgccagccccgccgcctgggctgccgccagcctactagccagggcggccacgtcgcggcctgcacggcggtagacaccgctcacggcggccgccacgtcgtggtccagccgcgcctggctctccgccagccgaagttgcaggagcgagcgcgcgggggcgggcgccggggcctcctccgtgccccaggcctcctccgccgattcccgctgcaccacgagtggaggcaggtccctcggcgcggccgtcggttccggctccggctccggctccgagtcggtctccgcggcttccccagccacccgcagccccgtggggcggccgcgcgtcgggcccgaaggacccaggtacagctcctcctcctccgacgaggacgcagagcgctcggaatccgtctcggtcgcctcccccggcaccaccgtctccggcctccgcaggggcctccgccgacgacctgggacgccatggcaccgaaccggcagctgacgctcggagcttgcgagatccgccctcgtgccgaattaaccacccaggcctcgtacctagccgtaagttt

SEQ ID NO: 363859 - DNA, 375 bp, Homo Sapiens
ggcggggggttcgcccagcgtcgtggactatttccctagcgaggacttctaccgctgcggctactgcaagaacgagtcgggcagccgctccaatggtgagcgagccgggccggcgggcgtgggaagccgggcgcccgggtctcgggatcccagggtcccccagcgaggacgcgagggggccggagcccctggccccagtgccacggccgagacggagggggcactctcgggagggccgcggcgccggcttagcggggcagcttcgcggtgcctgttctgcaggaaaatcctaaccggtgcccggactctcgaaatcgtggtggtctccccagagtcgggagacggacgcccgtctggggtagattgtgtgaggtg

SEQ ID NO: 363860 - DNA, 378 bp, Homo Sapiens
tgataattgtagtttaagaactaatatttccctctcagaagagttaacatcatagtaatttaattctctgaccagaatgtaaaaatattagaaatcagtaacagacaaaaaaataaaattccacaaatctagaaacttaaggaaaaattccatttaagttaaagcaaaatgagttgagttataagtcctacaagggaaagacaagggaaacatgaggatgttgagatttatgagacatggttaaagcaaagcaacgcttggaggaatatgcatttctttggctgcattggtcagaaaacaagacagatttcagacttgaagaaggcatcataaagctagcactcctcccccaaccttgcaaatcatccaaaagcaaaa

SEQ ID NO: 363861 - DNA, 297 bp, Homo Sapiens
aggtgcccacatggcaggcatttattttctcacagatcatatgttccacacatgtttgttcaataagcatggactgcaaccacctacatgaatattcatagctcctcctgtagcctgttgaatatgtatgtttagccaacctcttcagcataaagctcctgcccaaacccctcctgctcctaaatgtctgtctctggtgttaaccagaggctgctcttcccaggctgctggatggctaccttgcaggctgtcacccttaacaaaaaataaagtgtcccctgcaaatgcaaaaaatat

SEQ ID NO: 363862 - DNA, 432 bp, Homo Sapiens
tccactcaccccatcccatcttggcaaagcgctgcttcagctgccctaagctgcaccagcgctttgccaagatgggatggggagggggtatgagaactggcagagcctcggtgcagcagggctgaagggctttctcaccccagctctggctatgcccagttctctgagaaaggagctcagtggggaggtggtccctccagcggaccagggaaggggtcactgtgctgggagcagcctccttgggcctcaggaaaccaccaagtgcctcggatggtggctgcccacggcgcttctgctgagaccctgcccccggcccaggtgtctcggagggtggctgcccacggcctgggtgtggctggaatggtggcaggagtgggcaccagtgcggccccggtggccatggggaataaaccagcattactgccaaaaaaa

SEQ ID NO: 363863 - DNA, 1532 bp, Homo Sapiens
  misc_feature (14)..(14): n is a, c, g, or t
  misc_feature (903)..(1007): n is a, c, g, or t
cgggcgaggggcgnacgttcgtggcgaacgggaccgtccttctcgctccgccccgcgggggtcccctcgtctctcctctccccgcccgccgacggtgcgtgtgggaaggcgtggggtgcggaccccgccccgacctcgccgtcccgcccgccgccttctgcgtcgcgggtgcgggccggcggggtcctctgacgcggcagacagccctcgctgtcgcctccagtggttgtcgacttgcgggcggcccccctccgcggcggtgggggtgccgtcccgccggcccgtcgtgctgccctctcggggggtttgcgcgagcgtcggctccgcctgggcccttgcggtgctcctggagcgctccgggttgtccctcaggtgcccgaggccgaacggtggtgtgtcgttcccgcccccggcgccccctcctccggtcgccgccgcggtgtccgcgcgtgggtcctgagggagctcgtcggtgtggggttcgaggcggtttgagtgagacgagacgagacgcgcccctcccacgcggggaagggcgcccgcctgctctcggtgagcgcacgtcccgtgctcccctctggcgggtgcgcgcgggccgtgtgagcgatcgcggtgggttcgggccggtgtgacgcgtgcgccggccggccgccgaggggctgccgttctgcctccgaccggtcgtgtgtgggtttactcggaggtgctttgcctctgaagaaaagagaaatactaggctttagaatttcaccatatgaatttcgggagagaggagcacagttcagcccataactaacacacgacggaatgaagttgataatagtgagaccttgttggtacaagactatgtaacataacctgcacttctcaacaaagaattgcttttctgacttctgcactcannnnnnnnnnnnnnnnnnnnnnnnnnnnnnnnnnnnnnnnnnnnnnnnnnnnnnnnnnnnnnnnnnnnnnnnnnnnnnnnnnnnnnnnnnnnnnnnnnnnnnnnnaggttacttggtacactggtcgacaaaaccttgaaatgttgatgtttaagggctgttgattgctggcagcaaagaagtccaactgtgctggtacccgagatagcgtctccacattttcttccaggatcatcacctttgttctaaatagctcccacatagtgtgaacagaagtcatatggttagattttctgccttggcacccaggaaaccagtatgattgagtaaacatattaaacttcctctgcatttccagcctgaacagatgttgagtacaagcttgatccaacctacgttcaacctgagagagtccacatccacagactgtttcatttccctttttcaatttaccattagaagcatagattctggctggcatattcaaatgcgcccattaaaggcaatcaaaaatggttccaccattctcattctgatttccacaattggtgctgtaaccgatggactactggagggaaagagaccaatttcttctggcacacatcttcccacggtttagcaactgttcat

SEQ ID NO: 363864 - DNA, 349 bp, Homo Sapiens
gaacgcgaacgctcgaggtggccgcgcgcaggtgtttcctcgtaccgcagggccccctcccttccccaggcgtccctcggcgcctctgcgggcccaagaaggagcggctggcgggtggggggagtgtgacccaccctcggtgagaaaagccttctctagcgatctgagaggcgtgccttgggggtaccggatcccccgggccgccgcctctgtctctgcctccgttatggtagcgctgccgtagcgacccgctcgcagaggaccctcctccgcttccccctcgacggggttgggggggagaagcgagggttccgccggcccccgcggtggtggccgagtgcggctaaaa

SEQ ID NO: 363865 - DNA, 637 bp, Homo Sapiens; identical to SEQ ID NO: 264756

SEQ ID NO: 363866 - DNA, 965 bp, Homo Sapiens
  misc_feature (849)..(881): n is a, c, g, or t
  misc_feature (928)..(928): n is a, c, g, or t
  misc_feature (949)..(949): n is a, c, g, or t
ggttccttcagatgtccttctggattactattttgagaatttttagatatcttttgttaatattccaaaagttgttgatgaacgcatttaaacttatcaactgcatttgcatttggcattttttgtcagtaaaaatttccacaatttcctcacttcttttccttatggccagtaaaagtggtgtgtggccagccttgttcatcacttcgatgtctgcaccacaggacagcaattttgccaccactgacaagttctcactataaacagcataatggacagctgtgttgccatacacatctacaatatttggatcagcaccagaatctatgagaatatttgcacaagcctccctctggcattgcagagcctcatcaagggggaagttgaggagggtcctctgcaagccagtcgccacggcagcgctaccataacgcaaagagaggcggcaggccgggggatccggtaccccaaaggcacacctctcagatcgctagagaaggctttctcaccgagggtgggtcacactccccacacgccagtcgcccctcgtcgggcccgcagaggcgctcagggacgcctggggaagggagggggcctgcggtaccaggaaaaatctgcgtgcggcaaccttgagccttcgcggtctgggcagggggcctggccgctgcgcgtgcgcgcaatccccgaagggccccctagtccaccagcctcctttctcccaggcaaagcacctccaagtaaacccacacacaacctgtcggaggcagaacggtagcccctcggcggccggccggcgcacgcgtcatctccgctctcgacgaattcgagctcggccgatttggcctgatnnnnnnnnnnnnnnnnnnnnnnnnnnnnnnnnnatgcgccgccaacacgccagttttaaaaagtcccccaagtgtgggcngccctcattaattgatgttgnctagttaaaagtttct

SEQ ID NO: 363867 - DNA, 1252 bp, Homo Sapiens
  misc_feature (258)..(278): n is a, c, g, or t
  misc_feature (416)..(433): n is a, c, g, or t
  misc_feature (523)..(595): n is a, c, g, or t
  misc_feature (1113)..(1113): n is a, c, g, or t
ggcagcaacctgggaatggctggaggtgggagagaacctgacttctctttccctctccctcctccaacattactggaactctatcctgttaggatccttctgagcttgtttccctgctgggtgggacagaggacaaaggagaagggagggtctagaagaggcagcccttctttgtcctctggggtaaatgagcttgacctagagtaaatggagagaccaaaagcctctgatttttaatttccataaaatgttagaagnnnnnnnnnnnnnnnnnnnnnttctttaaatttttgagtctttgatatgtctaaaaatccattccctctgccctgaagcctgagtgagacacatgaagaaaactgtgtttcatttaaagatgttaattaaatgattgaaacttgaaaacaccacaatannnnnnnnnnnnnnnnnnggggaaataagcggccccagcaccgcgagcgttgcttgtccggccccctcccgcccccggagaaagttttctcaaacacatttcttttcnnnnnnnnnnnnnnnnnnnnnnnnnnnnnnnnnnnnnnnnnnnnnnnnnnnnnnnnnnnnnnnnnnnnnnnnngcggcccatgcgccgagcccgccttgcgccttccccccaccacatcacaacaccacgcgccggggcggtgccaaaccgggcacggtggttgggtgccaaccaaactttctttttcacgcgggaccccctccccacaggtcctcctcttgaacccgcgagatttgtttgctccacttcccgtgcaagctcgccatccgcgtagcgcgctctcctcgccaattataccccacacaattttcatgcactctccccggcgcgctgcatggtgcacagctttccgcccgcgcgcccgctcacacggcgccgacgcgccgcacgatgggcggggacgaggggctgtatctacactgccccacccgacacggcggaaagcgcccccttctacacacctcagcgccggacccgtgacgtgtgtcagacctccgccgcctccccgccaccagaccctgtggcagtatctcatcgccaccgcgtaggtgtcggcgcgccgcgccgtggcgctacagatagccgctatntgcgcgcctcctgccgacggggagtgtaacgggcggggcggcgcgcaccgcaggcagccggtcgtcggtcgaacgacgcgcgtcctatcgtcttgtggcaggtacggcaatgcgcggcgcgcgggagaccgcagaagcc

SEQ ID NO: 363868 - DNA, 455 bp, Homo Sapiens
  misc_feature (85)..(97): n is a, c, g, or t
  misc_feature (284)..(284): n is a, c, g, or t
  misc_feature (380)..(381): n is a, c, g, or t
  misc_feature (383)..(403): n is a, c, g, or t
  misc_feature (426)..(426): n is a, c, g, or t
aagctggaccatctcaggagagaacacaagtgtgaggcagctgctggcccctcacctagtctggggttccctttaccctgtaatnnnnnnnnnnnnntagaagatggacaagacaccttaacagtccctttggcagtactaggcagaagaggcccatacttgggtccaatgtgtgcagcaggcaaaacattttcccttctaaatgtgggcccagaccactgccctgtccccccaacattaagaagcagtagccacagccaagtttcaatcatttaattaacagnctttaaatgaaacacagttttcttcatgtgtctcactcaggcttcagggcagagggaatggatttttagacatatcaaagactcaaaaatttaaannannnnnnnnnnnnnnnnnnnnncttctaacattttatggaaattnaaaatcagaggcttttggtctctccattt

SEQ ID NO: 363869 - DNA, 424 bp, Homo Sapiens
cgtccggccacccacacccgcgccgcggctggggcttgggttggggactgtgacggcgaagaagccgggggagggagttctcacaagatctgatggtttaagcgtggcagtttcccctgagctctccttcctgctggtatgtaaggcgtgctttgcttcctcttcaccttccgccatgattgtacatttcctgaggcctccccagccatgcagaactgcatacaacttaggattcataactacatatatacggatagaagtgcatgaacagaaaatctgcccttctggaataccaaatgcaaaattaaagtgactacaagcagaatttggagaaaaaaataaaagatgcaatatagtttttaaaatcattgttaaaatataatgagtctgtactttgcttaaacaataaaaaagtattcgattt

SEQ ID NO: 363870 - DNA, 1176 bp, Homo Sapiens
  misc_feature (157)..(157): n is a, c, g, or t
  misc_feature (159)..(159): n is a, c, g, or t
ctgggaaatagtagggaatacttggtatgtgtattcccatgtgtcctctagggagttggtaatggttaacctgacttcagcttccaggaattggctactcttcccgttttctatagtcatttgaatccacgagcttgatttgcactaatttgaccgncnacattgattttgtgtgtgacttggtttatggggccagctgactgaagtaagcagaccttttgggcaaaaatatgctttgacagtggtctcccacctatttgttccactgtctgccttcccctggttacttaaaattcatcagcttgtccaactggaccttctttccttcctgctgaagttgatttgaagtaaaaccttagatttgatgttaaaacagttgtcaaatctgttggtaaataagatttgaaggaccctactctgtctcccttgaaaaaggggaggaatgtcagtgttactgttttcggaaaaagtagatttttaaaccgagtttggaaatggtaagtatgcagaggtgggtgggggcaatctcaaaaacgtgcaaaaatgaggaaaaccaaaaatgaggaaatgtgtgcgtgtgtttaatgcaaaactttaaaaagaaaaacaactgttatgtgactgttaacttgctctgcattttatgtgccacaggtatgaaaggtgacattgcaaaatactccgatcttctcgcagtgtagaaggggtgaccccgggggttgggggagatcaaaaacagctcagtagttaggacagagcttagctaagtttgtcttgcttttaaggggaagttgccttatggtttagactttattatggaatggggttgggtctgcttgctgctttcaaagcaaaaaccacaaaaatgtgttcaaggataccccagcctggtgtgaaatgtcttctgggtaaataggggtagggtttataaaccaactacttggttgtcaaccacttgcgacaagaggaaaaaataaacatctgctccatcggaagaacgaccaggaacaatgggttatgtgttgtaccagaggaaatagataacgtaaccttttaaagcaaaatcttaataaacgtgtctgagaaatgaacacgatgttttgttaaatgctcaaagggtcaaacaagggggagcaggaaaggactgaatacaaagaagccgagagaaaagaatac

SEQ ID NO: 363871 - DNA, 555 bp, Homo Sapiens
  misc_feature (190)..(234): n is a, c, g, or t
ctcagcctgatggtaaatactccccagggtggatgggttgttacatcaattatagtagaatgagcttggaaagtgctgtcaccccaggcttggagagtcacacaattcctgttaactctttaaatgttctgagaaagtcctccagttcagaaagttaactttatttgacccagagttttcaaaacttggnnnnnnnnnnnnnnnnnnnnnnnnnnnnnnnnnnnnnnnnnnnnngctatagagaccctctctgggtgaacatttttgaacatctcagaaagggctgggaaaggttgacttagtcccttctgccttccgctgcccccgcaatgctctttcattttatgaagaaggaaacagcaaggactctgacttctctgttatctcagaaaagagctgaaattatccctcaacctcaacctcaggttgcagacacggcaggtcagagaggagtttttctgcagagggtggtcagggaggagaggggttagcttagaggacagggccagacctactcataaggtatttctaatgtagcgaaacacttcctccaga

SEQ ID NO: 363872 - DNA, 563 bp, Homo Sapiens
atgagctcaatcggcactggggtgagttcgctgtctgtcggtgtaatagtttaacctaaggattggggttgaagggaactcggacagaccacatggggttcgcggacccggggtgctctgagaccgccttcggctgggtgggccatttgcagctgtttggagaccggtcgtctttatcccctatatgctaggcctgcgtctcaggtgaccgtgactcctgaagcttttcagcgcaggtgtagccggcttggcgtcgccgcagtgaggtttggagccgctttggattgctgagtcactttcttcagccacttagggaaaccgaaagtggaaactcgtggggcttgaaatagtgtgttctcttgagaaccaccgaggcagtgagatttgggattccggggtctggagatcgtgctttttgtggactgcgtttgcagttcctagggtgctgctgattcacaggccttctctgtctttaagtgtgcagatcattgaccgctcagtttaagagtcactggaaatcctgtcggaacagaactaataaaaatggtctgaaaaacaaaaaa

SEQ ID NO: 363873 - DNA, 630 bp, Homo Sapiens
cctaatccttcagctttgatcaagaagaacattggggagcctggcccttcaatgtcttcaactcttctgactcaggctctgcacatcctcttgagagtcaccctccagtgaaaagaactctttattgaggccctgctgtgtaccccatgctgttctaggagctggggatctagcagtgagttagacacacagggtcccagtgctcacagagggcatatcctcatgaagagagacagccagcagacaaggtcgcaaatatcagagaatagacaggcataagggccatgtgctggagtgaccagctggtgtgcgggaaaggcctttccacaaaggtgacatctccgttgattcttgaatgttcagagggtgctgctgtctgatgcttggaaggagggaacagtcagtgccaggaccccaaggggagaacctgttgatgggatgggattcatttatgctcgggagaaagagacttggtttattggacgcctgggttgattttcttctcttctgcatcctctgcactgacatttgcagctctgccttctccccgtcccatctctgggtgaagaacacctgtacgaagactcgccgacctgcagctgctgcagagtttcagaaaacagggctagc

SEQ ID NO: 363874 - DNA, 554 bp, Homo Sapiens
cgggcacgagcccaggctcaagctcaagctcagagggacacaagccaaccaaggctacagttagagaccggtcctcagaggcctcgtgtagtgcgacgcccttgtgtggcagtaagaaaacgagggtcctggaaaggccccggacactgcttgtggacaccagtgcttctggcagacccacgcaggggccccgagaagggcgctgctccacgggactcaggtccacacggggagctcttgcctttctccggacccaagatctggcccgcaagcaaaaataccaaagaaaaacatgctagcacaaaaatattaaataacaactttgctaccttttaagtgcaggtttcaccaaataccacctagagactctgctacttttcaaagacatccacaaatagcagcattagtcaaacattaggcaatcaattaggcaaatgcaatctagcaatatggccaaagacaacctaccaaaccaagcagggattaccccagaaacgcaaggctggttaaacacaaagacaaaaacatcaatctaataacaacaacaaaaaaaa

SEQ ID NO: 363875 - DNA, 603 bp, Homo Sapiens
  misc_feature (440)..(485): n is a, c, g, or t
  misc_feature (498)..(560): n is a, c, g, or t
gaaatctctttgaaggatgccatgcttccacatcttgtgcactctgcacacttgcaaaatcagtaccatgtggatgctgaggttcaccactttgccctccagagcagggactaaactgcacctgggcccactggagccacaactacggcagccaaggagcactgtgccgggatgtggggagcagagacttgaggcagccccgggcagcaagccccaaagttccatgagtgttctacgcccttccctggaaaccatcctgccttcaaggccctcgcactgtgggcctgtgatgggaggagcagccttgaagctctctgaagtgccattgggttcattctcctattgtcatgatgaaaacacctggcttctttctagccacactctgatcagaaagtcacttggtcacacccttggtttactttcctaaatacctttttatnnnnnnnnnnnnnnnnnnnnnnnnnnnnnnnnnnnnnnnnnnnnnngtgttataaatcnnnnnnnnnnnnnnnnnnnnnnnnnnnnnnnnnnnnnnnnnnnnnnnnnnnnnnnnnnnnnnnactgcactccagcttgggcaatacagtgagagtctgtctcaaa

SEQ ID NO: 363876 - DNA, 388 bp, Homo Sapiens
ggtccaacccagggagactgttaggtcctttggtctagaaactagtttgaatatgttttaaggttttattaactttttaataaatagccagactatactgacttgtttgcattgggcatatatactactcttgcgagcaggaggcctgaaatctcctagagaagttcaggcagagggagcctggcaacaagggaaatcccgagattgtaggcaagagggtgaggaaaagatgctttcaaaaagcctggagggagtggagatgattatgtttaacgcattccttctttggttttggtaacctttaacaagtctttctcctccagcccttctcttcaatggtccctgccacctagagctgctagcatagtatggattaatagtgactggt

SEQ ID NO: 363877 - DNA, 557 bp, Homo Sapiens
gaaatagcctcattcttcttaatttggagcagtgcaactaagtcagaatctgtaaagatggtttggtccagtgatttccttgtttccaccctgtgtgctaacattcctaggtagttaaggtaccagctagttcacacggcacccacgtcttgttgtgacagctccctggacaccggcttgatagtctcatgaatggagtccttcctgccattcagctagttccttgagcagcttagtagaggagtgtagcacagggacccagaagcctgatgcatccaatgcagatctctcacctcacagtctctgcatctcctgggtaaaatgtatacgccagtgctcgaacctcttagcttggtgtcaggattcaatgtaggcagggtgcttaccagaggcctggtacatactaagtgctctgtaagtggtattcatagctttaacactctttcccttaaatacatccaaattccttttaaggatatatgacttgtaatgagtttcaagagaaagtggccttagcatgtattccagggattacaaaacgtgccacaaacccccct

SEQ ID NO: 363878 - DNA, 518 bp, Homo Sapiens
tagcccggtgttagcgagccggagcccgaggcgggggtggagctcgagcgggagccggggcccgcggggagcggcgagcccggcctcagacaaagggtccggcggggccgaagtcgcgccgacctcgagtccccgcagaggaagcacaagtgccactacgcgggctgcgagaaagtttacgggaaatcttcgcacctcaaggcgcacctgagaactcacacaggtgacaaagaagacaaggaagacaaggaaggtgatccgggaggctggagagcttgtcaaggtcacagacccacggttttccgccccctagggtccaagctctttcctggacatctgcaggcaatgtcgacacgccctccagtgtctgtggcgggcaaaggatgtgtctccacccccagaccttccgatcctgtgctgaaagtgtccctcagcctgtttcctgagaagcccaggggcttttggcttgttactttttctttctcttgaagtaaacagaataaaagagagttgctcag

SEQ ID NO: 363879 - DNA, 370 bp, Homo Sapiens
gggctcgggggcgggcggcggcaggcggcagggggtcctcgccttccgggccgcggcgccctccctgcgctccgccggggcgggcgccggcgcttgctggttgaggtccgctaggatccgcgctaccacgaagagcgaggcgctgtccttaccgtcgcggcgctcctcgacgcggggcagcgtgggggtggcggccacggccgcgccctcgggccgggactccggcccctcccgcgggcccgggcacgaccgcgcggctcgacatggacacgaggcactcggcggcgaaagtggtccacataggcggcggctgccatgctgcgggctggggccggcggcggtgctcttgctgcgagtcgtcagccgcgca

SEQ ID NO: 363880 - DNA, 842 bp, Homo Sapiens
  misc_feature (103)..(155): n is a, c, g, or t
ggcctgggtggcgaattcggcacgaggagcggacctcaaccagcaagcgccggcgcccgccccggcggagcgcagggagggcgccgcggcccggaaggcgagnnnnnnnnnnnnnnnnnnnnnnnnnnnnnnnnnnnnnnnnnnnnnnnnnnnnnaaggcgcggcggccgcgccccccagcccggcgtggagcgagccggagcccgaggcggggctggagcccgagcgggagccggggcccgcggggagcggcgagcccggcctcagacaaagggtccggcggggccgaagtcgcgccgacctcgagtccccgcagaggaagcacaagtgccactacgcgggctgcgagaaagtttacgggaaatcttcgcacctcaaggcgcacctgagaactcacacaggtgagaggcccttcgcctgcagctggcaggactgcaacaagaagttcgcgcgctccgacgagctggcgcggcactaccgcacacacacgggcgagaagaagttcagctgccccatctgcgagaagcgcttcatgcgcagcgaccacctgaccaagcacgcgcgccgccacgccaacttccacccgggaatgctgcagcggcgcggcgggggctcgcggaccggctccctcagcgactacagccgctccgacgccagcagccccaccatcagcccggccagctcgccctgagcccgccacagccatgagcagccgctcccaccccctcgtgagtccctggcctttccttttgtaataagaaagaagagagagaacttgatgcaaagtccacgaaaaaacaatttttttcacctcaggtgtcaaagtaaatttgttaaaaaaa

SEQ ID NO: 363881 - DNA, 471 bp, Homo Sapiens
agccggcctggctgccttttgcccgggctgcggccatcgggtggatgccggtggccaactgccccatgcccctggccccggccgacaagaacaagcggcaggatgagctgattgtcctcaacgtgagtgggcggaggttccagacctggaggaccacgctggagcgctacccggacaccctgctgggcagcacggagaaggagttcttcttcaacgaggacaccaaggagtacttcttcgaccgggaccccgaggtgttccgctgcgtgctcaacttctaccgcacggggaagctgcactacccgcgctacgagtgcatctctgcctacgtgactgatctagggaacatgccagtttgctatcagggcctgatcactgggatgcagctccccggggacgagaaaatgaaaaatatgactaaactgtcctcccacacgggctgtcattaaaacagtgctcactatgtcacag

SEQ ID NO: 363882 - DNA, 462 bp, Homo Sapiens
ttaacatcagtcaggcgttttcctaaaggccaagttctctccagaatctgtcagtttcacctaccgactgcagagaccctgcaaaacactcatgagacatatacattgggtgcatgaagcccttcctgtttctccctctactggggcagagagagagctgattccaagcctcgggggagctcaggaggcagagaaccttctccccgtttccacacctagatttcaaatcacacccttccctgcatactgcagaggccagcaaggcccccttccagaccccctggcctgggcctcggctcttgtaattgtaggacctgagtggcccaggatcctggcaccagctccgcctgtttggtctttggctctcctggcactgccagagaatggaaaagctggtctgtttacaggacatggggccagaagcgcattaaaaaataaggagcaaataaaatgtcataaaca

SEQ ID NO: 363883 - DNA, 547 bp, Homo Sapiens
gcccgcttgccctggagtgtaagtgctgggtaaataagaaccgcctggcgcaggctgtgtctactcttcacgccgccttctcagatcgggctgcatgtccccactccgtgtttacatctcgttcccgctccgggtctcggtgactggctcctcaagccggagacgcgtgtggtgcggcgcgatgcgggcgccagcgctgtgtgtgctggcggtgcgctgccttagtgcgggggaaagtggagggaacggtcctgcggggcgttctgtccaagaaaaaggactgcagcctcggggagccagggtcccctcgcagacgagctgccaacgccgcggagccatttctgttccaccctaggggaggagtagggggatatcttttaaaagtttaattgcaaaataagtaggttagtaaggccatttgtggttgctgtttcagtaacttcagcagtcaacggagagaagagtggaaaccttactggatgcggacaggagagccagttactgaaagcagatataacgcggatcctgtaaagagtggtgtgtatcc

SEQ ID NO: 363884 - DNA, 636 bp, Homo Sapiens
cctgataatccacgcatcaaacatctaccccttctttgtgaaggaatagaatctacactcttcttgcttagcttcctgtcaaaatgtagtgttcaaggaataatcgaggttctttgagctaccttcaattttctaaaaagcttatcagaaagcaaactgtatctgtgataagactgaataaactcactgagaggccaattttctgtgcttttcgctggtatgataaaaataattacactggtactctggtgaagatgagaagcatggattagccattatctgtgtctgattaatttttaaattccattaattacttattaatgcaatttggaagaaaaatctttcatcccatgatatgggcagaggagggagaaataataaaaggctgggattcccttgtttgtgaaaaggttggaaaataccacccaagtggacattggaatgtagaatgtgagcacgatgctgggcaggtgcactgtagcgcatgatgtgccctgaaccagtggaaagggaccgtgtgatgctgtgcattctctgaacctgtatcctcttgaaaccaacaaacagaaggcatttttgttgtggagccctctgtacaatgtacagcaaaataactcagaaccagagactccttct

SEQ ID NO: 363885 - DNA, 632 bp, Homo Sapiens
  misc_feature (588)..(588): n is a, c, g, or t
ggatatcagtgtgtactttattcaggcctcagcttgatcctttgcaaaaatgagggagttccctcctaagacccctttgagcttctattgaagtctttttcttctctctacagttaaaggagatcttattgtagggcataactaggccctgtggggttacaatggtgaatcttacttggattttgcctcctggcgaggtgaagaagggtctacccttaaagcagctagtaagctctggtacccaagccggagatgagtcagcttctctcgttagtgagcagtggatagtggagctcagactgagggactgggggcaaggagcaggggtggttgtccaagccacggagggaggagaagtgtcaccactggggacagcacagacaaatgaatgatcttgattggggttggtgaaaccccgttaacagttaatccaacgaggtggcacttgagctggggcttgaagaagtgaatatgatttcctccagcagaagggtaagtccaagggaagcatcgagggacacaagaataatgaagagtcagcaccataaggcagggcgagagcaaataaataataaaaagaatatgaanaatagtagaatgtgcatgcagacacgtcacagtagtctgtgtcc

SEQ ID NO: 363886 - DNA, 508 bp, Homo Sapiens
agcttaagaattatccgcctcactctcttttttagaaataggagggaaaggtagagtggaaattgatttcttgcagagactgaggcgctgaatgatagagggaataaacatttgccctggataaaaatgttcttggctgttgtccagctctaatgatgtcctagagcagaagtgtttcttctgatgtctcattttaacaagaggatgatgtctgtgtatgtctctgtgttttagagaggctggcaaatgctgctaagaggatctgaggttcacataaagaggatgaaaattctgaattactttcattgcaaataaaccttaacaattgtgagagttagagagcatacttttcacataagactttggtatgctgcctaaagctacttacataatttgctattcagagaaatgcatttgtttattgaggacccacccggacttaaattggaaaaatgtaacattcagatttttattttatatgtgaaataaatgtgtgattgctgttctt

SEQ ID NO: 363887 - DNA, 697 bp, Homo Sapiens
tggctaccacaaaatctggagtgattagatgccaaatatgattatgttgtattttaacaaatgcagaaagtataatacaatcatcattggcctttatgactaaagtatttataagactttaattcactttctcaaaatttcttgatgcctgcccgccacctctgataagcataaatatctctgccactcagtccctgtggcagactttagttttttccccagccctctatcagtgactgacacacatataacactgaacatttgtacatcccacagccaggatgattttgtttattttctttagtttatagtacaagacaatagatttttcttccatgtgcttgccttccacagataaaatattacttttgcaaattacaaatgttctcaccccaagattctggaacaacctacaaggtaggaatgccttgatctaattaaaacatttgctaactgctgattttaggggaaaactgtctttagcagcatctgtatgtgtaaaacatgtaggtccatcaataattcactgctgtctctacatttggtcactgactctcttctcacagggaaagaggtttcaaaccagatcctcttaggtctctgcactcagacccagccaaagctgggttccatagccttcagcaaaggcttgaggatgaaaagtaatggttgatgtggaataaaacatttaacatgc

SEQ ID NO: 363888 - DNA, 715 bp, Homo Sapiens
ctataagctctcaaagttgtgattacatgtgtcttgtagtaactattttagagtctgtctccacgtccaggctccaaaccaacctctcatcctcaaatgtcttcacaaggtcggtgatcttggcagttttactgaccaaagagtgggggctcatctccagcaccttgcagtattgacaggaaagtcactgagtagcaaatgaatgcatgaatgagctcgtgttgttaatattgccaggcccacaggaagcacccaacaaagagcaatgattggtgttcgcgttcattatctcatttaattcttacaaaaccacggcaaggattcaaccccacaactgctgtctagaaaaccgaggaaagtgacgcaacccgcgggaggtctgacggcccgagagccgcagcgccaggcccgggagccagccccgtccacttccccggtggattcttctccgttccccgccggccgccccaggtgaagctcctttccgccgtcagaaggaggctcccagcgggaagcagcatcgagggcgacccagggccagcacgggaaatgccagggaccgcgtcagccgagcctgctggaaccccgctcctcgctgcagacgccgttccgcctgaggacagtactcgggcatggggagtcaggtgcccgccacaggaacgcaagagaccgcgccggaccagcgaaaaagctccatgctctcctggttttccac

SEQ ID NO: 363889 - DNA, 490 bp, Homo Sapiens
cggagcctgtgaccgcttcgttagtggagaggtagctggcagtccgcttcggcgggcctgtgccccgcgccgttctcggggcctccctgctgagctcgcggctcacgctgagagggacacgcagtgacgagcggccgaagcagctttgcggttttgtagtgcatccctgagcatgagcacagaatgaagcggcgtttggatgaccaggagtcaccggtgtatgcagcccagcagcgtcggatccctggcagcacagaggcttttcctcaccagcaccgggtgcttgcccctgcccctcctgtgtatgaagcagtgactgagaccatgcagtcagctacgggaattcagtactctgtaacacccagctaccaggtaagctggagccaaccaagggactagaatgagggaagagaaatagtggttttaggcaattataaaactttttttaatactgtgttagatattaaaaattgttgagtatgtgtaaggt

SEQ ID NO: 363890 - DNA, 749 bp, Homo Sapiens
tctggtcataaaacacgatttccaccttctgtgcagagaaactgcactcttaattgtaggcagaagggtttcgtttgggtgacttcatcttcaccactggaagacgctgcccacctcccagccaaccccctccccagaccgagggtggacgggcctggccgtcagggaaggcctcgcattgtgccatccagccggggcttggccacggccagtctgaggcagtgtgggctcctgcgcctgttgtctttgaagtccctgcaaccagatcagctctctgctctctgagatcccagggctgtcgagctcattgaagcctgcaaatgggacagcactggccttcctccttttcattcagccactggacggggctggcccacgagccagcagataaaagaagtcatttaagcttcgatttcagataaaagacttgaggttcatgaaacgctccagcataacagtgcagcttctgttctgtgctgcaaaacacattagaatacaaacaaaggggctgctccgtggagcctgcaggatccccgaccctgtccaggctgggtgccaggtctgagggtttgggcgtcctctccgccaatgagaaatccacctggcggcctcctctgtcctgttcacccacccactcccatccactctgtcttcttaccttaatttgcacctacttggccttaatgttggcagaaaggttacggagagacagtttaaggtcaagtgcaataaaatgatttcatttaccc

SEQ ID NO: 363891 - DNA, 611 bp, Homo Sapiens
tttatggccacaccctcctcccttccctacctctgcagcctgtctgcaatgaaggaggtactaacaaaagcaagaacatcccttcagttaggaggtcagcaaagggagaaatgaaccagggtaagagaaagctgggattgccagagaccactggctctctgggtggcttggatccaaagtcagaggagaggcagctggttgtggctcggtgattgggtgacccccttccctctgaccacaggcaggtgagcacagtcctgctttagccggggtccctcatggtggtctggtcctatactcttcctgtagtgcttggttagagtcgggcgggggttggctgcacatttatgcagtggccttttgacccttcagggtggtggtagtcttcaccttgagcttagcctgtgtttgatgagcacattgcagaccattaaattcacaaaccatttcattcttaactccccactacctcttattttttaaccacgacattgtgggaaatgtttgtcactccaaaactgtggaattttgccattctaaaattgtagcagctttggggaaattacttttataaaattacttttataaactccctggattgaaaaaataat

SEQ ID NO: 363892 - DNA, 828 bp, Homo Sapiens
cctgactccgaaaccctgggcgagtgtggagggcgcgcgggggtggggtgtacccgcccacgcaaactgctgctgatctcccttaaagccgagttagaggcttggggcgagacaggagtgacgggcgatgctgtcactccatctgtcattctacccagcctgcagcagctgaattcgaacccagagacttcaggcctttgcgttgttaccgcagtccgcatttcaaagccagagtttggccactgagtcaccatgacctcgagtactggcggggcccgagccagcagagctagccacaggagggagcctcccaggtggtcgaccggagccaggtgctgccaggcacccgactgcagagcttgccctccaggtgatctcgcagtatcggtgttcacaagccctgtaaggcactcggggtatcctgaaggctacagattctgcaagggcagagactttaaggaacagccatagtccttctccagctcaaaatctggaccatgggcacaaggttgtcccggaaccatcgatctctagaaggtacaggaggaaggggacctgccagtccagccctcatattttacagagggaaaaagggaaagccccatgtaaaacagggatttccctcggtgacacttccaggctgagaagggccggggatctggacacctacccagaaacactcccaccctgtcaatgcctctctgaattatgtgatcaactgcctggagtatgaactaggcacatgcaaatagagaacagaggtcttgttgaaaatatgatgctgaatattaaaacctcactccccaaattaaaggaactgacctgagc

SEQ ID NO: 363893 - DNA, 682 bp, Homo Sapiens
ggatgccttccttccctccatttcacaaagaggccagacttgaggactaagtcattagatcttatcccttagaattttgcatatcagcatctgctaacctccacaacacaccctggcacagggtggggctgagggccccaggaaacaaagattcccaaaagtgagagggatgagtcattatttcctagagatgactgttgttttagagaaccttggtccaactctgttctgacaaggttttaggaagatggcaacaacagtggcagcagtgtactttttggatctttctcataaaaaaacaaaagagcaagtaagagagggaaaccaaatatccacatgcaacatccgcaacaaatctagtatgtcaaggtttgacatactcccatggaccccaaagtatgagccagtgagaatgagtcatcaatatctcaagacccatataccagcatctgtgcagaaggatgcagaaggaagcaaagggatgttggatggacctaagaagaggagatccccaagctgtctacagatccttactggaaggtatggtgcaccaatttgagaacagcagctgaaactgggagggacctaacggagtatttcccagtcctctcgcccattctgtatggtgagcacataataggtacttatttagtgtttgtcgaattaataaagttcaaatgac

SEQ ID NO: 363894 - DNA, 698 bp, Homo Sapiens
  misc_feature (655)..(655): n is a, c, g, or t
taatgcaggtgacttaccgcagttcccaggagcttataaaaatgtggtaagattctgagtagaaaacaagtcttgaaagcttcggtgtgttgggaaacttacgtaaagtttttagttacggcaaatgctgttatttgggaataaaaagtactttattctctaacatttggtaccagggccaaacaagatcccattcatagacactctctggttctgtttccttccattattacaaacccgcacataactcgtcaaatcggggagctgcattggcggcgacgtcttccctagtttccagtgtgtcttcccggtgtgttcctaccacccagagggaagcttttgcacaggatcgactctggaacccctggcctctcttttaagggtaaccatcctcatttgaaagatcagtttacaattttgaacatactaattttgggaaaagatgagacattccaggctgcttgattaccataagtctttgttctcttttagcgtgtaagtgctatgaaaattacttgtgtagaatagccttcttataatagtgtaagataaagaggtaccttacctgaagacgtggtgaaataaaaagtatctttatacacactatatccaccaataataaagaccatatgtgtgcgtcacggtggctgtaganttttcgtgtgaattgtgtgttcacacccaataatgaagagtgg

SEQ ID NO: 363895 - DNA, 449 bp, Homo Sapiens
aaataagggcatgaaagctgacactcaggagggggttacctgtgggaggggcaaatggctgaagccccagaggcagctgttccggctttgggagaatgggtggatacctgagacaggcaggggcacgccaccgtccactctgtctttctcttttgccactgatacatacgttacacatactactttatactaagtactgctaaagtgtttcaataaattaaaaaactttggtctcttggctgaaaatgggatgaatgcagggtggtgagatctgagcagccagtcccttagggagacacccaagcgagagagaacatcggcagaagagatggagagcaaggtgagatcaagatgctttggccagagtcaatggctgctgctagacagattaccggacaaaagagagggaagaatagaagatggtcacaggcctcgtgccgaattcttgg

SEQ ID NO: 363896 - DNA, 347 bp, Homo Sapiens
ccaggcctgcagtttcacatctgtgacgggatgggacagatgacaccgtggtattcgatgacagctcccaggtatttcaaggttggcccttactcattcagggggtatgtttgagtgccacggtgtgcccagactctgctaggcaccagagagacaagatacgagtgacgtggttctcctcccactgctgacggaggaattaacacaaaagcagacaacactctagaactggagagaggtccagattgcgacaggagccacaccagagtgtgcaggcttcatgaaggacagaagcgacttttgtgccgggacttaaaaagataaggaggccaggtgtggtggctcat

SEQ ID NO: 363897 - DNA, 609 bp, Homo Sapiens
ctgggcgaggtggctccaccctttcaccaaggccaacctcatcctgggccgacgcgacaacttgaggctctttggcaccacagggaactgtgctgcttgcagcaagctgatcccagccttcgagatggtgatgcgggcccgggacaacgtgtatcacctcgactgcttcgcctgccagctctgcaaccagagattttgtgtgggagacaaattcttcctgaagaacaacatgatcttgtgtcagatggactatgaggaagggcagctcaatggcaccttcgaatcccaagttcagtaacgcccggcgcctggcctccaggcccgtctgtccatctgcccgcctgcccacctgcctggccggccagccagccactctaccagtgcaggctggccagccgctctcctgccacattagaacttctccgtcctcgatgggagggatggcccttcctcctccaccaccgcccgtctgtgtgtgacccctcctggggccaggccgggcctgtacagtctgtcttctgtatataaatgggaacatttattttatgaaaaatgtaatgcgattttattactggcgtggattaaacttatgaatgtttccgggaggtt

SEQ ID NO: 363898 - DNA, 444 bp, Homo Sapiens
gcggccgcccgtagcctaattgcgcagagggctcgccttgcacctcctcttcccccgccgccctccctctcgcccagaaaggaggacggacccagctgcaggctccgagctggtttattctgcggccgaggattacatttatgcacgaacgggcttactggttccagattccccacttgggcacaggcataggaggcttgttttccaaattgctggttttaattgcacctgcctttcagattacctctgggaatctgtgggaggagccgagagggtggaaaatgtttcttagctttgcaaaaggaagaaaactttgtcacccagcgggagacctcagccacgagtaacccggggagacaccagaaccgggacgggctttgactgatttgcctacgagggttccgtaggaaagggcgcacgcgtgtgaaacaacaccgagcttga

SEQ ID NO: 363899 - DNA, 357 bp, Homo Sapiens
cggacccaggagcatccagggcaccttccatcctgcactcgctggtacctggtgtcgtggggtcatctcggggcagcatcctggtgctgggcggtctcggctctgagcagccatggtgggcgggccccgtgcggcctcctgggaagtggcctgcaagcacctgctggcctctggaggtcacagggtagctgccctggccgtccctctggtgcagatgtcctcggtggccccggtccggtcgtgtcacctggcccaggtggctggctccttggcccggttcttcccggccacctccctgaggcaccacctccttgagatcccagcacagaaataaaagccacactatttttatccctc

SEQ ID NO: 363900 - DNA, 593 bp, Homo Sapiens
tggtcttcgctgccagcaatctaagtggaaaggaaagattaggagattccaaacggagcagccagattccaccagggaggggggaaaaaagccctctccaagaggggtagaaaaagtgaacttcaagaatttttgagaaaaactgatttgcattggaggggaaactacaaatgctgactgcttcaatcatgcacaattgtggaaagaaagcaagatctgcagtgcaaattaatatattaaaagtcaagagaagtctactaggaaacaaatcattaacctgtattaatcctagtatatcccaaatgtttttagccctcaatttccctttttataatacatactgaacactctttgttacactgttgcaacgcattttctaaattccaaaagtaaaattattatttttgttgttgttgttgatttctcttctgttttttgatatttctattagccagatcacaaatctgtatgctggaatatcatatctggagagaaattctggtttgtgctgtaatagaaatttctaatctccattttgaacttctgtgatggaagaaagatctatcactaagcaataaacatgttttcatttt

SEQ ID NO: 363901 - DNA, 706 bp, Homo Sapiens
  misc_feature (299)..(317): n is a, c, g, or t
  misc_feature (518)..(563): n is a, c, g, or t
ggtaatgactatagagttttcttcacatttcacagattgaaaccctttactttgagaatatggctaaacctgtccaaagatactgcccagagctattgatttgctctctccaaaaggacattcttgtcattaaatcatattttcctaaagatgggatgtagcaaacctcattgactgcagcctagtgcatagccagctccttgagcacaggaagggactctcttccacactggacacaggtggctccctcacttgtttccagaggtcctctttagagctagcacctgtctcccacaagnnnnnnnnnnnnnnnnnnnaaggaaattgaaggagaacagcacagaatgggatgcagctggggaaaacaatcttggcaatcctgcacagaccctatcagactgcagacagccatccacctattactgtgcctactacagatcctggccacagacctggatgcaaacctcaactccaaaaactagtctatggagttaaaagtcaggatagttcttactgtnnnnnnnnnnnnnnnnnnnnnnnnnnnnnnnnnnnnnnnnnnnnnntcagaatggtaagattctgtttcttgatctgggtggtagttactgggtgtgttctctttgtgatactctctcgagatgtacacttaggatttgcaatcttttctgtaaaatatttcaataaaagacatttattttttaaaaaa

SEQ ID NO: 363902 - DNA, 414 bp, Homo Sapiens
ctccatcttcttgatggaaatctgtcctcaccaaaagaagaagaaaactttgcatctgaggttgcgactgagcaaacagaacattaacttagggaaatttctccgtccgtgcattaactgaaggaaactgccgtgttgctctctgcactatttagagagaatgtgagttaggaactgttggaagagacatgaatagatatgaaatttttgtcatgacaaaactaatgctgtgttaataagaaacagatgaaggacccatctgtttcattcctttctcttcttaagaggatatagccgaattatggttaagtaaccctgaggacagttacatgatagcctttctcatgtcaaatgtgtggaaagagagtgtgaggtcgaagtttcaggtattgtaaataaatatcttgtgacctg

SEQ ID NO: 363903 - DNA, 699 bp, Homo Sapiens
  misc_feature (133)..(224): n is a, c, g, or t
taagtcaaaatatttcagaagtgaaattcagtggttcagaacaaaggaaagtgtcactattagaacattattggagctacttgaggtaaactgataccacggaaacaccactagccagaggcaggaaatttgnnnnnnnnnnnnnnnnnnnnnnnnnnnnnnnnnnnnnnnnnnnnnnnnnnnnnnnnnnnnnnnnnnnnnnnnnnnnnnnnnnnnnnnnnnnnccttttcaggcccctagctccgtgattaaagttagagcccctgtcttagcacctttccaagtctcactagaaaggttcaaggtcttgcatcctcacttacaagcccttctcgccacctttctccttctagcaccactgagccaacctagcaaggaactgtgcccttagctttctccccgagccacattcttaagactagtgaaggtcattgtgagatccagcatctgtctatcttcatttcagatgaatggctgagaagacagtgggtggaggaggctggaacagcagcacagttggcctccgtccacagctgtagcctgatctccttctgggattcctatacgcagcggaccctgtctccaaatatcgtggtcctctgctcccaaaatgctgttatgcagtattcacctggttcttatacagacttcagtgtaaattttaacaataatagctatgatagcatgttatttaagcc

SEQ ID NO: 363904 - DNA, 544 bp, Homo Sapiens
  misc_feature (325)..(325): n is a, c, g, or t
tgccccggtctgcgccctcaaccccgcgcttccgctatattccggaggaatctgaaatcagattcagatgtgaagcgcggtttcggatcctctttcgcttctctatctcgagaaacttgaaactgcgtcctctaggattgcatcaaactgcatcttgagcgtggaggaggactgctgagccccacgggttcgccgggctggagaggtcttgcgcaacctgagggttggggagagaggggtgttagcggagggaatgggccctgacggccctagaagcttccccgagcgcctcccacctccagcggacttgctgttaaaaacgcanattaatgcgtcctgtgagtcagaataaggatgactacttatggaagaggaaggagtgactggggtggggcgcgtggagagacttctgctgtggctggcaaagttctttttcttggtctcggaggcagttcactttgtagtaattagttaagccgtacatcagaaccattggattctgtatccgggttttatttttacaataaaaatacgtttaaaataa

SEQ ID NO: 363905 - DNA, 310 bp, Homo Sapiens
  misc_feature (122)..(186): n is a, c, g, or t
cttttcctcagaggagcaggcaacagtgtgggataaacagagtcacgatcagaggaaccccagggtctggtgatggcagggatggggggagagagagaaaatccacaaattccaatgtcacnnnnnnnnnnnnnnnnnnnnnnnnnnnnnnnnnnnnnnnnnnnnnnnnnnnnnnnnnnnnnnnnnggcaaccaaccacattagaagtcttggcactttgtaacggaacgggtactacactttatcttaattcttaatttaaaaacatgtttacaagttacaaccaacttctatgaaaagttgaaaagac

SEQ ID NO: 363906 - DNA, 779 bp, Homo Sapiens
ccagcgctcgccgcatcaggtgcagccccgtctcccggactttcttcacatcctctgcctttgctgcttagaaaagacagtggctcatcagtgagaggccatgatggcacagagctacactcaacaaatcacaggctgagatcagtctgagccacatgctgggtctcacatgaaggcaagagccacccaggatgtagctggacttcctttttctggttaataatagctgtattgagatataattcacataccatatgattcacccatttaaggtgtttaattcagtggtttttagtatattcagaattgtataactgtcactgcaatcaattttagaatatttcatccttcccaaaagcaaatccataccatcagcatttctcattcccctcttctcctcaacacacccaagccctaggcaaccactcatctactttctgtctctagagatttgcctgttctggaaactgcacttacttttgctgtttcctggaggcgttctgctgctgcctgttctgctgcagccatttcctgtcttcccaccggccttgcactcacagtgtccaccacctgtctgcaaggggcttcccacttcatctggaatcagaaattatagaagagacacttatttagccctttatggcagatctttaaaggaaaaataatacttaatggtgcctattagaaacaagaatttcacaaactcttgtcctatttaattgtgtaaaatgaggactgaaatacaccagttggctcaataaatatttggtttgaggatg

SEQ ID NO: 363907 - DNA, 766 bp, Homo Sapiens
gggctaggtacgaggctgggtggtagcgtggtgttggaaagacagcgggtgatcatagatgagttaataaagaaactggacatgaatctgaatgaggacatcagttccctgtccactgaagagcttcgtcagcgtgtagatgcagcagtggctcagatcgtcaacccagcccgagtcaaagaacagttggttgagcaactgaaaactcagatccgagaccttgagatgtttatcaacttcatccaagatgaagtgggaagccccttgcagacaggtggtggacactgtgagtgcaaggccggtgggaagacaggaaatggctgcagcagaacaggcagcagcagaacgcctccaggaaacagcaaaacaaaggcagaggatgtgaagaaagtccgggagacggggctgcacctgatgcggcgagcgctggccgtgctccagatctttgctgttagccagtttggttgtgccacaggccagatccctccaaccctgtggcagagggtccaggctgacagagactactctcccttgctgaagaggctggaggtgtcagtggacagagtgaagcagctagccttgaggcagcagccacatgaccatgtcatcacctctgccaacctccaggacctctctcctgggaggcaaaggatgagctgactatggcttgtgcggaaggagctaacggtggctgtgagggactgctggccctggcttgtttgcctctcccgggattggcctgtttggccctttggtggttgtgccg

SEQ ID NO: 363908 - DNA, 807 bp, Homo Sapiens
ggttcaagttaatttttaaatgcatcactaacgtgtaaatagtgactgtttgttccagcaattttttggtggtgaagtaaccatcaagtgattcaggttcctcttggaaccctccaagaaaaacttcagggtcctagtgtaatacatctgtccccatctctcactggcgtatatatttaactggactcactctcccaccctcagctaatgctacaatcctggagtcacctcttgactcatctttcccattgccaccacaatccattctaatatgtcagaaaatctgtcagttttaatctacgaaatctcttaaaatatttccgtctaaccattccttgttttccttctatttctatagccacccttctggttcacaaaccttttacttcttgcctcaactagtgtaatagcttcctaacccatttctctctatttcagacagatggcaaggttattttccttaaaaagactcttattatgttgttccttagctcaaaatccttcaatggctgaactttcactgcctgaaagataaatcccaagattttagccatgcattcaagagcagctataaccataatgactccagccttcacacttccagcttcaccttccaaaccacctccatattccagcaaattagcctacttactgggtcctagtcacatcttaccacttcctaccctcccagttttatttataccaagcctcctcctgaaatttctcttcctttctttctacctacccaagacataccacgtgcttcaataaccagtcccttcctcctacaaacactactctggaaag

SEQ ID NO: 363909 - DNA, 450 bp, Homo Sapiens
cctttggaaatccagggctttttaccctttggatcccagcttcagagagctgggctattttccatcaacttctctttgcttcaactctttagtagcaatctcttgtcttagagcccggtgttggctgacaccagagggggccccagcccagacgcacctggggttcaggctcctgactcgggacatctctcctccctcctcccaccccagccatgccaagactcacactcaccgtgcacctgtctggcttcaaaatctctctgatcctcccagcctcgttgagtcctctcaggtgaaagtcatgagccgatctgtctcttgtcagcatcacagtgtagccagccagaaaaagaaataggactttggggtcattttcccactttttgtagaaagtaaacagctcagagaactgaaagctatgggagaggtagagatttagtcaaaaagaag

SEQ ID NO: 363910 - DNA, 570 bp, Homo Sapiens
cgagcttttcggtgtgcactgtgacaaccacaaacacacttttgaacgtagtggggcttggctgctgcgagttacgcaggtatcctggagaggcagggcacccggggacacggatgactcgaggccgacttcgggtggctctctctgctccttcctgtgggggtgaagacgcccgggtcctcgccggcccgtgcgcaggggagcgggaccgaggagcgctctcgctccgtcctgcggcgtcccgcgcccaggtgcacatcggggagctggggacgcaggcgactcaggcagtttctgggagtcgttcttacgtcatcatgtcacgggcagaacagggcagagcgcccgcctttctcgcaaaaccctcctgtcccttgtgtacttacactgttacaagtaaagacttccccaagtgaccaaattttagagcattacagtaaaattggtacttgcagatgcctcagcttgattccttaattgatacgtatctagccacaactttaaactaccgagggacgatgtaagactgctgtgtcgcttttctttccttcaaataaacttttactcggt

SEQ ID NO: 363911 - DNA, 583 bp, Homo Sapiens
agagaccctaggtactgccttctaactcctgcatcctcagaaggggaaaagggactgggaagtaaagggaaaccatatggccccagggaatggacccttggagactcccatcctctcttccccctcaccaagtgcccaggagacccctggctcagaccagcccaaggccttgcccagtggcaggggaaaggggcacctcactccacctcaaagtcatttgactgcccccatccaccccaccaccctaatcttccaccacctctccggctgcccctgccctccatcacagacagcagagccgggcagctttcttatgccattttctacactgtgcttcatgagtaggactttcttgcactagttcctatgactgagtctccaaactggtttcctagtagtcccccatcccttcctcccttacccagctatgattcagttgtctctgccctccctcttaccctgcctctgtgtttcggtgagagtctctgtatatgtactgctttctgttttgttgcattgtggggcagaggcctctctgctcttgtttaaccccataaagaaataaatggtaagacttgatgat

SEQ ID NO: 363912 - DNA, 546 bp, Homo Sapiens
gaaaacttctcaggactttttcgtagtaaggctgtcataatactgcctgatgtattttatgtaatgaattgcagactgcagaaagcggggacttagctgagaaaattaatcgtgcactcattcagcaaaggtttcagggcctgctgtgtggagacacggttccaagcactgctgcagtagcagggaggaaacagaacggacctcaaacgctgtcccagcaaggactccagtctctgccttgtggatgtgtaactggcacgtgatgtaccagaaactcctgtgtgtggttgtatccggtgcgtgacacagtactctctccagctgctccttggatttgggaagcagccgaagatttacgggccatggaggctccttctatccctggaaatcggcccttgggaattaagctgagttatgtggttaaagccgtcatgacagccatcccctggctgggccagttctgggaataactataatgcttatactacaggatggccaattcagaacttcttactagtgctgaattcaataaaggtttaataacac

SEQ ID NO: 363913 - DNA, 550 bp, Homo Sapiens
cgcgcgtgtgcgtgtgtgtatttattcaacagaaagaccttaagtattcaagaatttgctaggttcctgggagagaggtggagtctcctagtcaatacacgggcctgggaaccaggaactcttgagtcgtaacctcagcttgagcagtagccctcccaccttgtatgactttaggtaaagcatttaacttctcttccatctaccaaataggagttactgatgctgtccaggttaccaagtgactgctagtgactgctctccatgtgagaagtttgcagagtccagagcacacatctgatgggaggggcgaggctttctacagctgcttgacctttgcttggcttcactaattgggagtttcacgcagagttctcattggctgatggaaaacaaattctatgcaatttctgattgtaaacttagaaaattcagagagaaacagccgctaccaaccacctccacctccaccaccgctgccaccaccttgaatggaattgtcctcacttttgttgctgttgcaaatgtactaaaataaagacatctttggaag

SEQ ID NO: 363914 - DNA, 671 bp, Homo Sapiens
  misc_feature (339)..(394): n is a, c, g, or t
taaaatgccggagcaggcccggcctggcatgggtgtggacctgcagccaggcaggctcgagcgggcgataccaaagtctgcccccccaccattgtggccatgcagtcctgtcactgtctttttgcttccttccgaggggggtcccccagcctcttccagggtcttcccctggaagtgggcggctgcagggaaggtgggggacaggggtctttgcacgattcagaccccggggccgtggcaggagcggtcacctcacaggtggtgacactgaggcaggggcctcggggtgccccctcccgcccggcaaccagaatggttggaggcaagacagagagaatnnnnnnnnnnnnnnnnnnnnnnnnnnnnnnnnnnnnnnnnnnnnnnnnnnnnnnnntcctattttttgagaaagaaagatatttatatttggcaggttgtattttaaaaagttatttaagttgaagcagccttcctggaggctggcgggggcgggcgtggcggcggtgcgctggcagcaggacggcgacaggggccgtggaggcatgggggttgccccaaggcacgctaacaaccctcagaagtcacagcacatagcatcgcaattaagactacatagcatacaaccgggcgggcggcgtagcggcgcccgggccccacggggcgagaaaggg

SEQ ID NO: 363915 - DNA, 763 bp, Homo Sapiens
tactgaaagctgatgtgttaggacacgtgttcattaggaaggtctgtgctaatggtctcctttccccctgaatgtattagttctgaatgtcacgccgaagtccccgtatacattcaagattcccgaaatccactctccgctggagagcaagtgcgtgcaggcataccatgcccactttgtctccatgctgagcgaggccatgtgctttctggcccccgataactctctgctcctggcccgctatttgtacctccgagggctcgtttatctgatgcagggacagctgctgaacgccctcttggacttccagaatctgtataaaacagacatacggatctttcccactgatttggtgaagaggacggtggaatccatgtctgcccctgagtgcgagggggctgagcaggcgccggagctgatgaggctcatcagcgagatcctggacaagccgcaccgaggcctcgaaactggacgaccacgggaaagaagttcaagctgcccaaaaagccacatgcagcctggggcgacttcatgaagcgggttccagggatccgggcatcgtgcacggacgcccaccatccatacacccggttggctccaaggccttttactgtcgtgctcgcgaaaaacgttttgcggccccgccatcttttgaaaacacttccacacccgccgggtaagcgccactcccaatttcacaggctcccggggtcaagctctcaccgccgggttggggaaggggacacccctctacctacagaga

SEQ ID NO: 363916 - DNA, 615 bp, Homo Sapiens
  misc_feature (431)..(470): n is a, c, g, or t
gccgtggagaggacaggttggctgtctcctttgcctgtaggtggtctggggccccagcagtgggagacctgtaacttcaggcaccactggaagaacttaagcccagagaaggaaacggctcttccactccccagcgcccctccccagatggtgcatcagaacctggagggttgcaggacaatctcaagagcagcaggcagacatctgaaccgtgaagatgttacctgtttgtgaaaaagagggtcacagagtatgtgtgaaccaatacttcatttgagacagcctcacatggagaatgcaatgagccattctcttctcacatacagttgaatatgacatttactgcagtttgatcactaagcataagacctttctttaaaaaaaattattgtttcactccagcctggaccacagagctagactccgtctcnnnnnnnnnnnnnnnnnnnnnnnnnnnnnnnnnnnnnnnnaaaagaatcctcatcattaatgcaagtggaaggaaactcttcaccaaagaattgatcacatcatgaaaggtgaaatcattacggaattgcttaaatatataatttgaatctggatttaaaaataataaatgtaagttttttcttt

SEQ ID NO: 363917 - DNA, 340 bp, Homo Sapiens
acaaaagcagcaggtggggtagccggggagcaggggctcccttaccacccaggtgccaagggggaatcctggaagtgtcccgaagccttctttaatgaaaatctaggggactggaggctggttttactttccctttacttttggggggcgaggttgcaactgtgatgctttgtgggcaaacctaacttacggataggccgggggtctcaattctccctccaggggattgcctctggggctcccggctgccctgcgggattccccgaaggagccgcgccggggccagggaggggcgcgatttcctctcccaactcgccccctctccgcccaccctgcggcc

SEQ ID NO: 363918 - DNA, 298 bp, Homo Sapiens
gcatgagacagcccttgaaaatgaagaatgaggcatcgcaaaatgtcagcattgctgaggctgaaaagctcggctccacttatgccaccattttctcaagcctcaatcaagcgtccattctgttttttctccgtcctccactcccttgaatgctcattttctcacctggtttcagttacaaactggttttgatcattctgcaatctacagttccatcatcctgaataataatatctccagtggtggatagaaaaatctctcctggcatgttctcccaatattggaaatggtgaagacc

SEQ ID NO: 363919 - DNA, 690 bp, Homo Sapiens
  misc_feature (250)..(250): n is a, c, g, or t
atcaccatcaagctggtcccagctaccaccacctctcacctggaccatttcagcatccttctaactggtctcccggcctcagctcctgcaccttgtgctggccatctgcctgtttgccctcagattcattcccttcttccccagtgctatactgccttcctgggaactgtatttcccaggctcctttgtcaactgactttgggtatgttcagccaatgaaagttaccagcagaagactggcagatggganggagggaagaagccaggatttatttccctctgaagctcagccaggggctcccttcaggtggccccctctgtggttctggctcctgcagggtgatcctagcctcttggcatcagagcaccattcacttcctttatctctccagtcttaagagtagtagtgacttccggctgttgctcatctttggattgcctcatcatcccccatttggtcattcaattctttccctgtatcaaatttcccttgtctgaaatacctagggtaatttctgttttgctgactggttgttaactgacgtatactctatagtccactctctacacaggggctgaagtggatcccgctaaaaacaaagcagatgggggcatgacccagctctcatccctccaagagcttcccatcatcagaatagatgagaatagaatctcagctcctctggaact

SEQ ID NO: 363920 - DNA, 477 bp, Homo Sapiens
ccacccggcaaagcactggcagggctcgaagtgggaaggcaaggtcagactggattgagagttgcaactgtgattgaaggcggtctttcaaagcaggctcttggtgagggttgggtaagaatcgcgatattgcagcgcagagttggtggaaacagcaagcaagggtttcgaggacttcaaagactcctaggggcaaacttctactgcttcctactgaagagtggatgggccttcagggaagttcctggcaggaacagtcctcccatttgtctgggcggatggtccggaagagcaaagacatgctaatgagacagaggaatagcaagtccccttcaagccgacaggaaggggcctcagttctcagcgccagcctgagtgtgggggctgcttggctcggcctgtttccacgctagggacgttctacgtgttttcttcttcatggctttttgttttctaataaaagatgtttctattcat

SEQ ID NO: 363921 - DNA, 520 bp, Homo Sapiens
ccggattcgggcgagaggcgcggacgcgctcgggcagggcgggggaaactagggccggcgactgcggcgtcacggcagcccaggtcgtctcgactctgcaatgcgacgctgggtcttcgcctgcctgccgagccccgcggcctccgacggcctttggcagccctcatttatttcccgtggcgcagccttgcccctcccacgctttcaagggcgagattgggactaggatgaaagaattctctggcctggtgtcttttgagaatccatgtgcttagttttgcaatcagggttctgattgcagaatatttgggaagagcgaaatgtacaagaacgagaccttgtacttctgtataatgagatactttatttaccttacttttaaaaactgcaaattgtgacaaagtctctaatttttaacaatgatgttatgtttagacattaagaggaaaccagttgctggttcttgtagtataaggtactgcagtgagtaaattgggagaaaaagaaatttacttagttt

SEQ ID NO: 363922 - DNA, 364 bp, Homo Sapiens
aagaggcagaagctgatcagagaggaggttgggggaatttggccgtatgctcagaggcattggtagctaagtgactttttcccagacaggctggtctcctgtaagagagagagagaactgacagattatgcgagagaatgcggctccgccaccatcaaggtcagaagcctgcccctactctcattatgtgttgctagccaacacactccttcagtttgtttccagctgatcatctttctgtcttctgcattcccagttcgtaatctgcactctcttctctctccacgggccccagagcagatgggtcacttcttttggtttcaaatacaatttagtggccatcttccctcccatctttttcatt

SEQ ID NO: 363923 - DNA, 371 bp, Homo Sapiens
tgttcagcgtcagaatcatcagctggctgagcctacgtgaatttttctccactcaatctcatcatccttcagacaggcggagagagcgggatccatctatgagatttctctgctgagaaatctcctcccctccctccaatgaagcaacagaggtcatatctgaatgcagaagcatggccttgtgctgggaaaacacatcctggctgtagagctctcaggcttctagagtcaaagccaagggttcaaatcctctctgtcttactcagaagccacatggtcctgagacagtgaagtaactctgtgaacctcagtttaccaatctgtaagatggggatcataatgtaaaagatggcattaaaacttacattggg

SEQ ID NO: 363924 - DNA, 620 bp, Homo Sapiens
cctcctgcgagctttggcttctgcggcagccagcacggccaagaactgcatggggagggccctctgattcacacatgggacagctttggtcctggagcaagcggacctcgtggctttttgtcatcctttcacgttcacttgctgcagcgtggctctgcttcagctgtgacagagatcacacctgtgtgttggacccaggctggttttgaactcctgacctcaggtgattgggcaagggcttttcaatacaaggggacaagcactgagaggctcctcatgtcgcatgtctgtctcactatttctctggaatgtgcactgtggacctgggatggaattctgaccagcctctggggaggccgcgcagctggggcctagcgagtcttcagagttgcactgggggcaggggacattccttttgtccccgaggcaggtggagggaagcttcatgtagctcacgaggaagagacctcctccccacgctgccgggctggcctctcgagcatccaggctgcgcagcctcctattgtgatgtagcgccagttgcttcgagctggcggctttatcatatgtgggttttgattgacatactgttgttcatgctgaagtttgagtgtcgttat

SEQ ID NO: 363925 - DNA, 934 bp, Homo Sapiens
  misc_feature (18)..(18): n is a, c, g, or t
cagagagcactccagggnatgcctgatggtcagaataaatttatggaacaaagaagggaaatgactacagaactcggaagtgaggtacagaaacagctggattggttacaggaaaaacaacgtaggagagtgacacagcagggatctcgctgataaaggacctgcatctgaatccagctcctccatccatgggccatgtgtcctggttgctgagacatctggagagccttgtacctcatcaaaagaagagagacagtaatccttgcctttctttcctcctaaggttgttaacgaggcttaaatgagagaacaaggatgaaagtattttgtaaactctaatgccctgtgtataaagcagagaataatagcatctgtggtgttagaaaatgcctggaactttgtaaagatgttgtttgattcaacattactggagtaaaccacaccattagacagaatgaaagactccaccgcagagagagagactgatttttataacaactgaatttattatagcataaactaaatacaaagctctgaataaataatcgtttttttcagtcatcacatctgcaggtgtgtatgtgaacatttccataagcacataaggatacagatgtcacagacatatttagtgagggaagcccagagtcacggttctctgtgggtaagagctagatgccttgagatgaacatacagggcaccgtctcaaatgatttggactatgtgactgtgttcgtttctccttcagactctgctcaagaaagtgtattgataacaggttgctccgccctcaagtttagggcactctcccacgctctttcatgcaaagttttttaacacctctctttaagaaaattcacaaatcagaagtattaccccagcttcaatctgacaatcaggacccctactctgcccctctttcctaggatctta

SEQ ID NO: 363926 - DNA, 612 bp, Homo Sapiens
cgacggtggcggctctcggagccggcgcgaatccggcccccgcagcgggacccgggcaggtcttgacgagccctgcccgggccgacgcatgcggaggatggaaacacttgcccggcaatgtctctgggccgcctccttcgcagggcctcctccaaagcctcggacctcctgaccctcacccccggtggcagcggcagcgggtccccctctgtcctggatggagagatcatctactccaagaacaatgtctgcgtgcacccgccggaggggctgcaggggctgggggagcaccacccaggtgagccagggcaggcgaggctccagggtcgcacagcccaggttattttccgagccagggctctaaaggccctgggccacagcacgtgagagtgcatttggttcctcttccagaacgtgtaacaacagcagctgtcctcccggaaggagggtctggggggtgttaagtctggctcatggcaggctgggtgagtccctcagccctgctgcttccaaagggagggacaaaagatgggttagtgatccctcaggcctgcctggccccttgtcattcgtgtcaatgacttgcaacaaataaatgcattgctttgttca

SEQ ID NO: 363927 - DNA, 736 bp, Homo Sapiens
ttttttttcccctcaagcatctgagttaatccagaactatagtggggtcctagaaactagccataacattaaaaaaagtaatttaagattcggtagagagctggtaaaattatgtgaaacagaatgaaccaaaattaccacatgacactggaaatcaaaggaggggacattctgcagtatttctagctactaagcgatggcaacttaacactcgctgtatggttctcttcagtttgcagcctgtgttttatttttgtgaacctggtaaccaatgctgatgaatgcccatccgaaaaccacttccaacttcttcttccttgtccacctcctaccagaggagcggaaaaagctaaaaattccattttgcaaccagtctgtgtgacccaatcctgttctaagagacacgcgggggttcctgtggcagggaagattctggaaaagaattttctccctgatttaaaggagagagacacatgagaagggccctttcgcacctccctcccttcttgatagcaccctcctctgggtgctatcgtgaggatgtgatgcctggagcggtggtagcccccttgagatcagataaacccccagcctgaagctgaaagctgacacgtataggaaggtaagaaaggaaagaccaaaggagctccaatccttgtaggcactgttgagctgccaatccaaccctgaggatcacccattttagatttaagaaacagaagttcttaggtgtaag

SEQ ID NO: 363928 - DNA, 859 bp, Homo Sapiens
  misc_feature (123)..(131): n is a, c, g, or t
gcactgctgaagctgcaactgcagcttcaggctatagtactatcataatcactaagaaaacagcatttctatggctagaggctccactggtcgaattatggttgtcactcttgcccaaacccnnnnnnnnncaccagcaggggccccaggcagtttgaaaatccttctgttgttactgttactagtttaaccactcttcagttattaatttagcaagaatttattgagcacctattggtgaaaggtaccaccttggctctggagacaccacagtgtggaaaaacacactctgtgggcagagagtctgccgtctgctaaatgaggaccagtatcttttccttgggccatgagggtccctctccccggatcgtggttccaatcacagcctgagggccaggaggctgggacctggtttgggccagaacttcttcataaggattaagccctctctcccctttacctccagaggttggaaacatcttcccctgtagcaaggcagtcaccttaaagctgcctctacttcccgttactcctgctacttctccgacccttctcactaccctctagttgttttaactcagtcatggggatccttgacacatccagacagagagagagagaaggcctaaatttccacaagcagtagcgacttcccaggtacataaagtcccatccttcaaggaagaggatgtgtggttccaacctgaatacaggttcctaacttggtaagttgaaaacagcatgctgcactctggctacctccttaaaacaataaccatatcctttgtggaattattatagaagtaatttaacatggaaggaaaatcattgcattaaaaagataaaacatttaaatatt

SEQ ID NO: 363929 - DNA, 717 bp, Homo Sapiens
  misc_feature (420)..(497): n is a, c, g, or t
  misc_feature (518)..(532): n is a, c, g, or t
atctgccaccgcactcggcttatccctagaaatcctatgatagcatgatgtataggcacctaaaggcatggcacttgagaaatgtgaataagattgtaagttacaaatagcaaggtacagtcagatgttaacagtctcagcccctaaatgtcaccttgtattacagcatgttatataagcacatacaggcacatacatgaaatagtgatacttcattctcagtaatatttttcatccttctcactggaaagatctttgatgatttttaatcaacataggagtttcaatgatatctagaagtttaaaagggctcgttcaaacaaattatgaccatacactctgaagagtatgtgtctgtctcttgtggtgtaaatttttattttattacacccaattatgttcccacaaaacctttataannnnnnnnnnnnnnnnnnnnnnnnnnnnnnnnnnnnnnnnnnnnnnnnnnnnnnnnnnnnnnnnnnnnnnnnnnnnnnaaagagcaaggccctgcctcnnnnnnnnnnnnnnncttttttcttcataaactacagtttatataggcaaaactttcagtactaagcaattttagtctctgcaggctcttgtcttgaattaatacaacttttgttaattctcttatgaagttaaatcttcctgcttgtatgcaacccatatgttgaaatttttttgtacaaaagattcatacatctttaa

SEQ ID NO: 363930 - DNA, 430 bp, Homo Sapiens
ccgcccgcgacctctgcgagtctggagcgcagaggacagggtctggctgctctttggccttggatggaaagtggggaattgggtggggggctgcggaccccttaacgtggattacttggtgtgtatcagctgggctcagaagacccacgacctcttctccatccgtggattgatttgttctgcttaacagctgggtcgccaagctggaggtggaatcagaggtttctggctgactcggtgggtgctttgaaccaggaaaggacaagaaagaggatgggaaggactgatccacattcccaccaggaagtttagcagaacccccgcgtgccacctggaccccttggaaggacctggctcaggctggaccacctcttgagaggcaggagctctggatttgatcaagaattctttgctgagcatggtgcctcat

SEQ ID NO: 363931 - DNA, 498 bp, Homo Sapiens
tattagacatccaatagatacttgtaatatacgagcatctgctctgtggaagatgtttttttccaggcccagaagtgtaagatccggtgcctatcttcaggcgggtggcaaacaaacatcacataaaggagagtgtctggcttgtgtcttctgggttcgtgatccccctgacttcagtgtgagaatgtggccagagcgtctagggaagacagggagagttgtcagagaggagttttgaggaggccctgaaggctcgccggctgttaaggcctgagctgtagtgggcaagaagagatggccagttcaggtagaggaagcctgctttgagctgaagaccggagtgagatctggacagggcttcccaggaccagtatttttccctctccaccctggtcttctcctgtaacgtgtggccgccttttccagcacggcctcctgccttcctggtgcactttttggagaacgtggtggaatcagaggtttctggctgactcggtg

SEQ ID NO: 363932 - DNA, 737 bp, Homo Sapiens
cgcatcttgaatgtgtttgttctgttgtgaaaatcaatgcttcttcagaatagctggtgttgggacttcagtaagagagctcgaggaagtttgcctaaagaagggcttctgggctgtcagtaagtcaggcagtcagtccacagctctttctaggtggaaactgagaggtgttacaaaggacctacatgaaaaacctaacaaccggttctctgtggagaagcctggactgcttagaaacatatgccccttaggggtgtactctcacctgctactactgcagtctaccagacctgctgctaccttttttggggtttcaagcaactttccatctaatagacaacctaacccagcttgaagatttttgcagaggatggtccataaaatgccaaatcaagctacatggaccatctcaggtttatttgaggactaagtagcttgcattccactcctgggctctgccccactctccactgcacccatagatttaccatggtagatttaacttcccggctgaggaaaacaccaatttcagagtagccccagaagccctgcctcctctccctcccaagtccctgtggccttgcagggagctgcctgtttggtttaatctggggagctggcacctctcccattccctactgtcaggcctgcactgttcagcattcttgtttttgcatctgtcattatcttttgtatgcaaagaggtttaatgtgcaataaatgtaaatggccagtaa

SEQ ID NO: 363933 - DNA, 254 bp, Homo Sapiens
  misc_feature (80)..(124): n is a, c, g, or t
cccaattagcttttgtcttcttagtccccagtggactgaaacccttactctttctttaccacaggagtcatgtgggtgannnnnnnnnnnnnnnnnnnnnnnnnnnnnnnnnnnnnnnnnnnnntcaaagagaaaactaggaagagaataatgaggattgattaatggtcaggggaatacaattcacacagaagaaagaaatggagactaaatggttattggcagcataggaatctgatagaggagaattgctt

SEQ ID NO: 363934 - DNA, 452 bp, Homo Sapiens
cggtgcctctcccttcaaaagcaagggacctttatgcatgattccacacctgcattccgataggaaagggaaacagcagaaacacaatacccatctgagagctacgcttagagaggactctgggcttttatttatttttttacttcagtcttgtgaccagtaattttaagggaaagccaataataatgtttttaaaaagcctcacgccacccctggcggcatctcctcggtgtactttgctgttcagatccgcctgccttctgggccagcctaacagcgcccggcctcagcccccattgtccctggagctggcgaggtgtccggttgcggagccggcggcgtctctggaaatgcatcctgcatccccgcatggataacagctgcagctatgtcagaattgcacaaaaaggggaaagggtcattgtgggccttttgacccatccattaagccc

SEQ ID NO: 363935 - DNA, 389 bp, Homo Sapiens
ctatttttggcctctgtgctcatgccatcccttctgcctggaatgcccttctccactgtctgcctggctaactcctgctcattctggaaggctcagctcctcctgaaagccctccctgaccccaaccccagctccttcctcagggtgtcgtagcacagggatgcttttggtctaattcaggagagcatcatgtgatatgcttttaaagtaatgagttaaaatgttagacaatatgaaactctattatgtgatatattagatttcatgtcattacattgtattatattatatttttaggtggtatgctatgtgacataggatgcgatgtgatattacatcccatgacactatgttacacagtgttggattaaatgcctgtgtctctggct

SEQ ID NO: 363936 - DNA, 464 bp, Homo Sapiens
gcggccgcctgcagggcctggtggagctggtaagcgcctctctcccgcagggagcacatggtcttgaggctccacgtgctgagcgcgtcgtcgatggacttggccagggattgcacctgctcggtgaaggagtcctccagctcggctctcggccgtgggtgaccgcaccttgcgcagggagatccgccgtggcaggcggctctccagaagcgagttgcggattttctcgaagttcttgctgagctggtattggcggaaggcggtttggatggtgcaagcggcgcgccgggacaccagttcatgtcagagatgcatacagaagtacttatgggtaaaatgcatgatatcttgaagttgtgttaaaatattctgtcaaaaaatgtggaagagttagatgacacaatattaatgttaataaatattaataaaatggttacagctggatgatagctacgggggagttt

SEQ ID NO: 363937 - DNA, 699 bp, Homo Sapiens
  misc_feature (519)..(615): n is a, c, g, or t
gcggccgcagggagccagggccacctcctcggcgtggggagtgagggcgcggaggcgcctgcacctggctgcggtgcccacggcgcccccccgcgaggctcctggtggagggttggtctgcagtcggcgcaggggagaggccttggtccgagccaggatccaccgcgctcctgccgctctcggggctggacagtcaatggggtccccgccgctgctgcagtcgctcggctgccacacgctgttagtcagatcccgcacgctgttggccccacagccagcccggggtcacttaggaccgcattcctcagtcatccagttgttagatcagtaagcatccgccagaaaagtccattccttcttactcgatttattctgcacccattacttctcagcagggtgatgattcctcctcccagcgctcgctctgtaaggcacgatgtacaaaaaatccctgtcgctgtgctcaaagatcaactcattgtattttctgtcctttatgccccttctcccgagagtctnnnnnnnnnnnnnnnnnnnnnnnnnnnnnnnnnnnnnnnnnnnnnnnnnnnnnnnnnnnnnnnnnnnnnnnnnnnnnnnnnnnnnnnnnnnnnnnnnacctctgcctcttctcactgaagtgtctgttttgggatgtgtctaccttgaatacccattcctggtgtaacacatcctcccctt

SEQ ID NO: 363938 - DNA, 639 bp, Homo Sapiens
cacccattaggtgctaagcattttcagtacttcagaaagtcctctctatgtccccatgagatagatgatattgtactattttcttcattgtatatttgagaaaaataagcctcagtaaagttaaatgacaacctcaagtgtacatagctggttgatgatgaagcctggtttctaattgaggtctgtcctgtctttggagtgagacataatattcctgcaaagaactaagcagccttacaaaggcccctgagaggttaacataaggtctgtacctagacactcctgtttctgcctgtaggccaggccttagttacggtgagttccagggcaggcaggtaggcaggagtgattatatgactgagaataaaggacagcagtgagagaagttgtattcaatgcagcacagtaaccagggacttgtaatagcttctttcacctcattcttttgtggcttggatttcctaggaacacggaagtggagctgcagatgcaaaccaggcagaaggccatgaatcgaatttcattgcccagttggcctcccagaagcacaccaggaaaaacacacaggtttctatcactcctcagctaaacttaggtgaaggcagcatgtagaaaaagatgttccaaacgtagtgcttt

SEQ ID NO: 363939 - DNA, 652 bp, Homo Sapiens
cctcaccatatacactataggtgactgacagaatttcttggtgggcaaatgccagagttcattatcaactaaacagtggtttcagatggcatccacacttacaaactgtgtgtcaacaggcattttccttaagagaaatgccttcttcttgagaagaatttggaattgtcaaagaaaaacaattgaaaatgttgcacagaaatcctgtgcctttccaggaatgtcttctagataccggggccattgtctcaaccactgtttaccatctggctttttaacgtcaacaagtgaagacctgtgcacacaggagacagcatggtctgaccctcatagtgttttctttttctctagatgcaggtggacccagccacactggcaaagcgtacgtattctgggatcatctctttgtttaggtgtgaaatcttagtgttgtaaaggtagtgctgcttcacctgcttttgctcaagggccactctggtttgagctttctgccagaaatgagatttgggaattttggtttaaaaactactaagagtcacttcacctggcccatactgccttgagagcccctggagcagagaagcagctaacctgtgcctggattcctgacccacagaaacaagaagacaataaatccatgttgtagtaaaaa

SEQ ID NO: 363940 - DNA, 1085 bp, Homo Sapiens
  misc_feature (45)..(45): n is a, c, g, or t
gcctgggtggcgaattcggcacgaggcccaagtctgcgggtgtgngccaccttcgtcatacaggaagagttcgaccgcttcactgggtactggtggtgccccacagcctcctgggaaggttcagagggcctcaagacgctgcgaatcctgtatgaggaagtcgatgagtccgaggtggaggtcattcacgtcccctctcctgcgctagaagaaaggaagacggactcgtatcggtaccccaggacaggcagcaagaatcccaagattgccttgaaactggctgagttccagactgacagccagggcaagatcgtctcgacccaggagaaggagctggtgcagcccttcagctcgctgttcccgaaggtggagtacatcgccagggccgggtggacccgggatggcaaatacgcctgggccatgttcctggaccggccccagcagtggctccagctcgtcctcctccccccggccctgttcatcccgagcacagagaatgaggagcagcggctagcctctgccagagctgtccccaggaatgtccagccgtatgtggtgtacgaggaggtcaccaacgtctggatcaatgttcatgacatcttctatcccttcccccaatcagagggagaggacgagctctgctttctccgcgccaatgaatgcaagaccggcttctgccatttgtacaaagtcaccgccgttttaaaatcccagggctacgattggagtgagcccttcagccccggggaaggtgagcagagcctgacgaatgctgtcgactcatcgcgttagtcacgtgtggttcaatatgctgtttgttcattggtcggccccccactcagccagcacaccctgcgggagaaggaacagggatcggcaggaagccagccttccccagtgactgcatgatctggcagggcttagagcacccaactgttggcttattcaggcagcagatttactgagcacctcccctgtgccaggcccttagcacaaccaggggttggccacctacggcccacaggtcaaatccggcccaccacctgtgttcataaataaagttttattggcactgagccacagcc

SEQ ID NO: 363941 - DNA, 414 bp, Homo Sapiens
tgagtcgtgaaggactgttagggagagggcgagccctacctttcgcttctggtcttcttactttaggcctgttgttcatactagaaagtttgagccagttttccttaatgttatgactcgtgggtggggagaaaggaatttttctttaacattttaggttcttgctaaagttggaatctcagttcgtgttttgtgcgcctttccagatttccaggtttcgtggtgtgcagtttagagttgcactaactcttcaaaaacacaaacgtgcgcgcactcctttccccaaccagctatattgagaaattacccgggctctggggctttctgaccccacctccatccttaggaaagcgttagataaaacttggcaacctcaccccattcaatttagaatagagagcttttagaggcaaa

SEQ ID NO: 363942 - DNA, 914 bp, Homo Sapiens
  misc_feature (90)..(187): n is a, c, g, or t
tggactcaaccagtcctcccacctcggcctcacaagtagctggaactataggcgcatctcaccatgcctggctaattttttaaaaaattnnnnnnnnnnnnnnnnnnnnnnnnnnnnnnnnnnnnnnnnnnnnnnnnnnnnnnnnnnnnnnnnnnnnnnnnnnnnnnnnnnnnnnnnnnnnnnnnnnggctcagccactgtgcttggcccctggattctttctgcctaaatgatgagcaagaaaaataagggtagcggggtacagcgatctccaaaatatatagaaactgatggtgatgacggacatttactaccttaaattatgtgctactataggtcaacatcaaaatattccctataaaataaatacaagaaacaaaatatttacacattttattgaaatgctttgtatttttccattttgacaggacagtttggaataaaataatacaattgattgtagaaggatacacaccaaactatatttagaggttttgtctggggaatgagattgaggaaacagggctttttacctttcaccttctacatttctgtatatgattacttttgttaaactgatcatacattacctttgtcattaggaaagattataagcaattcaacaactgaacaaacattgtatagccttactctatccctacaggagctgacctactgaagggtaaagaagagtctagctgagtggattgagggccgctgagagaacaatcttgttggttaaggttaaaagtatatacccagaatagacaaggagctagtcctactcagatggggattaagtttgctcacctatcaaggtgctccagtggatttctgtatttgttcctttaaaatcaggatactctgcctttgctcaggaagcaacatggcaatctggtctgcagtcagctgta

SEQ ID NO: 363943 - DNA, 870 bp, Homo Sapiens
  misc_feature (315)..(315): n is a, c, g, or t
  misc_feature (317)..(317): n is a, c, g, or t
ggaaggcagagtatcctgattttaaaggaacaaatacagaaatccactggagcacctttgataggttttcaaaaatacctggcaagaaatctggaaattctataattttgttgaaatattgaaaaaagatgacctgcatcctaacccttgaatgactcaaatcagtgccaggtggaggactcccatcaccttctctcagaacaaaatcacttcattttattgtcttagtttgtatattttctgtgacttgaaataaactttgaacacaatttttagtacactgcaaattgatacacatgacctttttgcttttananagcttaacactaagggtgaaaccttagatgtgttttctacccttactgcagtattgtactttaacatattgccatagttttgtttttaagttaaccacttattcttcttgatgatatttgagaatttctcagaagcaatgttttctggaacttggtttttgtttagtttgcttccagtaagaattattataaggctttgccctctgaaaatattctagcacttcggagtcttctaggagaaaatatcacatgcttagagctataaaatggtcagaaggctaacagagcaaagagcctagcacagctgtgtgtttagtttagaaaaatccaaatatcaaaatgcatttgtttcaatagcaggtctgaacatgtataattcagagttaagacaaaaattgttttagcactggtttgagtgtgtcagcaacacaagagactgttgacatttacttgtgtgttcttaaacttatcagtctaggcagtcaactttgaaagtttaaaaagccactgatttttcacatgctcaagatgaaataaaaacagaaatcaaatg

SEQ ID NO: 363944 - DNA, 468 bp, Homo Sapiens
  misc_feature (225)..(283): n is a, c, g, or t
  misc_feature (324)..(341): n is a, c, g, or t
ctttccaagccccctcccgtggccgtcccctcccaagacctctcacccatgtagcaatccctacatggctgcctgtcatgtccctactctctaagccctcctgcccactgttcctccctccccgacatgctgacaccaagtggtggaaaccacccctcagccccagcctgccctgtgcagagttcagctttgtgttgaatgagggggagagggacaagtgagggnnnnnnnnnnnnnnnnnnnnnnnnnnnnnnnnnnnnnnnnnnnnnnnnnnnnnnnnnnntaccgaacagatagacagaaaacgttgtacggaaaagttgnnnnnnnnnnnnnnnnnnccgggagaacccgcttacacagctctgtttgtaatttttttcttcatgctaaaatcacacggcctatttgttgatgtaagttgcctgaattccgtggtatgctatcttcttttttaaaaacaaaagc

SEQ ID NO: 363945 - DNA, 723 bp, Homo Sapiens
ctctcgagagatgtggcttggccactgttgcagagtcccaggcctgggccactcagttgcctcccccggcccagctgtctcctcgggaccctggcctgggagggtttgaagccaggcagggaaaagagggcagaaaatgtggtgccggggagctgggccgggccagcacatcattccgcaagttggagaactgcaggctgaggggcaccgtgggcctgggcccgggacccagcatggaaccccttctcctggagcaccaggggtcacaacagtccctccactccagggatcacgggtgacccacggccgggtgctttggggacgagacaaagacagcgtgttcctcaagcccctgcctgccgctccgtcactggggccatggtctgcgtgccaacaaccttttaggaagcatcttgtgcccaacctcaccaccccgcaaaaaaacctgtgtccaaaacacttggcagtggggcttaaaacgctcaggtgccccgaggaggcgccgggagatgagcccagagcggtggctggcgaaggccccagcaggacatggggcgtggaacttgcttgtttacctcggagccgcgactgaaacccagcccagcgtgtccgcgaagcccggaaacttccagctccgcgactgtgcagaaagttggggggcgcggccggggtgacagcagcgcttcggggcggccgcggcggccacccggacctcggcctccc

SEQ ID NO: 363946 - DNA, 621 bp, Homo Sapiens
  misc_feature (77)..(85): n is a, c, g, or t
ctgacgtagaaacagcaggtctaagcaaaaggtgcatgagcaagagcaagtaacatccctattattatgacgcagannnnnnnnnaagttgaaattcaatttttgggctgctactaaaaaggacatgtgcgaatatctattatttacgcttcaaactaaagtcagccgtttttctttttcaagatatgtggcatctggctcaaaatcaattgcaagaaaagcccaactctatttgacccagaaagagctctttccaataccctctcctcccacttacatcacagatggcgactgaagcttaaggtttaatgcccgaccctaaagccactcatcctaaaagacagggctccagatggatgctgtatggcagaggataaggcgctatgagaagctgccaagcctcagatgtgcagctgggctgaataccgacgccagcgcctagcgcccattactttgcacccacacttaggaaacaacccacgcctcaccgcgggacccggacccagccctccagcacccagcctccggctccgacgtccgcgcgtgacctccgggtaccggaggaccttgggacgaggaggtccctccgctttccggggaagttgtcaagggcaagttcgg

SEQ ID NO: 363947 - DNA, 772 bp, Homo Sapiens
  misc_feature (220)..(252): n is a, c, g, or t
  misc_feature (285)..(302): n is a, c, g, or t
  misc_feature (305)..(379): n is a, c, g, or t
  misc_feature (603)..(649): n is a, c, g, or t
  misc_feature (714)..(728): n is a, c, g, or t
tcttgtgttttttgagaggagatattccttaaccacgaaaaagactatcctgttaaaggagagaaaaactttcccccagtagatggtgactacggggtaatttggaggacgtccttctctcccccgtcacgcgcgccccccattgtttgcagacagagcgcgtgtaataccgaggctgagtcctccctgggagccctgggggacacacactctttgctcnnnnnnnnnnnnnnnnnnnnnnnnnnnnnnnnnagctctcgctctttccctcagtctgtgcctctnnnnnnnnnnnnnnnnnnacnnnnnnnnnnnnnnnnnnnnnnnnnnnnnnnnnnnnnnnnnnnnnnnnnnnnnnnnnnnnnnnnnnnnnnnnnnntgtgagctgtgctgccgccgccgctgccctttgatcccgacattagtgttaggggctcggagacacagagcgcggccatagacaccgccgcaccggcactcatttatttatacctcccatcacacacgcgagcataggacacacacacactcacacctattagatccgtttccattgaagaatattacgctcggggacaagccaggtgcacgaccaaaaatttnnnnnnnnnnnnnnnnnnnnnnnnnnnnnnnnnnnnnnnnnnnnnnncccctcttctggctccaggaaacaagcttcaacccattgcacacaccggagaaggggtttccccnnnnnnnnnnnnnnncctcgtgccgattcgccacccagcctcgtacctagcctaggttt

SEQ ID NO: 363948 - DNA, 517 bp, Homo Sapiens
gaaaggacagcataacacttgacccagcactcaataaagcagaggtgcagaaaacaccctgtaatgtttcccctgtgcatcccgggtggtaagaatatcccacagatgaatatggccagggatgttttctaggaaccgaggcccaacctgctgtgattttcctcccacgaccaccagagtaccgagcgcagatccaacccagcctgaccccctttgggcaccgcagctgccttcccattgatcggcactgtaatggtaaatagctctctgcaggcctcctcactgggacctttagtggctctctgcttgcttctgtctgagaaaacaggaaagaaaatgcaagctgacgtggattcctcacttcattttgaaagaaatggctttccctaggcaagacaggaaagggaatgaggtttgctgaaggaatccagagaaataaatgttcatactcataaaaaattgagcatatgtagtcatactggactgacctcaaattcagtagcttacattgctttag

SEQ ID NO: 363949 - DNA, 619 bp, Homo Sapiens
ctctccctacccaagatcttctatttttctactctagttattttgtctcaaaatagaaggaaaagcatttccgtggccagatgactttggacagaaagagcatttagttttccaaaatactttgaccaggatgaaggccacagatgcatgagcagctgtttatccgccagcctcacttggaatggttggtgctctggggtaacggtggcagagagagctaaacacaccttccttccttcacaattggctcagaggattcactttttaagtcaatattaatcacttcctaattaataattaaagatgacacttagggtctctctgtatttgttcactcagaaagtcattcactagaagctataaacgcacttcctaaatccggccatctagcaatcatatacaaatgctagagggcaaactatttaaccagagacaaatcagcagcggtgagaacaaagcctttcccttcggcaacttaagttggcacagcgatatatggcataatattgacagcaaacgcgtttccagcagagaaaaggaacaaaataataaaaagtggtaaagttcccccaagtaagacactcatatttagagcaaaccccttgatatttttttcatt

SEQ ID NO: 363950 - DNA, 646 bp, Homo Sapiens
  misc_feature (327)..(579): n is a, c, g, or t
agaaaacatattaaatgtttgcctttagatggtttctggtttaaagtacataaggacaatgaagcaggttacaaaaaaagcacttaacatttaccctgttcaatgttttacctgtctgagcataccttttctgttatgacaactctgtaaatggaagaaagaagtccttttcaactcaaagcagcaatttcagtggctgtttcaaacattgcctttcaattggagataaaatcaaagaaacgaaacctcaggctttttactgaggaccaacttgaattcattattcaatgattttctgtatcctttcaacatgtgtttgttaagcgnnnnnnnnnnnnnnnnnnnnnnnnnnnnnnnnnnnnnnnnnnnnnnnnnnnnnnnnnnnnnnnnnnnnnnnnnnnnnnnnnnnnnnnnnnnnnnnnnnnnnnnnnnnnnnnnnnnnnnnnnnnnnnnnnnnnnnnnnnnnnnnnnnnnnnnnnnnnnnnnnnnnnnnnnnnnnnnnnnnnnnnnnnnnnnnnnnnnnnnnnnnnnnnnnnnnnnnnnnnnnnnnnnnnnnnnnnnnnnnnnnnnnnnnnnnnngagtgagaccctgtctctgaaaaacaaaacaataaaaatgcatttattgaattcacacttcaaaaaa

SEQ ID NO: 363951 - DNA, 533 bp, Homo Sapiens
taggcaaccacaaatcaaccctttctctgggctatctaaaataatcaggtactagaccaaaaaatgacatgctgtctgccttaccttttagtgatgatttgtaggaagaggaaggtaggggctggtgagtggaaaagtagtagagtttgtgagggaatgttctgtatgtctgaagacaaagtctggagattggtgggccagaaggtgtgaatctactctgaaggacaggcaagagtccagcccagggaaaaaggtgcagatgggtaggatttgggtgggtacttgaattaaaaaaatgaatttgtgaggcaatattgctggagtcaaaaccaaaaaatcaaattgaccagggcaaaaaatagcctggggcctagcatggctctgctgccacgtaggatgactggacctctttccaggttcgtgttaacagtccatactacttatggtatacgtgaaatgctttctattcattcaagcaaccttactaaaaacaccccatgaaaataaaagtctatatcttcccttcaaaaaaa

SEQ ID NO: 363952 - DNA, 720 bp, Homo Sapiens
ttaacctaaaatttcttttaggttttaaatacctgataaaaatgaacagaccagagccatggaccagcctctctcttggagggcaggactctgttaattagtacctcgaacacagctgttcaaccatttgtgactccatttaattgtactagccccacaagcctctactttatcttcacagatttcacaggacgccttgtcaaatgccttactcttatccagtacatattttcttgttcaacaaaattagtattcctatcaaagaaagaaactgtattagttcaacatgacttgtacatactgcccctatgttggggagtagtaatcactgcttggtgagttgttaagaggctgggatttgatgtccgaaagacctggatttgaagcccaacaccaacagctgttaactgcatgaagtgggcaaaccatctgaaaataaggatgctcaaagcaccggtcccctagggttgttgtgtggagtcagcagatgtcaacaatcaccatcagatcagtgaccttatccctgacaacccattctagatctgtacaacactgacaagatcaatagcttgagatgaacagtgaaagggatctagcttctgttaccttataaaaattacaatgttttaaatctcatttgcaagttctcccattaagcaagggagtagtttactaggataaaaagacatttaatattaaaagtaactgagttgactaccg

SEQ ID NO: 363953 - DNA, 621 bp, Homo Sapiens
gtacgagccatggcgcccggccaagtccatcctctttaaccttggtgccagtggtactcaaaccatggcctgcaccaggaccacctggagtgctcgctaaaacccaggctcctgcccccaagttctgattcagtcggtgtggggtgggccttgagaatgtacatttctaagaaatgtctaggtgctgccgccagtccacacacggctctatgctctcttgcctcccgacagaaatatcaaacgcttagtgcacataatggtgcttaacatatgtcagcttccttttccttaacacttctatgattcagctggagacttttcaaaaggagctgaaggaattacacagcagcatggtgccaggctttcgctatctgagccggaatcaggacctgctgtgtggcaataacaataaatgatggccatcacctgtgttcctgcaaattcgcctctctgggcctccatttccttctctgcagaatggggtaatagtatttctagcatggattagacatgttaatacacgcaatgagcttagaggagtgctgggcatgttaaaaagacttaatgaacaaaagcggcattcttgtttttattattaccattgctaatacctatatcttc

SEQ ID NO: 363954 - DNA, 551 bp, Homo Sapiens
gtatgtcaatgtaattcccattattgcatatgtcctgtagacaagcctcagaataagtaggtcagaggttgctttccttctcaacttctgcagcccagatgagtttaataaaccacttagatcagcttagatggatataagtcaatcgacccaaatggcaaatgtgaatcacacaggcatacagtgagaaaggaagcagggccctgaaatgctaagctggaactagagtctaagatggctttaccaaaaacatacttcccaggccatgcacctatatgtgaagctttattgatgtttaaacataaccttgtatggctgtgttccagtctgagatggtatggatccatataggtgagagtaagtttatatctgcatccgcagtgtaggctggggaatttaaaatgttgattaatatctattgtatacataaatatctacataggcaaagtcatataattctatatgttgtgtttacccatgtataatctagatacagatctagcattttttttcatatgcatacagaataaagatataggaggtcaaaggat

SEQ ID NO: 363955 - DNA, 836 bp, Homo Sapiens
  misc_feature (53)..(93): n is a, c, g, or t
attcgagactgtgtccgcttcgagttctttaagttccctgcaatctgtacacnnnnnnnnnnnnnnnnnnnnnnnnnnnnnnnnnnnnnnnnncagggatcaggtaaaggagtggggctgctgcagccattcagacctcaggagctggaaaattgccaaggatgcagaaggaaatgaagatgatcaaagacgaggatgtgcatttcgacttggctgtaaagaagaccccctcctttccccactgcctgcagccagtggcttctcggggaaaggctccccaaagacaccccttcccggaagctctccgagggccattttcccagtttcggtatgaacctcccccaggagacctagatgggttccccggggtcttcgaaggagcagggtctaggaaacggaagagcatgcccacaaagatgccctataaccaccctgcagaagaagtcaccctcgccctccactcagaggagaacaaaaaccacggccttcccaacctccctttgctgttcccgcagcccccgcgccccaagtatgactctcagatgatcgacctgtgcaacgtgggcttccaattctaccgcagcctggaacactttgggggcaagcccgtcaagcaggaacccattaagcccagcgccgtgtggccccagccaacgcccactccattcctgcccacgccctaccccctactaccccaaagtccacccgggcctcatgttccccttcttcgtgccctcggtcctcgcccttcccttcagccggacacctttctgccaagcagcccggaactctgttgcccggaaagcgagcccaggagagcgaggaacaagcaaagg

SEQ ID NO: 363956 - DNA, 540 bp, Homo Sapiens
  misc_feature (428)..(448): n is a, c, g, or t
tttaaatcccggctgcccgggttgatggggagcctggagcccgcgaagacaagacaggggagggggcgggggcatgagaccgcgctcagagcggccccggcccctccccaacggcgcccaaccaaaagaggccaccctcagcccagaaccttcccagcaagtttctcagctctccgacggggcggagggggggcgccccatctctccccgtcggcagcggggctcccatgcctttcaccaagggcctccctctccccagtaaggcgggggcgggagacaagccgggtgagttgggagacttcagagcggggccggcgaccgcgtgaacagctccccctggaacacaagcagccccccgcgccactcgcgcggaattaacctcctctctcaacggcgccccccggccgcatccccctttgtgtgagagnnnnnnnnnnnnnnnnnnnnncataaaggtagcaacaagcaaaatggaggtgccagataaactgcctcgtttaccctgccatgatagatgcttaaataaaccgagttgcaatt

SEQ ID NO: 363957 - DNA, 303 bp, Homo Sapiens
  misc_feature (17)..(17): n is a, c, g, or t
tccttgctgctccgagnggccccaggtgcctccgccacggctcctgtgacgctgtcacctgcgctgtgacctgctccggagtcataaagaggacgccgggacaccaagaagcagggaaatgttaaagagtttgttggagcaacagcgattccgagtgagaaacacccggtcatggcttgtgattgaagaaaaggcttttataagttgcatgaggaggcaaacaggattaaatacttgattagttacagtgatgctgtcgccgtatgtggacttgtcaacctgaaataaaagaatcagattcca

SEQ ID NO: 363958 - DNA, 774 bp, Homo Sapiens
ccttgtgagggaatacctgtgtccccccttttttcccctttttacccaataaaaccctgccttactcaccctttaaatcatctgcgagcctaaattttcatggccgtgggacggacaagaactttatcttcagctgaactaagaaaaagtcctgcaacatttttggcgcgcaatgtgggggcaccagaagcgggcaccgttgagctgttgcaactgttctgctgctgaggaaaccaaatctgaaagagattaagaaacatgagcagtataaatgactagacaatgtctcagctgaattcaatcatctttttaaactccatctacctgctctatctgacattaataaacattccaagaagaatgtctgcaaagaggagagactgagaattactagccactcaattaggtcacttaacatcttatattagctgctcatttcatttgggagcaaggagaactgggttctcattcttcagccaatgagctggagaaacctggacaaataatttaattgcttgaggcttaattgtccaatcactgaaatgtaagaaaataagaaataatctttaaatttactttcaattaaataaaacactgattgttaatacatatttgaaaatatactagaaactgaacgtgcaaattaggataatgaattgtactctaaatttaaaatgcaagaaatgatgtattttatttcttatttatacatatatattatttcaagaattataaatctcaacatgctttccatataataaaaatgtttaatat

SEQ ID NO: 363959 - DNA, 748 bp, Homo Sapiens
  misc_feature (386)..(398): n is a, c, g, or t
agggctgctttctgcccgtggataccgctgaggaagcctcgttaaagtctctcttcccagggccgtcctgtcctaaagagccggaacagctgcggaagctcttcatgggagggctgagctttgaaacaaccgatgagagcctgaggagcccttctgagcagtggagaaggctcacagattgtgtggactccaagtgaaggtgaaagagaccagacgagacctttcctaattccattcatctctgagggatttataaggaagttaccaacccctggtctaaataatcaaacagagaaaagaagaaaaggaaaaaaggatcagaggacacagaagaatttctggacacacttccatctgctaattaaatggaagaagcaagtttgggnnnnnnnnnnnnncctctacctcaatcaaagactatgaatctttcttttaatctctggagctaacttctctaattagtttcctagaggaagaggatgctttactattggcatttcacactctgcacaatggtatgaacttgacatacctcagctgatccagcagaaagagctctaaaactcaaaagttatgtcatcagtaactgtcaatagatagaagtgttcgcaggtactactagttccaatactcattgactttgtaacaactggtatattagctacaatcaaacaaaatgaggtattctttacaagaattacataagccctttccaataaattttctgtaacgatggaaatattctaaa

SEQ ID NO: 363960 - DNA, 619 bp, Homo Sapiens
cacgcccggcctgatttttctattccttgtaaatgcccagcctgggcatacccactcgcagaatattgtactactgtgttcgttattgcatcccagagtctgagcttgaataaatgctacgaaagcctccagcgtgtttgttgcatgctgctctcccatcaaggcataatcgttgtataataagggatagtgtgacatttcttatcatattgcagcatgaagactgtattttgtgcttattgtggatttcaggggtataacatttatatttgtgataacaaacatgcgtggttgttcaatgttgcccatgaaatcaaaatcctaccacttctctttcaagattttctggaccaaagtgtatcctgggactccaatgcaagttgtcatgcaaaactgtcaccatttgaagctacttagctgagtgaaaacatcactggtagggcaaatcccaagcaaaaattcacaagtaaattgaatgtgccagctgttggagggctgcatctggcttctgtaaacccctgatttcaaaagggggttcagctaaaactcttcattgttctttgtgattgagatgctcttttgtacaaatatgaactcataaaataaatgtttgctaatg

SEQ ID NO: 363961 - DNA, 730 bp, Homo Sapiens
  misc_feature (65)..(65): n is a, c, g, or t
ccagggccattttgagcatgaatggcccaggttttttgccttctaggacctttgctgctccaccngaaggaccaggcactatggttaacttatcaacatcaacccattaactagtcaatgtgccagagagtatctgtcaggctgtcaggctgtcaggttgtagcaacctcttcattccagagctggcccagggaccggggtgggacaatgggtttatgcgttgtccacagttacaccctccctctcccagcctccaccccagggtctgcaggtcctccggcatgtagtatttatctagcaaggcggggtggtggaggcagcaccctggcaaagcagctcacacactgcagccacactcatcagctgtggtgaggcggctggagcaaagtcaaagtcatgcagcaaaatgaaaactctgggactcttcggcaaaatcctcattaagccgagcagctttggccaagtaaattttgcctccttccctcgcgtggcctgagtttaggagcaagggtggccagagtcccttacccacagataagcctcccctcatgaaatgccactcaccccgggctaccattgacatcagggctgcatttccagccagcctggaagtaaaatttgagaggaagacaatattaatctgtgtccccacctagtgagctgtggacaggtttaagttgggtctccttcttcttcaccacaaaaacaggctctaagaaatcatgttact

SEQ ID NO: 363962 - DNA, 607 bp, Homo Sapiens
tagacagcctggtggtggggctgccagtctcacaggcctcatcctctacctcatactggaatctaggtctgattgtttctaaggacaaaaattccctggctatacccaagcctcccaatctatttagaaaacaggcagccacgtggtcagtctcattcctgttgcatctgttctaggagaggccgacttatcctgctacctgattttgcaaggggtattttacaaaacacaagggagtcctttcccccagggcagtgattacagtcatgacccaaccaaggccaagccactctcatggccgagccctcggcagagctagacccctgctttcactcttagatgagaagtcttaggtgaaatccctgagctccagtgcttggaaagcagttcaacagcctaacagacataaacaagttttgaataagtttctaggattttaaacaggtgactccacacttcatgaatcacaagctgaggtgaatgagatgtacttttctttctgatcaaagtcatttgctcttgctacctgtcctagaaccttggtttttaaatttaaatacaggaaacagggaatttaaataaagggaaataaaagtaaggataacag

SEQ ID NO: 363963 - DNA, 684 bp, Homo Sapiens
tcgcctggatcgcagcgccatctcgtggctgctggcaggtctgccttgggccctcttggcgcaaggcaaggaaacaggagctcttcccatcagtgacagcccaggagaatgctccagtgtcaccagtgactcctgctcccacatctgcctacaggaagccctcttggaacaaaagcatctcacttctgggaggcatcaagtatgtgcatcaccagcaggacagacttgcagcgcctattctgagtgaaaaagagaatcttttggtgctaccctcaaccaacctcatcctttctccacttggattcttctcaacattgaccctcttgaaaagatcataaaaactcactttaaggtgtatatgaggagttttgtctcccaggaaggtttgcattgtatctgtaatggtggagtctcaggcattgacttcccaggtgaaggaagggtgattttgggatgggggggccttcctgaaacctctgaagaaacagcacaccagcacctctgccagccagctgcatccaggatcaatgttccccctagttctggttcactcttttgaagctttccaagtcccagaagtgaattcttagcctttctttgagctctctttggtccaggcacagctgtaggaaaaattgtacagtggcatgaaaaaagtgaagggtttagtgtagtaaattctgc

SEQ ID NO: 363964 - DNA, 609 bp, Homo Sapiens
gaaaaaccaccaccagtgccttctcttttgatatatttacagtaaaaatattccctgtacaaaccatctcactctttcacagggaactggcttggccctctcccctgaagtgggttgcacatccacccagcccacccccagctcactctagctcccttcctgttagaatttattcagaacctccatttctaggaggaagcaaggagggggcagttatcttcgtggacttgggtcctcctggaccctttgtcctcatggttatgtttcaaacagagttgagggctccctaaaggggaaagattatttaagttttgtaaatgctgccctccaaaaaccactccacataaatgtttcatggcttagcctctgtgaggccagagctggaacattcagctgtgagggtgtttatatttgtggaactctcttgaacatttgctgtgggttttaaacagctgctatgctgaagctctggggataggaagatcatgaatattcaggtgaagccaccagaatgaacagccgttaatagaataaatgcctaaacagttgtgtaaggcttattaagacctattggggctgagataataaattcccactctgacatgttgc

SEQ ID NO: 363965 - DNA, 574 bp, Homo Sapiens
  misc_feature (74)..(74): n is a, c, g, or t
  misc_feature (79)..(189): n is a, c, g, or t
ccttttcaaaattaaattccaattgtgtcacttcctgattaaaactcttcagtgattggccaaatctcagtcantttannnnnnnnnnnnnnnnnnnnnnnnnnnnnnnnnnnnnnnnnnnnnnnnnnnnnnnnnnnnnnnnnnnnnnnnnnnnnnnnnnnnnnnnnnnnnnnnnnnnnnnnnnnnnnncctgttacccaggggagagggaggggcatcgggaggcctcaggaatgctggaacgttctgtcttgatctggttaatggtcacctgggggcatatttgcataaaaattcaagttgactattctagatttgtgcttcttactttatagaagttatgccctcagtaaacattttgaaaacataaagaccaggcagaggcagggaagtaggcaggtgtgcggcctgtattggtagcagagtcctccctgagggctggatcattagggaggtagtgggcccagggaggaggcacgggaggttaatttagaaaggtggcccaggctgggtcatggtgggcctcagaggccccactaaagaatcagacttggccaggtgtggtggctcacac

SEQ ID NO: 363966 - DNA, 451 bp, Homo Sapiens
cacaacctaggtccctcatatgttcacaatagggcttgagctcctatgagaacctaaggccaccgccgccgctaatctgacaggaggcggagctcaggtggtaatgctcgctcacgcgccactcacctcctgatgtgcacccagcaggtgcgcaaagcagacgggatgaacgtctgggtaggtggaagggttgggagcagtcaggactcagggaaatgtggcaggagtcccagggagagggcaagaggaacccgagagccccctttgtcctccccccataaagtgtcaacagagccaccttcgtcactgagcacaaagctggcagatagaaagaaagtgctcgataaaatagccactaaataaaatgaatgcacagctttgaaaatcagttgattcttctagttcatagtcttcttacagcaaataaatgatgaagacacatcatttgtgt

SEQ ID NO: 363967 - DNA, 726 bp, Homo Sapiens
  misc_feature (218)..(227): n is a, c, g, or t
attggggatccataggtttgaattagccaggcagatactagatacctgagaccatcaggagaatcacttctgattaggcagaataagaacgggcactggaattgccactccataggaataaattgtctaggaaatgaaccaaattgtgtgcttaatatcagtctactcctttgttagcttatttcataagctattagcataaatgtaggtcgttggcnnnnnnnnnnctcaattcaactcaaaaattttgagatcattgtgagaaatatacacttgtaagaaataatacagagattccacccggttttcccaatgataacatcttgcaaaacaagggcaatatcacaaccaagccaagataggatagaaatgatataatcaagatacagaacatttctatcacaatgatcccatctgttgtcataagccatattcagtttcctcttgtgctcgtatagctatgcccaccttcataacctctggcaccagcggtctgttctccatctctaattttgccaaaattgattggattatactttcttttgggattggcttttcactcagcataatctctgggcattgatccagcttgttgcatcaatagttctgtttttagtactgagtgggatgtcagtatagatgtaccatagtaaacacctgtggaaggacgtcaggaatgtttcctgttattaggtatctaaataaagttgctgtaaacatatgtgt

SEQ ID NO: 363968 - DNA, 680 bp, Homo Sapiens
atgaaccccaaatataagctgatgtaaacaaggtattaacagctacaagaccatctgatatcagcatctgtgcaaggggatgcaacaggagaagcccaatgttaaccagtcctcacaagaaaatgcagtaggtaaatttgagaacaccaagtgaactataagagtttttgtacaatctgcatgttgagtgcaaggaatctacactaagatatgaaggggccacgagcagtctgggccctatgacacagttaaccagctgtagttccctttccatttaaagccccacactaaggaagaactgctgggaataaaatccaaattgagtaggatagggataatagagccaaaggaaatagaaggttcagattaatgggggtaagtaaagtttcaggaaatctcacagtgtctgaggtcatgtctttaaacacttgagagaaacaacaaaatagagagttctagagctgtgaagttagaaaacctatcttgactcgtaactcctatgtaaaagttggggaaaactaatttcatattaaaatgagcagtaggaaaagatcacagtcaaatccatggaaacctatttgaaaagtgaaaataaggattagcgtaatgtctccacagtcaagctgtaccagaaagacatatagtttatgaagctagtgtaaaataaaattaatattttg

SEQ ID NO: 363969 - DNA, 405 bp, Homo Sapiens
catccccacaggccaggagagtcgctcgcaggttttgggtcatagatggcagccctgggcctggggcccacaggaagagttgggaggggccctggagcctggagcctgcccacccaccaggcctgtgtgcagggggtgagcgctcggtggctgaggctggtccgtgagggccccaagtctaaccccatctcccgtccttggctctgcagcgcaggaccaggcctgggcaggcgtggtgggggggcctgcaggtaggtatcacccacccctcagaatggctctcaggctcagattcacagcctccccatggcaaatggaggccttccagggtcctggacccacccccaagcttgggtaggagggatccccctcttaatctcacatttacttgtgtttgaacatctc

SEQ ID NO: 363970 - DNA, 644 bp, Homo Sapiens
cagcgtggacttgccagaagcctccctggcagccgagggcccttctataaagaggactcttgagctggcagcagagcccatccaggcagcacggctggctgagcagagacaagggctgcccacactgggactggtagaggaagccggccctgacggatgggtggtctcgcccttcctgggttcatcctgctgcaggtgggcctgagtcgcagatcagaaagcaccgggaagatgcaggcctgcatggtgccggggctggccctctgcctcctactggggcctcttgcaggggccaagcctgtgcaggaggaaggagacccttacgcggagctgccggccatgccctactggcctttctccacctctgacttctggaactatgtgcagcacttccaggccctgggggcctacccccagatcgaggacatggcccgaaccttctttgcccacttccccctggggagcacgctgggcttccacgttccctatcaggaggactgaatggtgtccagcctggtgcccgcccaccccgccaggctgcactcggtcgggcctccacaggcatggagtccccgcaaaaacctggcccctgcaggagtcaggcctggtctcacgctcaataaactccggactgaagatgcaaa

SEQ ID NO: 363971 - DNA, 765 bp, Homo Sapiens
  misc_feature (98)..(226): n is a, c, g, or t
gagactccgtgtcagaaagaaacttgtatcatggctagcaaagtggaatttggttttaggctaaaataaaatcctagagccaggtgtggaggcgagtnnnnnnnnnnnnnnnnnnnnnnnnnnnnnnnnnnnnnnnnnnnnnnnnnnnnnnnnnnnnnnnnnnnnnnnnnnnnnnnnnnnnnnnnnnnnnnnnnnnnnnnnnnnnnnnnnnnnnnnnnnnnnnnnntcctactctagggcacctgggaaccaaccagtggtgcctttggaaatcttggtttatgcttcctctctgacagtaggaaaaagctattgtgggagtttctcctgccatgtagagtgatggaagagcagaattgtggaggagcagggttgctttgttttgtctttgttgtactcagctggaaagctgtttaaggaaagaatctggttatgacctcctttctgcaattggaaatgaacgccacagggaaaagaagatataagacacagaatgctccttgcctggctaaaatggaagaggacaaaggaagcagaatactttctgggcttttggcttttgctaccctcctctggcagacccctgtccaagacgctggctgtgttgtgtgccaggctagagcttgtacctactgtaaaatctgtgtgtgatgtctgttgagttttttggaaaacaaaaaacttatattttaaaatacaaggtattagataataccaagggcagataattccacccttggaaataaaaaagattttcttttcttc

SEQ ID NO: 363972 - DNA, 575 bp, Homo Sapiens
tcatgtctctgctccaaataaagaaacaaactacaagaagagaaaaaaacaaaagaactggttcaaaaacaagataaagaattccacacgccagaaacacagcaaaagcgcaaaacgtgggacgagaatgaagctgtgggcttgttgcatgtggggcctggcaatcgggctgagagttcagctgctgtgggctgaaggggtctgaataaactccagcatagaggggacagggccagctcactgcttcctcccgtttcatgcaaaccagcaaacagagacaaaggcaaactgccgctgctgtgcacctgggctatggcttcgagaacaaacgactaaggagatggaaactcaccaagccaaacccacttcatgggttctgaacagggtctgtgtgatcttcctaggttacccaggccagagtcccaaactgccattcgaagatcagaccgtagaagtgtggatgccccgatggacaggagcgggtagctgcagaagcattaggcaggaaagagcaaaggagcacagtgaatttgtgaattgatcatgtctctgctccaaataaagaaacaaactac

SEQ ID NO: 363973 - DNA, 719 bp, Homo Sapiens
  misc_feature (591)..(604): n is a, c, g, or t
gagacctgacctcagggcagggtatgagttctaagcagttgggagcttcaggggagaaggttgggagtcacagacagataggcaaagctctgcacggagcctgagagcaaatgccattggagcccttcagtgtgcactgggctggggacaaggctctacacaccgaaggcaaggccacggtggatctggaggtgggacagttgactgtgtgtttgtctcccataggacacagcactggccactctccccagctctagttcccaccctctccttacttagccagtcttatggtgtagcctacactgggctcaaacttccaatccccctgcctctgtcttatgagtgctaggatgacaggccctgtgtcactgttttctagcgcaatctctcttgagaacccaaaatcgtgggcagctggttcctgatgcaccaaggttttctctgggtgaaaaggaaagctcactcgtcctgggagagggcctcggatcgccaccaccgctgctgtcgtctccactaaagaaaccttctgtactttcttcccagttacatattttgtattgtattgttttgttttaaacagtaatttacttnnnnnnnnnnnnnncaaacaagctgttatgtactgggcgtggtggcacatgcctgtaagccagtcttggctatgtagtaagcatccgtgacattgcaacataataaagcaaaccccctgtgacaagttt

SEQ ID NO: 363974 - DNA, 520 bp, Homo Sapiens
cttttcggcgccaccaccttcttggaaatgagacagagcaaaggggagggggctcagaccaccgcctcccctggcaggccccataaaagcgactgtcactcggtcccagacaccagagcaagctcaagacccagcagtgggacagccagacagacggcacgatggcactgagctcccagatctgggccgcttgcctcctgctcctcctcctcctcgccagcctgaccagtggctctgttttcccacaacagacgggacaacttgcagagctgcaaccccaggacagagctggagccagggccagctggatgcccatgttccagaggcgaaggaggcgagacacccacttccccatctgcattttctgctgcggctgctgtcatcgatcaaagtgtgggatgtgctgcaagacgtagaacctacctgccctgcccccgtcccctcccttccttatttattcctgctgccccagaacataggtcttggaataaaatggctggttcttttgttttccaaaaaa

SEQ ID NO: 363975 - DNA, 458 bp, Homo Sapiens
agggagagaggaacaaattaagtgcttccatttctggtgctaccgtggactaaatattacggaaacttctgatatactgcaactaaaaatgctggatataatatttaacaaccacacacactctttcaccatagggattcccagtccacccccttaactttatgagtcactctgtgaccctgccagctacaggtttttcccagcaagcttgaacccaaactggggccttgaacatttccaggcactgttaaaggtatctaggttgcccaaaatattgaaataaactggccccagccctgagccaaatttcttaaacccccatttaaactccataccctgacccctccttgtggacaaacctaggtaagacatcctgtttttctctctgtccatcttgaaaatatgctgcagcactctatatgtaagttcttcaaataaatcctttgaactgataaaaa

SEQ ID NO: 363976 - DNA, 602 bp, Homo Sapiens
  misc_feature (411)..(428): n is a, c, g, or t
ccctttcttctgaagggcattaagggatactcatggctcagcaaattctgaagtagaaattgtcacagtgctgtaggtggaagagactcaacaatgccatcatgaaaaaaacttctggaattattcacaacagtaaaattatgaccaacttacagtcctaggagatggattgcagaaatctttaagaccatccataagaaatggctttcaaacttatttgaaatcaatttgacatcacaacccacttttcatacatgtataaactgaaattggtttcacaaagtattatttcccttataacatgctacatattttcccttctattaaaaaagttggctgtcacccatgaagtttgttaccagttggtcatgactagaggttaaaaagcactgatcaattgctttaatcttnnnnnnnnnnnnnnnnnnggcaacataacacagttgctaagagtactaactttgaagtaggactgcccaggttcaaatcctgacaccgctacttggctatgaagcccaagtcctaggtcatgtcactaactttggtgcttcagtttccccctccagaaatcaagagaaaccttctaataaaaaattgttatc

SEQ ID NO: 363977 - DNA, 1015 bp, Homo Sapiens
  misc_feature (399)..(410): n is a, c, g, or t
ggtatgggatcggcggctgcgcgcccctcctccgggggtctccccgccttttttccgccacatccaatcaaatcgggcgaggggcgcgaagcccgggagacgcgtaggccgcggccccaggcccggtgtttgacgtcggcggctgcccgcgttccgcgccgagtaacggtcttcggaattcagagccttcgccttagggaaggtgggacggtcgccagtttctccagcactttcttcgtccagggacgtcaacctcccttgcatgctgtcctcagggactgacagcggggcctgctcagaagttctcgatacgggactctctacaggacctattgtgattaagtgcataggggtgaggagagacgtggcttatttatgtgtttttcagtttgttatgannnnnnnnnnnnaattttacttctccctgccctagaatggagctccttgagagtaaaaacccgcctgggtcgccatcaccctaggcttggtgcagggcctgccagggcgctcgaatttgttgaagaggtgggtgttcagtatcgaaagagccgcggattgtacattagaaagcctggctttgcgccgcgtccttgccacttgctgaccaggcccctccacgtggtccccgccggggcagcagctctcctcacccgtccaaaggcacggggaggcgcgtggcggccccgccagagctgagccccctgggatgtgaggccgtctcgctctgagcttcagagcagggttgcaggagacacctcagaaggtcgttttgaggacgggaggagatgaactgctcaaagcctgcttaactagataaatggtatcgattaacttttctttgactccctttccacacctataaaatgaagatgacgggaaacttgtcatactttttttgtggtgggtgggaaaggtctttatgaactgtgaagtcctatgcaaacgtgagatgtttcctttcgcaatctgattagcgaagcaaaaacacgcgagtcaaaaacatacacagaaagca

SEQ ID NO: 363978 - DNA, 522 bp, Homo Sapiens
tggggggcaggaccgggctgctgggccctcatgtgggagagaggtgaaaagcgtcccccactagggggctggcagtgcatgtgcttgagttaaatgtgcagggcagacagagccagaagggcctgtacccaggggctcgtcccctcctccggtttcccagacaaatccagacaccagcctttagggtggccttgggaggagagggccaggctgtcctgggtgtgagagaactagatagagcctcccaaccctgatttagaaatgcattccttattttgtctagaaattaataaatgaactagcttgttttgacaggtttatttcacatcctatgaatgtatgtaaataaactgtacataggtccatccacataaaatatcttttaataacatatcaacatttgtgtaaatttgaaatttaaaaaaatctatgaagctggtgtacatatgttacaattacgtatattttctttggtccttcataaaaatatatttactttgccaataaaaagaaaaagaactc

SEQ ID NO: 363979 - DNA, 675 bp, Homo Sapiens
  misc_feature (568)..(598): n is a, c, g, or t
ggaactaaatctttgaaactaactctgcattttacctttcttgcaaattgcagctcagaccagccacattccaggctcccaggagccacacatggtcaatacctgtcacattgaagtgcagctctgttgtcaggtctgtgaaaggcctgaatatcccttttcttcctgttaggaataacgctcaaaatcataaggaaattgaacactcgaacaaaggattcctagcaaagcaattttagttctgcacagaggggtgcgttcttgtccagtcaccatgagagcacacctgaacaaaggggcacaagagcctttattcctgacacaagtcctgcccctgtaccctttccccattggccagggtcgggtcgtacaatctgaactaatcctggttggctaaacatttgatttttttagataaggtgggcatgcaaaagaatgcagagaggaaggggaaggggtgtctgcattgagctagaaagttagtcctctttccaaataagggaagaaatgtgagctggtactgataatgcctggtactgtggcgtgcctgggcatctaacaaaggcannnnnnnnnnnnnnnnnnnnnnnnnnnnnnnggtgtgtgtgtgggtactatgaattaaagaataaaagattgatcaggctatttgaagagaaacctcatcgtatccca

SEQ ID NO: 363980 - DNA, 607 bp, Homo Sapiens
gtccggagggggaagggatgtctgtagtgacaaaagttagtcttctttgtaaataagggaaggaatgtgagctggtactggtaacgcctggtactgtggcgtgactgggcatctaagcaatagccagaaaggaaaaaggaaaaaagagtgtgtatgcgtgtgtggggtactatgaattaaaagattgatcagcctgtttgaagagaaacctcatcatattccacactacaaataccccaggcccagaaagtcaccttctcctgcctgtgcccatagctctgcgttctcttgggcgtcactcccgccctatgttctgaagctgtgattgtccgttgtctgagctgggcgctggtggcgtctggggcatcaccattgtcctcacagtgcctggcgcctcagacacaaagtggagtcacaggacagcacaggccacaggcaaacaccagaggtccaaagccgggccctggctgggagctactggagggtctgcctaagatgtgtttgctcagaaggccaggtgccctggtggttagacagctcaggccctgtgccttcagtccatgttcatgccacccccagatgctgtgtgacccgggaagtccagggg

SEQ ID NO: 363981 - DNA, 556 bp, Homo Sapiens
caacttggcccaggttcacattctgcaaaagctgtgagcttgcaaattgcctttgatcctataagagccatcatggtgatcaatttctttctacacaacgccagcacatatttaaccccccacacggagcaacgtccagtttaacccgcacagcagcaacccagcctccagctctgtctcaccaagcacgtgtcaacaattctcttcctaggtgattccagcagcacagcctggcagctcctgagcccttgggaagttctgcagctcggcttacccagggctgccctggccaaagccccagccactctcctttactgcagagagcgggaccgtgtcccccttcatccccctagaacggtagggctgggagctgcgtcagacctgcctccacgtgcctgtgggaagagacgtcggagtctgatcgcagacacaagaagatcagtcaccccaaaaagataaaatatactcgaacttccgacccttcatcttcctttcagaacacactcacattttctataggaaaacagcctcataataataaaaactcaatttagcg

SEQ ID NO: 363982 - DNA, 480 bp, Homo Sapiens
agggcgaagccgcgctcggtgaaagttgaagagggggaggcctcagacttctcgctggcctgggattcctccgtgacagcagcaggaggcctagaaggagagccagagtgcgatcagaaaaccagccgtgcgctggaagacaggaacagcgtgacaagtcaagaggagagaaatgaggatgatgaagacatggaggatgaatcaatttacacctgcgatcactgtcagcaggacttcgagtctctggcagacctgacggaccaccgggcccaccgctgtcctggaggtaatgcaaaacagccccaggactctgacaggtggttacacgggtaattggacatagcaacagcttgaagcctcaagtgagattaaagaattaataatgtaattttacagttaatgtcattttattgtggtgtcttgggtaccctgtatccgccttttaaatacaattaaaaataaaagcaacagctttccggc

SEQ ID NO: 363983 - DNA, 442 bp, Homo Sapiens
tgggtggagattgtagtttgtgcaagggcctgggatcctgaaaacagcctgagatgggatgggctggcgggggtctgcgcattgccaaagctgagctgcggccagaggaccaaccccaccgtgggtctccctttcactgctggccaccgctctgcctgtttgcccgcccacaaactgggggtgattatggcaactccctcttacctagtgtttgacctatcctgagcctggtgtgttaaacaaaggctgagtccacctggtgggtgggaggtgggagcacgggagtgacaggggctcactccggttgccctggggcacacaggaagggaagagtgaggccaggctagtggcctaacaccagcaggtctcacctcagagcacacacaaatcctggtgtgccaagagagatttaaatatttaaataaaaaattttaattcctaa

SEQ ID NO: 363984 - DNA, 691 bp, Homo Sapiens
  misc_feature (44)..(44): n is a, c, g, or t
  misc_feature (254)..(271): n is a, c, g, or t
ccaacattccatctggcaataactggcaatcagctgggctgggnggccactgtcctctttagataggatctgctctgcactctacttcgcagtcaccacgtttcttgatcatctcccgacacccagctagcttcccttgtttgaaatttttgtttggtctctgtgggtatttgagttctcaaaacttgagtgtccatcagaactacctgagatcctattaaaacgcagattctgccaggcgcggaggctcaagnnnnnnnnnnnnnnnnnngcagattcctgggcctcatccaatttggaatgtccggggtggagcccaggggttgagtttgcaacctctgccttacctaacagtgtgttcccaggtccctgtgcccaacaggtgctttttgggcccagtaatgtctgcttctactcctaggcgtgggtctgtcaacatctctgtttctgtctacatctgcaggctgtctctcaaggtggtctcttctgctgcttagcaactcaaaaatcccaacagcactccctatcctttccctgaccccagaccgctgccaagcctgttctcccccattacaacatggtctcactcagggcctggactgctccaaaactcgcccaggtctccagctctcctctaccacccaacaccctgggctcacttaaggatcccaaataaactctttatttatat

SEQ ID NO: 363985 - DNA, 485 bp, Homo Sapiens
gaaactgccctcacaggattaaggagagttacaagccaggctttaggcagcattatatatagttagctgttatccagggtgcacaagtgtactttgacccacttccctgcagctgctaactcactgaacatcactccacgtgctagaccacctcctacctgtttctccatggttcttaccatgagtaagaatttctgacgctagactcataagatcgttttgcccaagaacgggttgtttttcagatcctgaattctgacgtccccaaccaaggaacccactcagcacaagaatgaggtttcttggtctccctgtctcatgacttcgcccttcacttcttgaccaatcatcgatccccacactgcagcccctgtccagaggacttaaaaaccctgccccccaaacctctcagggaggtggatttgaggcttcttcccatctcctcattcagatgccctgtgattattaaactctttctttgctgc

SEQ ID NO: 363986 - DNA, 502 bp, Homo Sapiens
  misc_feature (302)..(321): n is a, c, g, or t
  misc_feature (396)..(452): n is a, c, g, or t
atcatccccattttacacaacaggaaactatgtttagcggttaatccatttgccctctcatacaaagtcatgtgattgcagagcccgcatcctgtccatacaagcctagcaagccactcagcctctcatcctgtctcctctcaaagtggggataatcgcagccgtgcagcgttgttgaaagaatacataaaagccgggcacggtggctcacacctgtaatctcagcactttgggaggatcacttgagcccaggagttcgagaccagcctaaacaagagtgagactaacccccgatctctacnnnnnnnnnnnnnnnnnnnncaaactagccaggcatggtgacagtgtggtctcatttactcgggaggctgaggcaggaggatggcttgagcccannnnnnnnnnnnnnnnnnnnnnnnnnnnnnnnnnnnnnnnnnnnnnnnnnnnnnnnnaaacgagaccttgcctcaaaaaaaataaagcatctaggccgggcgcaaaa

SEQ ID NO: 363987 - DNA, 838 bp, Homo Sapiens
  misc_feature (454)..(558): n is a, c, g, or t
taaataaataaaaagccatagagtttctttataattaggttctaacactacttcttcctattagtcaataacagtgccacaataagtggattgggttaaaatgaaaatcaccaattgagtctctacccaaaaccccttccagttgctcttatttaggaggaaacagcttctgctcagtttctgtccactcacaagacctctcctgcatggaaccctgtccacagtttctatcactccatctgtgcttacttcagattatctctgaaacaatcagatgtaatggccagtggatgcaaaatacatataaagtaagatttgggattaggaggctcaagggggatggatatgtagagaaaagacctaggaagaacaagaacagggactggcagaaaacacattctgagacaaaggccatttatttagctctggccagttggtttatctagcctgacannnnnnnnnnnnnnnnnnnnnnnnnnnnnnnnnnnnnnnnnnnnnnnnnnnnnnnnnnnnnnnnnnnnnnnnnnnnnnnnnnnnnnnnnnnnnnnnnnnnnnnnngggacaatgctaagcatcctacaataaacaggatggtccctccaaccaagacttatccagcccaaagtgacagggtgctgaggttgagaagccatgtggtatataacacagatgtacacactggaggaaacgtcactgaagtagatgctggtcacttaccagtttcactccttcaggatatcctcttctttaaacgaggaggttgtgactagttacttcccatgaaaagcagctgacccttagggttgaaaagtatgtttattcccaataacagtgaatg

SEQ ID NO: 363988 - DNA, 378 bp, Homo Sapiens
ttaaaaataattagggaataatacagtttgcagattttctcccgatgtcatcatggcactcagtaacaaggaatattgtagatgaattttgaaaatgtttttcctggaagagaatcccaaacgtgtggccgaaagggacccaggacctgccagccatgctcctcctgtctttttcccttccagtttgaaccccacagcgctgggcggttgacgaggtgtggccaggcttgcatctgctgaaagaaccggggtggcccccctgcatcttgatcagacactgccatgaggtccctcccctctttgatggcaaagggaaacagtgggctctacacatggagctttgaagtcaagagtcattttcatccttagctcagcatg

SEQ ID NO: 363989 - DNA, 728 bp, Homo Sapiens
  misc_feature (178)..(178): n is a, c, g, or t
gttaattggccaagaaattgcaagctgggggaaaaattataaatactgggaaataaaggattcttcatagggaacgaaacagggtttgttaatgatttatgggaattatgtgaagggccacattatgcatcaacaataccctccagcctatatttcaagcacatgcagttttttgccngcagtgcttctgctgcaaagacctacccccacttctcttagcctgtctgtccccactccatacccccgacctttcatccagctggcctgtgcttgctaaagctccctttatcctttcccagctccctttccatgttggagtaggttccccccttccatgctctcatagcaccctgcaaccttattaggctgtaattattacatagttagattgatctccaactagattgtcatctctttggtggagagattacgttcttgtgtatcttcagtgcctgacacagaagtgtttctaaaagtaacatctgcacacccctcaaacagaatcacaaggggcgaggccaagaaatctgctctccaagtgataacttaaactttttaacatgctcttcaggtgacacttaaacttgtttgaaaaactctgtgtcataaaactaaatattagctggatgaatgtatttgtatctttttctgtgttggcctttgtgaggagaaatgctgtctatgcaccaaatcagagctgaaaaattctagtgttttgttaaaaaaaa

SEQ ID NO: 363990 - DNA, 707 bp, Homo Sapiens
ggagatcacagatggggaagaggaagggggagacaagatgaccaagacaggaagccaccccaaacttgaccgagaagatctttgacccttgcctttgagcccccaggaggggaagggatcatggagagccctctaaagcctgcactctccctgctccacagctttcagggtgtgtttatgagtgactccacccaagcttgtagctgttctctcccatctaacctcaggcaagatcctggtgaaacagcatgacatggcttctggggtggagggtgggggtggaggtcctgctcctagagatgaactctatccagccccttaattggcaggtgtatgtgctgacagtactgaaagctttcctctttaactgatcccacccccacccaaaagtcagcagtggcactggagctgtgggctttggggaagtcacttagctccttaaggtctgtttttagacccttccaaggaagaggccagaacggacattctctgcgatctatatacattgcctgtatccaggaggctacacaccagcaaaccgtgaaggagaatgggacactgggtcatggcctggagttgctgataatttaggtgggatagatacttggtctacttaagctcaatgtaacccagagcccaccatatagttttataggtgctcaattttctatatcgctattaaacttccttctttttttctaaaaact

SEQ ID NO: 363991 - DNA, 463 bp, Homo Sapiens
aaaaacaacgccaatttatcctctctgtattaaagtgataattctgggcccacagaaatcagtcagtacctgcggtgtgccttaaggggactctcatgatcatcattcccttctagagaacattctagatgaagaaatgcaactgttgaccttctggttcacccatctccccctcgaggcattcttgataccccttctcacctgcatttctgtcccagggataccagatgcagccactacctaactaggcttgtcctgggggagtgagccgtgaacctggagacatggctttgacccacagctactgttcatttcctcaggctttgcgctgattccctcaataatatgacagtaaggcaagtagtctccttgcctttctcctgaaaggtatgagatgtggacatttcagtgtttgaattattttaagagatgttttatagaaataaaacgttttgtagctaag

SEQ ID NO: 363992 - DNA, 462 bp, Homo Sapiens
cagcttcaggacaggacaccaggctggctgctttttttagcctgcccctggcccaggcccagtccttggtgtcagggagcccccaggccgcaggtggagggtgataaaatatgttctctgacaggacccagccagccacataggtggaggttttccatgtccaaatgaggtcaagatgccgaaatcccagatctgacttcacacttcccttttctagaaccttttgtaaaagttggtggcagcagaggcagccccaggccgggctgcatctctctgtgtctgttgtgccttgcccggcgcctcacggatggcaaagctctcctcacccatgggactgtagtgcaattaaacccgcgtctaggtgatgcttttaaagttgtagcttcgtgctttgtacagttttctttctggttttaatttttagttgtgctttgagtcagtccaataaactagactttttcc

SEQ ID NO: 363993 - DNA, 2030 bp, Homo Sapiens
  misc_feature (1048)..(1065): n is a, c, g, or t
agcgggtcccttcccccatcggtcctcttaggggaagtggagatgtgggcctcggagctgcgtggcccgggctgtgcggattccctaaacgccgcacttgcgcacagccccttacgtaaccgtcagtgccggggattccctggagggggtcattctattcaaccattatacacaccccgggctcctgccgccgcgccgccgccgcctcacaaaatggcggcgcccatagaggagaccgcggccgcctccccggccccattttgtgggaggcgagagatctgtcaacatggaaaacctctgctgaggatgcatccgagtttggaaaccccacttaagggatggagcctgggggatcacattaaacggaaaatgccaacgacttctaccacctctacgcgtttttagtttttcattttctcgaaggaagcgccagaagcctgtggagtaattgtaactagagggagaacggaaagctgaggtgactgctccggggacttggcgcggcgccttggtggctttggttgctcttccacgctcccggcagctgaccagaatctcttggagggtctcctgggccacctcggccgcgccagtcgtgcagtgagacttctgtagttttaaaatgccacagtccacggcccggtcggcaccgctcgcctgaatcgtgggctttgggaaccttggaggctgctgctccaggaactcgcggtcggccgggagccggggagcttcgttgctgggagcgggcggtattcgcggactccggcggccctggcgggtcgcggccgggatccgagccggggatgacgatgctgatggagctgatggggcaagagtgggaacggaggcacgtacactgaaatttaagtcatccaagttgggacttaagatagcaggttaatattgtctcaggcgagacttagaacgtcttttctggtatcccagtctgcagtgggcaaatctattgtctttatttctcatttaagggcagaatggagggatgacatatttttacttttcaagaggcggttgccacttttaagtcacnnnnnnnnnnnnnnnnnnacatacacaaacatacgatagtggtgttttcagagcaagtatcaaaggctaaagacttggagtgatactaggtgtttaaaagcctttttaaaaaaattaagatgtgatgacaaactggagaattgacttttaaaaatttcttttctgtagaagaggctatcttcaaaatggagtcctaaagtatatctgatggatagaatttaaattcttaacactgtatataccctgtggtcaaaagcatcaacgtaacccttgatgtttatcagactacttatgtttcaatcttcctgtggctagaaaaattaagacagaagtaagttattaccgggatttgcttgtaagaagcacgtcaaacgttcaaggaaaggtttgttgaaactccgaatatcgcatcacacccaatccatctaattttccatggctgtttctcccagttggcagccaatcattcttggcggttttacctggaccttttgaaaaacaagcggtccctaccccctcaatcgctccactttcctggaacctgcctccttcaattccgacctcctttcataaatcggccaacaacacccctgaccaaagccctctcctctctcgcccaaagggggcctacgacgcttagaccttcccaaaattcccggaccttataaggctctttccccagcattttcttttacccaactcccacgttcgctggtccccgagagggccatataaacttactcgccgggccccattggtgtgggtgcgattcctagtcgcatacggaattaccccgcactcgtcccctcgaggatacacctcggccccctggctgctccccctatagtgggacgcgcccctcttttttaccccccccacaccttacaaaaatttttgggcaatcgcgcccgcgccgtatatttttatccaccttcgtccgcttatttccactgtcgacatactgtctttctttgtgtttctgg

SEQ ID NO: 363994 - DNA, 1127 bp, Homo Sapiens
  misc_feature (965)..(965): n is a, c, g, or t
  misc_feature (975)..(975): n is a, c, g, or t
  misc_feature (982)..(1069): n is a, c, g, or t
  misc_feature (1077)..(1077): n is a, c, g, or t
atcagattcaactaggagaaaatcccacctccaggctctattaatccttccaatggagtggaagtttctctcacagagaaactagtaaggggatccaatgggaaaagaacgttcacacggactagaagacgaaaccaatggaatggaaaattgtcctcgcgttggtagaagcagccaatgagatgaaaagagcccgcctccaaagtggctgcagaggcaatggggtgaatcgtgctcagaggcgcgctccaatggggtagcagggctcgcccggccgccactaccccgcttccccgcgcccggagtccccacccacggccggccgcggagccgagtgctgacccgggtgagaggttcccgcggctcagggaagatggcggcagccgtggtgctggctgctgggttgcgcgcggcgcgcagagccgtggcggccacgggggtgcgcggggggcaggtccgaggagctgcaggtgtgactgatgggaatgaagtggccaaggcccagcaggcaactcctgggggagcagccccaaccatcttctcccggatcctggacaagagcctcccagctgacattctctatgaggaccagcagtgtcttgtgttccgtgatgtggcccctcaggctcctgtgcacttcctggtcattcctaagaagcccattcctcggattagccaggctgaagaagaagaccagcagcttctaggacacctactccttgtggccaagcagacagcaaaggctgagggcctgggagatggataccgacttgtgatcaacgatgggaagctgggtgcacaatctgtgtatcatctgcacattcatgtacttgggggccggcagctccagtggcctccaggttgaacctgccaactgattaaaggacaccagactctggatgcttggatggaaagggaaaaatggaccctgtgatgctaataaaactgttctcccttaaaaaaanaaaccccaanaaaaaannnnnnnnnnnnnnnnnnnnnnnnnnnnnnnnnnnnnnnnnnnnnnnnnnnnnnnnnnnnnnnnnnnnnnnnnnnnnnnnnnnnnnnnggattccntcatcacctgtacgccctctagagttactcttagcccgttacctctgcgt

SEQ ID NO: 363995 - DNA, 571 bp, Homo Sapiens
  misc_feature (47)..(95): n is a, c, g, or t
  misc_feature (561)..(561): n is a, c, g, or t
ttgtaattctttggggtttttttaagacagggcctcactctgtcatnnnnnnnnnnnnnnnnnnnnnnnnnnnnnnnnnnnnnnnnnnnnnnnnngctggacccaagcgatcctccaacatcagcctctagagtagctggaactataggcacatgccactgtacccgggtaatttttaaattttttgtagagattgggtctcactatgttgctcaggctagtctcaaactccagcctcaagccatcctcccacctcagcctgagccactgttcctagccaaggtaactcttgaggaaagacatgaaggataaggtaaacaaaagcctagttggtagaggaaagttccttacaggaaattttagccactaaatgtggaagaaatgatagaattagaaaaatcaccatcttactagccggaattaaataagtgatttagatgatcctaatcaatggacaaaaccattaagggaaagtttgggggagaagtttataaggaagggatcgggttgacaccacctgaacccactgctccctctcagcaccatggaaactgggagggntaaggcatca

SEQ ID NO: 363996 - DNA, 618 bp, Homo Sapiens
gcggccgcggctcccccgcacctgttgccttggatgaggagcgcgccctctacatcgtccgggccggcgaagcacgggctatcgagcgggtcctgagggattacagcgacaagcatagggctactttcaaatttgaatcaacagatgaagataaaagaaagaaactctgtgaaggcatatttaaagtccttataaaggacatcccaacaacatgtcaagtgtcctgcctggaagtactccgcattctctccagagacaaaaaggttttagttcctgtgacaactaaggaaaatatgcagatactgctgcgactagccaagctaaatgagttagatgattctttggagaaagtatcagagttcccagttattgtggagtcattaaaatgtctgtgtaatatagtgttcaacagtcagatggcacagcagctcagcctggaacttaatcttgctgcaaagctctgtaacctcctgagaaagtgcacaggaccggaaatttatcaatgacattaagtgctttgacttgcgcttgctcttccttctgtcacttttggcacaccgacatcaggtcacaattgcgctatgagctccaggactaccggtgtaacgcagatcttgg

SEQ ID NO: 363997 - DNA, 1456 bp, Homo Sapiens
  misc_feature (77)..(77): n is a, c, g, or t
  misc_feature (79)..(80): n is a, c, g, or t
  misc_feature (83)..(83): n is a, c, g, or t
  misc_feature (108)..(108): n is a, c, g, or t
  misc_feature (111)..(111): n is a, c, g, or t
  misc_feature (1143)..(1144): n is a, c, g, or t
  misc_feature (1153)..(1153): n is a, c, g, or t
  misc_feature (1193)..(1193): n is a, c, g, or t
  misc_feature (1306)..(1306): n is a, c, g, or t
gacaaacgacaaaccaagagaggaaaacggtgcaaaaagaagcaggcaccggaccggaatttttcggagcagaggcncnnccncccttttgccgcaagaaagggaaanggnagaaggaatggggggcacacagagtgagcagttctccccgttccgtaaacggtgttacacggctttcctccacctgcgaaggtattctaatctgattttgaacttgttttccttgatggttgatgcaaacattccagatattgcacttgaaccagataaaactgtgaaaaaggttcaggataaattccgcttagacctgtcggatgaagaggctgtgcattacatgcagagtctgattgatgagagtgtccatgctctttttgcagcagaggtggaacagattcacaagtttgcccagtactggagaaaatgaaactgggattgacccatcaagaagcttggctcaataagaaaaccacgtaaggagcaacctttgtatattggagacttcagagtaaccagcaagggaagagaaatcttaatcttgtaaggtatggaatttttccaaaaatgtacatgggaacctgagtttttcccctccctaggcatgcacatcggctacagaacataagttctatgaaacgcgccttggattctcgacaacaactaggggacatattatatttctccaacaaggttataaacatatgggccgactaaagagtttaagtggaaaagtggcagggaagaagcgatttcccctccacattaaatgaggttcaacaatagagtattaacacgagaagagaggtattttgttggggaagcgcgcaagagctatagattacagcggttcttggccacaaaattgacagtgtaaacagaagacgccacaactgtatttatcttatgatctttttatacttttaagagcatcagtgttctgtggacaacacgagtgggtcgaccacattatatctccaggacgtgtagagcctgacaaatacaggcggctggtatgagagtacaccacgctctgccataactatatagaaactaaattagatattaaccacctcatatatctaaagagggggccgactgctcccaccgtacgagagagaagagagatgttatggcgcggctggggtnntgatgccgncgatggagaacatacatatctcatcgctaggggtggaaantacaagtaaaaagcggagggcggcaacgacccaccacacataataacaagatatagtaagagcgatacgcggctcaatatagaatgttaaaaaacagcacctcgcatgtggantaaatacgtgatttgggtcccgcccgcatcagcgatgtttgtatatataaaaaaacggaccgtggtcgccttagtgccaagcagaatgtgagggggtcaaagaaaagaaacatgtgcgtcatgccggcgggctttcgtggagggcgtctg

SEQ ID NO: 363998 - DNA, 466 bp, Homo Sapiens
  misc_feature (432)..(432): n is a, c, g, or t
accgcccgtcgccgccctccgctgcccggcccccggcgcgccgccggctccggctttgtgcggagggagcgagttcgcggcttcggctcccggcgccctcagtggccgcgccgccagcggactgctgcagcggcgtgagcagcgggggtcgcggctgcgggaaacgctccggagcccaggaacatagtccccgctggctagcggcggcagcagcagcagcagcggggcccctgcgcgcggcgcccaccgtctcctcctcgcgccgggctcgcggtgttgcaggcggcagccacgcagactgctctctcatccttttgtccttcagtcagaacgtgaatgtactgctgacgcatactgttctgggagaagattagcgtgatgcagtgctcttatgtattagcgccgctccccctccgtcgcctgcctcgcggngttaacgccggcgccttccagcgccgcgccggcc

SEQ ID NO: 363999 - DNA, 483 bp, Homo Sapiens
  misc_feature (51)..(51): n is a, c, g, or t
ggaccctgggtcctgtgtgtggcagatggtcctccctgcctgccccggccnccgccttccccatgggcctacggccaggactggaggacttgccccagcctaggttggccctctggccaggggaccgtccgggattcccgggcccaggcccactgaggtctgccatggacaagtgtaagatgcccaggacccccttccttggcagtgcccagatgggcccaggcccggcttctcccccagggcggctggcggctgcataaaccctgctcccccagggccctggcaaaggccgggcacccagcccaggagactccacaaagggttaaggggcgcaggcggctgtgcccacagtggggcggagcagccgggctggtgctgggccaggagcacgggcgaaggcgctgcattttaatgaatcgttattgccggcgaggcctttgtctttctttatccggtgcacaataaaagaattaattagccacc

SEQ ID NO: 364000 - DNA, 546 bp, Homo Sapiens
  misc_feature (15)..(15): n is a, c, g, or t
  misc_feature (29)..(29): n is a, c, g, or t
  misc_feature (46)..(46): n is a, c, g, or t
  misc_feature (60)..(60): n is a, c, g, or t
  misc_feature (86)..(86): n is a, c, g, or t
  misc_feature (94)..(94): n is a, c, g, or t
atgaatcttcccggnaggaaaatcagaantggtggttcctacctanaaggccgaatgacncccccgggtaaaagtgccaatgcttnaccttccnatcttctgcaaacctcagtcccctcgtggaaattccccaggagcacaagggcaatctcgacaagctcccacgttccccagtgcccgaccccaagccctggccccatgatcagataaatgccctaagtggggtggcatggacatttgcacacgtcccagactgctttatgttagaagctgagctggcatgccactagctggttttgatgtaaacaacaattttgtaaaaccctggactgaatgggtctgactaacggctggttctgtgaacttgagcctcagcgtcctgtgtcagaagagcacaaaccactttcccagagaggttatgaagacagaaatgaccctgtgacccctttgcaaagtatgaagaacggttcccactcatgcatggagctggatcttctcaagtgggaaacaggcgtggtaaataaatactgttgtttcagctggtgt

SEQ ID NO: 364001 - DNA, 658 bp, Homo Sapiens
caaacacagttaaatactgatggaatcaagtattttgtatgaagttctcatttgttatctctaacgctattttgtgtttggcatatagtattatagtatgtgtatatcactttttgtatagagtaagcaattgaataatttgttagtaaaaataataccacattgactgatactgctatagacatagcttgagttttatgtctcctttttgctcattttctaagacttaggagaaagaataaatctaaaatgaccattaaaacattctccatttcagcttgctgtgtaacttaggaagtataaaactatacttctctttatctgcatgtaagtttgctgttaaaatgtgaatttctaaatgtgtatttggaattatttccgtagtttatttctgcaaactatgtaaatttgttatatgtgtgagtatgtgtacatatgtatattttagagtaatataaaattaaagggaacaatcttgcatagctctttcaccagttttaaattattgatacgttatttttaaggactcttgacaaactaggggcaattttcttatagtggagacccagtgattatcagcagatgaggaaataggttaaaaattgctatatggcaatttgtatataaagtaataggatgtgagaaaaaaacccttctc

SEQ ID NO: 364002 - DNA, 479 bp, Homo Sapiens
  misc_feature (26)..(26): n is a, c, g, or t
  misc_feature (33)..(33): n is a, c, g, or t
  misc_feature (49)..(49): n is a, c, g, or t
ctaaccttcctcggctcttcggcagngaaatcngcagcagaggagatgnagcagcttcgtgcgcattgctccatttgcgcccaacgtgaaaagaactgccaggatgccccaggacaccagctcccctggcttcctgcggtgcttgcacagtcctgaatcagcccgagagctgtggatctgcgtcccctggctgcatagccgactgccggctccatggaggggcctgtgccggagaacgcacatgttgacttatttcttcagtctaggcctttcttggcccccttggttattcattctagatgatacaactcttatttcagttcaaatgtctcacggaagaggcattgaagacagagtggatgcccgtgtttgttggcagtaggtagtatttaccactccggctgtagtaaaagaacaaaaggagaaattacacctatttctcatatttaagggaaaagcaattaaatcaccaaagtcag

SEQ ID NO: 364003 - DNA, 509 bp, Homo Sapiens
cttaattctaaagctctctgtagttcctattttctaagcaatattagctatattggatcttctagatgaagaaagatttgactatgattaaatatgtgcagtgccatcctggaatagattttattcatagattaataaaatatgtgcagcatgatttaggagaaaatattttaggacattaaatttagttacataagctacagtcttttaaattctgtgcaactaaaatctgttttgctttaaaaagaaaaaatgttcaaatttcactgggaaatgtagagtatttgttttccaagacgatcaaaatcatacccaatcatacttttaggaaattttcaaaatactagatatagcctttcaacttaatgacgattgttattgtctaattttcttacctgcacttaccagtattcagaacactctgatttggttacatgtttcttatagtacctccttggttcaaatgtaattcttttctgatattgaataaactgtaatgtcaaggacct

SEQ ID NO: 364004 - DNA, 1017 bp, Homo Sapiens
aggtctgcccaggactcaggtcacgacccccaggagacctggaggactgaatgctgctgcccccaaggaggaggctgccgtcttatcccaggagggagagcaggtgaagtccccaggggaggaagcacctagccccattcctgctgagcaggaggtggcaggtaccccagactgggaggtaaggacagcccggggcttcgaatgaacgtctccagcgtgggtccaactgagcagccatggagcactgcagagtggcaggcagcagggcagggaggcagtgctggaggctggctcaaccccaagaccagcaggccaagctgccatcccaggggagcgaggacgtctgtgcagagctgagaggcagcagccatgtgtgaacagactgggcctcatcctggccccaccgactttgtgtggacagagcctgtttccctgtctgtgcaacacagaacctgcctgatctcactgctggatccctcttcttcctgccaggaaaataaaaaggttcaaaaggaagttgctgcgtatccatctgaggcctctgaggacagcaaagagcaaaggccctgggaccgggtctacgtgcccatgacagagctctggctggactggttctgagcctctaacacccccaagactcagaaccgtgaagaaaatctttccaataaatccaagagttgctgctgctataggccaggctgccacctttcggggcctccgtcttcagacaaacccagcctggcttcatccacactccctgtccccacagctgcaggaacagcacttcctgccaccgagccgtgtgaccacagtggattgtctctggaggggcccaagggggccctggccacccttctgactgactcggtgccaggggacagaccaacgtccctctcgtgctgacagccgggccgcaccctggcatgagggcatttacagaaatgctggcggaactgctgccagggaggctgtagggtcctctggcaaaagaggcctcaggtggctcctcaaaaaaaa

SEQ ID NO: 364005 - DNA, 770 bp, Homo Sapiens
tccgtcaacaagtgttgggtggttcttactagtgtcaggaatgtggggggagggggaactgtagtaagtaaacaggtgttggcaatcatggcagtttacgttaggaggggaaaagagccaagcattaaacaatgtaaataaagtgaatagaatagttccagagggtgacaagtgctatgaagacaaccaaacttagagtgatcaaatagagtaactatggcaaacagcaccgagttttcaagggaagcacctctgagacgatatttgagcagaaggcacctggccaacgatcttgtgaccagagtatcacatgcggaatgaagagcaagaacagagttccaaggtgggcacaagcactgcagaatatatcacaacattaccatttatacgcacaacaaagatagaaactagacaatgacaggcaatgaaagtgtagtcttgctgggtagggaaagagcttctgaatcaaaagcagagtgaaccaagcctggaagaacgaatgaaccctgtcccctgtgggctatgggcatggcctctcctcccttccactggcctcctaagtagaaaagcgctggacaaggttggggaggagtgtgcagaaggattcagtgcctgcatcttttcagctcttcaatcccgactttgggagccaagtagagacaatgtagctaagtttgagcccaaaagcaagccaggaagactcctagagtaatcccagctggatatttgaatagagatggcattcactccaacccctctgctccgcacca

SEQ ID NO: 364006 - DNA, 462 bp, Homo Sapiens
ctggaatctgtgttactttacatggcaaaagagactttgctgacgtgattaatgttaaggaccttgagatggggaggttaccctggatgatctgagtgggcccattataattataagtgtccttagaagtggaagagagagagggaagaggatcagagaaagagatggtgattagggaagcaggggcagagaggtgtaacatagttgactttgaatatggagaaagaaggctaagccaaagaatttgtttggcttctagaattttgaaaagacaaggaaatatattctctcctggagcatccagaaaggtactcagccctggtgataactttgattttaatgcagtaagacctaagtctgagttctaacttgcgaaactataaaatgataaatttgtgttgttcaatgccaccaaatttctggtaatttgagagagcagcaatagaaaacccatacatatac

SEQ ID NO: 364007 - DNA, 479 bp, Homo Sapiens
  misc_feature (388)..(388): n is a, c, g, or t
ggacttttccaattgtcaaataatgggacttgtgaattttaaattatcccaacatatagaataaaagggagggcagccttctgcccacctgtgtcgcctcccactggcagtcacgcccaccagagccaccctggctccctctcctccctgagcacctgctgctgcgattttaaagggaactgtactactcgcagtgataggtttgcagagtgtgtgcttggctgtggcagcctagcttggagaagctgctgttggtgcaagggagatggtctcaagtcagagggaagcagagacgcgcgtctcaagcctgcccttcctagacggccacctgcaggaccccacactcactgcactggcagcgtgcactggcgtatttgtaacaggcttnctcggtgctcctcaccggtgtgctgttttccaaacaccacctttttgcctcaaggtctctgtaaatgaaataaactgtaatttactatttg

SEQ ID NO: 364008 - DNA, 517 bp, Homo Sapiens
agcctctaactagtcacatttactcttaagaaatgaaaggttttccaggagagaactgtgtacaaataaggtgactggagatgtgacctgatgtgtcacgcaggcccttcggggcggcaggcgctatcgtgggcgtggtccttgcaccgtcccatcggccttgccttccagctccgtggcacggtttcctggtctttgggccagtgtgtaccttggagtgacttcctttctcaacttccactgcagtgtgtgtgccttctgctctgagagctgccttgtgacccgtgtgatagaaagcagggagtgagggtccccgcggacctggcccttccctccttcctcccccagaaagaggagttagagcaggggtgcgagagccgttcgctgtgggtttgtctttgaacaaacattaaggtgtcttgtttttgttctgggctgggggttggctgtagtcttaggtaactgaaagttcctactctcccttaaggtattaaatgactctttttccaaagaaaaa

SEQ ID NO: 364009 - DNA, 553 bp, Homo Sapiens
caggcagtgcacttgcccctcctcatgccccttctgacaccagctccctgtggaggcctggtttctgggtaatgcctcccttgggcatcttcatgcatcaaccaaatgggccatcaggtacttcattagtcatggcagaaggaggggaaaagacttgttttccagacagaaaatctactcccctgtccccagccatatccctggataggaagggataggaagagactacttggtgccatggggtaggggtgagggtataagtagatcagagtgggaagacctcagccttgggtggcttgtctctgcttcttgccaggtgggagggcctgtccacaccctggatccccgtaccacagtgccagccatgcccttcccctgggctaccattgtccctttcctcacccagttggtagaggagtcaggaggtgggaggccgtgggctttggttttataatgtaaccactgtgggggtgggggaggatggtgaaccatgtatttcagtgaaatatttaatatatttaaatatcaataaaatcaaactctttgtaaaaaa

SEQ ID NO: 364010 - DNA, 523 bp, Homo Sapiens
  misc_feature (34)..(34): n is a, c, g, or t
  misc_feature (44)..(44): n is a, c, g, or t
  misc_feature (52)..(52): n is a, c, g, or t
aatgtgaaacccctgttttctgggtaaatccctncccttgggcnaccttcangcaatcaaaccaaaagggcccatcaggttacttcaattaatccatggcaaaaaggaagggaaaaaaacttgtttttcccagacagaaaaatctactccccctgtcccccagcccatatcccctggataggaagggataggaagaagactacttggtgcccatggggtaggggtgagggtataagtagatcagagtgggaagacctcagccttgggtggcttgtctctgcttcttgcccaggtgggagggcctgtccacaccctggatccccgtaccacagtgccagccatgcccttcccctgggctaccattgtccctttcctcacccagttggtagaggagtcaggaggtgggaggccgtgggctttggttttataatgtaaccactgtgggggtgggggaggatggtgaaccatgtatttcagtgaaatatttaatatatttaaatatcaataaaatcaaactctttgt

SEQ ID NO: 364011 - DNA, 450 bp, Homo Sapiens
  misc_feature (55)..(55): n is a, c, g, or t
cctttggcctccccctttacccagctcttggggtgtctctgttttttccaatccnccacttcctgccttctcgtggccctgtgtgagcacatgtgtacatctcagccttatctcaaggaggtgacaccttctctccttgtccccatctggccgtctctctgtgcttccctggccaggggcgtgcctgctggtcctatggggggaaggctactccgcatctcagccaccttcctcaggctcactccacctacatccccagtctgccacaccccatccctttgggcctcagccctgtccctttgatgtcctcctttccttcagcccctctgccctgtccctgcacacctccactgcctcccagcagatctgtggagacaaaacaagcaacaccttaaaagagttttatttctgaaaataaattaattttttgtaaataaaatgtttaaaaat

SEQ ID NO: 364012 - DNA, 364 bp, Homo Sapiens
cctttctgaagatttactcattcataaaaagttctccaggtacaaaacaacaacaaaaaaggtattctcaaaactgtagcctggcagagtgagtctgagagatgcggaccagccagccacgcctgggaacgctgttggcctctctgggaatggcatctaccaggaaagcagccagggatgtcagataacagaaaccccagaggtggcatgggaacatttgagggagtaaagaactggcaactcaaggtagggggaaggtacaagggacacggaggcttgaagcaggatagtacaggctacaacacagagtgctgaggaaggggtgggtggggaaggaaagcaggaaacaatgagaacggaggaa

SEQ ID NO: 364013 - DNA, 127 bp, Homo Sapiens
gtgcaactcttctaaaaacattcataatgcagtcatgtttatttttttctgttaaaatgtttttgacagttttaagagcagtcttttggctctgaccatttcttgttctgtttccaataaaatcaat

SEQ ID NO: 364014 - DNA, 1152 bp, Homo Sapiens
aagaatcaacaccaaagatgaatgcaaagaaaaggagggctcaggaagaggccaaagaagcagaaatgagcagaaaggagttggggcttgatgaaggcgtggatagcctgaaggcagccattcagagcagacaaaaggattggcaaaaggaaatggacaattttctggctcagatggaagcaaagtactgcaaatcttccaaaggaggggggaaaaaatctgctctcaagaaaaaaaagaaataatggaatttttctcttcaaaggtccttaggtgtaaattgatgccatcgtaagcaaggtgcaggcaagacttgaaggcaaaagtcaattcagctcttgagaaaaggtgtctttccagcctgaatttttcagattgactagaccaagcagaatctctcaacctgatcttagtatttcctagaaagcacttgacattgtgtgaggtctcacctgaaggaacttggtggtgacatttgggagggtggagggaggcagtgtccttcctgacagcacttgcctccatggatcttctgtacacagaactcttatctaggatgtggttctgttcatgctgctttctgcgatgtgcgtgtctgttagaataggctctctacccagctagaacaccttccagacacttgctggacagctatcttccacatacttcccagtttacatttggtcttaatgatcttgaatagatcctctcttcattttactcagccaggttttgtactgatgtacaggtgttaaattacttcaagcatttttgtaagaggtgtatataattcaataaaaaaggtaaaacatgatgattaagttctgggggctttgtaaatgatcccactaaaatgtgacctaggaaaaatatgaatggtgtttaggatgagagaaaaggggaaaacaatagccctgggtcagctttataatagagagcctgggtttccctaggcatgaaggagatgtatgttgtagtcctgccactgattactgaagtcctgccattaattgctgaatgtcttcagttggggccactgagctttgtcttgaatctgttcccttttataaaagagttactacatcaaaacaaagagtgaaatcccaaatttgtcaaactgtatgtatttaaacatgtcccagttttttgggt

SEQ ID NO: 364015 - DNA, 518 bp, Homo Sapiens
acatcaatgaccatgaggacaaaaacgaagaggcattttgcgtgaaggtcatctaccagtgagggcttgagggtgacgtccttcctgcggcacccagctggggcctgtctgtgcccctcctgccctgcaggctgtcctccccgcctctctgcagcctttcacttcagtgcccaccctggctgacctgtgcacttggctgaggaagcagagaccgagcgctggtcattttgtagtacctgcatccagcttagctgctgctgacacccagcaggcctgggttccgtgagcgcgaactccgtggtggtgggtctggctctggtgctgccatctacgcatgtgggaccctcgttatcgctgttgctcaaaatgtattttatgaatcatcctaaatgagaaaattatgtttttcttactggattttgtacaaacataatctattatttgctatgcaatattttatgctggtattatatctgttttttaaattgttgaacaaaatactaaacttttacacgtct

SEQ ID NO: 364016 - DNA, 684 bp, Homo Sapiens
  misc_feature (546)..(562): n is a, c, g, or t
gcaaaaatatcaatctttaatgggagaattttcaatttgccaattttttccttgaatgggtttaagtatgctacaatatacagttcaggcaaaatttaagatgtaattatcttcaatacttaagtgtgcttgctttctagtgccttggttttctttcttgatgctggaaaaataaacaaaccggtattgagtgtttaggcgagtggaaagtggctacaatccaaaattttaaatttaactctgcctcggccattcaaaagtctaataacaaaaaatgtaaacctaatttggcagtttgttaggttagacaactgacagcctcatttcattcctacaagttggttttcagtaatctcttccttccccccagtaaggctggaagaggctcttggcaaacttcttagtgcaagcaatggttagattaatttgtgaggcagctctttaagacgttcagaggtaagaaatactggatttataaagcaaatggctgtttgggggattccaaggatttacctaattgtccaattctacgtgctctctataccnnnnnnnnnnnnnnnnngctatccacctttccatgtgggtcaaactaaaattacaaatgtcccctcactgcagatcaaatgtaaagcttccagttaaggagctaaatgaggtcctcagctgaatgaggaaccctgtacc

SEQ ID NO: 364017 - DNA, 698 bp, Homo Sapiens
cgatgatcgcagcactggtgtgcataccacctctttgcagtatgttggttgtgctcatcctcttcttagtgctgggacggcggggctctgggtgcgagtacctcctgcatatgaaccgaggggaggaggacaagctgagcacgtgtgacattgccgtctactcacattcctatcctggaaacatactgctgcactgacttttctccgtgtgaccccacaattgacatggctcctccatcccagcgctggaagggccagtgggaagaggaaatagatgtctgcactcctggctgcagctggacaacagaagccccatgccgcctgtccagttcggaggagaactagctgctgccttgccttccgggacctcgtttgctgaggagggacttacagactccactggtgttttgctgttgctcattccatgcatctttggcagctcttttcttctgctcagacccttccccgtgctcagacagtgcaccgctgtcccatctaaagaaacctgtcaggaatacgagcttctgggtatgtttcgtttcccattgctgtagcatttcttatcccctgagagctgatgattattgaggacagaaggctcagaaacagtttgtgacagaaaatgcagtgtttcatttttcagggataaatgctaagataaaacattgcttatccaggtccatttgagtggtaacgat

SEQ ID NO: 364018 - DNA, 359 bp, Homo Sapiens; identical to SEQ ID NO: 70911

SEQ ID NO: 364019 - DNA, 2246 bp, Homo Sapiens
ctgccggcccaggcgcgatgaggcggctgcccgctgggtggcgccgatttcccggggaggtcccttctgggcccccggcggaggtgggagagagtcaggcaggagccgaggccggggagccctcttcgtcagctggtgctcactgcgccgcgccagcgccagccgggactcacccgcagctccatgcttgtgcccggttcgactcgtccatcctccaagaagaggcagcccatgaggctcccagtccccactgagtgccaccctgaaggatgtcccagctctcctccaccctgaagcgctacacagaatcggcccgctacacagatgcccactatgccaagtcgggctatggtgcctacaccccatcctcctatggggccaatctggctgcctccttactggagaaggagaaacttggtttcaagccggtccccaccagcagcttcctcacccgtccccgtacctatggcccctcctccctcctggactatgaccggggccgccccctgctgagacccgacatcactgggggtggtaagcgggcagagagccagacccggggtactgagcggcctttaggcagtggcctcagcgggggcagcggattcccttatggagtgaccaacaactgcctcagctacctgcccatcaatgcctatgaccagggggtgaccctaacccagaagctggacagccaatcagacctggcccgggatttctccagcctccggacctcagatagctaccggatagaccccaggaacctgggccgcagccccatgctggcccggacgcgcaaggagctctgcaccctgcaggggctctaccagacagccagctgccctgaatacctggtcgactacctggagaactatggtcgcaagggcagtgcatctcaggtgccctcccaggcccctccctcacgagtccctgaaatcatcagcccaacctaccgacccattggccgctacacgctgtggggaaacgggaaagggtcaggccccctggggcccagccgctccagctccccgggaaagagacggcatgaattctaagagtgcccagggtctggctggtcttcgaaaccttgcgaacacgtgcttcatgaactcaattctgcagtgcctgagcaacactcgggagttgagagattactgcctccagaggctctacatgcgggacctgcaccacggcagcaatgcacacacagccctcgtggaagagtttgcaaaactaattcagaccatatggacttcatcccccaatgatgtggtgagcccatctgagttcaagacccagatccagagatatgcaccgcgctttgttggctataagtaagggccttgcagacatgtcctctcaggtgggtggcagtaggagcaggttcttaggacaagaggtgtagctcaccctccttcctttgggttcagtcagcaggatgctcaggagttccttcgctttcttctggatgggctccataacgaggtgaaccgagtgacactgagacctaagtccaaccctgagaacctcgatcatcttcctgatgacgagaaaggccgacagatgtggagaaaatatctagaacgggaagacagtaggatcggggatctcttagtagggcagcctaaagagctcgctgacgtgtacacgatcgtggttactgttctacggtcttcgaccccttctgggacctctcactgcccattgctaagcgaggttatcctgaggtgacattaatggactgcatgaggctcttcaccaaagaggatgtgcttgatggagatgaaaagccaacatgctgtcgctgccgaggcagaaaacggtgtataaagaagttctccatccagaggttcccaaagatcttggtgctccatctgaagcggttctcagaatccaggatccgaaccagcaagctcacaacatttgtgaacttccccctaagagacctggacttaagagaatttgcctcagaaaacaccaaccatgctgtttacaacctgtacgctgtgtccaatcactccggaaccaccatgggtggccactatacagcctactgtcgcagtccagggacaggagaatggcacactttcaacgactccagcgtcactcccatgtcctccagccaagtgcgcaccagcgacgcctacctgctcttctacgaactggccagcccgccctcccgaatgtagcgccaggagccacgtcccttctcccttccccgtggtggccccgctccctaaatttat

SEQ ID NO: 364020 - DNA, 1131 bp, Homo Sapiens
  misc_feature (51)..(51): n is a, c, g, or t
  misc_feature (76)..(76): n is a, c, g, or t
tgctgtcgctgccgaggcagaaaacggtgtataaagaagttctccatccanaggttcccaaagatcttggtgctcngtatccttaagatccatcagggctgggacatgactttcaagggtgactgatgacaaggggcccataggtgaggggaacagtcggaagaaacggaccttgtaggctttccttttgttgtctgcccttctgcattggtttgactatccttgactcacgtcaatgccagatctgaagcggttctcagaatccaggatccgaaccagcaagctcacaacatttgtgaacttccccctaagagacctggacttaagagaatttgcctcagaaaacaccaaccatgctgtttacaacctgtacgctgtgtccaatcactccggaaccaccatgggtggccactatacagcctactgtcgcagtccagggacaggagaatggcacactttcaacgactccagcgtcactcccatgtcctccagccaagtgcgcaccagcgacgcctacctgctcttctacgaactggccagcccgccctcccgaatgtagcgccaggagccacgtcccttctcccttccccgtggtggccccgctccctaaattttttaaaaagactaatataccattactacaactactacactcaaacctgacaagagaaaatacaaacctgaagctgccgagcaggagtggatgcagcctgatcagggtctggagcaaggagccgggctttcctgagctgtggcccggcagggaagatcgcctggacgtggagccagcatcgccccgtgccctcggcgtttgcatttgtaaacttgtggtcttcctatgtgtcagaaacaactgtgtcttgggggggaagaccctcgctgcgccgcttcccgccgcagcgcccgcgcctccgaggggacagcgccctctggagctcgctgggagcatcaccgcctggacgcccgcgccgcggaggagccggcgcccatctccacccgcacggctcgccggtccagagccatgagccaagagccctcttacacgctgctaactccaggggacagacgaagggacatctatggaaaacgctggtttgggttttaaaataaccacagttttttaatttcaca

SEQ ID NO: 364021 - DNA, 496 bp, Homo Sapiens
tgccaactgtcgacagatgatccaaaagatttccttctaagcatctaacactgactgaggtcactgaagaccacactggcaggaatttcagggactgatgacatctccttcccttgtactcatgtttgagagagtaggtctgattcccttactgcaggcccccatgaggtctgatacggttcggctctgtgtccccacgcaaatctcatctctaattgttatccccatgtgtcaagggagggacctggtgggaagtgcttgcatcatggggacggttttcccctatgctgttctcctgatactgaattctcccgagagctgatggttttaaaagtgtaacagttcccccttcacttgcgtgcttgcttgttctctcttgccaccttgtgaagaaggtacctacttcccctttgccttccgccataattgtaagtttcttgaggcctccccagccacacagaactgagtcaattaaacctcttttgtttgtaaaaaa

SEQ ID NO: 364022 - DNA, 484 bp, Homo Sapiens
gccggccgctcgttctccagccgtcttcaggacagccgcagcctggacgggctgagcgaggcgtgcggtggcgccgggtcctcagggagtgccgagtccggcgcgggcggcggacgccgcgccaccatctccagtcccctggagctcgaaggcacagtgagccgccacggcgaccttacccactttgtcgccaacaacctgcaactcaagatccgtctgagcggcgcgcctccacccccgccttctgcccctgcgcggccctgcccagcgcctgcacccacacccacaccggccattcccccaatcgaccccgaggtgctgcgggatctggagcggttgagtcgggagctgggaggccgggtggaccgtctgcttcgcggtctgggtggcgcggtgcaggagctgacggcgctgagcgtgggttgcatccagacctaccgcgatgctgtggactccttaggtgaagccgtggacatgagcatca

SEQ ID NO: 364023 - DNA, 403 bp, Homo Sapiens
gtggaggacttgtctgactcactctggcccaggcagcagccggagtcggtgtcggagagctcggagtcccgctccttggtgctgtgggggagcacgaggctctggcggaccaggagctggatggtgtcattcaggcggacctcgtagtcgaagagggtatggccgtcctccatctgtttgcccctgtagaacagcctctgcaggcctggctccacgtggaacagctcctggatcttccgcctcagctcctccaccttggtcagcctggacagcgagtccaccgtgtgggtctgcctcccgtccatggtccgaacctggatccacatggtgtcggcgctgaggggagggacagcaaaaacccccatcagttttaccagcacctctgagccatgccatgctctaa

SEQ ID NO: 364024 - DNA, 527 bp, Homo Sapiens
atctataaatcaagaaaatggcactgcaaaccctatcaagaacggtaaaacaagtccagcatctaaagatcagcggactggaaagaaaacctcagtacagggtcaagtgcaaaaggggaatgatgaatctgaaagtgattttgaatcagatcccccttctcctaagagcagtgaagaggaagagcaagatgatgaagaagttcttcagggggaacaaggagattttaatgatgatgatactgaaccagaaaatctgggtcataggcctctcctcatggattctgaagatgaggaagaagaggagaaacatagctctgattctgattatgagcaggctaaagcaaagtacagtgacatgagctctgtctacagagacagatctggcagtggaccaacccaagatcttaatacaatactcctcacctcagcccaattatcctctgatgttgcagtggagactcccaaacaggagtttgatgtatttggcgctgtccccttctttgcagtgcgtgctcaacagccccagc

SEQ ID NO: 364025 - DNA, 577 bp, Homo Sapiens
  misc_feature (68)..(68): n is a, c, g, or t
cttccacaccaataaatgaaggacagactgtgttagacaaggtggctgagcagtgtgaacctgctganagtcagccagaagcactttctgagaaggaagatgtttgcaaggtaactctagtaagtggaagggatttttagatgtgctttttggagattaaatcatttgttttaaaaaatactttcattgatgcataataatttatacagatttaaaaacatacgcattttgccatttctgtgtagcattaagtaccttgaagttgaacaattattaatataatttggaatttctccaaggcaattatggtagaataagttgatacttcaatacagttaagcatgaaagttttcatcttacatctttatttttgagtccttatcacttcaaaattctgttatgcttattagtatgtcaatttgaaaggaatattttcttacattaacatgtatcttcacctcctttgcagatagatgtgccaaaaaaactaaatgttatggtttttcttgtatcagaatttgtttttacatgtttacattatttgtagcaaatattaaatgataatttaagattttaa

SEQ ID NO: 364026 - DNA, 527 bp, Homo Sapiens
ctttaagatgtcgatgccagatgggctggtcctcttttgtattattcccccagaattttcctggctctctttgcttatttcattgttcagtgaactgtagaatcgacttatccgtttaacctaaacaattcagttggtgtttttactggaactgcattcgctttatagatatactcgggaacagatgatgtcttcatgatgttgaatcttctcatccaaaaacacagccatcctgccttttgttcacagggcctgttgtggccctcagtacagtgtggggatggtctcttcctacagacccactcggttctccttcatccctacgtatgtcctcttttttgttgctattataagtgaggtgttttctctcattacagcttctacctcattattttcacactggccgtgaccgctgtgtatgacttttgtacccagttttctttctcaattatcttctttgtggttttcttggattttccaggtttacagtgacatcacctgcaaataaacacttcaccttcggcaaa

SEQ ID NO: 364027 - DNA, 437 bp, Homo Sapiens
cagggacacgaggcctgactccttggcgcccccgcatggcccgggactccctataccagttcccaggcgatcctggagaggtttcatttcccacactacagccatcgtgatcctaaggcaaatactagaacagacacttctctacctaaatcctcagtgcttaccccagaattaaattgaaatcggccccttgccgcagccttctgggccagatctagggatcttccctccctccctgcactctagctgcaggagcttcctggtgtctgcccagagcttgcccctaaactgagtggctcatctttcccatccctgctgaagtcacctcctcttagaggcctcctcagagtggttcctgttgttctttttcagcaccctctttacttcctgctcagttctgataactatttataattatttatttgttggttaaaaaa

SEQ ID NO: 364028 - DNA, 495 bp, Homo Sapiens
  misc_feature (37)..(37): n is a, c, g, or t
taggtgcgaggcctgggtggcgaattcggcacgaggnattaatctaaagaaagcacattttaccattgctgttgggaggaagcagaggcagatgggaaagcagagagaggagcgcgcttcctttcctccccgctgccgcccaccctggggagagacttttgcggggagggaaggcggagctgaggacagccagctccgccctcccaaggctgtgcgttcctgagggccaggtcgggggcaggcatggaggggaggaaaggcgtccctcttggccctccccagagtggctttcctggcaccctggcctgggtgtctggttctgttttcttttcttccccttgtgtttccagtcacctaacttcccttcctcaggctcccccggcccaccctgctcagtgaccccacaggaagcttacacattttctcagaggcctttgtgctcccacctcttctaccctccccctcttctttcccattttaaaaaagaaaagaagg

SEQ ID NO: 364029 - DNA, 419 bp, Homo Sapiens
cggggattgtggggggcagtagctggctgtttcgtggcatttctgtggctctgcagtgttcctccaccccaggaccaatatgttcaggccacaccgatggcctgaaccccatgggtagagtcacttaggggccacttcctaagttgctgtccagcctcagtgaccccctagtgcttcctggagctgaggctgtgggcggctgtcccagcaaccaagcgaggggttgccccagttgctcatacaaacagatcagcatgaggacagaaggcaggagactttggtcagttacctgggaattctgggctgccaggaaacgatttgggcctctgtcagtttcttttccatgtatgaggagggggaaatttgtatattagaaacttattcatcccactcaggacaataaaaacgaatgtacaaaa

SEQ ID NO: 364030 - DNA, 1132 bp, Homo Sapiens
aaatctttgttgtggtttgagcatctttgctgcttttggattgagatggcgaatcaaggcttcacttcctctctcttctgtctttagaaagctgtgatcgtgcgtgcaattatttgaaaggcaacatagtcaattaagaaacctgtagttgttaaggaagaaattgttggcaagatatccatactgcccatatctcgttggtgcaataattaaatagcaaaggaaatctgtattggcaactattataattcaataattcttttgtttactgcccttttctgttcaagaattttctggaaattactccctttcacatggttgaactcttaagttgaccagttctcatagctctatcactagaatggtttgcaggataccccaaacatactatggataaaatccaaattgtgctacttttggacccatgtaatttacctaaaagttgttaattgctgacagagtactgccttgaattttgggtttaaaacctctctagtttccaatgacaagtaacaactcaaataattccatacttgtttgaggaagaggccataatccttctgaattgttggcactaagtaatgggatttggcccagtaagtatgacggtcgtgtcgcctaaccaacgcagagcagtgctttttgtgtggctgaagcgatgtgctgacgaaaaaaggaaaattctaggacaatcgttggctaaaaatcaccttaggatgaaaaatttgaggcaaatttttttaaatgacagaaaaagataatcatctcacttgcttgaaacaggagccagcatgatctctggaagcatcaactatccctcgtcgtgattgttgaaagctctttcactgttttgcattctagtttgaatagtttgtattgaaattggattcctatcttgtgtatgtttttggtgcgtaaaagggaaaaattggtgtcattacttttgaaatttgcaggacgaagggcatgcttttggtttgctgtaagattgtattctgtatatatgttttcatgtaaataaatgaaaatctatatcagagttatattttaatttttattctaaatgaaaaaaaccctttttacttcaaaaaaattgtaagccacattgttaataaagtaaaaataaattcta

SEQ ID NO: 364031 - DNA, 502 bp, Homo Sapiens
cagcatttggggttgggttggccctactccagcctggagctccctgagggagcctgcactccctgctcccaatccccgctactggtgcggggatgcagcctggagctggcgtccttgttctgggcctgctgctgccgccaccccaggaggccccaggcctgtcctgaattgacatcagtgcttccctgaactgcctcccccacccctggcattatcccaggaaacttatgttttctagaagctaagcagctgctgggactcagggactggtgcaggtaggctgagtggcagctcagtcctagaaggtctctgaagatctggactgaggaccctgctactccccaagccagagcccatcagccaggcctgctgtgagccacctgcctgtggagtgctgagctcaaccaaaggctggcaagctctgggcctcatttaagggattctgatgagccgatgggccctggaggcagcccattaaagcatctggctcgtttttggaaaa

SEQ ID NO: 364032 - DNA, 1004 bp, Homo Sapiens
cggcagtactataagccggtcctaaggtagcgaggcctgggtggcgaattcggcacgaggccaccccagcctggtgtggacccatcggcgggagagagtgccacgcctccacagcttgccccaagcgctctgcctgcccgtccactcatctgcccatggggaagtcggctcactgggacaagggccactgcgctggtctgtgtctgggcctgtcccatggctggggcagtgagggggcccagtcagcctctttggggcaccctctctcagccaggcttggcccactgccatcacccagcaccccagatcaccgccaggacagcccccaatggtccccttacggacaggtcccagagatggacagaggcacccagggcccccaccgtccttctgacacagcctgtgggctcccggaccgagtgtcccccgccaggctactcctaactaacgcgttgcctttcacggaccccgctggaaagcttgtagcttggcaaggctgatgcttctgccctggcctgctctgggtggtggtggactaggtggacagacggccagccagccagctgtggccgggggcccggctccatgtgtcccgtgtctgtgtgctgtgctgccgcgccgtgtctgatgtgtcagtgctccggccgccgctgtccctttcatcaaagccttaaccttgtgctttatgctcttgtgggaaggcgacgggggggcaggcggggagcaggccacgggggtgatgctgccacagggggctggtgacacccagagccccctccccagccctcaggccctccctgccaaactggagaaccccaccccaaggcatgccacgtccgcagccccggcctggctgcggtgctcgcgccgtgggaaagcacactggggaggggtcagtgcttcccttggtgtcagggacctgagagtaagcacatgacagcgtctgcttgcgttgtgtctgttttatgtttttatatctacatctatatatctataattttatt

SEQ ID NO: 364033 - DNA, 1371 bp, Homo Sapiens
  misc_feature (1177)..(1177): n is a, c, g, or t
ggtccggaatcctccggatgccgcccgcactttcctcccgtgggacacagcggcctttgtgcggccctgcggagttgggctggcgccttctgggccgcccccgccccctccggagtccgcaccagataaacagcggcgccctccccagctcccagccccggggtccgggcagcccggcgagggctgggacccctgtagtcacctgggttggggccgggccgtcgggattggcccgcgtggggagcgaggcgagcggggtggggggtttcttcttatgcggcttgaacactttcgcagtatcgtgcgccggccccccgttgcgattctttggtgggacttctagcaatatgtctatatggcaccctctgcgcgtatacgctttacgacttggtctcgttttcttttgcgaaacgtgtaaggcgtcgcccaataccttctctccttgccttgtgctacctcgttcatgccggtaatttagctctcacccctgcatggccgaaccatgcattatccgtactactgctgaccatgtcttctaccagatctttatgttctactaagttcccctaagccacattcgtgactctcccgctcgcatattcgccctgatctacccgctcgcctctcttatcctcccctcatcctcttccacgtcttgtgcctagacgcccatttctcttgtcccttaccttttttgtccactagtacccgctcattgtcgcccgacttgctctcaaaatattagtccacgcaatcgccttctttgcacttactcttcccccaccgcgtcttcttatgcacctttatctgctcttttctcctccccaattcgcgcatatgttcgtcattaccgttacttattttgctcactaccctcatcgcctttattctttgccaaatgattcccctctcatcccgttatcttttgatcactcaccccccacacctgtgcactcgcccactactcatagtgagggctctctccccgacgcaattcgtatacaccgacctatgataacgccaattttcacgtactttttcgaaggggagacgcctatatatctcgacattgttggcacatctctgtttcatattgcaacacacagtctccaccgttatttctgtctccgcctgtgtatactcctctctttatacgtgtttctatgtgacgacactntctatggacgtcatatattgtactcccacaccactccggtaagtcttctactgctgccctctcaccgcctctgtttcacagttttgtaccgcacgtgcccacgtgtcttatatagaacagttagttgaccgcacacactcccacatcattgggacctcaccctcccaccgaggctctctacagtgcttgttaca

SEQ ID NO: 364034 - DNA, 472 bp, Homo Sapiens
agacatcggactttgatttgatgctgaaacaagttaagtctttgggaaactattgagaagggatggttgtattttgcaaagtgagaagaacataagatttggggccccaggggaagaatgatatagtttggtttggatgtttgtcccctccaaatgtcatgttgaaatatgatccccaatgttggaagtggggcctagtgggaagtgtctgggtcatggggacagatccctcatgaatgtcttagtgccctccttgtggtaatgagtgagttcttgcaaaatctggttgtttacaaagggtgtggcacctccccactctctctctgtcttgctacatggtatgctggctgcctcttcactttccaccatgattgtaaggttcctgaggtcctcaccagaagccaagcagatgttggtgccatgtctgtaatagcctgaagaactgtgagccaaataaacctcttttctttat

SEQ ID NO: 364035 - DNA, 505 bp, Homo Sapiens
gagcttaatcgccttcgggagactgagatcttgttccactccagcttgcttcgtttacaggtagaggagctactaaaggaagtaaggctgtcagagaagaagaaggatcggattgatgccttcctacgggaggtcaaccagcgggttgtgagggtgccctcagtccctgagacagagctcactgaccaggcatggctcccagctggggttcgagtgcccctccaccaagtgccctatgccgtgaagggctgtttccgcttcctgcccccagcccaggttactgttgtgggcagctaccttctgggcacctgcatccgaccagacatcaatgtggatgtggcactgaccatgcccagggaaatcctacaggacaaggacgggctgaaccagcgctacttccgcaagcgtgccctctacctggcccacttggctcaccacctggcccaggaccccctctttggcagtgtttgcttctcctacacaaatggctgccacctgaaaccct

SEQ ID NO: 364036 - DNA, 533 bp, Homo Sapiens
gccctgcagaactgctcacaggaagaagggcccagatgagactttgggcttggacttttgagttaatgctggaatgaggggcttccccctttgctgggcactcattcttctccttcctgctgccatgtgaagaaggatgtgtttgcttctccctctgccatgattgtgctgctgctgagccaggagaatagaagcgtccaagtcagtgccttcagagatccagctgacttcaagagggctgaggtccacccagggccaccagcatcaggaaggagacagctttgcagtgactccacccgctatgtgctgggaggcattggctgactccaaagcacacagcaatttcggcttggcccacggcagcaaacagctgtgccaatgcccatcctaacgagaataaggcaaggcttagcctgtaatccacccctctgcagaaaccaatcattcctcctcattaccgagtgaagaaatgcctctcaaggctccttttcctccttacaaacaaaataaaacaaatccttcctatggaaaaa

SEQ ID NO: 364037 - DNA, 492 bp, Homo Sapiens
atagcgatggctctggccaatgtggttccttgttctcagtgggatgaactagctcgagttctggttactctgtttgattctcggcatatactataccaaatgctctggaacatgatttctaaagaagtagaattggcagactaccatgcagactctcttccgaggaaacagcttggccagtaaaataatgacattctgtttcaaggtatatggtgctacctatctacaaaaactcctggatcctttatgacgaattgtgatcacatcctctgattggcaacatgttagctttgaagtggatcctaccaggttagaaccatcagagagccttgaggaaaaccagcggaacctccttcagatgactgaaaagttcttccaggccatcatcagttcatcctcagaattcccccctcaacttcaaagtgtgtgccactgtttatacacaggcaaattaccactcccgaatgaataaaggtaaagaaaaaagaaaaa

SEQ ID NO: 364038 - DNA, 539 bp, Homo Sapiens
tgtagaggtggggtcttgctatgttgcccagctgagaattcagtttctaacaagctcccaggtgatgctgctgctggtggagcataccaagaaccagaaaaaaagcaagcttgttgccaaagaaccctggggtttcctctttcttcccgtatagcttggaaatggtctctgtggggaaccctaaaattcaggaagaagactgagagcctccagagttctggctccggacacacctacctttccagcctgcattcaagccacaagggatggcaaggagtcaagtgaccaatagcggcttgcttccccttgaaccaacttgctgctaaagtgttgacttaggtctatttctgaattcaatctgggagccaccatctgacctcccaagcatttggtgaccaatgaatgaataactccaatgtcacacatcctcagagagagctctctggaagaaacaaacaataaggccaaaacttacttgctccaagttgacgaccggacagactgaagttcttcctcacttcaaagaacatatatccttc

SEQ ID NO: 364039 - DNA, 573 bp, Homo Sapiens
ggccgccggtgtcggaccgcgcgcggccagggatgtttggctgcgtacttgcatgagctttccacccacttgagcccagtcctccgggccgttcctcgcccccacccctgtctggcgtgaccccagcctcagcctctttctaagggacttcctcagcacatttgtatttttatatccgactctttgtttactggctctgctcatggttcctgccctcccctcagtctcggccacgctcttctgcgcctggcagataggatgggtgttgaggctgggatgagacaagcccccgacacggttaccaaccacatggccagtctgcccaggcctgaccccaggaggctttctggcagaccccttctccccaaggtatcatcactttccaagggcccagatccgattttaccttggacccctgcgtcttgcccctgggaacccaaatggggactgctctgaacctttggatgacatctgtggccccggagatgttctcaacccaggggtgcccttcgtaaatgttcctccatcctcactgtaccaggagtgtgtgaataaacacagaccccctctgtg

SEQ ID NO: 364040 - DNA, 483 bp, Homo Sapiens
ttatgtatttaattttgctgtactagcgacacccacaaccctccacaaccatgtcctgatagttctttaatacaaccttttcattctcgtcaaggtacagcatcgagatagcactgagttctgtcgggacacagcatgccttaggaatcttagagttaacagagttgaccaacgtctgaacaatggcatgattagtggagttcagatgatcagccagaggaaaagggcattctccgtggcagtaaaaagcgtgataccccgggggagccacaatccagtcatttccaccccacgtcactgaagtccacgtacaaaaggtgtctcttacagctggacttaaagcgtttcccgctggttgtgtttggcttgacgtttttctcttttggggagaggatgcccttttccatcatggacaaaagttactagcaatggccttattggacccagctggttaattctgtgcaaagactggctatctaacat

SEQ ID NO: 364041 - DNA, 340 bp, Homo Sapiens
aggtggaagttcagcccttcatctctcatttcatttttagtttatgaaattaacttttgtctactgttcctcaaactagttctttgccaaaggaaaaagccgcctaacttttttcaatttaccagtccttagccccacccacctcctttccttccaccctgtgttctgcaacctttctttgatttttctttatttcaccttttataattttgttttcatttctgaccctctccccataacacacaagaccctttagatgagcctaaataaatacagaaatagacttaaagcattaaatgcttttttaagaaaaagttttgatgtgtcatcctccatagtt

SEQ ID NO: 364042 - DNA, 515 bp, Homo Sapiens
tatattctgccccatttaactttttgggaacaagagtccctccatccagataaagtagggcaggttcttaactggccatgtcaagtacagccactgttgatgccaccaaggacgttctgatgttgccttgcttctgtgaggaggcagagctatgttgtcctcagtggctctgcctgccgtgtcagccacccggaaggtttggagttatgcaacgagtcttcagttttccgtgtttctcctatcttgtctcttgttttgtgtacttaagcctcttgagcttgtccttgtagaatagtgtgggaccactgactaaaggaacagaacgttctggatatctccttcctccagctttagccacagggctgtgcacagctctgttgatttccagccaggcgtgccagcggcactggacagtcatctgcagcccttcatatatcgtaccttggagttgttttccttggaccctcctaccttccaatatcagcttttcaataaatgaaaatggaatccttcca

SEQ ID NO: 364043 - DNA, 598 bp, Homo Sapiens
gaggcatccagacatctgaagaaagctgttgagctcgtgtgcacagccccacagtgggtccctgtcccctgggtctattaggcctctccccagatatctgagcataactgggagcacctcaattgtggaaaagcctctttgttatcggccttgtgtcagcaggtcatggtccctagagactacctagttgtagtgtgacctacatttataattattgtcatgtccgaatagataggaggagaaaaacaattacacactaatttaaagagacagtatcttttttaatcagttctcctaaactttaataaaatgtatctttaaatgtatgtattattcaatcctttggaatgttatatttttggaaatcatagctttttatttccaaggcccctaaaaactgcacaaaatagatgctgctttctataatctattttaataataataaacaatgattctgttaccttgactgggggtggaacactacattctttttagagtctgattttatggattggaatattgggatatctttctttcctttatttatttgaaataattagtgtagtgattacaaaacagtcataaatttttaaaggcc

SEQ ID NO: 364044 - DNA, 272 bp, Homo Sapiens
aatacaaggtcaaatcattcctggattcatctggagttgcttaaaagttaaatcattggaatttttgatgataccttttctatatggattacaatttgatcgctgggaattctccaccttaaagaagactcttttgctatctggaaacccatgtccacctctgacttccactcaaaattgctttcctcacaagtctgactgcgagagttgtgaaaaattgggatgtgcttctgaggtgggctgtggaatgccatacagaatctcgaagtctt

SEQ ID NO: 364045 - DNA, 429 bp, Homo Sapiens
gggtctgggacacaataatccggccgaaggcgagcggccacactggactaggaaacgaggcgccgggctgtaaggtgggcccgcgccttttctcctgcctggcactgattcccgcatttttcgctcgcgccctgcgctgcgcgctgcctgtgcgcctccctgggcgcgcgggcgggagagtcgggcgagcgccaagacggctgggcccgactcccactggcgccccggctccacctggcgctggggctccggtccgcagtggctccggcaggagggagagaacgaggagggaggcttggaaacgccgggagtagcggtgaggccgacgccggggaagcgaatcgatactgcgttactggacgcccgtgcctcatgaggatggtcgattccctcattcgttattcacgatttattagggatggcggccgc

SEQ ID NO: 364046 - DNA, 458 bp, Homo Sapiens
ggcactcagaacattcctgctggcaagccatcactccagacctcttcagctcggatgcccggcagtgtcatacccccgcccctggtccgaggtgggcagcaggcgtcctcaaagctggggccacaggcgagctcacaggtcgtcatgcccccactcgtcaggggggctcagcaaatccacagcattaggcaacattccagcacagggccaccgcccctcctcctggccccccgggcgtcggtgcccagtgtgcagattcagggacagaggatcatccagcagggcctcatccgcgtcgccaatgttcccaacaccagcctgctcgtcaacatcccacagcccaccccagcatcactgaaggggacaacagccacctccgctcaggccaactccacccccactagtgtggcctctgtggtcacctctgccgagtctccagcaagccgacaggcggccgc

SEQ ID NO: 364047 - DNA, 586 bp, Homo Sapiens
ggatttcttcctttgattctgtcaatgtttgtttcatatattttgggctctgatgtttggtgcatatatattacatcttggtgaattttcaaactttttaaatttcaacatgaagatgaaattataggatgtctgggatttcctttgaatccgtggggctgggagtaactataaatgaaacaagattggccgggaatttgaggctgcaaggataggtacacacaggggagtgaagcagggcttggagcagatggtaaagattgttggcttttccagccatggggctctcttgccacttggcagtagtggcatgaagccgccaccagggggccacgcaccagtgcatgtggctgtgttccaaactttttggacaataaaatctgaatttcacatacttttcttatgtcattagatattacccttttacatcttttcactatttaaaaatgtaaaaatcattcttaacatttgggctgtgcaaaaacagctggtgggcccaattttggcctgtatttcacttgccaacccgatttatacttttgtatctatttgacattttccattaaaagttatataacactaaaaa

SEQ ID NO: 364048 - DNA, 901 bp, Homo Sapiens
cccggtgctggcggcgtcccgtttccggcgcggcttcgtccttccttggggactgacctaagccgaatggggccccaggtaagcctcacgcgcccccgtccccggcaccttggggcggattggaaggacttacaatctgggcacagaggcaacgaaggtctgcccgtgttccggatgatctgtttgttctcccccgcctctggcattttggagaggaagtgttcaatgaaatcgtgcggggtcaattgcggccaggttccacttgagcttgttcaccaggagcagctccatttgcagcagctcctcgggccggatggagttgtcggtgtagatgcacagcttctcggccgtcagggggatggtctccttcatcttagaggccacgaacatgcaagtggcccccagcagctgcaggcggctctttttcacgggctccagcgacaggaagcggtccaggtagttcatggccagcgggaagacctcctcctcgcacttctgttcctcgcagacctccagcatccaggtggcgacgatcttccgcatggacggcaggacctccttctgcacacatttgaagtaggacaccgagggcgcgcaggtctcctccgccttcagcatggcccgcagcacccggtcgttgaggaggttggcatcggggtacgcgcggcggatggtttccacttcgcagcacaggagctggtgttccatggctggggctcttcctgggcagctggggagggctgtgggtcctggctgggtccgcgctccggctctcgcttctgctgccccgcgctccctcgcgctcttctgcccctcgccggagcgtgcggactctgatgtctcgctgctactgcgccctcgtgccgattaacacccaggcctcgtacctagcctatgttgt

SEQ ID NO: 364049 - DNA, 1755 bp, Homo Sapiens
ggcctgggtggcgaattcggcacgaggcggcgcagtagcagcgagcagcagagtccgcacgctccggcgaggggcagaagagcgcgagggagcgcggggcagcagaagcgagagccgagcgcggacccagccaggacccacagccctccccagctgcccaggaagagccccagccatggaacaccagctcctgtgctgcgaagtggaaaccatccgccgcgcgtaccccgatgccaacctcctcaacgaccgggtgctgcgggccatgctgaaggcggaggagacctgcgcgccctcggtgtcctacttcaaatgtgtgcagaaggaggtcctgccgtccatgcggaagatcgtcgccacctggatgctggaggtctgcgaggaacagaagtgcgaggaggaggtcttcccgctggccatgaactacctggaccgcttcctgtcgctggagcccgtgaaaaagagccgcctgcagctgctgggggccacttgcatgttcgtggcctctaagatgaaggagaccatccccctgacggccgagaagctgtgcatctacaccgacaactccatccggcccgaggagctgctgcaaatggagctgctcctggtgaacaagctcaagtggaacctggccgcaatgaccccgcacgatttcattgaacacttcctctccaaaatgccagaggcggaggagaacaaacagatcatccgcaaacacgcgcagaccttcgttgccctctgtgccacagatgtgaagttcatttccaatccgccctccatggtggcagcggggaagcgtggtggccgcagtgcaaggcctgaacctgaggagccccaacaacttcctgtcctactaccgcctcacacgcttcctctccagagtgatcaagtgtgacccggactgcctccgggcctgccaggagcagatcgaagccctgctggagtcaagcctgcgccaggcccagcagaacatggaccccaaggccgccgaggaagaagaaaaagaggagaaggaggtggacctggcttgcacacccaccgacgtgcgggacgtggacatctgagggcgccaggcaggcgggcgccaccgccacccgcagcgagggcggagccggccccaggtgctccactgacagtccctcctctccggagcattttgataccagaagggaaagcttcattctccttgttgttggttgttttttcctttgctctttcccccttccatctctgacttaagcaaaagaaaaagattacccaaaaactgtctttaaaagagagagcagagaaacaaacaaaatagtattggcataacccctgagcgggtgggggaggagggtccgggctacggagtgacttagacgggattgatacgcccaaataatcaactcgcttggatattaaggtccttgcttctctgtggtaagaataggcatgtgaacacagaggaggcgctctcgggagaggagttaggttccgatccttatacgtgctttaaataacacacagcgataagacagagcatttgaagaacaggtaggagaacattcagcgaacagccatgttgtcacacgggtacgaaagacgggttctaacggtcagcaagaagaccagtattctctgtgccttcttcctgaataaagcgcaccagctagtagtggggtcactacggcatcctctgtagcttggagcttggctcatggtgcagtgtaggtcacacttaacaacgtcacttcgtagtgctaataactcatc

SEQ ID NO: 364050 - DNA, 389 bp, Homo Sapiens
  misc_feature (62)..(62): n is a, c, g, or t
cccctgaagccctcagtttccctcatcctgccaaaacggtgtgaaatagtaatcccctgtgnctgccttatcctcacagggcctattgtgaggacccaaatggattagactgtaaactgcaaaaggctgtccgcacatgaggtcatctgattactgtcctcagatctcttttgtagaggatttcaatgtatttctttatcatttgagtgtgtgtgtgatggacgaatatgtgtgtgagtttgagaagcatatcgttcgtgtccagttactttgcaaatttgtggacatttgtgattggacagaggggtttgtgctgtggcctaacacttgccaagtgaggtgtaggttatgcctatatgcaaattaaacttcacctttcttgaatattc

SEQ ID NO: 364051 - DNA, 304 bp, Homo Sapiens
agaacagccatgccaagtgaaaacagccaccttggcaccagcatcaaaggtgaatttcttgtttcgggtcagctctgtgccaaagatctctgccatgccagtcaacaactccaactgaactgactgagatgcctccacctcaaagcgaagttctgtttctcgctctagttcaaatttagtggttggcttcttgtcatcattagcctcttctcccatctcttctgtgtagctgctgtgcctgcgcagccaggagcccaacaggtaaactcagaaggtcctcccgtgcagaatttaaaccaaacta

SEQ ID NO: 364052 - DNA, 279 bp, Homo Sapiens
tgacagggtgagaccctatctcaaaacaaacaaacaaaaaccccaccagcaaccttgctgacaaatccacaggcccccacgtctgccaattgcctgcctgtatgaactgggcacctgggggaggggcgtggcccccaggctactcatcttggctttcacagccaaagggcctgggtggaacctcagcttactgtgtttactgactgggtaatgtggcctctgaagctgtcacctatctataaaatggggattaaaacgacactcacttgctcattgaaa

SEQ ID NO: 364053 - DNA, 509 bp, Homo Sapiens
gctgcagggcctgcgcgtggagtggcgcgggcgggatccgcgcgggccgggtcgggcacagcgcagcgcgggggccaccgccgccgacgggccgtgcgcgctgcgcgagctcagcgtagacctccgcgccgagcgctccgtactcatccccgagacctaccaggccaacaattgccagggcgtgtgcggctggcctcagtccgaccgcaacccgcgctacggcaaccacgtggtgctgctgctgaagatgcaggcccgtggggccgccctggcgcgcccaccctgctgcgtgcccaccgcctacgcgggcaagctgctcatcagcctgtcggaggagcgcatcagcgcgcaccacgtgcccaacatggtggccaccgagtgtggctgccggtgacccctgcgccgcgcggactcctgccccgagggtccggacgcgccccagctcgcgccccttcccatatttattcggaccccaagcatcgccccaataaagaccagcaagcaaccgg

SEQ ID NO: 364054 - DNA, 498 bp, Homo Sapiens
  misc_feature (471)..(471): n is a, c, g, or t
gcggccgctgtaccagtacgtcaactattgcaaccctgagctgaaccaggcagggaagggggacggggaggctgaggtggaggcagaggcagagctggccccggttcccgaggagggaggtgtggagcaactgcaggccttgctgcccttggcaggtgagctgggcccaggcctcgctttgccctgtcccagtccactagtgacccccacccatgccctggctcccctcggagaggaggctggagaggagcctgggggcttgcccagcttgggggtgagtgaccacaaggccgaggtggataagtcaacccaggtggacatcgacaagatgctgagtgtctgcactgctccacttgtccccccgctctctcctcagtacaagtgactgtcccgccccactggtggctcccctccttccacgcctgaatttggcttcaggcttcctgtgggcctaggccctctggtggcggnggcaaatttggcacctgcccccacttg

SEQ ID NO: 364055 - DNA, 742 bp, Homo Sapiens
  misc_feature (665)..(690): n is a, c, g, or t
ccagtgtgtgcagctgaacttcatcttcactttgagaaggcctacttcatcctgaatgagtttttgatggggggggatgccaggccacctcaagaaagagtgtgctcaagccatcgagcaggctgactactgcagaggaggatgagcgccacggagtgtgctgaggagatgggtttggcatagccctgtgggccggggtgtgacgatggggtcctggcagcgtggcgggaacggctgcttctcctctgcccagggccctgttcttggtgggactcggctgcccctcctctgctgcctcacctttcggagtgagctgtgggctcaggcccttcaaacattccctccctccaccccctacctccactttccccttttcccactgaaggttttagaagctaggaggcaggaaaatgtgacccagatgggggtgctatttggcttttattccctgcctttgcagaactgatgtcacctcagatgtccttccccctctttctccttggctgcagtggggcctttatccagtgccagggaggaacaacatagttaatttttttctaaccttgccactttgagggaaggaagggttgggggaagggcaagctttatgggaccctggtcctggccctggcctttcactccagttctgggtgaggcaggagctnnnnnnnnnnnnnnnnnnnnnnnnnnagtgtctgcctttatgtccttttttttgaaataaaaggaaaagcatttttgg

SEQ ID NO: 364056 - DNA, 1311 bp, Homo Sapiens
  misc_feature (1241)..(1241): n is a, c, g, or t
  misc_feature (1244)..(1245): n is a, c, g, or t
  misc_feature (1256)..(1256): n is a, c, g, or t
agcggggggcggggcttcgggcgagagggagggcagcaggagaaaggataagaaagggagtgggactggcgcctacggtggccgaagtgggacgcgccgagccggaggctgcaggatgatgcggttcatgctattattcagccggcagggaaaactgcggctgcaaaaatggtacctggccacttcggacaaggaacggaagaagatggtgcgcgagctcatgcaggttgtcctggctcgaaagcccaagatgtgcagcttcctggagtggagggacctcaaagttgtctataagagatatgccagcctctacttctgctgcgccatcgagggccaagacaatgagctcatcacactggagctgatccaccgatacgtggagctcttagacaaatactttggcagtgtgtgcgagctggacatcatcttcaactttgagaaggcctacttcatcctggatgagtttttgatggggggggatgtccaggacacctccaagaagagtgtgctgaaagccatcgagcaggctgacctactgcaagaggaggatgagtcgccacggagtgtgctggaggagatgggtttggcatagcccctgctgggccggggtgtggcgatggggtcctggcagcgtggcgggaacggctgcttctcctctgcccagggccctgttcttggtgggactcggctgcccctcctctgctgcctcacctttcggagtgagctgtgggctcaggcccttcaaacattccctccctccaccccctacctccactttccccttttcccactgaaggttttagaagctaggaggcaggaaaatgtgacccagatgggggtgctatttggcttttattccctgcctttgcagaactgatgtcacctcagatgtccttccctccctaataactgtaaatatataaatatgtcaggttaaagggaaaaggtgttcagggcacttcttgtcctctctgtcccataacctacctccacctccaccctccccctagccagccaggcagcttctctgcctgggaggggagcctggacccccctctttctccttggctgcagtggggcctttatccagtgccagggaggaacaacatagttaatttttttctaaccttgccactttgagggaaggaagggttgggggaagggcaagctttatgggaccctggtcctggccctggcctttcactccagttctgggtgaggcaggagctgggaggggtganaannggggagggggnagtgtctgcctttatgtcctttcttctgaaataaaaggaaaagcatttctggaaa

SEQ ID NO: 364057 - DNA, 506 bp, Homo Sapiens
taggagagagtggagatgggaagacagggaaaggaaggcagcaggaggccacaagcccaccaggtcttcatgtcaagagagggagtaacatgtcttctcattgcccacggacccaacctctgtccaggtgcccctcatcatcacagtttaacacaagctcccctgctccagccaaattgatctcccagtcttgtccttacccattccaagtgctctgccagcccctgttcatccaagttttaagtcctccaccctgttctaagagactgttccaacggctctgggcctcagtggtcacttgaccaccattgtctcagagctgcccactttgtgtgtgtcacatgctgcctgagtcacatgtacatcttatttctgcctctagttttgtaagctcctggagggcggataacatcttatactactcttgtattctcatggcacctagtgcagtgctgggcacagagtaggtgctcaataaagacttgttgaatgaacagcaaaaaaaa

SEQ ID NO: 364058 - DNA, 984 bp, Homo Sapiens
  misc_feature (43)..(79): n is a, c, g, or t
  misc_feature (731)..(915): n is a, c, g, or t
aagactcatataggggacccgggctcatcgcggtggcggccgnnnnnnnnnnnnnnnnnnnnnnnnnnnnnnnnnnnnnatcaggccaaatcggccgagctcgaattcgtcgagagcggagtggcccttgcaggcaagagtgctggagggcggcagcggcgaccggagcggtaggagcagcaatttatccgtgtgcagccccaaactggaaagaagatgctaattaaagtgaagacgctgaccggaaaggagattgagattgacattgaacctacagacaaggtggagcgaatcaaggagcgtgtggaggagaaagagggaatccccccacaacagcagaggctcatctacagtggcaagcagatgaatgatgagaagacagcagctgattacaagattttaggtggttcagtccttcacctggtgttggctctgagaggaggaggtggtcttaggcagtgatggaccctccattttacctctttaccctgtcgctcataatgaggcatcatatatcctctcactctctgggacaccatagccactgccccctcccctggatgcccagtaatgtatgtctactggtgggagactgtgaggatcccaggattcagtattcctggcccagagggcccttgctggctactgggtgttagtttgcagtcctgtgtgcttccctctcttatgactgtgtccctggttgtcaataaaatatttcctggcctcctggnnnnnnnnnnnnnnnnnnnnnnnnnnnnnnnnnnnnnnnnnnnnnnnnnnnnnnnnnnnnnnnnnnnnnnnnnnnnnnnnnnnnnnnnnnnnnnnnnnnnnnnnnnnnnnnnnnnnnnnnnnnnnnnnnnnnnnnnnnnnnnnnnnnnnnnnnnnnnnnnnnnnnnnnnnnnnnnnnnnnnnnnnttttccggcccccccgcccccccccaaaaaattttcaaaaaactctttttgggggcggcgcccccaccc

SEQ ID NO: 364059 - DNA, 458 bp, Homo Sapiens
gggagggcggcagcggcgaccggagcggtaggagcagcaatttatccgtgtgcagccccaaactgggaagaagatgctaattaaagtgaagacgctgaccggaaaggagattgagattgacattgaacctacagacaaggtggagcgaatcaaggagcgtgtggaggagaaagagggaatccccccacaacagcagaggctcatctacagtggcaagcagatgtgagtttggagtgagaatgacagcatggcgatcttatgtgaagatgagaagaggagagggggcacgtactgaggtggatcaggggtgcctcttgtttttggtgcctaagactctttggcaatctggtgaagcctctaagccccttctcagaataagattttttcaggcataaaacaaaatatatagaattaaaggaaaactaattatattgaaatagttattaaaatactaaaac

SEQ ID NO: 364060 - DNA, 751 bp, Homo Sapiens
  misc_feature (53)..(89): n is a, c, g, or t
agaatgtatagactcactatagggcgaatcggatctcaccgcggtggcggcgnnnnnnnnnnnnnnnnnnnnnnnnnnnnnnnnnnnnnatcaggccaaatcggccgagctcgaattcgtcgagagcggaagagtgctggagggcggcagcggcgaccggagcggtaggagcagcaatttatccgtgtgcagccccaaactggaaagaagatgctaattaaagtgaagacgctgaccggaaaggagattgagattgacattgaacctacagacaaggtggagcgaatcaaggagcgtgtggaggagaaagagggaatccccccacaacagcagaggctcatctacagtggcaagcagatgaatgatgagaagacagcagctgattacaagattttaggtggttcagtccttcacctggtgttggctctgagaggaggaggtggtcttaggcagtgatggaccctccattttacctctttaccctgtcgctcataatgaggcatcatatatcctctcactctctgggacaccatagccactgccccctcccctggatgcccagtaatgtatgtctactggtgggagactgtgaggatcccaggattcagtattcctggcccagagggcccttgctggctactgggtgttagtttgcagtcctgtgtgcttccgtctcttatgactgtgtccctggttgtcaataaaatatttcctggccaaacacacacaccataaaactctccaagcgctg

SEQ ID NO: 364061 - DNA, 392 bp, Homo Sapiens
cgcctccaggaagtcttggccgcaagtggtctcccgggcttcggcagcgaagcccccttcttttcctcctctctcctcatcttcaacggttacctcaagttcatgcagcacctcaggggttcagccctcgatgccaacagacgactattcggaggagtctgacacggatctcagccaaaagtccgacggaccggcgagcccggtggagggtcccaaagaccccagctgccccaaggacagtggtctgaccagtgtaggaacggacaccttcagattgtaagctttgaagatgaacaatacaaacaaatgaatttaaatacaaaaattaataacaaaccaatttcaaaaatagactaactgcaattccaaagcttctaaccaaaaaacaaaaa

SEQ ID NO: 364062 - DNA, 473 bp, Homo Sapiens
  misc_feature (313)..(322): n is a, c, g, or t
acactaaggacaaacaaagtcacaggacttgacactatgcaacttactgtaaagctataataatcaaaacagtacagtgctggcaaagaacagataaacaggttaacagaacagaataaagagcccaggaataaaaccacaaaatacagtcaactgatctctgacaaaggtgcaaaggcaatttaatggagagaggacagtctcttcaactggacatccagatgtgaaacaatgaatcctggtacacaccttacccctttcagaaaaattaactccaaatggatcatagatctaaatgtaaatgcaaaactgnnnnnnnnnncttttaacataggagaaaatctaggtgatattgggtttggtgacaagtttttaaatacaataccaaaaacacaatctattaatgtaaaacttggtaagttggacctcattaaaattaaaaatttttagtctcaaaaaatgacgttgagagt

SEQ ID NO: 364063 - DNA, 748 bp, Homo Sapiens
tacaactagagcttcaacgtcgtgcttttactaaagccattgggcttaattgaataaccaagtatagagggcaaacactgcaacaagagccgcagtgattccatggacctccagaccccgagtccttcatgcagagctgcagccggctcagtggaagtatcacattggtgtgctgtgtggcacacaagctatgtctagcctggggagtgggttgggagctgcatttgggatcctgctgatcgcttttattcttgaagcttgaacaggcggcagaatatcaagaaccaggtggtatgaaggattacgctgcaacattcccccctcttctaccccgcccttcaaccgtctggctattgttactttctgggaattgcgttgggttcttgtaagtttacttgttaaacactgtctgtagctagggccttacagcttggtctaaacggtggtgatttctctaggctcgctcatgtactacagccatcttatttcactgtgtgctgcagatgagccatttagctagaccttctctcaccatcctgctgatgtaccccttgtggagatctcacatgtcagtcgcttgaaactattctggaagatcggcatagtcaatctccataggagatgactttaactccccttgtccagcatgtattactcgaagctttaagaactcatctaagtctcctctccgaaaccagcattaacatgttctaggtccagatctatgcttgacagcctccaagaaaca

SEQ ID NO: 364064 - DNA, 1189 bp, Homo Sapiens
gtcccctttttcttcggagcgctgctccataggcattaacactctgggaccctaaggcaccactgtctcactgtctggccttctgcgatgaactgatgaaccgatatgactgacgcttctctcttatatgcttttcccatgaatccacctagtgcctggaatcatacgtgcgacttcaacacggtccatcttcctatgggagtattgattcattgctcgaatcccttcccaagatactagtctgtcaacgcagacctgtacatggttgagagttctccacaagtggtgtaccatcagggactggtcgatgagaatgtgtcagctaaactggctcatctggcagtcatcacatgtgaaatcaagaggctgtagtatcatgagcgatgctacgacgaaactcaccacccgtttatgatctcaagcctgtaaggcctgtactacatgacagtgtttaacaatgtaaacttacatagaacccaacacaattcccagaaagtaacaatagccagaggttgaagggcggggtagaagaggggggaatgttgcagcgtaatccttcataccacctggttcttgatattctgccgcctgttcaagttcaagaataaaagcgacagcaggacccaaatgcagctcccaacccactccccaggctagacatgcttgtgtccacacagcacaccaatgtgatacttccactgaccggctgcagctctgcatgaaggactcggggtctggatgccatggaatcactgtggctcttgttgcagttttgtactctatacttggtttttcaattaagcttaatggcttttttaaaacatgacttgaagctctagttttctagatcttttacagtgtacagtattttacataactaagctgtattaaaagcttgttcatttacttgccaggaccctggctctacttttagagtcattgtaagaaactctaacttgcatcaaggtactaataagcttaattttaataacccaaagtttaaaggttccgatctttctccttggggtggagtgatctcattctcaggacaaccgtttacttacctgattcctcggagcattatcaacttctgctctgttgtcctgaccatacatatgtcctagaactacagttaagtgtgttgtggaattttagttttgaatcctgtataaaagaactccaagacctt

SEQ ID NO: 364065 - DNA, 953 bp, Homo Sapiens
  misc_feature (51)..(87): n is a, c, g, or t
  misc_feature (774)..(774): n is a, c, g, or t
ggatgatacgatcactataggggaaccggagctgtatcgcggtggcggcgnnnnnnnnnnnnnnnnnnnnnnnnnnnnnnnnnnnnnatcaggccaaatcggccgagctcgaattcgtcgagagcgggcggcatgtggactctcgggcgccgcgcagtagccagcctcctggcgtcacccagcccggcccaggcccagaccctcacccgggtcccgcggccggcagagttggccccactctgcggccgccgtggcctgcgcaccgacatcgatgcgacctgcacgccccgccgcgcaagttcgaaccaacgtggcctcaaccagatttggaatgtcaaaaagcagagtgtctatttgatgaatttgaggaaatctggaactttgggccacccaggctctctagatgagaccacctatgaaagactagcagaggaaacgctggactctttagcagagttttttgaagaccttgcagacaagccatacacgtttgaggactatgatgtctcctttgggagtggtgtcttaactgtcaaactgggtggagatctaggaacctatgtgatcaacaagcagacgccaaacaagcaaatctggctatcttctccatccagtggacctaagcgttatgactggactgggaaaaactgggtgtactcccacgacggcgtgtccctccatgagctgctggccgcagagctcactaaagccttaaaaaccaaactggacttgtcttccttggcctattccggaaaagatgcttgatgcccagcncccgttttaaaggacattaaaagctatcaggccaagaccccaagcttcattatgcagctgaggtctgtcccgtcgtgatcgtcgttatcttttttattcctgcttctgaagacagctgggctattgtgtcaacagtctgctcaacgaatgtgttgctcctaccttgccccaagtctgat

SEQ ID NO: 364066 - DNA, 493 bp, Homo Sapiens
gcggccgccgcggggtcggccgcggacttggcctttgccttggccgcgtccccggaggcgctgtcccggcgccccgctgccttcctggcctccagggccccggccctggacggcggcactgcagccggcggcgcggggccggaatcctggtgagggcccactccgtggccgagggcgccctcgctgccctggcacacgagcttgtgcttcttccagtcctgacgctggcgctccttgcagcagtagaaggagctgcggcagcggctgcagcgcagcaggttctccatcttcccgcacagctcgcagtactgccggtctcgctcgctcgagctcggcccgccgggcccgcagctgtcattggccatggcgaccgcagctgagcaggaggggtgcggccggacggcctcgcccgaggctccagcctctgtcttccaggttctttctgcaagtcttccaccagggccactgcctcctctccactctccggatgctg

SEQ ID NO: 364067 - DNA, 355 bp, Homo Sapiens
tccctaaaaatccaaaacaattgaaaccccatggagataaagaagtaagaggaatggttatccagaggcctgggaagggtagtgggggccatgtgggggcagtggggatgttcctatgggtacaagtaataatcagaaagaatgaataagaactactacttgatagcacaacagggtgactatagtcaataataacttaattgtacattttaaaacaacttaaagagtgtaattggattgtttgtaactcaaaggataaatgcttgaggggatggatatttcattcttcattatgtgcttatttcacattgtatgcctgtatcacatctcatgtacccaataaatacatacctct

SEQ ID NO: 364068 - DNA, 448 bp, Homo Sapiens
  misc_feature (37)..(37): n is a, c, g, or t
  misc_feature (48)..(48): n is a, c, g, or t
  misc_feature (432)..(432): n is a, c, g, or t
aaaataacccccggccacagaaagcaaacaccacaantcctcaaccanttgtgggaccctaaaaatcaaaacaaactcatggacatagagtagaaggatagttacccagagcccgggaaaagagtaggggattgtgggggagttgggggtgccttaatgggtacaaaaaataaaaagacctaaatagggccctagtatttgatggcacaatagtgtgccctatagtcaataataatttcattgtacatttttaaataactgaaagaatataactggattgtttgtaacacaaaggataaatgcttgaggggatggataccccactttacataatgtgattattactccttgcatgcctgtatcaaaacatctaatgtaccccataaatatatacacctactatgtacctatacaaattttttaacataattnaaaattaaaaatacgt

SEQ ID NO: 364069 - DNA, 232 bp, Homo Sapiens
caggaatctctcggaccgcggatcctcagcccccgctccaccagcccgccccagcgcgtgggtctgtttgggaggcctgggccggagcagagcagaggtgatccggcccctgcctgctgggccgcccgggttggaagggagggcagtgtgggcggagatctgctccttcggtgggggcctctggctcagatttggggccaaggaggcctctgtcattttaaagactcgtgtt

SEQ ID NO: 364070 - DNA, 371 bp, Homo Sapiens
  misc_feature (31)..(31): n is a, c, g, or t
ctcccattctgggaaaggaaagcagcctccnagggaaatgttttctgccttcctgcttctagaaccacctcaggtactgatgaaccccacttagcacagctgaaggggtttgtgaatactcccgcctaaatcccttctacttcactcctcaggggagtgaagtgccttaagaaacaaagccctgtcctaatttatctagcttgtcagtccggtcttagagataccctctttcctgaagtgaggcgtgcctgtagaaacactatgtggtcagcctgtccccaaggagatcttgtgtctcctctccatctctgcctttgttaccagtgtgcatgtgtttgtgtgttttttaataaaatattgactcggcaaaa

SEQ ID NO: 364071 - DNA, 432 bp, Homo Sapiens
ttctgaattgggaacgaagacccgaaaaactcgccatgaccattcccctccccggcccctagcttcggcccggaaggcccctcagggcagcggccgtgggtaccacgacccggccagttcccctcgccgcggaccgaccgggcagggccaacccaggactgttccggggaggggagcagggtaggggagcgaatgttggggttcgttcgtgggtcacccagaactgggcgcacgctggcggcgcccggacttcgccgactgtccgcccggtgccacccgcgcggctcgcgccagacgcagcctggcggtccctgtcctgtcttcgagtatttgtttttaatgctgggtgtcgatcgagacaacaagcgctcagagcaaagcaaggatgcattacgggggtaattttaaaccgatcgataagatttttcagag

SEQ ID NO: 364072 - DNA, 500 bp, Homo Sapiens
gcggccgccaggggccgcgcggctctgctcctctactcagccgatgactcgggtttcgagcgcctggtgggcgccctggcgtcggccctgtgccagctgccgctgcgcgtggccgtagacctgtggagccgtcgtgaactgagcgcgcaggggcccgtggcttggtttcacgcgcagcggcgccagaccctgcaggagggcggcgtggtggtcttgctcttctctcccggtgcggtggcgctgtgcagcgagtggctacaggatggggtgtccgggcccggggcgcacggcccgcacgacgccttccgcgcctcgctcagctgcgtgctgcccgacttcttgcagggccgggcgcccggcagctacgtgggggcctgcttcgacaggctgctccacccggacgccgtacccgcccttttccgcaccgtgcccgtcttcacactgccctcccaactgccagacttcctgggggccctgcagcagcctcgcgccccgcgttc

SEQ ID NO: 364073 - DNA, 1621 bp, Homo Sapiens
cccagacgcccaggcgtgccttgtttttggattcagttctcctgtgtgcatggctttccaaaaggactgtaagttctttggaattgtgaacattcttttgaaatatggagcccagataaatgaacttcatttggcatactgcctgaagtacgagaagttttcgatatttcgctactttttgaggaaaggttgctcattgggaccatggaaccatatatatgaatttgtaaatcatgcaattaaagcacaagcaaaatataaggagtggttgccacatcttctggttgctggatttgacccactgattctactgtgcaattcttggattgactcagtcagcattgacacccttatcttcactttggagtttactaattggaagacacttgcaccagctgttgaaaggatgctctctgctcgtgcctcaaacgcttgggattctacagcaacatattgcccactgttccatccctgacccatctttgtcgtttggaaattcggtccagtctaaaatcagaacgtctacggtctgacagttatattagtcagctgccacttcccagaagcctacataattatttgctctatgaagacgttctgaggatgtatgaagttccagaactggcagctattcaagatggataaatcagtgaaactacttaacacagctaatttttttctctgaaaaatcatcgagacaaaagagccacagagtacaagtttttatgattttatagtcaaaagatgattattgattgtcagataggttaggttttggggggccagtagttcagtgagaatgtttatgtttacaactagccttcccagtaaagaataaaggaaggaaaagcaaaattgtaaacatcacttatattactttattgcagcttcatcaccagtacattatatgttgtaatatttatttacctgatcattttgatcattttcgggctttattttgctaataaactgggatgttacttctagggctaaacatggcatatttccacctatgattcgggtttacctggaattaggagctcagaatggaatgcataaagcttcactggggaaggtaatacaaactggggggggaaaatcgggggattatctatcgagtaattattttaatttaaaacttggactatcgtccttagggggtatttaaaggaacctggttttcccctaaacagaggagcaataaggcgaccgccgcatgagcacttatgagataactacagtgacggagggacagactggaggggaggtttgacggcgaagagggtgggcactgcagagagtcgccactcgtggcggagaagaaatacccatgactatacagtgaacatgtgggggccgtgcgtcatgcaacgatgaggcctccgatggcccaacgcagggaaccattgtttcccgctggtgggagaacggggcggctaggcgttttacggaaggacgaggcagcggtgggactgcgcgatcctgaggggcctggcagtgcgggcagcactgtcggggacaaattgggggttgtagaaccggggcgaaaaaacagtgccgaagagaaacgaagcgcgggggccgtgccggattgtccataccgtcccaacgcttagaaggt

SEQ ID NO: 364074 - DNA, 523 bp, Homo Sapiens
ttgctttgcaagcaatgtccggcaccatcagcaactcctactggactcccaggagtttgcaagcgttcttaaccccttcggacgctccagccagatgccagtcaaacagatgatgctcttgcctgaggggaaaggaaagacacaacctagtgccacaggttttactcagaaactgtttccccagcttctccagctctttgtacttatttgtgtgtttttatatgcaagttagaactaacagtctattaaagctgttagatggagatacatgttccatcccaccctcagccacaccctggatttttaatacttctggaacggtgcctgcaggtaccaggaagagctaaacaacttcacctgttgaagactggctagtgatggggaacggtcctcctgcttcccgcttttgtttccacttcccccattaactgttgtactctgttgagggaactcctttcagaaacagcaaaccagagaaactgcctcgctagcaaattcatgggctcagaaaataaacgtcaag

SEQ ID NO: 364075 - DNA, 490 bp, Homo Sapiens
agcggggtctccgtgccgagggacccgtaggaacgggaacattgtcttcctccaggcagccccgcgtggggagtgcaggtggtttcggttgcggcagtcgcgtcccgggagcgtcgctgcctggtgaacgctagaatgggtactaggaaaaaagttcatgcatttgtccgtgtcaaacccaccgatgactttgctcatgaaatgatcagatacggagatgacaaaagaagcattgatattcacttaaaaaaagacattcggagaggagttgtcaataaccaacagacagactggtcgtttaagttggatggagttcttcacgatgcctcccaggacttggtttatgagacagttgcaaaggatgtggtttctcaggccctcgatggctataatggtaacttaattaattaaatgttgtcttatgtaagaacctgaggagtaagagatgcaaatattttatggtgaataaaataaaagctcacttactatc

SEQ ID NO: 364076 - DNA, 1134 bp, Homo Sapiens
tcccgggatgctatctcgaccttgacttcgcatgtgcatccgccgaagtctttctagatcaatcggccccatctctcgtcttcccgattcggccatgacctcacccgtatcctcgacgtaggacctcggacttcatttccgccaccccgacacttccggaatccccggaagcgacccgttgccatggcgactatgtacacagccaggcagccccgcgtggggagtgcaggtggtttcggttgcggcagtcgcgtcccgggagcgtcgctgcctggtgaacgctagaatgggtactaggaaaaaagttcatgcatttgtccgtgtcaaacccaccgatgactttgctcatgaaatgatcagatacggagatgacaaaagaagcattgatattcacttaaaaaaagacattcggagaggagttgtcaataaccaacagacagactggtcgtttaagttggatggagttcttcacgatgcctcccaggacttggtttatgagacagttgcaaaggatgtggtttctcaggccctcgatggctataatggcaccatcatgtgttatgggcagacgggagctggcaagacatacaccatgatgggggcaactgagaattacaagcaccgggggatcctccctcgtgccctgcagcagggtgagaccaacaggattatagcctcccacaactatgaacaaaaactcttccagatcacactgcattttcaccaatctacttagaggcccattcccggaccttatcagaggaaaagtacatcacttccaaaattaacttggtggatctggcaggctcagagaggctggggaagtctgggtctgagggccaagtcctgaaggaagccacctacatcaacaaatcgctctcattcctggagcaggccatcattgcccttggggaccagaagcgggaccacatcccctttcggcagtgcaagctcacccacgctctgaaggactcgttaggggggaaactgcaatatggtcctcgtgacaaacatctatggagaagctgccccgtttagaagaaacgctatctttcacttgagatttgccagcagggatgaaagctagtcacccactgaagcctgcccatccatggaaaagtatgaatgcctgga

SEQ ID NO: 364077 - DNA, 771 bp, Homo Sapiens
ggtacattggtttgccctatgcggaccataattatggtgctcgtcctcctccgacacctccggcttcccctcctccatcagtccttattagcaaaaatgaagtaggcatatttaccactcctaattttgatgaaacttccagtgctactacaatcagcacatctgaggatggaagttatggtactgatgtaaccaggtgcatatgtggttttacacatgatgatggatacatgatctgttgtgacaaatgcagcgtttggcaacatattgactgcatggggattgataggcagcatattcctgatacatatctatgtgaacgttgtcagcctaggaatttggataaagagagggcagtgctactacaacgccggaaaagggaaaatatgtcagatggtgataccagtgcaactgagagtggtgatgaggttcctgtggaattatatactgcatttcagcatactccaacatcaattactttaactgcttcaagagtgtccaaagttaatgataaaagaaggaaaaaaagcgggggagaaagaacaacacatttcaaaatgtaaaaaggcatttcgtgaaggatctaggaagtcctcaagagttaagggttcagcctccagagaattggatcccttctcctgaatggttcaaaatttttgggatggggaagacaaagatccaaagccatgggaattggattcgaattatgaaaggaaagcgcaaattaaccaaccccggttatcaattggaaaggggtgggttccaaaaaat

SEQ ID NO: 364078 - DNA, 1857 bp, Homo Sapiens
  misc_feature (1336)..(1344): n is a, c, g, or t
  misc_feature (1497)..(1505): n is a, c, g, or t
  misc_feature (1578)..(1578): n is a, c, g, or t
  misc_feature (1623)..(1631): n is a, c, g, or t
  misc_feature (1670)..(1678): n is a, c, g, or t
agcggagcggcttcaggaacccacggcctctgcgcgtccccgcgacccttcttcgcgcccggcgaagacagccgggcgccccggagggcggcgggcaggcgcccgggagatgcggagcctccgctgcagcgcgatctgcgcgaccagaccagcccccccgtagtaagcgcttgcagccagttgtctagttgtcagaagccgagctcatcagcgggctcctggtgtcggcgttctgctgctggaaggtcagggagttccctggaccccacggaagaagctgtctccatgaaggacagggaccgtgccgtgaaccttttattctcccactgacatgactatagccttcactttccctcggtccaccatggagcccttgtgtccactcctgctggtgggttttagcttgccgctcgccagggctctcaggggcaacgagaccactgccgacagcaacgagacaaccacagacctcaggcccctccggacccgggcgcctcccagccgctgctggcctggctgctactgccgctgctgctcctcctcctcgtgctccttctcgccgcctacttcttcaggaagcagaggaaagctgtggtcagcaccagcgacaagaagatgcccaacggaatcttggaggagcaagagcagcaaagggtgatgctgctcagcaggtcaccctcagggcccaagaagtattttcccatccccgtggagcacctggaggaggagatccgtatcagatccgccgacgactgcaagcagtttcgggaggagttcaactcattgccatctggacacatacaaggaacttttgaactggcaaataaagaagaaaacagagaaaaaaacagatatcccaacatccttcccaatgaccattctagggtgattctgagccaactggatggaattccctgttcagactacatcaatgcttcctacatagatggttacaaagagaagaataaattcatagcagctcaaggtcccaaacaggaaacggataacgacttctggagaatggtctgggagcaaaagtctgcgaccatcgtcatgttaacaaacttgaaagaaaggaaagaggaaaagtgccatcagtactggccccgaccaaggctgctggacctatggaaacatccccggtgggcgtgcgaggacttgcatggttttgggtcgactacacccatccgcgggatttctgcataacagccaacagcctccccccaaagggcttgcaaagcccccccaagcctggggttttcaaccagcttggccacttttcaacccaagacttgggcccccgaaattttccggaaagtggcgccttttttttaannnnnnnnnaatatgtgggggaaaatccctcttcacatatattttcccccctccctaagggaaaaaaaacggtataaaaagcgatagggcctatttcaaaatcccctccctcgatgggggctccaccacccccttgggggcgatcctccccatatacaggannnnnnnnncccccaccccgcgctataaaacacccccccggcctgattcattgggggcaccctccgggcatatagggggggnacaaaccccctttcccaaattgtggtggggaacctcccgcaaatnnnnnnnnngctgtatgttgcgccccccacattttgagcaggctccannnnnnnnntggtaaaccctaatacacacacgcgcgtggaatagggacggtattctttgagacaaattctctgtgaggctaaccctatggacagactcacgcccgtaaacccttcgaggtgggagcgccccccctccaaaagtgaggctctccctccacacacgggtgttactcttgtccccatctca

SEQ ID NO: 364079 - DNA, 642 bp, Homo Sapiens
ttttggttcttaaaaatgtttattcaatgcatgaacagaaagacaaatgcctactaccaagtcagcctaaggttcattgcaactgcttatgcacataccaatggcttgcatatgtctcaccccatctaggatcatctagaccagggctgtaagggaacctacattcaacaacaggtgccataatatctaacaataatgacaggctattggaagaccaggaaaacaacaaagctcatgtatttcaccagctggaaaattcatctagtaaacaggctgtttgaggaaatctcttgacattggaagcatgatgcacacacgaccttaaaaccctaccaatagctctgatggaggaaagaagggaacctgagctagcacgttggtattcacgagggctcttctgtcctgaattggtcctctcatctctgggaaagagaaaagtgtccctaaaaaccacaatagggatgagatgtgccttcctagattcaagtagattcagtctgagacagcaattttgtttttatgtaccaacagaaaacctaaacaagcaggaaataaaagctacttccctcactaaagatatattaagggccaaatatttgttctaaattgattgctaagtctattagatattttgaaaagaaa

SEQ ID NO: 364080 - DNA, 422 bp, Homo Sapiens
cattgaaactgggtaagtgaggagcatttaataaacatgtgcatagaatttagggaatccagtaaggggcgcttcagtatgctgaggctggcaatagtggtgggtcattcccactgctgggcctacagaggagaggatggaacaggtggctggacttggagatgggagctgtttgctgagaggcttgaaggagccttcagaggggaatgcagccactcctgccaccacctgccagggagggagccctgaggacagaaaccctgatctgactgtctccccaccctcggctctcctctcatgcttcccattggctcaaccagccagaagctggcagccagggagcctgctggtttagccacattggtcaggttcccaggcaggatggggaggatggagcatggcgtggcctgtaagtgcaaatg

SEQ ID NO: 364081 - DNA, 455 bp, Homo Sapiens
ttaactgacaacgtcatcaccacctgtctcttactgaccgtaacggtataataagtataaacggtaggagcccagccgaatgacttcctccagccccacatccaatggctgggatgtgcaccctcttacctaaggttgtgtatccccttctctgcagctagaacccacttggcctgggttccattccccaccgcagaaaagccttctactactgactggactggagaatgcatgcctcagttccgttatcccctggctgtgtaactctgaggtccatgttcgacgtggctccccagagttctgtcatgggagtaagcaccagtcatctgcagtgtaactcacttggcaacacatccttattttgtcttctccctgttccctgtcccattctgtccctccttgaccaatgcttccagtctccttgggatcaagtcccaaataaactacgtgcactg

SEQ ID NO: 364082 - DNA, 686 bp, Homo Sapiens
  misc_feature (220)..(220): n is a, c, g, or t
gtacccctcggctctccttgtctcaagcccgtgtgcgtgtccgacagcctcaagaagggcaccaaattcgtcaagtgggatgatgactcaactattgttactccaattattgtgaggactgaccctcagggatttttcttttactggacagatcaaaacaaggagacagagctactgaatctcagccttgtcaaagatgccagatgtgggagacacgccnaaagctcccaaggaccccaaaatacgtgaacttttggatgtggggaacatcgggcgcctggagcagcgcatgatcacagtggtgtatggccctgacctcgtgaacatctcccatttgaatctcgtggctttccaagaagaagtggccaaggaatggacaaatgaggttttcagtttggcaacaaacctgctggcccaaaacatgtccagggatgcatttctggaaaaagcctatactaaacttaagctgcaagtcactccagaagggcgtattcctctcaaaaacatatatcgcttgttttcagcagatcggaagcgagttgaaactgctttagaggcttgtagtcttccatcttcaagggtggaaaaagctaatgaggctgcgaaaagtgagcagagctgtggaaaggctcccccaaaacacccccaccttcattttataaagcaaaataaaatgcttgaacctg

SEQ ID NO: 364083 - DNA, 683 bp, Homo Sapiens
actgatatattgtagtttaataaaacatagtttatacagttcattgaaaaagtattttaatacaaacaccacttatacacaaaaccaaatgttgatattcttgtttttaaaaattcttgatttctctaaaacactaagatgctatctcaatagagattgcttcacattttccagtttcttgatctgtgcatgtcacatgtaaagatccatcccttttcatagtaagaacagctaatatatcacgtaatccattttcttttttatctaaatcctggagtacaacctgtgcaaacttggtttcctctttggcagagttcttcccatcagactcatagagttcaaggcacactgaagatatgcttccaggggcttgcaatgtgtgttgtcttcgagctggcaaaggagtccctgatggaaacagcactgtgaatctactggctcctgattcgtccacacccttaactaaaatatctctggctgaacactctatcataagagagtcttccaccaacaggttttctttcccaataagaattcctgcttctatagctgcaccaatagggatcacttcatcaggagggatagaattgagaagctcaacagctgggaaaagatctttaatcagttgctgtagctttgggattcgagaagaccctccacaaaggacaaccttgttgatatca

SEQ ID NO: 364084 - DNA, 1097 bp, Homo Sapiens
  misc_feature (45)..(81): n is a, c, g, or t
  misc_feature (856)..(857): n is a, c, g, or t
  misc_feature (873)..(873): n is a, c, g, or t
gaatgatagatcactatagggaacggacgtatcgcggggcggcgnnnnnnnnnnnnnnnnnnnnnnnnnnnnnnnnnnnnnatcaggccaaatcggccgagctcgaattcgtcgagagcggagaggattgttgccgtcatgtcggctgcgattgcagctctggccgcttcctatggttcgggttcagggtccgaatcggactcggacagtgagagcagtcggtgtccgctgccagccgccgactccctcatgcacttgactaaatcgccttcatcaaagccgtctctagcagtggcagtggactcggctccggaggtggcagttaaggaagatttggagactggagttcaccttgaccctgccgtcaaagaagttcagtataatcctacctatgagaccatgtttgctcctgagtttggaccagaaaatccctttaggacacagcaaatggctgcccctagaaatatgctttctggatatgccgaaccagctcatatcaatgatttcatgtttgagcagcaaaggagaacttttgcaacatatggttatgcattagacccttcattagataatcatcaagtgtctgctaaatatattggttctgtagaagaagctgaaaaaaatcaaggtttaactgtatttgaaactggtcagaagaaaacagaaaagaggaaaaagtttaacagaaaatgatgcatccaatattgatggttttggggaccatgggcaaaatatgtggatgaaaaagatgtagccaaaccttcagaagaagagcaaaaagaattggatgaaatcacagcaaacgaggcagaaaaaaaggaaaacagggaagaagaagaaacctggggagggaaanngacaatcttacatggntaacatattttttttggtacatccttcattttttaatgaaaaaaccttcatattttacctctggttccgctgtttcattaccaataatcaatttaccccttacctatccagcctggtaattaaaaatcatttatgggtacaggcatataatttgtgggtttggaacaaattttgtggattccccaaaggggaaaatttacaaggccggaactttttctgtttta

SEQ ID NO: 364085 - DNA, 245 bp, Homo Sapiens
ctaagtagtggcactaatacaaaaatcatgctaatcttgtgccagaaccgtttctttctatcacatttcactgtatgtgctatactgcctttcatagaaaagttatgaaatagaaatgctttatgaaggaaggagatgtgagttggtgggaattacacgtaaataacacttgtaggtagtcttagataaagggtaggaaagaaatacctgaaaacccattttagtcctgattctaccaaaactac

SEQ ID NO: 364086 - DNA, 674 bp, Homo Sapiens
ctagaggatccttcacgctgagaacggctgtctctcgtcatcctggctccacaccagtggtgtgtcaagaaggatggtccgggcccctgttggctcagcgcctggtaccagcttccttgggtcagagccagccgggataacagcctctttgtgcccaccccagtgcagagaggggccctggtccttcatccatggagaaagtggtacacaagagcaagcagaacctctctgaccgctcgcgccaggcctacactttccacctcatggaggcctctggcaccacctggagcccggagaactggctccagccaacagctgaactgccctttccccaactgtacacctaaaggctctcgcagggcaggagccctcgcccctcccgggtgaagctgtgggctgtaaacaccagtgccttgctcagcctcctggttgcaacagggaggtcttgtctcccctcctgggctttcctcctgccctgtgggcagcagcctaggctgggtcaggggcttccctaagatcttcacctctctgcctccctactgccccaacatagccttgaggaggcttctcagccaccaaagggttctggccccttctcactctcctctcctctcagatggaactctggttattatggtgttagttatcgaataaaaacgacttcagaatgcaaa

SEQ ID NO: 364087 - DNA, 251 bp, Homo Sapiens
tggatgccccctttaggcaatgtttaaagtctattttttaaagttttaagtattttaagaggtattgagactaatgaatataatagttcagtaatttaaaagcttatttattttcagtggaaggatttttattaaaaagaagctaattgacatggaaatgtcagtgaaatttcttacctgcaaggaaagtgaacattttgtatttaagtaaactataatgtgcacattttaataaagaaatttgccctttt

SEQ ID NO: 364088 - DNA, 485 bp, Homo Sapiens
ttactaataaaattgtagtatcaaatgtttatataatgcttttcatcatagacacaaacacaaaattttaaagttcacaattttggaatatgaatttgctgcattattcaaggttgccagttacagtagagttgctctaatgattccaagtgcagatggccagagctggcctcagattctcagttcattaaacagtccttcctttgaccaacagccctctcattgtaaggccgcctgggtctcagctgatgtcaaaagccccattctaccctgggtggattgttcacataaaggatccccatacatattctgctgcagatagggatggggctggctctgcagatgtcgctgcctccagcactgtcacttttgctcatcacacgatcttgggtctctttccagagacttgcacaaagctcaattcagagtttgcctgtgactgatgcacacttggcctgcagatggacagaggaggaggaaaaggc

SEQ ID NO: 364089 - DNA, 542 bp, Homo Sapiens
ggagaaagcagcccgactcagccccgagaggttcggtgtgcgggcagcggccagggactttgcggggtagcgcggactcctggacttccaacaagggccgctgcgcaggcgctgcaatcactgcaggcacttgtctgcatgcctggtggggcttggagtctggggaggcttatcagtaaagcccagagcatttgctatttattgctcaaggggcacctttgtacagtctggccgtttgcttggcatggcctcttagaactccttattgtttaagaaatccgatctggtgaataagaagttagtctttctctcccagtcactgcctcctggacgaatatttgccagcacggaggcagagaggacagaaaaccacaagccatttggggaactgggaacagttcagtgtttctggggtgtgggggtgtcaaggtgggggatggggttgatggaaaacatttgcaatttctgctttacctcacgattcccagctctgacctctggacctgttctctcccacccctaacataaatcattttagtttc

SEQ ID NO: 364090 - DNA, 424 bp, Homo Sapiens
aatccaatgataacaactgcaaacatttacttaatgtgtgctaggcaccatatggagtgctctatgttggattatctcatttcatcctcacaattttatgaggaatatatcattattatcaacccattcaatggatgaggaaaccgaggcatacagctggcaagtggcaaagccaaagttagaacccaaaagtctgacaccaaaactcaacctgccccctctgacacagaaactttcatggagctcagtgagaactttaggaccagtgtaggcactctctgaattcttctagatagcactgagcgtgagtatggtctgttgtttaagagtatttactgtctgggtgattattctggctcatttcataaggcttttgtcttggtgagagagcactcaccatcttctagttggaaagccaaggtct

SEQ ID NO: 364091 - DNA, 299 bp, Homo Sapiens
caccatagcatgcatttctttctactcccatctagggtttggggttgcaagtttttagagaaaggaatttggcaagaaaagaatccagatgtaactgacagcaaagtgacacatggcaaagcaacatctctgctcttaggcatacttgttcccagctactaattaactgacagaaacagaaacctttccctttaatatttgccactgtcaaggtcaaggatggaccttaatacatcaaaattgtacttactctctacttgttaaatacagatttaccctttactaacagttaaaaatgc

SEQ ID NO: 364092 - DNA, 528 bp, Homo Sapiens
  misc_feature (106)..(106): n is a, c, g, or t
atgagccatcacatccggctggggaatacttttaaaaacttaaagcgagtgaagggagtctgattaaagtaggcacaataaaatataaagctgtttagaaggcctnaaaggtcctcggccagtaaccctaatttcccccactttccctaactttaatactagtaattcccaaaacatttcctgatgagaaacttcgatttccctgaaattttatgatcactaatagggaaggactgctgagtcacaataatcactggtggaatggggatttaattagcaacaacagtcaagtcccacccagtaagcacctgagagcttgtgagtcagttgaagacacgtatttactgagtacctgccatgtgtaaggtgctggtgatagagcccaaggaacttggttgctatgcttcaaaggagtggtggactgttttactaagtgggatatggcaggaacttgattgaaacacatactcagaagtagttcacctcattatagcttaaatatgtaacactctgggcttcaggtgattc

SEQ ID NO: 364093 - DNA, 555 bp, Homo Sapiens
  misc_feature (410)..(410): n is a, c, g, or t
  misc_feature (420)..(420): n is a, c, g, or t
  misc_feature (435)..(435): n is a, c, g, or t
  misc_feature (484)..(484): n is a, c, g, or t
  misc_feature (497)..(497): n is a, c, g, or t
gcggccgctacgtcaacaggatgaccaatgaggcgctgcacaaagggtgctccctgaaggttctggcggacagcgagcgatatacgtggatcgtgctgtgagggccaggccgccccggacactgactccaactacctccgtggcctgggaccggcccccttcctggggtggcctcttcctggccggctggcccaccgactgatgaccggcactagtgttagcctgcggaacggggctgggcagggcagcctctgttggcctgagggtctggacgctttttatttatgcctatttaagttgggaaggggcagagagagggcgccccctgccccaccagcctgagtgccccgccttcaccccgagctgggcaagggcctggcccctcgtgcatttgcccttttctcggctanagctgtggangttgccctcggggangtcgaatggaccccattccccctgccctgcccgcccccagcctccccanccaggccggcaanctggccatccccattccgttcttcttcatgtaataaatgttttaatttctgaacctca

SEQ ID NO: 364094 - DNA, 490 bp, Homo Sapiens
taagagacagggtcttgggccggaggtttgcagaggctcttgtgtctttctgggaccctctgcctctccgcttgctgctgctcctctcctcctcactgtccgactcagagaggaaggtgtcctcgccttcaggcagaagcgactcctcctgcatagacgccaggctcacggtggtcaagagctcgctgcgggccttctctctttggtactgccggcttaggtcgctctcctctgcaaacacgcaggaaatgtacttggtggttcgctgccgaccttcgtcttccatgaatcccttgacaactttgaatctttgaagaaagtcggcacagcattcttgcttctagttttcccacattcatagccactcggatttcagcttgggaaattccttttcgtgcctctgcgctcaatgaggtcgtaggtcctgtgtgagcatatcccgctcgaacacaatgtccactggaggcactgtcttggagatgacctcctc

SEQ ID NO: 364095 - DNA, 279 bp, Homo Sapiens
ctgttttctggggaggaggggaagtgttgtgtttaatgggaacacaagcttcctgccactttccattgttaaatcaatatttgatgagaatgaatgggggaaagctattaggtcagagtaaggaatagcagtcttaacacttgtgcttcagtcctcagcataggccttaaatacttttggatgactatacttttggaatgacctgaggcagcaatcatatttttatttgaatactgctaccaagtgcgtagtgtagcatgttgtataaactcatgcccc

SEQ ID NO: 364096 - DNA, 578 bp, Homo Sapiens
gctatctctatcgcggtttccttatgtataaatgggaagaatagtacctttcattggatcgttgtaaatattaaatatggtaacacctgttgttatggactgaatatgttccctcaaaattcatatattgaagcactaacccccaatgtgatggtatttggaggtggggcctttgggagataattagatttacatgatgtcataagggcgggcaggacttcatggtgggattggtgccattataagaagaaaagataccagagtcctccttctccgccatgtgagaatgaagagagaaggagtctatctacaagccaggaagccagccctcacaaggaaccaaatctatcagcaccttgatcttggactttccagcttccagaactgtgagaaataaatccctattgcttatgtcacccagtctatggtattgttgtggagcagccctagctaggacatctgtaaatgacaagttctatactactatataggactgctggataaatgctagctattcccatttccctctgagaactgaaatacctgaaacttctattaaaagtctttgtattcctcaa

SEQ ID NO: 364097 - DNA, 671 bp, Homo Sapiens
  misc_feature (34)..(34): n is a, c, g, or t
  misc_feature (608)..(616): n is a, c, g, or t
gtggttaagttacacacaaaacagtgtaagaccngttccatcaacagaaccaaatgttgttagccaagctacttcttcaacagctgtatctgcttcaaagccgactgcctctccttcaagcattgcagcaaacaattgtactgtgaatacgtcatcaattgcaacgtcttcaatgaagggtcttacgactacaggaaactcgtctcttaatagcacatctaacactaaagtatcagcagtgcctacaaatatggctgccaagaaaacatctacccccaaaataaattttgttggtggtaataagctgcagtcaacaggaaataaagcagaagacacaaaaggaaccgaatgtgttaaaagtactcctgtcacttctgctgtgcagattcctgaagtaaagcaagacacagtgtcagaaccagtcacacctgcatctcttgctgctttacagagtgatgtgcagccagtgggccatgattatgtggaagaggtacgaaatgatgaaggaaaagtaattcggttccattgtaaattatgcgagtgcagctttaatgatcccaatgctaaggagatgcacttaaaagggcgaagacacagacttcaatatnnnnnnnnngtaaatccagatttgcaagtagaagtaaagcctagtattcgagcaagaaagattc

SEQ ID NO: 364098 - DNA, 708 bp, Homo Sapiens
ggggctgtgtgaatcgtgggtgggatggccgcgggccgcctctttctaagtcggcttcgagcacccttcagttccatggccaagagcccactcgagggcgtttcctcctccagaggcctgcacgcggggcgcgggccccgaaggctctccatcgaaggcaacattggcctgcactgcccaaagtcttggaaacttgctggatatgatgtaccgggagccagcacgatggtcctacacattccagacattttcctttttgagccgcctgaaagtacagctggagcccttccctgagaaactcttacaggccaggaagccagtacagatctttgagaggtctgtgtacagtgacaggctccactttgaggctctgatgaacattccagtgctggtgttggatgtcaatgatgatttttctgaggaagtaaccaaacaagaagacctcatgagagaggtaaacacctttgtaaagaatctgtaaccaataccatgaagttcaggctgtgatctgggctccctgactttctgaagctagaaaaatgttgtgtctcccaaccacctttccatccccagcccctctcatccctggagcactctgccgctcaagagctggtttgttaattattgttagactttgccattgttttcttttgtacctgaagcattttgaaaataaagtttacttaagttatgcttgtttttctaaaa

SEQ ID NO: 364099 - DNA, 1001 bp, Homo Sapiens
gggagtgctctcggcggaagtgatcgctgtgtgaatcgtgggtgggatggccgcgggccgcctctttctaagtcggcttcgagcacccttcagttccatggccaagagcccactcgagggcgtttcctcctccagaggcctgcacgcggggcgcgggccccgaaggctctccatcgaaggcaacattgctgtgggaaagtccacgtttgtgaagttactcacgaaaacttacccagaatggcacgtagctacagaacctgtagcaacatggcagaatatccaggctgctggcacccaaaaagcctgcactgcccaaagtcttggaaacttgctggatatgatgtaccgggagccagcacgatggtcctacacattccagacattttcctttttgagccgcctgaaagtacagctggagcccttccctgagaaactcttacaggccaggaagccagtacagatctttgagaggtctgtgtacagtgacaggtatatctttgcaaagaatctttttgaaaatggttccctcagtgacatcgagtggcatatctatcaggactggcattcttttctcctgtgggagtttgccagccggatcacattacatggcttcatctacctccaggcttctccccaggtttgttttgaagagactgtaccagagggccaggggaggaggagaaaggaattgagctggcctatctagagcagctgcatggccaacacgaagcctggcttattcacaagacaacgaagctccactttgaagctctgatgaacattccagtgctggtgttggatgtcatgatgattttctgacggaagtaaccaaacaagaaagacctcatgagagaggtaaacacctttgtaacagcatctgttacccataccctgaagttcagcctggatccggggcccctgactttctgaagctgacaaatgtggtgtctcccaacacctttccaatccccgccccttcatcctggagcctcggcgtcagc

SEQ ID NO: 364100 - DNA, 828 bp, Homo Sapiens
ggggtgaatcgtgggtgggatggccgcgggccgcctctttctaagtcggcttcgagcacccttcagttccatggccaagagcccactcgagggcgtttcctcctccagaggcctgcacgcggggcgcgggccccgaaggctctccatcgaaggcaacattgctgtgggaaagtccacgtttgtgaagttactcacgaaaacttacccagaatggcacgtagctacagaacctgtagcaacatggcagaatatccaggctgctggcacccaaaaagcctgcactgcccaaagtcttggaaacttgctggatatgatgtaccgggagccagcacgatggtcctacacattccagacattttcctttttgagccgcctgaaagtacagctggagcccttccctgagaaactcttacaggccaggaagccagtacagatctttgagaggtctgtgtacagtgacaggctccactttgaggctctgatgaacattccagtgctggtgttggatgtcaatgatgatttttctgaggaagtaaccaaacaagaagacctcatgagagaggtaaacacctttgtaaagaatctgtaaccaataccatgatgttcaggctgggatctgggctccctgactttctgaaactagaaaaatgttgtggtctcccaaccacctttccatccccagcccctctcatccctggagaactctgccgctcaagagctggtttgttaattatgttagactttgccattgttttcttttgtacctgaagcattttgaacctacagtttacttaagtttattgcttctgtttttctaaaaaacaacac

SEQ ID NO: 364101 - DNA, 1133 bp, Homo Sapiens
  misc_feature (46)..(82): n is a, c, g, or t
tgatcatcactatagggcgaactggagctcaccgcggtggcggcgnnnnnnnnnnnnnnnnnnnnnnnnnnnnnnnnnnnnnatcaggccaaatcggccgagctcgaattcgtcgagagcgggggtgagcagcgatacctagggcggaagtgctctcggcggaagtgatcgctgtgtgaatcgtgggtgggatggccgcgggccgcctctttctaagtcggcttcgagcacccttcagttccatggccaagagcccactcgagggcgtttcctcctccagaggcctgcacgcggggcgcgggccccgaaggctctccatcgaaggcaacattggcctgcactgcccaaagtcttggaaacttgctggatatgatgtaccgggagccagcacgatggtcctacacattccagacattttcctttttgagccgcctgaaagtacagctggagcccttccctgagaaactcttacaggccaggaagccagtacagatctttgagaggtctgtgtacagtgacaggtatatctttgcaaagaatctttttgaaaatggttccctcagtgacatcgagtggcatatctatcaggactggcattcttttctcctgtgggagtttgccagccggatcacattacatggcttcatctacctccaggcttctccccaggtttgtttgaagagactgtaccagagggccagggaggaggagaaaggaattgagctggcctatctagagcagctgcatggccaacacgaagcctggcttattcacaagacaacgaagctccactttgaggctctgatgaacattccagtgctggtgttggatgtcaatgatgatttttctgaggaagtaaccaaacaagaagacctcatgagagaggtaaacacctttgtaaagaatctgtaaccaataccatgatgttcaggctgtgatctgggctccctgactttctgaagctagaaaaatgttgtgtctcccaaccacctttccatccccagcccctctcatccctggagcactctgccgctcaagagctggtttgttaattattgttagactttgccattgttttcttttgtacctgaagcattttgaaaataaagtttacttaagttaaaaaaataaaa

SEQ ID NO: 364102 - DNA, 585 bp, Homo Sapiens
ggtatgcggaaccaccacagtgatctcacattttgcgagattatcctgatggagatgaagtcccatgatgcagcctggcctttcatagagcctgtgaacccacgtttggtgagtgggtaccggcgcatcatcaaaaatcctatggatttttccaccatgcgggagcggctgctcaggggagggtacaccagctcacaggagtttgcggctgatgccctcctggtatttgacaactgccagactttcaacgaggatgactctgaagtaggcaaggctgggcacatcatgcgccgcttcttcgagagccgctgggaggagttttatcagggaaaacaggccaatctgtgaggcaagggaggtggggagtcaccttgtggcatctccccccaccttccaaacaaaaacctgccattttcacctgctgatgctgccctgggtccagactcaagtcagatacaaccctgatttttgaccttgcccttggcagtgccccacatcctcttattcctacatccctttctcccttccctcctcttgctcctcaagtaagaggtgcagagatgaggtccttctggactaaaagcc

SEQ ID NO: 364103 - DNA, 410 bp, Homo Sapiens
  misc_feature (301)..(301): n is a, c, g, or t
  misc_feature (304)..(304): n is a, c, g, or t
  misc_feature (355)..(355): n is a, c, g, or t
aagctcaagaggaagtttgcggctgaatgccctcccctggtaatttgaacaaactgccaagactttcaaacgaggatgactctgaaagtaggcaaaggctgggaacatcaatcggccgcttcttcgaagagccgctgggaggagttttatcagggaaaacaggccaatctgtgaggcaagggaggtggggagtcaccttgtggcatctccccccaccttccaaacaaaaacctgccattttcacctgctgatgctgccctgggtccagactcaagtcagatacaaccctgatttttgaccnttnccttgcagtgccccacatcctcttattcctacatccctttctcccttcccntcctcttgctcctcaagtaagaggtgcagagatgaggccttctggactaaaagcc

SEQ ID NO: 364104 - DNA, 432 bp, Homo Sapiens
  misc_feature (77)..(77): n is a, c, g, or t
tggaaacccacggggtaaaagtttcccacccgtatttggttgggtttggggccttaaagcaccccagaaactataancccccacatatccatgaaaatgaaagtccagaatttggcacatgtcagataactggttccagactaacagccccggccctcatttcctcgtcagaaaggtcacccttgagataccttacctatttataggaactagataattttgaaacttccttttgaactgtgcagataaggaactaagtaatgttttattattcaatatgctagcatttactctataatcccttttgaaatgtgagaaaaattgtctctgtgtttgaagaatgccacatctttatgcaaaatataatacagttgcaccaagtaaaagttaatgaaatgcaaaggatattgtttatactaaaagaccaaaaag

SEQ ID NO: 364105 - DNA, 545 bp, Homo Sapiens
  misc_feature (73)..(73): n is a, c, g, or t
  misc_feature (219)..(219): n is a, c, g, or t
tcctctccccagaccacagggggcctctctgcctccagccccaccttccccgggagaagctttccccaatccncaggtctctagatcattctgttctcgagtatcctgtggaggaggcaaaaatgcctggcgccccttctctccaagctcaattctctaagcccctcagggtctcctcctcaccccaccccaggcccttggtgtccaggctgcacccancagatgtctgttgccaaacagcctgccctccctgccggagccggctctgccagccccagattgggaagtctccccgctggagaagggtggggctcctctgagccctgccctgcctcctccatcagatcctttgggaagaagtttctgggagatgcccgcagctgtgcgtgccccagacacaaaggctggcctgtgtgtaagtcaaagtcactcccgcaaacctgaatctcgagctacctattggttctgtgaatgttctgtgtcttttatttattctcgggtgatcagctctttccaagacttcaataaatttgtcagttacagtc

SEQ ID NO: 364106 - DNA, 747 bp, Homo Sapiens
taaattaatctctcccccccaaaaaatgcgaacttaggctgttacacaactgctggggtctgttctcgccgcccgcccggcagtcaggcagcgtcgccgccgtggtagcagcctcagccgtttctggagtctcgggcccacagtcaccgccgcttacctgcgcctcctcgagcctccggagtccccgtccgcccgcacaggccggttcgccgtctgcgtctcccccacgccgcctcgcctgccgccgcgctcgtccctccgggccgacatgagtggggaccacctccacaacgattcccagatcgaagcggatttccgattgaatgattctcataaacacaaagataaacacaaagatcgagaacaccggcacaaagaacacaagaaggagaaggaccgggaaaagtccaagcatagcaacagtgaacataaagattctgaaaagaaacacaaagagaaggagaagaccaaacacaaagatggaagctcagaaaagcataaagacaaacataaagacagagacaaggaaaaacgaaaagaggaaaaggttcgagcctctggggatgcaaaaataaagaaggagaaggaaaatggcttctctagtccaccacaaattaaagatgaacctgaagatgatggctattttgttcctcctaaagaggatataaagccattaaagagacctcgagatgaggatgatgctgattataaacctaagaaaattaaaacagaagataccaagaaggg

SEQ ID NO: 364107 - DNA, 616 bp, Homo Sapiens
  misc_feature (97)..(97): n is a, c, g, or t
  misc_feature (262)..(318): n is a, c, g, or t
  misc_feature (563)..(572): n is a, c, g, or t
agatgttagaattcatgaattagaataagcacaaaggagggcgagaggggaggccgtggaagccgcattcctccccttgccttgggcgcccaccccngaaggggcgcgtcccctccctgctccactgcacgtgggtgtttaaccaggggatatccagtgcctcaagcaccacgacccgggagaaaactgagttgataagggtccattcaagaattgtgcccacaatataccaggcacttgtccagacctgcatcgtccaatnnnnnnnnnnnnnnnnnnnnnnnnnnnnnnnnnnnnnnnnnnnnnnnnnnnnnnnnntgcatgtggctattgagatgtgctgtatgatacacaccggactttgaagactcagtgtgaaaaataaaaagaattttaagaggggtgggggtcgaggggaggcagagcagtaggacaaatagctaatgcacgcagggcttaaaacctagacaacaggttgatgggtgcagcaaaccaccatgacacatgtttatctatatagcacctacatgttctgcacttgtatcctggaacttaaaattagnnnnnnnnnntaataaaagccaacatggcattcattactgccaaaaaaattaaa

SEQ ID NO: 364108 - DNA, 1208 bp, Homo Sapiens
  misc_feature (150)..(186): n is a, c, g, or t
  misc_feature (728)..(736): n is a, c, g, or t
  misc_feature (1133)..(1133): n is a, c, g, or t
ggcatgcgcgttgcgcgccggacgcggaacgtctgccggtgtccccgcgctgctggtcccggggtccctgaaccgcgggcggccccgctccctctgctggccatggcccccccgcccgcgtgccggtccccgatgtcaccgccgccgccnnnnnnnnnnnnnnnnnnnnnnnnnnnnnnnnnnnnnggcgcccgggcccgcgccgagcccgccgggagtgccgtccccgcgcagagccgcccatgcgtggactgccacgccttcgagttcatgcagcgcgccctgcaggacctgcggaagacagcctgcagcctggacgcgcggacggagaccctactgctgcaggcagagcgccgtgccctgtgtgcctgctggccagcggggcactgaggaccacgctgctccgtgtgaataaatgcccagtggcctaaaataattacaaaaatgaacacaccaccccttgatgagcctagaacccacagaaaacaaaaataaatgaaataacttcacactctacaactgtaaccccactcactcgccctggtaaaattttatttttgggggccccttgggccctctcaaaaaagtttttcgaacacttttcctttggggccccggggccccatacggaagacgggaacggggctcataggtgtgttccccaaggaaaaccgcgggtcataaaatagggggtcgggagctctgcccccaaaacaaaaaacacgccnnnnnnnnnaaccgccggatggcttctttagaaacaatactcccagaggggaagctccgggggcgggcctttcccgggggactcatatacacgcgcgggaggcccgataggtgacctctctccactattaatatacttggcgaccccggcctctcgcggcaatatatatttgccacaaaaacagtggcttgaaacactccctcgtaaaggatgttttctgcgcccacacattgtggaaaaaccctcttctacagatacaccgggtgtgtgagagaacattttggtgataacctccgagtggcgcgattatttcagcccccccttgttgcaccgcccgtgtggggatataaatatattttggccccgccgggggtgcacaaaaggggggggcgcgtgccgaagaaanaagtggtccgcacataataatggggcggcatcctcttttataaaaacacaacaaacggtgggagtggaatactct

SEQ ID NO: 364109 - DNA, 508 bp, Homo Sapiens
  misc_feature (136)..(136): n is a, c, g, or t
  misc_feature (143)..(143): n is a, c, g, or t
acatcctagttcaaacttactctccaaagaaccaagcacagagccaggcatgtcatagaccttcaattgttcgaggcaagtgtgcctttactcacctcagggcttatttccagaacacatttcttctaccatgatnaccaccncactcccacctccctcctccctcttccaaaccctgattgaaaatataaacaagtacgagttacataaattgatagataaaaagaacgggttatcaatagaagcctgcagtgtcagaggtgcacctgcatcttctgggtactgtaggacttgcattcctttccagaaatgtgccttttaagcctctgcaagctgaaccctgttctctctctggccacctcccagtggctttacttctgcccttcatcagcttagctgttgtcatacagattgcagagacattcttgctgcacagaagccaaatgtagttgtaagaataatttatggatggttccatccatccacattaaaaaatagttccttatca

SEQ ID NO: 364110 - DNA, 540 bp, Homo Sapiens
  misc_feature (11)..(11): n is a, c, g, or t
  misc_feature (144)..(144): n is a, c, g, or t
  misc_feature (146)..(146): n is a, c, g, or t
  misc_feature (158)..(158): n is a, c, g, or t
ggaaagcaagnaggtgccagaggccttgagatgagaagaaaaacaccaagcagccacaaaagaaagcagcctacccttcacatcggtggaccaccctatccatcaccctgccaaggacactgaatgtccaccatctccaagggngngctcccagtgcntcatcaaccccaacaaatcatgcttcacccaaagccacctacgtgcaggacagcccgactgagaccaagacctacaacagtgtcagcaaggttgacaaaatttcccgcatcatctttcctgtgctctttgccatattcaatctggtctattgggccacatatgtcaaccgggagtcagctatcaagggcatgatccgcaaacagtagatagtggtggcagtgcagcaaccagagcactgtataccccgtgaagcatccaggcacccaaaccccggggctccccttcgcgtatttcaggattctcctttttacccctctaccaagctgtgaccctcaattcatatttatgaatctctacgcaaaaaataatctacagtaaaaa

SEQ ID NO: 364111 - DNA, 1183 bp, Homo Sapiens
  misc_feature (567)..(569): n is a, c, g, or t
  misc_feature (573)..(576): n is a, c, g, or t
  misc_feature (579)..(633): n is a, c, g, or t
  misc_feature (635)..(640): n is a, c, g, or t
  misc_feature (836)..(845): n is a, c, g, or t
  misc_feature (869)..(953): n is a, c, g, or t
  misc_feature (1001)..(1024): n is a, c, g, or t
ggtccggaattctcgggatcagagggtgtgaaggagctgtgtctgctgctgcttaaccagtccctcctgcttccatctctgaaacttctcctcgagagccgagatgagcatctgcacgagatggcactggagcaaatcacggcagtcactacggtgaatgattccaattgtgaccaagaacttctttccctgctcctggatgccaagctgctggtgaagtgtgtctccactcccttctatccacgtattgttgaccacctcttggctagcctccagcaagggcgctgggatgcagaggagctgggcagacacctgcgggaggccggccatgaagccgaagccgggtctctccttctggccgtgagggggactcaccaggccttcagaaccttcagtacagccctccgcgcagcacagcactgggtgtgagggccacctgtggccctgctccttagcagaaaaagcatctggagttgaatgctgttcccagaagcaacatgtgtatctgccgattgttctccatggttccaacaaattgcaaataaaactgtatggaaacgatgagcnnnaaannnnaannnnnnnnnnnnnnnnnnnnnnnnnnnnnnnnnnnnnnnnnnnnnnnnnnnnnnnannnnnnagggggggcccgctctaaaaaatcccccgaaggggcccaagtttacgcgtaccccagttttttttgaaaaaaaggggccccttaaagggaagccgtattaaaaggctagggccttggccccccctttttacacacccccggactgggaaaaactggctaccttgggaattttttgtgaaaggaacccttactttcnnnnnnnnnnacaaaaattgggaaaaacctcccnnnnnnnnnnnnnnnnnnnnnnnnnnnnnnnnnnnnnnnnnnnnnnnnnnnnnnnnnnnnnnnnnnnnnnnnnnnnnnnnnnnnngccctcgggcgcgcctgaaaaaattttttctctacctggggaaatgannnnnnnnnnnnnnnnnnnnnnnnccccggggagcccaagggggattcccaacatggggtgtggcgggaatattttaaaaaatccaacagccccccaaaggggttcttttttagaggggcccccctagaagcccttccaaaaaatgtgggtgtttggaacctacaaaaaccgcccccccacac

SEQ ID NO: 364112 - DNA, 454 bp, Homo Sapiens
  misc_feature (90)..(90): n is a, c, g, or t
  misc_feature (150)..(150): n is a, c, g, or t
aaatcaactaaggtgaaatgaatcccaaaatgtgacccaaaaaacttcttttcccctggctccctggaatgccaaagctgctggtgaaantgtgtcttcccactccccttcctatcccacgtaattgttgacccaccctcttggcctaancctcccagcaagggcgcctgggatgccagaggagctgggcaagaacacctgcgggaggccggcccatgaagccgaagccgggtctctccttctggccgtgagggggactcacccaggccttcagaaccttcagtacagccctccgcgcagcacagcactgggtgttggagccacctgtggccctgctccttagcagaaaaagcatctggagttgaatgctgttcccagaagcaacatgtgtatctgccgattgttctccatggttccaacaaattgcaaataaaactgtatggaaacgatgagc

SEQ ID NO: 364113 - DNA, 439 bp, Homo Sapiens
  misc_feature (92)..(92): n is a, c, g, or t
aggttcaaaaggacctttaacggggaaaccggacaaaaggctcctaacaaagctttctgtgaatggaggctttccttctgtgtcccccttanactctctcctaattggacttaacaagtcaggcttcctctagaccccgggattgctgtcctctctgccttctctatgtggctaaattctacttattatttctaaattacctaaggcagtagcttctcccaggaagcctgatccataggctcggttagatatccatcctgtgctctgtacaataatctgtgataaccatgattttattattgtatgcttgcctatctgtccctttcaccacacttggagatttatgagaacagagaacagaaatttgtctcattcattttggtagacccaacaggaagtaagtgctcaataaaagtttgtagaagacaagataacaaag

SEQ ID NO: 364114 - DNA, 509 bp, Homo Sapiens
  misc_feature (208)..(208): n is a, c, g, or t
gcccagggattaagtgttgaaatgacattaggtaacaggtttagagacagtaggaaaggtgtaataatagaagattggagacagatggagaacatttctgggatctagatttcagtactgttacagtaatggttgatgacagattccaaattatagataacatcaaaatagaaaataggtaatagttatgagaataaggatgttaagnaagtgtgaagctaaactgataagtgacagtgacacagtaattaacatttatgaagccaggttttttggcaagcctgttatatatgttatcttattaggtcatcataataaatcacaagtagatacgattacctgttttgcagatagagaaactgagttggggtagaggtgaggtgacgacacagagatagtggttattgggaactacagttgaagaaggctagaaatactgattaactttagtctgtattttaaaaacataaatctaaatataagtgttataaataaagagaataaacact

SEQ ID NO: 364115 - DNA, 736 bp, Homo Sapiens
ggccagagctctgtcctctgggtcttagtaacaggttgttccttgggcctacaagtactcagtttccaaacttttcacttaactaagcacttgcaggcctcagcattaatgctacctgaagcttctctgctaatcctcattataaattagttctgtgtacaaactttcaagttgccaatattcctttcataacattaacacaaattttgtaaacgagtgtatttggtggttggtcctaagttgctgtatcccatactacgtttaacctctgtgaggacaagggacgcatgtttcttgttcagaattataaattagtccagtcatagtccctggcacataatattgaaattagtgaatcgtgtgtatcttcataaacatactgtttgtcctggtagagcaaaaattgtcaacctgggattcatggacaaccaatgatgtgaaaaaaacccagtaatttcctgcaagattctgtgcttttccttggagggaagtccctgaatttcatgggactttcaaaagaactgagacattctgacccccagaaagaaagacccaccacagtgataaaagagttccaaagcttcacctccagctttttactgtctctcccaccgccaggtatctgtgacactgccgtatcaacatacaggcaatactcctaatttgaatataatcaagaacttttccactacctgtttggatggagaaactgattaaaaaaacgtttctagaaagc

SEQ ID NO: 364116 - DNA, 919 bp, Homo Sapiens
  misc_feature (53)..(53): n is a, c, g, or t
agccaaggttgccgcggtgtctccgtcagcctcaccatgaacctggaaccgcncaaggctgagttccggtcagccaccagggtggccgggggacctgtcacccccaggaaagggccccctaaatttaagcagcgacagaccaggcagttcaagagcaagcccccaaagaaaggcgttcaagggtttggggacgacatccctggaatggaaggcctgggaacagacatcacagtcatctgcccttgggaggccttcaaccacctggagctgcacgagctggcccaatatggcatcatctagcacgaggccctgctgaagtccagaccctccccctcctgcccactgtgctctaaaccctgctcaggattcctgttgaggagatgcctccctagcccagatggcacctggacaccaggatgggactgcaacctcaggtctccccctacatattaataccagtcaccaggagcccaccacctccctctaggatgccccctcaggggctggccaggccctgctcaacatctggagacacaggcccacccctcagtcctgcccacagagaggcttggtcggtctccactcccagggagaacgggaagtggaccccagcccgggagcctgctggaccccagatcgtcccctcctcccagctggaaagctagggcaggtctccccagagtgcttctgcaccccagccccctgtcctgcctgtaaggggatacagagaagctccccgtctctgcatcccttcccaggggggtgcccttagtttggacatgctgggtagcaggactccagggcgtgcacggtgagcagatgaggccccaagctcatcacaccagggggccatccttctcaatacagcccgcccttgcagtccctatttcaaaataaaattagtgtgtccttgccaaaa

SEQ ID NO: 364117 - DNA, 518 bp, Homo Sapiens
tgcacctttggatcttcagccaaccgggcttttgggccgaagctgccgccgccaaatgccctcaactggtgatccagcgcctcaatcaccggacggacctaagggcgctgctgggtggcgacgccgcggcggacacatcactcaccaggaccggggaagcactgttgaaacgtagtgacggcaggctggaactgttcaaggtgttcccccccgacgccgacccggcgcccctctgcgccgcgtctcaaatcgcaccaccggtgtaggttttcggggcgaattgcgcggccacaacctacatcgcgcagcggcgccgctgtccagacgcgtggcacaccgcgaccaccgctgctacactcagatcaatcgttcggcccgcaccgagagtcatctcggaagtgggccggatttcttttgtggataccgttatcgggtgccccagccggtcaagccttggttgtccatcaatgaccaggtaactcgcctccaaagccgcggcatgctcatcgtcgacaccg

SEQ ID NO: 364118 - DNA, 626 bp, Homo Sapiens
cagctccaccttcatcagaatggcgtggaaatgctcatggaaaatgaaggaccccagtcaggaaccaacaagccaagggaaacctgccagggccctgagtgtcctggcctccacacgtttctcttgtggtcccattcaggctttaactgcctgctttgtgcagagatgctgggacggaaagaggacctcctccaccactggaagcaccagcataactgtgaggacccttccaaactgtgggctattttaaatacggtctccaaccagggagtgatcgaactttccagtgaagctgagaaatgagaccccaaggcagcctggggttaaggagagagctctgccgccaccttccttcagagcttcgtgctttatggtggtgcttagtcacaaagatcaaacaacaggattggtgtgagtgaacagaaatgatttttgtacatggttttattttcttaacgaaataaaatataagctctcgaagcatatttttctaactatatgcagtcttattttaaaatacgtactgattcttaatatcttagactttcagaataaataaaaagatcaaaatttgaagattgaaatttagcagaatataggctgttcttcaaatacagctctcagtg

SEQ ID NO: 364119 - DNA, 503 bp, Homo Sapiens
aacaaagcaaacaaacagaaagcttgaacaagaatttacatctgggaaaacgcttctactcatcaagagtggaattcctttttattcctataattgactcacagcttcaaaaatctgtgaagtcatactttggtcacggaagttgcaagaaaccatatttgcaaacgttttattttaaagaaggtatttaaaaatatttcacatattagccacagatttctagaagtgaagttataaaaattagaaattatattttgccttttgatgatagcaagtgaaaagagattgctccaagcatgttttcaataaattcagtataactgcaacacaaaaattctgcatgcaggcttcatacacacacgttataattttatgcatttatcttgagagttgtataattaattttaaaaatgcaacagaaatgtgaagttaagtctactttgccaataatggaaatgtctcatagataattttgaatacaattaaaattttgtttttatcat

SEQ ID NO: 364120 - DNA, 847 bp, Homo Sapiens
  misc_feature (87)..(112): n is a, c, g, or t
agatcttgcgccctggggctccggatccagttttggcacgttgttgcacctgtgacttgtccttggcctggcactgtccctcgcctnnnnnnnnnnnnnnnnnnnnnnnnnnatgctcacgtggtcgctttgctcccgcagtcatgcacttgggtgaaaacagactgaaaagtcacgggaaccagcttgtctccccagttatggcgcagagctgcaaggatggctgtgggtcattaatttctccgtggctgacctgtgtttgtaaccccgcagctgttgcgagggggaaggacactgcttcggattcaaattttgactccctgctgcagtgtgtcaccttgagccagtcccagatctttgcgttctcacaattgtaaaatgttaacagaggctgcctaccttgtggctggaattaaatgaattaacgtgtgtgaatgtgactagaattcagtacatgttcaggaaaagctgatttccgctttgctgttaccgtgaatattactgttttagggtgtagaaaagggtggaaggggatgttattgcatcctggaagcttatccttttgaggtaaagattgatttctggtcccctgcgtggtatatagtgtagttttgacattatttagatgtgttatgcacatttgggtgttgattatatggcttacgatcaagactaaccagtcatgccgtgggagattaaggtcgtggtctcttgtcaggattgtagtgagatttaaaaattccagccagaaataccaggcttagaatgctctgaagccctccccacatttttgccatctctagcaggagggcactgcatagcagaaacaaagacgttgtaaattgtt

SEQ ID NO: 364121 - DNA, 530 bp, Homo Sapiens
aatccacacacctttacctcagaaaaatcatagtgtgtacattgcttgaatgatccttttgggtttggctgttactcacagatgaaggagacatttccaaggttgtaaccagagtcattctaagcacagtccttgcagcagtagagacaatcccaatgactacaggaaatcctcaactctcatccagaacctgtaagctcaggacatgcatcataggaaggatgtgaattgctgcagtgcttccatggtagtcttttgctccctgcctacgtgggcaagaagctgtagactctgggataatttggacgatcccagcacgggtatactccactctgcttcatggcacttaccaaggctggagagagaccacacccatcccttctgttttccattgcattcccttccccaaactttccatccagaaattcttctttggttgaccctgccacattgtatattcttgttctcccccccatgatgcattttatttcagtatccttagattcctaataaatcaattatttaaacat

SEQ ID NO: 364122 - DNA, 504 bp, Homo Sapiens
cgggtggcctctctcgctgccagggcccttgtcagagcagccaggctggacagacggcctccctcctctccatctgaccggcacctgctgcttcggggcttaggccaccgctccctgtccccagaggagatagccccagatggactggaatgttgtggcatgagagcgcatgtgtgcgatggccccgctgtggtcccctctctgtccctccatctgtatgtgttctgtgtcccttgcatgtgtgcgtgttagagtgagcgcgtatgcatcaactcattgggctcttggctgctcacaaggcaaatttgacttggaaagactttcatctccttggaaccaagacttcctgagtccccctcaccctggccctgttccaccatggttatctgggtattggggaatggaaactttgggggagtgactttttaaagagacacttataatttctactactgcactactgtccattgtgggatgattaaacatggtatttaactgtgaaaa

SEQ ID NO: 364123 - DNA, 136 bp, Homo Sapiens
aaacagtcaaagagtcatgtttgaatttcacaaaatcacatcagacagaagttgttttcttcaggagggaaatgaaccacttaatatacccatactaccttgaacaatgaaattgaattaaaatagccaaactttg

SEQ ID NO: 364124 - DNA, 554 bp, Homo Sapiens
gcggccgccgaggcctcggcggtgctcaaggtgcggcccgagcgcagccggcgcgagcgcatcctcacgctggagtccatgaacccgcaggtgaaggcggtggagtacgccgtgcggggacccatcgtgctcaaggccggcgagatcgagctcgagctgcagcggggtatcaaaaagccattcacagaggtcatccgagccaacatcggggacgcccaggctatggggcagcagccaatcaccttcctccggcaggtgatggcactatgcacctacccaaacctgctggacagccccagcttcccagaagatgctaagaaacgtgcccggcggatcctgcaggcttgtggcgggaacagcctggggtcctacagtgctagccagggtgtcaactgcatccgtgaagatgtggctgcctacatcaccaggagggatggcggtgtgcctgcggaccccgacaacatctacctgaccacgggagctagtgacggcatttctacgatcctggagacgtctttctttgtgccttgatgttgagagcgcctctcttttga

SEQ ID NO: 364125 - DNA, 2154 bp, Homo Sapiens
  misc_feature (263)..(263): n is a, c, g, or t
  misc_feature (1989)..(1989): n is a, c, g, or t
gggattcccttcatcaaggtccagtggagagaggatctacgcgaatgaagaaagaagcaatagagtctcagtgataagttcttcggaaaaaaggtatcaaaaagccattcacagaggtcatccgagccaacatcggggacgcccaggctatggggcagcagccaatcaccttcctccggcaggtgatggcactatgcacctacccaaacctgctggacagccccagcttcccagaagatgctaagaaacgtgcccggcggatncctgcaggcttgttggcgggaacagcctggggtcctacagttgctagccagggtgtcaactgcatccgtgaagatgtggctgcctacatcaccaggagggatggcggtgtgcctgcggaccccgacaacatctacctgaccacgggagctagtgacggcatttctacgatcctgaagatcctcgtctccgggggcggcaagtcacggacaggtgtgatgatccccatcccacaatatcccctctattcagctgtcatctctgagctcgacgccatccaggtgaattactacctggacgaggagaactgctgggcgctgaatgtgaatgagctccggcgggcggtgcaggaggccaaagaccactgtgatcctaaggtgctctgcataatcaaccctgggaaccccacaggccaggtacaaagcagaaagtgcatagaagatgtgatccactttgcctgggaagagaagctctttctcctggctgatgaggtgtaccaggacaacgtgtactctccagattgcagattccactccttcaagaaggtgctgtacgagatggggcccgagtactccagcaacgtggagctcgcctccttccactccacctccaagggctacatgggcgagtgtggttacagaggaggctacatggaggtgatcaacctgcaccctgagatcaagggccagctggtgaagctgctgtcggtgcgcctgtgccccccaagtgtctgggcaggccgccatggacattgtcgtgaaccccccggtggcaggagaggagtcctttgagcaattcagccgagagaaggagtcggtcctgggtaatctggccaaaaaagcaaagctgacggaagacctgtttaaccaagtcccaggaattcactgcaaccccttgcagggggccatgtacgccttccctcggatcttcattcctgccaaagctgtggaggctgctcaggcccatcaaatggctccagacatgttctactgcatgaagctcctggaggagactggcatctgtgtcgtgcccggcagtggctttgggcagagggaaggcacttaccacttcaggatgactatcctccctccagtggagaagctgaaaacggtgctgcagaaggtgaaagacttccacatcaacttcctggagaagtacgcgtgaggacgcctgagccccagcgggagacctgtccttggctcttcctcccaatgcccgtcaggctgaactcgcctcccccgtgactctgcctcgggcctcgcagaggccgctggtcacttcgtcatcattttgcccctggagacgtctttctttgtgccttgatgttgagagcgcctctcttttgagcaaacaagcattctatatgcaaccagagtagaggggacctgctcagcaggtgtgaccagggttctctgaatctgttattgtttttgcttctggaaagttcatttggggtttacaacaactaggatgtgttgggtgagatgtttcagatctggagaaatgagcaggtgtcgggaaatgtgtgacttaaccgtggtgagggctggaaatccaaactcaccaccatgatctgtgaaataaagcccttagcggtgtgaagcatccggtcctttgaacagaagggcctggaaggcccctggggctgagaaagggtccgcccggtggcctggaggcaggcgccaggagcgcagtagcacgtggacctgggcaggatgttgcactagncttggggttagatgctggggggctgcggccacggtcagaaggccaactgttaaaagccctttgggtgtaacccagggctgccaaggaggaaactggggccctccgctttcccagcaaccgcagccagggccctgaagaaatctgggtgcgcccccgggggggtta

SEQ ID NO: 364126 - DNA, 460 bp, Homo Sapiens
ttggaccaaagtttcatataggaataaataaaaaggaggaccacttgtgagccaacctaggaaggacttgccagaaagtagcagctcctgctgaaaaatacagtgccttcaaaatgattctctgtgtgaattgcatgcaatttccatgtaaccataaagtgtaacctgtatgtgccatgacatgtgtctagaatgtgtaaagttaggattcagcaggaaggggcctggccctgtcactgtggtggatcagtggacctgctgaagtcactggactcatgtgacttaggtttgcagcatcagacccctgtgtttgcattaagtggccacatcgttgaaatcggatcaatctctccctcagctttctttcctactttgcagctttgctggttttaactgcttcattcttctgcttcttggtatccttttttcttttgaaataaaaacatgaaatacttaattc

SEQ ID NO: 364127 - DNA, 873 bp, Homo Sapiens
gcaagtagaaaagacatcacatttactgagtgccctaatgtgatatgcctatgccaggcactttacacgggttgtgtcgtctcatggaattctctcagcacccgtgcaaggtaagtactactattcccattttacatctgggaaactgaggcccagagaggttcgactactctctagtacatgggcaagcagagattcaaacccaggacactctgttcaaaacccattttctttccaccacactatgctgtctcgtggcacacaccaatgtgcacatcacagctgcactgtaagtcaagtatagttcggaattcttgacccgcatttgctcctctgcctcacctgtttcatgtcccccttcactgcgtttcggagggtagggattggagagggctgcaggctatccataacatacctgggcacttaatttccaccctgctcccccaggcctcatccatggtgggcctctcccatgaccttgactggaacccaggggcctcctgggactggtttggtcatgccagaggaactaagccttagaaaggttactattctttaggccaaagtgcaccctggtaaatgtggtcctctgctatgacagctcaaatgatatcctctgccaagagcaagcagcacagtgaggtccccaagtttccatacgaactagcagactgaactctccctgcgtgtcacagaaaggcagcgctttagaagtgggaggaaatctacagccattgcataaaacgcaggaaaccccactcgcattacaagcttcagcatacccgttcaaatccccatcatcaacatcaccaggccctgtcctgtcgtttccggaatctggttacaggcactcagacccaaaagtccatcaac

SEQ ID NO: 364128 - DNA, 334 bp, Homo Sapiens
cagcccctggggtggctctctcaaagcaatatagttcccctgcgggggacagcaagacaggggagagggttggggtggggacctgggggttccccatgtacagctatgtatattcaggggtgttctccgtctggtacccgctgtgggcatctatgtgtgtgtgaacctccccttccccatgccctgcatgacctgtgatgctgcagacaccaccatcctgtgtgcaggtgtgtgttggggggcacggaggggcatgttccatgtcctgttgcaccctccaccctgtgacccatgtactcggttgtaggaagtaaagagaactgagcacaattca

SEQ ID NO: 364129 - DNA, 402 bp, Homo Sapiens
gagccagggctcaggcccccaactctcctccttgcccctgcaccctcggacttggcctggccagaagggatgggggcaagaggaaggcagccaggggctccagcccatgccctcacagatttggctctcgagttggggagcgaagggctgggggaggacactgggaaccgggccagccgtggccctgcacttcccccagggagcaccaaggctaggcgcggcttcaccgcggggctgggtcgtggccagcttcgcccctgggtctgaagacctctgggcggcccaggccaaccttgccctgccgccgcacactcggctgccttctcatacccaggcttggggatttccaggtcccgttcccctcgtggcctggctgccagtcctccagcacccctcactccg

SEQ ID NO: 364130 - DNA, 962 bp, Homo Sapiens
  misc_feature (71)..(117): n is a, c, g, or t
gcggccgcggcctgcaacgtcatcgtgaacggcacgcgcggcgccgccgccgagggcgctaagagcgcggnnnnnnnnnnnnnnnnnnnnnnnnnnnnnnnnnnnnnnnnnnnnnnnaagaagctgctgtcgcctgaggaaccggcggtgagcgagctagagtcggtcaaggagaataactgtgcttccaactgccacctggacggggaggcggccaaaaagctgatgggcgaggaggccctggcggggggcgacaagtcagacccgaaccttaataaccccgcggacgaggaccatgcctatgctctgcggatgctgcccaagaccggctgcgtgatccagcctgtgccaaaacccgcggagaaggctgccatggcaccgtgcatcatctcctcgcccatgctcagcgccgggcctgaggacctggagccgccgctcaaaaggaggtgcctccgaattagaaatcagaataagtaaaaggaacgttcactcacagggtacgctcatggagagagggcgcagagcaaaccatgtcacgccatccaatgacaccagctggtcagctcaccaccccctctggctaaaactcaagcaaataaagccgcttcctgtcattaagcatctcagaggaagcagccctccctcgatggcctctagcccagagaagcccgcgcatcttggacccaccaagcaggcccagccttcctgctgccaccatctctgcttctccccagaggaacttagggatttcacccctggcttttaaagaaaaacgaaataccgataagccacaaggaccaatgtaggtattctccccggcccatcttcaaggtctcagcgactgaggctggaagatgatatggattggaacacgatgaaatctttgcttaatctttttaaaaagctgctgtggttttgctggtacactaagaattgtgatttgcattgtacggtttaggacc

SEQ ID NO: 364131 - DNA, 469 bp, Homo Sapiens
actcagtgactcacctgcagggttcaaaggatcatggcagtgtgccattattgtacctttaattccaccacctttcataaagccaccagcagaagatgatgtgtcaaatgtacaaataatgtgtgcctggtgccagaaagtgggaatcaagcgctattccctgagtatgggaagtgaggtgaaaagcttctgcagcgagaagtgctttgcggcctgccgacggagcctacttcaagagaaataaggctaggagatgaaggatgggacatgctggaaaattttccccagcagcactatgctaaggaaactccaaggcttgccttcaagaataactgcgaactacttgaacgttcactcacagggtacgctcatggagagagggcgcagagcaaaccatgtcacgccatccaatgacaccagctggtcagctcaccaccccctctggctaaaactcaagcaaataaagccg

SEQ ID NO: 364132 - DNA, 642 bp, Homo Sapiens
  misc_feature (59)..(59): n is a, c, g, or t
agcgtaagagggtaagtgttcgcaacacaaagatttcctggcacctttttgggcttcangataacacttaggtgaaaggatgatcaccagttcatttctggacaagtgtggatgccctataaaatctatgggagaatgatcccatgcaagcatgttttttgctatgactgtgctattttacatgaaaaaaagggagataagatgtgtccaggctgtagtgatcctgtgcagcgaattgagcagtgtacacgaggttctctcttcatgtgtagcattgttcaagggtgcaagagaacatatttgtctcagagagacttacaggctcatatcaaccatcgccatatgagagctggaaaacctgttacccgtgcttcacttgaaaatgttcatcctcctattgccccaccaccaactgaaatccctgagcgttttataatgccaccagacaagcaccatatgagccatattccgccaaagcagcacatcatgatgccaccacctcctttgcaacatgtgccacatgagcactataatcagccacatgaggatattcgtgctcctccagcagaattgtccatggctccacctccacctcgatcggtcagtcaggaaacctttcgtatttcaactacaagaacacca

SEQ ID NO: 364133 - DNA, 830 bp, Homo Sapiens
gcggccgccgctgggcccccggccaccctgcccttcccgctggcgcccgccgcgcccgcgccgcccccaccgctgctcggcttctccggggccctcgcctacccgctggccgccttcccggccgccgcctccgtgccctttctgcgggcgcagatgcctggcctggtgtgagccccgcctgccgggccctctccccacgaccctgtggacctgtgtggacgcgcgattcagcggcaggcgcagggctcagggggcgttagggaagggatggtcgctcctgcggcctcctagatacctcgggagcgcaggccgcggccgggcgggcctcagctcctgtggggagcgcctctagaatgtaatgggacgccccacccatttgccaggctggatccccactcgaacagggggccatgcagagactctgggctgcgcagcccccggcgccacggccaccccccggcctcagcgaggagcggtcggccatggccacccggggcagctgccctcaggccaagcccagcgcaacaaaggaaaactacgaaccggctgtccaaggctgagcggtgactgtccccacagactgcccccaacactaaacgtccctttcctgggacccagacagcaggccggcccggagggctgtgctacccctctcgcgggtgctggtggagaaaggaccctggacctgtgggtcccatcgtccgttccaggagcaggcaggctggggctctctgcagacgtcgcagcctccgggttgttgtttttttaaatgaatctacttatttgcgtatggaataaaaagggacattttctggaaaaaaacctcgtgc

SEQ ID NO: 364134 - DNA, 201 bp, Homo Sapiens
  misc_feature (19)..(19): n is a, c, g, or t
  misc_feature (26)..(26): n is a, c, g, or t
  misc_feature (83)..(83): n is a, c, g, or t
ccaaaagcccattcccagntgccaangcccaggggcttatttctagggaaggtaggtcggtttccatgtttccctcccgttanttttattttttactttttgcctgagacaagccgagtatgaggtggtttgatttaagaaaaatcaatgaaattgtttactactgttttaaaataaaaccgtaaactctggcaaaaaaaa

SEQ ID NO: 364135 - DNA, 644 bp, Homo Sapiens
  misc_feature (50)..(50): n is a, c, g, or t
gacttcatcaatgatggcttgaaggctgcagatagtgacccagtggtccngccttacgaccagcccttcatctatgactacgagggtgacggctcggtggcgggaacgctgagctccatcctgtccagccagggcgatcaggaccaggactaagactacatcagagactgggggccccgcttcgcccggctggcagacatgtatgggcacccgtgcgggttggagtacggggccagatgggaccacaggccagggagggtctttctcctggggcactgctacccagacacagaggccggacagcctgaccctggggcgcaactggacatgccactccccggcctcgtggcagtgatggcccctgcagaggcagcctgaggtcaccgggcccgacccccctgggcctggggcagcctccttcctgtaggcgagggcccaagtctgggggcagaacctgagtgtggatggggcggccaggaagaggccccttcctgccggggtgggaagagtttctctccatcggccccatgcgggtcacctccctagtcccacctttgcctcctaccagtgaacctcatctttgtatgaaagacagcaacctcctgggtaaatctgaatgaaaaacgtgctagtctctttcatgc

SEQ ID NO: 364136 - DNA, 1478 bp, Homo Sapiens
agcgggaggtaggagcgatgtggcctgggaacgcctggcgcgccgcactcttctgggtgccccgcggccgccgcgcacagtcagcgctggcccagctgcgtggcattctggagggggagctggaaggcatctgcggagctggcacttggaagagtgagcgggtcatcacgtcccgtcaggggccgcacatccgcgtggacggcgtctccggaggaatccttaacttctgtgccaacaactacctgggcctgagcagccaccctgaggtgatccaggcaggtctgcaggctctggaggagtttggagctggcctcagctctgtccgctttatctgtggaacccagagcatccacaagaatctagaagcaaaaatagcccgcttccaccagcgggaggatgccatcctctatcccagctgttatgacgccaacgccggcctctttgaggccctgctgaccccagaggacgcagtcctgtcggacgagctgaaccatgcctccatcatcgacggcatccggctgtgcaaggcccacaagtaccgctatcgccacctggacatggccgacctagaagccaagctgcaggaggcccagaagcatcggctgcgcctggtggccactgatggggccttttccatggatggcgacatcgcacccctgcaggagatctgctgcctcgcctctagatatggtgccctggtcttcatggatgaatgccatgccactggcttcctggggcccacaggaccggggcacagatgagctgctgggtgtgatggaccaggtcaccatcatcaactccaccctggggaaggccctgggtggagcatcagggggctacacgacagggcctgggcccctggtgtccctgctgcggcagcgcgcccggccatacctcttctccaacagtctgccacctgctgtcgttggctgcgcctccaaggccctagatctgctgatggggagtaacaccattgtccagtctatggctgccaagacccagaggttccgtagtaagatggaagctgctggcttcactatctcgggagccagtcaccccatctgccctgtgatgctgggtgatgcccggctggcctctcgcatggcggatgacatgctgaagagaggcatctttgtcatcgggttcagctaccccgtggtccccaagggcaaggcccggatccgggtacagatctcagcagtgcatagcgaggaagacattgaccgctgcgtggaggccttcgtggaagtggggcgacttgcacggggcactgccctgagctctggggtaaggacgagaagagccaaggtccgcctgctgccacagggtcaaaggaggttatccgatcaacccagaccagaggctctgaaccctgaaccaaagtcccagagctgaggctgggacgtgacctgtgctgagggctgtgagaatgtgaaacaacagtgtgcacaatgcgtgggaacaacaaaagaaacgac

SEQ ID NO: 364137 - DNA, 483 bp, Homo Sapiens
gcggccgcgctcgtctcgccgggctgttcgcgggcaggccctgccctgaagggacgaatcggcttggagcgcgggaggtggagtcggccccggcggtcgctccctggacccaacccgaggctgacccaggcccctgcccatgcggggcgcccctggctcggaagagtcccccgggccgggagcagctccaggcagcggccccggaggaagaggaagaagggacagtgctcagcttgggggacccggaccctcgccgcggcatttggagccgggggcagtcccgaactctgtgcttggcaccgccgctccgagtagggcagcgcctgccgggaccctgacccggaccccctgcgcctcgtaggcggggcgccgccgcgccaccctgttcttccgtgtctccctctgcctggcggcagtcacggccaagagagtattatgagggaggccgaggacttcatgctccggacagagaaacggcgctgg

SEQ ID NO: 364138 - DNA, 375 bp, Homo Sapiens
gagaaggtggaataaagttacacctggagtttgttgttggttttgagtatataaaatactgactttgaacaggaaaggagtctcctgaggggagaccgagtccagcacaagtgaaggagttaccattgaaatgatgactttcaaacagcactggcctctgtattgaccctatccttgtttgatatcatgctgttagaattcagcctcctaaagaaaattttcccgtgtatctactgtaatttggggattgcagctggcatttaattcattccttcagcagatgcttgcttatctactttatgccaagcacaccacagaacagaggacaaaataaatctctttcatggaacttgaagtctagtggggaaaaatgac

SEQ ID NO: 364139 - DNA, 978 bp, Homo Sapiens
agagggctgtgtctcaaaagctttggcccgagtccaagtcaatgacaggtggttcgccgttaccccgtgcagcctcatctctgtatacagtatgaagtcttagaagctgcccagctggccactagagtccttggaatggtatttctggtagatcggtaatctgcagtcaaggtgcagaggcctgagacagagctcacgcttgaattgtgacaccctcgtgaatgagctggtagcgagattgctgaaaacccaggctctatattatctgtgctggagtgagtgaaaccttcaaagaacagctattgcaggagccccgcctctttcttggcctggaagctgcgatcttgcctgaagatcttaaaagtggaaagcagaggacaatactgtttccggaaaattcaaaaggttttggcagtgctccagcaggccctcaacagttctcaccaggcaaggactggtaagctgaaaggcaggcatgccctaacccccaggcacctccatgcctggctcagaggcttaccacctgaatctaacaaggctcccagggcttcagtgttgtactctcccccctttgaacaggaggccttgcagactctgaaactggaccaccccgaagatagcagcctggcgctggagccggaagattggaaagctctacaacagcttgtgcccgggcactctctgcctcatcctgctgccaggaaccaagagcactcatggttcactctctggtctaggactgatgggaataaaagaggaagaagaaagcgctggcccaggcctgtgttcgtgagtcggcctgccatgtttccatgtgccatttcttaccccttgtaggcaatggcaaagaatgtggtcaggctgtagcctccccaaccagcagacagctttatggaaacttggtatagcagctaaaagagtttagtttgtttatatggcatgtataagttttcaataaatgcctaaagttacaagcat

SEQ ID NO: 364140 - DNA, 503 bp, Homo Sapiens
ccacttaatatacctaggaaatgtttcataggcattgtaatgaatttaaaatggctgcaaaaatctttatcattctccccatagagtttatttcccctccctttgaatctgtgtggcccagtgtctgcttacccaatagaatgcagcaaaagtaaccttgtggtagttccagactttagaaggactgacagcttctgtttccaacctcttggaatacttgctcttgaaatgggtgttctgggggaatgcagccccctgtgtcagaggtccaagtgtcatgaaggcatcatagtgtgaggaagcccaagtgagtcctgtagagaggctgcgtggagagtgacagagattgtttcctggctagtttgtagctattccatctactaagacacaagacaacatgaatgaagaagccacctcggacgtgcgttctagttgagctttggatgactctttttccaaccaccatcatgttgcagttatgtgaaagactctaagagataatt

SEQ ID NO: 364141 - DNA, 522 bp, Homo Sapiens
ggcgccctggggccagcagacctgctcgcaggcctgacctcggcgagctgggcgctgccgcctctgtgcggggggagctctggctcaggctccccagtggtcccgagggatttgggggtgctcccctagcgtgagcagaaactctttgtgaccttgttaaagtggtccagcctcctcaggcctcgtcttcctcgttactgatgcttgtcctgcccaccccgcgagatggggaatcctaaagctccctctcgtgtctcgttagcgccctggggttgcgctgtggcccgacagacaatgctgctcgctgctggaggcttgcaagcccaagttatggagtcagactgtccgggttcgaattttcgtctctgccttgtagtagggtgaccttgggcgagtcacttaatgcctctgagccatgacttctttacctgtaaagtgggcagaacaatagcttctatgctgtgggcttaaatgacaagcagaacgcgttgtcagacttagaataaatgctcaaaaaaaggg

SEQ ID NO: 364142 - DNA, 578 bp, Homo Sapiens
  misc_feature (12)..(12): n is a, c, g, or t
gccgcgcggggngaaagaggcagcgcgagggcgggggggtcatgcgctcgcccccccgggagcagggggtccagcttgtcgagtccggggcgccccttccgagtcctgggcaccctcgggggggaatccccgggggccgcgccctctctgagttcctgggcacactcggggagggggggtccccagggccgcaccctctctaagtccggggcgcccacgacacccccccgcgagcccgccccttggggagggtggccgcgcatgcgccccgcgcgcggactcagtacgcgggcacctggtgctggggcagcagctggcagccgctgttgacgtggctgaggactttctgcttgagctgcgccacctgctcgcgcagcaggctcgccgtggacgccagctccgtgttctgactcttgagggtcttcactttctcttccaggcgcgagatgcgctccagcttgcgcttgcggcacttggaggcggcgatgcgggtgcgcagccgcttgcgctccgccttgatgcgctcctgcgtgtccatgtcgatgggcgacaacggcgggctctcgccgaagctcggc

SEQ ID NO: 364143 - DNA, 441 bp, Homo Sapiens
aggagcacgggcgcgaaagcggccaggctgggccaggatctagaaagactgcctggcgcaggctccctgcccccgcgggcctgctgtcatggactcgtggagagctcgcttcccgcgcggacccttcctgcaggggtccacgtccaggcaccggcggctcggacaccccacccccggccgggcacctgccctgggtgccccttaacccgggcggtagctcgttaagatggcgaagtgtccggtccggaacacgcgaaaccccaaatcccgcctgcccgacctcctgacccccggccccacgggacgacagactgggcctcccgacgcgcagcgcgctgccgggacaccggtgcgtgcgaaacggaggacctttgtaacgccacgtgtttgctctttttgaaaaaacaagaataaatgtgttaaactgtctgaaaagcttgc

SEQ ID NO: 364144 - DNA, 213 bp, Homo Sapiens
gcggccgccctactacctgggccgcgactacctggagacgctgatggccagccagaaggcagccgactggatccgcatcagcgagatgctccttgggccagtgccccccagcttcgccttcttgccgaagcacaaggccaacgcgtacaagtagcctcaggctttcccaggggcaccctggggcgaggagagtacaataaattttattctttt

SEQ ID NO: 364145 - DNA, 937 bp, Homo Sapiens
  misc_feature (310)..(310): n is a, c, g, or t
ggcagaaacagtggctgccttactgtcggggaagttccagggtctgattgagaagttttatgtcattgattgtcgctatccatatgagtatctgggaggacacatccagggagccttaaacttatatagtcaggaagaactgtttaacttctttctgaagaagcccatcgtccctttggacacccagaagagaataatcatcgtgttccactgtgaattctcctcagagaggggcccccgaatgtgccgctgtctgcgtgaagaggacaggtctctgaaccagtatcctgcattgtactacccagagctnatatatccttaaaggcggctacagagacttctttccagaatatatggaactgtgtgaaccacagagctactgccctatgcatcatcaggaccacaagactgagttgctgaggtgtcgaagccagagcaaagtgcaggaaaggggagcggcagctgcgggagcagattgcccttctggtgaaggacatgagcccatgataacattccagcccctggctgctaacaagtcaccaaaagacactgcagaaaccctgagcagaaagaggccttctggatggccaaacccaagattattaaaagatgtctctgcaaaccaacaggctaccaacttgtatccaggcctgggaatggattaggtttcagcagagctgaaagctggtggcagagtcctggagctggctctataaggcagccttgagttgcatagagatttgtattggttcagggaactctggcattccttttcccaactcctcatgtcttctcacaagccagccaactctttctctctgggcttcgggctatgcaagagcgttgtctaccttctttctttgtattttccttctttgtttccccctctttcttttttaaaaatggaaaaataaacactacagaatgagaaaaaaaa

SEQ ID NO: 364146 - DNA, 548 bp, Homo Sapiens
gactgcgactgctgaccctgcagagctggctgctggacgcaccgtgctcgctgcccgcagaagcggcactgtgctggcgggctccgggtggggacccctgcccagccactggtcccaccgctttcctgggagaacgtcactgtggacgtgaacagctcggagaagctgcagctgcaggagtgcttgtgggctgactccctggggcctctcaaagacgatgtgctactgttggagacacgaggcccccaggacaacagatccctctgtgccttggaacccagtggctgtacttcactacccagcaaagcctccacgagggcagctcgccttggagagtacttactacaagacctgcagtcaggccagtgtctgcagctatgggacgatgacttgggagcgctatgggcctgccccatggacaaatacatccacaagcgctgggccctcgtgtggctggcctgcctactctttgccgctgcgctttccctcatcctccttctcaaaaaggatcacgcgaaagggtggctgaggctcttaaaacaggacgt

SEQ ID NO: 364147 - DNA, 810 bp, Homo Sapiens
tgagccctcccccttgcccaagtccattcccactgtaggccgatgcctgtgcaaaggacccagtgccatatcagagaggatccttgaagaggactcaccccaagcaaagggaaaattggtgggggaacttctgccttcctggtttccttgactttggcctcctcctcgttcctccttatcttcgccgacctccttccttgatttgttccacagactggaccgcagatcattaccttgaaccacacagacctggttccctgcctctgtattcaggtgtggcctctggaacctgactccgttaggacgaacatctgccccttcagggaggacccccgcgcacaccagaacctctggcaagccgcccgactgcgactgctgaccctgcagagctggctgctggacgcaccgtgctcgctgcccgcagaagcggcactgtgctggcgggctccgggtggggacccctgccagccactggtcccaccgctttcctgggagaacgtcactgtggacaaggttctcgagttcccattgctgaaaggccaccctaacctctgtgttcaggtgaacagctcggagaagctgcagctgcaggagtgcttgtgggctgagggcagctcgccttggagagtacttactacaagacctgcagtcaggccagtgtctgcagctatgggacgatgacttgggagcgctatgggcctgccccatggacaaatacatccacaagcgctgggccctcgtgtggctggcctgcctactctttgccgctgcgctttccctcatcctccttctcaaaaaggatcacgcgaa

SEQ ID NO: 364148 - DNA, 382 bp, Homo Sapiens
atacagagatatgtaggtgtcgtgggctaaattgtgccctcccattaacgtgttgaagccctaacccccggtacctcagagtgtgactgcatttggagatatggtctttaaagaggtgattaaattataaggagggtgtgagagtggccttgatctaatctgactgatgtctttaaagaagatgacatttggacacagagagagataccagggatgtacaggcacagaggaaagaccatgtgaagacacaggcagaagacagccatctctaagtcaaggaaaggggcttcagaagaagccatccccatcaacaccttgatcttgtactcccagattccagaactatgagaaaataaatttctgttgtttaagccaaaaaaaa

SEQ ID NO: 364149 - DNA, 532 bp, Homo Sapiens
cgcagaaaaccaatgctgcatggaaaaatgtacctaacaagagcttcaagaaatagtgacagaattaaagagggaaatccacagtcacagttgaagatttcaggaccttcccctcagcagttgatagaataattagacaaaaacaaacaacagcaacaaaaagtaacaaggacgtagacgttctgaacaatactattaaccaccatgacctaattgacattctagaacactgcacccgaccagtttcagaatacacattctttccttgtgcatatgctacatccgccaaggtagactgcatgctgggccataacgcacattttgataaatgtgaaaggattgagatcataccaggaaaaacaaaggaagaagtcacaccaaatatgttctctggccccagtagaattaaattggaaataggtagcaacagatataggaaaacaccaaatatttcaaaatttaacgaagcacttatcaataatccatggataaaagaagaaatcactagagaaaattaaaaatattttgaacc

SEQ ID NO: 364150 - DNA, 611 bp, Homo Sapiens
catcagggcacttgtagagagttcagcagatgatgtgcggatggtgctgaccccagtgagggaaacgtttgagagccttctccgcctcacaccgctgcaattgttgggtattttaaatgcacatctcttatggtaattcagaccacacccttcacatttaagaccttgacggtacaagcccccacagcatttctccacagtgatcacagaaagctggagctctgtatgaatgaacaaagagagcgtggggacgaatctgaaagtcttcaaaggtggcggaagctgacaagaccacttcaataagatcgccttcctggatatcactggccgctttcaccagctgaaggatgttttcagaggtagggtcatggcgaaaaagcaggatcttatcatacattccgtagaaaccacattcagggaacttctggtcgacaatggagcaagccatctcgcggacgtgcgccaggctgtagtccccggacgagtcctgcagcagcagcaccggctcacggctcaggccgatctgcagatggaacgagatgcccccgaccggggccgcgacaggagccaagaacggcgcgggcccgggcccggaccctgggaccagtgcg

SEQ ID NO: 364151 - DNA, 1163 bp, Homo Sapiens
caagtactctaagcggtttaaggtagcgaggcatgggtggcgccttttcaaaccgaccaatcggcaacccgcgtctcccggcgccgcgttaaatccgtgccggaggcgcgtcctgcatcgtctgccgctttggtgacttctgacagctctctccatggaaggaggcggcggccgcgatgagccttcagcctgccgggcaggggacgtgaacatggatgaccctaagaaggaagacattcttcttttggccgatgaaaaatttgacttcgatctttcattgtcttcttcgagtgcaaatgaagatgatgaagtcttcttcggaccctttggacataaagaaagatgtattgctgccagcttggaattaaataatccggttcccgaacagcctccgttgcccacatctgagagtccctttgcctggagccctctggccggggagaagttcgtggaggtgtacaaagaagctcacttactggctttacacattgagagcagcagccggaaccaggcagcccaagctgccaagcctgaagaccctcggagccagggcgtggaaagattcatacaggagtcaaaattaaaaataaacctctttgagaaagaaaaggaaatgaagaaaagccccacgtctcttaaaagggagacatactacctgtcagacagccccttgctggggccccctgtgggtgagcctcggctcttggcctcctccccggccctgcccagctctggtgcccaggcccgcctcacccgggcgccggggcctccgcactctgctcatgctttgcccagggaatcatgcactgctcatgctgcaagtcaggcagcgactcagaggaagcccgggaccaaattgctgctgcctcgagcggcctctgttagaggaagaagcatccctggggctgcggagaaccccaatgaaagaaattccagctagtccttccaggacaaaaatcccagctgaaaagggaatccaaccgggatgtttctccctgacaaaactgccccgggtgctgccatgtgccggcgcggaagcaattgggcagggcaggggcgacccggtccaacagtggggtcgaaaaaccgttaaacccggtctcagaatcgcaggaacccccgggcgtgaggggccagggcacccccgggacacacacgagatc

SEQ ID NO: 364152 - DNA, 455 bp, Homo Sapiens
aataggttagacaggaaacagtgataaacctttaatatctgaaacttgtgtcattgaccttcaactacatagtgaggttttcagttcagaacatttagggcccatgttacatgtggggataattaaaatgttttaagtgatgctttctattcttcaagtgttggccataatattcaagctgggtacaagcagcagagatttttgtctgagctcagtccaagctctgcagtttctgctgtttgtctttctaggtggcaccagtcagtcatcctctgcagctcatgaaacccagcataaccttttgggctgctctggaaaaacacattgagcaataagggttagaatactttgtgttcaatgtttccagtgctactctctggccaggagaaataccaaatcataggcatctggaaaagagagacagcccagaaagaatgatgatgttacaaagcctg

SEQ ID NO: 364153 - DNA, 1338 bp, Homo Sapiens
cggggcgctgctgcaggaagccgtgggggcgacaactccaggaccttgttggggtgcaggacgcccttcccgtcaccccgggacgtgggaagtgcaggccctgccggtccaagtccccaagaaggcgcgagcccagcattgacctgctgcaggccttcgtggagcactggaagggcatcaagcactactacatcgagagcacagatgaaagcacccccgccaagaagacagacattccctggcggctgaagcagatgctggatatccgtggtgtatgaagagcagcagcaggcggccgcagggtgaggcagggccctgcctggaagtacctgctgcagcacaagatcctggagactctctgcacgctgggcaaggccgagtaccccccaggcatgcggcagcaggtgttccagttcttcagcaaggttctggcgcaggtgcagcaccccctgctgtcattacctcagcgttcacaggcctgtgcagaaactcctccgacttggtgggactgcttccggatccgttacagaaaaggaggaggtgcagttcaccaccgtcctctgctccaagatccagcaggacccagagctgctcgcctacatcctggaaggtaaaaagattgtaggtaggaagaaagcatgcggagaacccactgccctgcctaaggacacaaccagccacggggacaaggactgctcccacgatggtgctcctgccaggccccagctggacggggagtcctgtggggcccaggccttgaacagccacatgcctgctgagaccgaggagctggacggtgggaccacagagagcaacctgattacctccctgcttgggctgtgccagagcaagaagagtcgggtggccttgaaggcccaggagaacctgctgctcctgatgagcatggcctccccagcagctgccacctacctggtacagagcagcgcctgctgccctgcgatcgtccggcacctttgccagttgtaccggtccatgcctgtcttcctggaccccgcagacattgccaccttagaaggcatcagctggaggttacccagtgccccgtctgatgaggcttccttccctggcaaggaggcctttggctgcccttcttgggctggttttgattactggcgaccacctcatcacagaagccacccacggtgggttgccggacgcccttggccaaaaggctgtgggctggaaaaactcctttcgtggagaaaccctggaaggccccagctttcttgcaacgtgttccgaaaccagagccatccttggaaccttcaacggggcctttcttaaaaggacattgtctgggcgcccaggcttttccga

SEQ ID NO: 364154 - DNA, 893 bp, Homo Sapiens
  misc_feature (245)..(245): n is a, c, g, or t
  misc_feature (638)..(638): n is a, c, g, or t
aaggacattgcccctaagctggctcaggggaaaggggaatttattaaattcttttcttttgatcattaaatcctaggcacaagcacctggggcctgaaggtctggagctggaagctgggggaagtgcagccacctcttccttgcagagtcaggccagtgagacccccaaccaggctactccttcctcacacagcctctttccaaaaggtcagagtgggaccggcagctaaatcatcaggagtggnagtggcccagggctctgggtcttctgtctgtctggttctctgtctccgtgaactcggctccaattctgaacgactgggcaggttacctttcccaggacacctgaatggtgacactctgcacactccttcctccccgctccctccagggtccctgggctggggagggccaggccgcacctgtgctctcgatgtagtagtgcgtgatgcccttccagtgctccacgaaggcctgcagcaggtcaatgctgggctcgcgctgcggagggcagacacacaacctcagtgggggccacaaaggccagggagcccctgcccgcatgggaacagatattctgagtgtcaggttcatgctaggcctcctcatgaggaggcaccctgctccctggctttcanagggaggaataacacatttcctccaggacacactgtcatcttgccaaggatctcctgacaggcacttctcccctagataccccttccctcctggaaatgctgtttttcctgcctgtatgtcaacaatcccggtccctgtcctctggtcctggaagggtgctaaaaaaatgtttggcttgggggggaaaaccgaaccccccgaatttattttttcaacacccacccatgggggtttaacgccctaccaggtgtagt

SEQ ID NO: 364155 - DNA, 465 bp, Homo Sapiens
tgcggccgcgggtgaggcagggccctgcctggagtacctgctgcagcacaagatcctggagactctctgcacgctgggcaaggccgaggtgggaggccctctgcgcgctgggccaggccgaggtgggaggcctctgcgcgcttggccaggccgaggtgggaggcctctgtgcgctgggccaggccgaggtgggagaccctctgagtgctgggccaggctgaggtgggcggtgggcagtgggcagcctggggctccctggattccaggcctttctgcctatgctcttcccagtcctgacactgaaagtggcagttcgggcgagaggagcaaacaggacgggcactgtggctgtctcacttagaacactccaccatcccagcgctcctgttcccagttcactccacaaagatgggcctgccatgtgccaggctctgctctagatgctggggacacagcagggattca

SEQ ID NO: 364156 - DNA, 1101 bp, Homo Sapiens
  misc_feature (1077)..(1077): n is a, c, g, or t
gcggccgccgcagaaataagggtctctgccccaacggaacaagcgcagcccacagtccggaaaagggtgtggccggccgaggagtgcgggggagtgtgcgccgcgggcactgcagcagccgcaccacctcctcccgtagccctccctccgtccagcagccgcctctgtcgcgctgcagtctggcggctggaggcttgaaggtggctgcccgagggtcgtccaggggccggggctgggtcctagcgggtacccggggataaaagcgagaaaagagagaaccgtatggctttaagtaggtaaaaagtctcgaggaggatgggaaagactagggaaacctttgagaggtaacgggaccaggatttccaggagcagcaaagccgcgagtggcaccaaaagcaagagggacgttcaagatggcttggctaggagggagagcttcggctgagacggggtccccagatgttattactgctgttgcccaagtagaggaagaagtcctgattctgtggaaggatccagtctgggcatgcgaaagggtgggtggggagagtgagcagtcggttccaagagtggcgcgtccagcaggcaggcggctagcggggagaggggaaagtctggggcccactgtcccaaggcagggagctgactctaggcataaggaggaaaagccccagatggaaggggtggaagggggctatgctgcacagaggaccgagggtggtcgctcacccaggcaggtagctctcgatgactcatatagagagttttcgcagtgagctgctcctcgtcgtccagtagctgcctcgctgctcgaaggctccgttctttctcgtcgcggacacggcgccagcccaggtagagggcgaggccgaagagcacgaaacccacgctgagtcacactgccccggccaaatacacaggtatcagcaccagcaaccgcctcccgaatgaagtcagcaccgccagggcctcacccgccgcgccagggccagcaggttggcccccagaacctgggtctggctttgcgtgagcaacggggggctggtcagtggggtcggagggagcagagggctggtnccatggggctggggctggggccct

SEQ ID NO: 364157 - DNA, 971 bp, Homo Sapiens
ggcctgggtggcgttcaaaaacgagggcttgaagtcccctcttccctcccggggatcacgttttgcctgggggagctgatcgcaagactaggcaacctccagccagtccctgggtcgggcggatcctcccagaggtgggcacaatggagcgatctccaggagagggccccagcccaagccccatggaccagccctctgctccctccgaccccactgaccagccccccgctgctcacgcaaagccagacccaggttctgggggccaacctgctggccctggcgcggcgggtgaggccctggcggtgctgacttcattcgggaggcggttgctggtgctgatacctgtgtatttggccggggcagtgggactcagcgtgggtttcgtgctcttcggcctcgccctctacctgggctggcgccgggtccgcgacgagaaagaacggagccttcgagcagcgaggcagctactggacgacgaggagcagctcactgcgaaaactctctatatgagtcatcgagagctacctgcctgggtcagcttcccagacgtggaaaaggctgaatggctcaataagattgtggcccaggtctggcccttcctgggccagtatatggagaagcttctggctgaaactgtggctccggctgttaggggatctaacccccatctgcaaacatttacatttacacgagtggaactgggtgaaaagccattgcgcatcattggagtcaaggttcacccaggtcagagaaaagagcagatcctgctggacttgaacatcagctatgtaggtgatgtgcagattgatgtggaagtgaagaaatatttttgcaaagcaggagtcaagggcatgcagctacatgggcgttttgcgggtgatactggagccactcattggggaacttccccttcggggggggctgggtcaatgtttcttcatcccaaggcccgacccctagaaatcaactgt

SEQ ID NO: 364158 - DNA, 887 bp, Homo Sapiens
  misc_feature (526)..(527): n is a, c, g, or t
gtccagatgtttattgagcacctgtgttctgggtcctatttgggagccttgttaaccaccaagaccttcctaagccatattgtggtatacagacagatacaaaaaaaaaggctctctccctgtctgatctcatgcagcctgccttggagacaagactctcccagtgctgtgtgcttggagagaggaaagcacacagccctggagtcagagacctgggtttcaattctgtctccacctcttattagctagctatggactcctctctgagcctcgattgcctcatctgtgaaatggggtaatggtgtgagcagcgtttccctgggggatgtgatgcagcccacttggggcctcatgcactcagcatctctttattagcaaacacttattgaacccctagtacatgccaggcactgttatgaggtcccggggatactttataacaaaagggacagaagcattcctgctcttgtgaagtttacattgactagatagtaaacaaaataaatgaaatatgcagtggtgcccnnagaaagagaatcgtagtaacataatcacccttggtcgggccgcccttcggccctcaagaaagcttttcttaaaaccattcctttttgggccccccggggcccccgtaaggttaggtgaaaacctgggcccataagctggttttcccaaggaaaattcccgggcccaatgaataaggggcccttggattttcttccaccaaataaaaaaacccgccccgggggggcaacccgaaagcggttccttaaacacaaatctccacaattggaagtttcttgagagggtcttttacctgggattcctctcccacacagggaggcgtctaggcgcggaggcctccgaatattcacaaatttatacgc

SEQ ID NO: 364159 - DNA, 1044 bp, Homo Sapiens
  misc_feature (510)..(519): n is a, c, g, or t
  misc_feature (773)..(884): n is a, c, g, or t
  misc_feature (886)..(886): n is a, c, g, or t
  misc_feature (889)..(890): n is a, c, g, or t
  misc_feature (900)..(915): n is a, c, g, or t
  misc_feature (959)..(976): n is a, c, g, or t
gtagcgaggcctgggtggcgaattcggcacgagggcataaatgacgatcagaacgtggccctggatcttgacccctatgttaatgaagctacttaatgaccagcgacacgttgtcttggttaacaacattctacaaaatgctcaggaacgactgagacggctaaaccacagtgtctgccaagagaaacagcccgcaggagagcatatgctggattcgggaatttacccccctggctccccaggcaaataacagatgaacctatggactcagtagcacaagtactgttccccagctgccttgtttcaacagacatgcaaagatcctaggagacagtccccatagaccttcagacattaaaaagggagccgtacagtttgtttgaagcacttcgtcttacccatttatgtaggggccccaggaaacctacacacagccagaatgaggttcccaaaggacttacattaattatggctcttgcttcctttcacaaatgagctgaggcctctacnnnnnnnnnnaagctgcatacttgaggcttaccttcttcaggactagttaaccagaggggcttcctttgtatgttacatgcctggttacatgggcctggacagcatgtcctctacctgtgacttctcattttcctgtttacactggggatttggagggggcaggcaaagtcaaagtgaatgacctctgtccacccacttttttattgcactggcttgaatacagtagcagtgttgatagaatcattttattcaataaatacttnnnnnnnnnnnnnnnnnnnnnnnnnnnnnnnnnnnnnnnnnnnnnnnnnnnnnnnnnnnnnnnnnnnnnnnnnnnnnnnnnnnnnnnnnnnnnnnnnnnnnnnnnnnnnnnncnaanntttttgcggnnnnnnnnnnnnnnnnaagaaattttttaaaacctttttttgttggcccgcccggccccnnnnnnnnnnnnnnnnnnggggccaaaacttttttttccaaagaacacaccgcggcaaaaaacaaggggcttgggattctcccccc

SEQ ID NO: 364160 - DNA, 902 bp, Homo Sapiens
  misc_feature (33)..(33): n is a, c, g, or t
  misc_feature (35)..(35): n is a, c, g, or t
  misc_feature (174)..(184): n is a, c, g, or t
accctttgactttgcctgcccccctccaaaatncnccagtgtaaacaggaaaaatgagaagtcacaggtagaggacatgctgtcccaggcccctgtaacccggcatgtaacatacaaaggaagcccctctggttaactagtcctgaagaaggtaagcctcaagtatgcagcttnnnnnnnnnnngtagaggcctcagctcatttgtgaaaggaagcaagagccataattaatgtaagtcctttgggaacctcattctggctgtgtgtaggtttcctggggcccctacataaatgggtaagacgaagtgcttcaaacaaactgtacggctccctttttaatgtctgaaggtctatggggactgtctcctaggatctttgcatgtctgttgaaacaaggcagctggggaacagtacttgtgctactgagtccataggctcatctgttatttgcctggggagccaggggggtaaattcccgaatccagcattgctctcctgcgggctgtttccttggcaacactgtggtttagccgtctcagtcgttcctgagcattctgtagaatgttgttaaccaagacaacgcgtcgccgggcattaagtagcttcttaacataggggtcaagatccagggccaccttctgatcctcatttatgcggcacagttctgtggctaggttgtcaatttgttcccggagctctacctggctctctctgacggcgtgtacgtgagagtcgagctgctgcacagcgggtcgcaggaactccagcagcccttcggcgaaaaggtcgcggcctgtgggccccgccaccggggtccctgcccccgatacagcggcggaaccagcccccgccatcacgaattgtcctgaagccccctcgtgccgaattcgccaccccaggcc

SEQ ID NO: 364161 - DNA, 1030 bp, Homo Sapiens
  misc_feature (49)..(85): n is a, c, g, or t
  misc_feature (770)..(780): n is a, c, g, or t
tgataccgatcactatagggcgcctcggaggtgcacgcggtggcggcgnnnnnnnnnnnnnnnnnnnnnnnnnnnnnnnnnnnnnatcaggccaaatcggccgagctcgaattcgtcgagagcggagggtttcaggacaattcgtgatggcgggggctggttccgccgctgtatcgggggcagggaccccggtggcggggcccacaggccgcgaccttttcgccgaagggctgctggagttcctgcgacccgctgtgcagcagctcgactctcacgtacacgccgtcagaactgtgccgcataaatgaggatcagaaggtggccctggatcttgacccctatgttaagaagctacttaatgcccggcgacgcgttgtcttggttaacaacattctacagaatgctcaggaacgactgagacggctaaaccacagtgttgccaaggaaacagcccgcaggagagcaatgctggattcgggaatttacccccctggctccccaggcaaataacagatgagcctatggactcagtagcacaagtactgttccccagctgccttgtttcaacagacatgcaaagatcctaggagacagtccccatagaccttcagacattaaaaagggagccgtacagtttgtttgaagcacttcgtcttacccatttatgtaggggccccaggaaacctacacacagccagaatgaggttcccaaaggacttacattaattatggctcttgcttcctttcacaaatgagctgaggcctctacnnnnnnnnnnnaagctgcatacgtgaggcttaccttcttcaggactagttaaccagagggggttcctttgtatgttacatgcctggttaccatgggcctggacagcatgtcctctacctgtgacttctcattttcctgtttacactggggaattcggaggggggcaggcaaagtcaaagtgaatgacctctggccacccactttttatggcctggttgaataacgtagccgtgttgatagactccttctcttccctcaatt

SEQ ID NO: 364162 - DNA, 841 bp, Homo Sapiens
  misc_feature (57)..(93): n is a, c, g, or t
  misc_feature (266)..(338): n is a, c, g, or t
  misc_feature (667)..(702): n is a, c, g, or t
agataatctatggatgtatagatctataggcgactggagttaccgcggtggcggcgnnnnnnnnnnnnnnnnnnnnnnnnnnnnnnnnnnnnnatcaggccaaatcggccgagctcgaattcgtcgagagcgggggctacgcgcagcccccgagcatgagcagcccgccaccgccgcccgcgctgccgccgatgcaccgctacgacatggccggcctgcagtacagcccaatgatgccgcccggcgctcagagctacatgaacgtnnnnnnnnnnnnnnnnnnnnnnnnnnnnnnnnnnnnnnnnnnnnnnnnnnnnnnnnnnnnnnnnnnnnnnnnntacgggcagcagcccgccaccgccgcggccgcagctgcggccgcagccgccatgagcctgggccccatgggctcggtagtgaagtctgagcccagctcgccgccgcccgccatcgcatcgcactctcagcgcgcgtgcctcggcgacctgcgcgacatgatcagcatgtacctgccacccggcggggacgcggccgacgccgcctctccgctgcccggcggtcgcctgcacggcgtgcaccagcactaccagggcgccgggactgcagtcaacggaacggtgccgctgacccacatctgagcaccggcctgcgctcgtccacccctgtnnnnnnnnnnnnnnnnnnnnnnnnnnnnnnnnnnnnaagttgggacgccttgtttagctttgcttgcctgggactgttgccttgtaccgatgatggggagggctgaaagttttgctgtagctgtcgggttttgtacaaaagcaaaaataagtcaggagcagcgaaaatgggactt

SEQ ID NO: 364163 - DNA, 970 bp, Homo Sapiens
gggccccatgcgtcggtagtgaagtctgagcccagctcgccgccgcccgccatcgcatcgcactctcagcgcgcgtgcctcggcgacctgcgcgacatgatcagcatgtacctgccacccggcgggacgcggccgacgccgctctccgctgcccggcggtcgctgcacgggtgcaccagcactaccagggcgccgggactgcagtcaacggaacggtgccgctgacccacatctgagcaccggcctgcgctcgtccacccttgtaacccacacccacccccactcccgccccgcacccccaagttgggacgcccttgtttagctttgcttgcctaggactgttgccttgtaccgatgatggggagggctgaaagttttgctgtagctgtcgggttttgtacaaaagcaaaaataagtcaggagcagcgaaaatgggacttctagagagctctcttgccccacgccgctgctcctttcacctttgtaggctgggaatcgctgtgttatttgcaaagaaaaaacagcccccactcctcctcctgagttccagggttattctgttacatttgaaaatgttgtcttgttagtttgcagttagccaaggagtgaatgggagaaacatagtatcgggtgaggccagctggagaactgcaacgcctacgcccccagtcgtgtcgcgtctgttttcctcgtggttttttggggcgctgaccactccaagcagcgcggcagctaaagccaatgttaatttatagccaggtgtgcgtgtgtctcccgcctcgccgcacctggccgcgggacagcttctgtccaatcatgttgagttggtgatttctgccgtgatctgtttgatatttcttcgcgctaatgtgttcagatttcgtttgggtagtggggaggggctactttgtttcagggttttcaagcttttactcttaattcctaaatgagatcaataaattttataacc

SEQ ID NO: 364164 - DNA, 375 bp, Homo Sapiens
catagacatgggagtgggagccgcagatgctgtttgaggcagaagagtttccatctcctcttgcccccccagtatgccagtatccctcagtgttgcctctgggcaaaacctagctggcagcaagttggcaagggagcctgggaaatggaagttcttataagagtaaggggatcgggatgcctctcagaacaaagtgaaatggtcaatgcagcaaccaaatagggtaaaatagtgctcttggcagttttggatagggatatccctgttggtctggaatccaggctggaatacaaattcagcatgtatgagtaaagatacttttgatagatgaatgtggtggagtagttaagatcactagagaaggtatatagagtt

SEQ ID NO: 364165 - DNA, 443 bp, Homo Sapiens
gcggccgccgccatgtcggtgctgggcgagtacgagcgacactgcgattccatcaactcggactttgggagcgagtccgggggttgcggggactcgagtccggggcctagcgccagtcaggggccgcgagccggcggcggcgcggcggagcaggaggaactgcactacatccccatccgcgtcctgggccgcggcgccttcggggaagccacgctgtaccgccgcaccgaggtagcggccctcggcgccggccgccctgtctggcgctgtcgggtcgccccgagtccctccttctcggccccgctttcccagcgtcgtgagcttagtgctttaggcgcccacggggtatatgtcttagggtcttcaccactcttcccactcaccggcactagaaattggctagatcattggtttgactagtcatttttgattgtcctaagtca

SEQ ID NO: 364166 - DNA, 496 bp, Homo Sapiens
tcctattatttatccactcaggattgaccacccctttgggccagatagttgtacccccatgtaccaggtgggcacatgaagacacaagaagtgctgtgatggttcattttgcacgtcaccttgcgtggagtatgccaactcattgtttggtcaaacactagtctggacatggtggtaaaggtattttttagatgagattaacgcttaaatcagtaaagcaggttacccaccatactacgggtgggccctgtccaatcagttgaaggcattaagaacaaagattgaggtttcctaaagaagatggaattctccttgagactacaacatagaaaccctatctgagtttccagcctgttgccctgtggaattcaaactcaggactccggtctatggcattaaccctcacttaacttttcagcctgccagcctgccctatggatttcggacttgccagccacacaattccttaaaataaatctctccgtttctgtttgtt

SEQ ID NO: 364167 - DNA, 574 bp, Homo Sapiens
gcttgggcccgggcagctcactccgggccctgcggaaagaattcgtaccgttcctgttgaacttcctgagggagcagagcagccgcgtcctcccgcaggggcccccgacccccgccaagaccccgggcgcctcggcagccttgccagggaggccgggaggcccgccgcggggtagccgcggggcgcgcagccagcttttccctccgaccgaggcccagagcaccgctgccgaggcccctctggcccgccgcgggggcaggaggcggggcccggggccggcccgcgagcgtggaggccgcggcctggaggagggggtcagcggggagagcctgcccggagccgggggccggaggcttaggggctctggcagccccagccgccccagcctcacgctgtctgatccgccaaacctcagcaacctggaggagttccctcccgtaggctcggttccccccggccctacaggcaggacgaagccttctcgcaggatcaacccaactccggtgagcgaagagcggtcactctccaagcccaagacctgcttcacctcacccccaatcagctgtgtgcccag

SEQ ID NO: 364168 - DNA, 954 bp, Homo Sapiens
gctggtaccggtccggaagttccgggatatcgtcgacccacgcgtcgagcgtgcgccccgggttctcgccgccttctctccgccgagcagcccttcggccaccctttgcccttaaaaatctgcagactgcgcctcctctccgcgggagcgagacctagcaggcccggggctgggcgtgccctcgcctgccacgctgcgcgctgccctcagccgggccgctggggcctgtgcagtgcaccgggcacgccgcgccaggctgggggcaggcaccgagcctccgtgggaggtccctgaggcagcttcgcctgctcgccctggctccagtccctcacctgccgcagacttagctgagcagccgccgccactgggcgccccccgctccccacttcgccagcgcccgctcctcggctcggcccggggtagtttgtagggacgcagctctccacgctgcgcgactgcgaggctggacgctactgggctcctggaaaggagcagacaccagcatttgccacaatgctgtcatccactgactttacatttgcttcctgggagcttgtggtccgcgttgaccatcccaatgaagagcagcagaaagacgtcacactgagagtatctggagaccttcatgttggaggagtgatgctcaagttagtagaacagatcaatatatcccaagactggtcagactttgctctttggtgggaacagaagcattgctggcttctgaaaacccactggaccctggacaaatatggggtccaggcagatgcaaagcttctcttcacccctcagcataaaatgctgcgccttcgtctgccgaatttgaagatggtgaggttgcgagtcagcttctcagctgtggtttttaaagctgtcagtgatatctgcaaaatcctgaatattagaagatcagaagagctttccttgttaaagccgtctggtgactattttaag

SEQ ID NO: 364169 - DNA, 457 bp, Homo Sapiens
tgctgattaagtttaccgtgttatatgggtgcggttcatggcgccccgaaacaattacaataatatatcaaagatcactgatcacagatcactataacacatataataacaatgaaaatgcttgaaatattgcaagcaattaccaaaatgcaatgtagagacccaaaatgggcacatgctattggaaaaatggtgccaacagatttgcttaaagcagtgttgacacaaatcttcaatttctctgctttgcttttcttaacctattgctgtcacatatatgtcccaaaaccttcaatttctttaaaaattctgctacctgtgaagtgcaataaatcaaggcatgcctgtatactctctcctgttatcctttctccagcctctgcaccccccttagcctcagcccctctgcacccctgcccctggcaccttcccacacctgagctctgcgttgttaccc

SEQ ID NO: 364170 - DNA, 581 bp, Homo Sapiens
ccccaaaacatggttctttgcgtattttgaaatggccctgtaaaactgtcctttctgggtggtgggggggaaatttacatctctaaagaatctctgttaacatagctagatctttttcttccaggccctcccaatcctgaggagattaactgagagtccagcaccttctaaaggtctgaataggaaacagttgtcatctgttgtctctaagggcagccactatgagacttcaaaagaacctcagtctccacaatcttttatctgaacctgaatatttcctttctattgatcccaggtctttagacaaactcaaccaattggcagccaggaaatgtttaagtttatttgtagcctgaaagcccccatccccattccttttgaattgtcccacctttctccaccaaaccagtgtatttctcaaatgtatttgattgatgtctcatgcctccctagaatgtataaaaccgagctgcaccctgaccatcctgggcatatgttctcagcacctcctgaaggctgtgtcacgggccatggtcattcatatttggctcagaataaatatcttcagatattaaaaaaaa

SEQ ID NO: 364171 - DNA, 679 bp, Homo Sapiens
  misc_feature (47)..(47): n is a, c, g, or t
gggtgacactgaggtcccagcagctccaaatgcaggcagagccctgntcctcagagaaggtcacagcctagccaagcccagccaggtggatgggcccacggaacgcacaggaacctggaacggaggttgaaagcaggaagcacagtctgtgactccccagcccactctgcattcgaccacttggggcccagaagcttcaggaaaggtgcacaaggtcactgggtcccagtactcccaacaggaaggtctggtccagggacagggctcttcccgactccccttagccacacgcaccagaagttctgcagtgcccagtgggcatagcagtccccaagaatgacccagcactgaagctgagccaaagaacttggggagcgagccacaccccctcactccctcttcgcctgctccagacttgccaggcggttgcttttcgtgggaaccgggatgtcctcaccaccctgtccagggcccagccccatgtccctggcctgctacagctggaaagaaaaaagagagatgtttgtttttatttgtttataaaaagaaaagtgttatatatataacatattatacctcatgaatacatacaattatttgtcaattaacaataaagaaaaatacagcaagcaaaaaagactctcttccacaaaaatagtgttcattacagaaaagtaca

SEQ ID NO: 364172 - DNA, 589 bp, Homo Sapiens
  misc_feature (15)..(15): n is a, c, g, or t
acttgcaaccacccnggctggtgccctgacagctgtgccagttgggccacagcctcccgagtgctgaccccacatggtcaagcccaggcaaaagctcccagagcccctgtctcgggctcccccaccgactggcagctgcactatccccaactccccacttctgccccaagggtggtcactgcctgtgatacattccctcagtgtcgcctctgagcccaggcctcctgccacaaagactgggccgagagatggggctgggtaagcgggtgcgcctcctgtttgggtttcttcggggtttctctgtagtgtctgctgccctcctcctggcctcccaggtttcagttgtgtctgacagagcattaggttttcctgttactgctgtgtaataataaagaaagattcggcttttggcaatcacggacacttttttcccctccaccgaatgtcaggattgaaagctgcctccgagtggttggggatggttttctgaccctacggtaactagatctaatatatatcatcagaaaatatatattgtatgtttactcttattttcagaaagagaaaatgaataaaaatgatgacatca

SEQ ID NO: 364173 - DNA, 1131 bp, Homo Sapiens
tacggctagtcgaggccgggtggtgaatcggcacgagggcgacgccgccacctccggaacaagccatggtggcggcgacggtggcagcggcgtggctgctcctgtgggctgcggcctgcgcgcagcaggagcaggacttctacgacttcaaggcggtcaacatccggggcaaactggtgtcgctggagaagtaccgcggatcggtgtccctggtggtgaatgtggccagcgagtgcggcttcacagaccagcactaccgagccctgcagcagctgcagcgagacctgggcccccaccacttcaacgtgctcgccttcccctgcaaccagtttggccaacaggagcctgacagcaacaaggagattgagagctttgcccgccgcacctacagtgtctcattccccatgtttagcaagattgcagtcaccggtactggtgcccatcctgccttcaagtacctggcccagacttctgggaaggagcccacctggaacttctggaagtacctagtagccccagatggaaaggtggtaggggcttgggacccaactgtgtcagtggaggaggtcagaccccagatcacagcgctcgtgaggaagctcatcctactgaagcgagaagacttataaccaccgcgtctcctcctccaccacctcatcccgcccacctgtgttggggctgaccaatgcaaactcaaatggtgcttcaaagggagagacccactgactctccttcctttactcttatgccattggtcccatcattcttgtgggggaaaaattctagtattttgattatttgaatcttacagcaacaaataggaactcctggccaatgagagctcttgaccagtgaatcaccagccgatacgaacgtcttgccaacaaaaatgtgtggcaaatagaagtatatcaagcaataatctcccacccaaggcttctgtaaactgggaccaatgattacctcatagggctgttgtgaggattaggatgaaatacctgtgaaagtgcctaggcagtgccagccaaataggaggcattcaatgaacattttttgcatataaaacaaaaaataacttgttatcaataaaaacttgcatccaacatgaatttccagccgatgataatccag

SEQ ID NO: 364174 - DNA, 245 bp, Homo Sapiens
agtccctacgttctaccttgctgttgagagtgagctgttgccatgtcccttggcagcttccagcctagctagggatgtacctatgaagtagtaggtaattcaggctgtagagtctgtaataactttccatgcctatgtcataggattctaatttgttcaggcccagcaatacccaggagatgacattaaaaggtgttgattttattgagggtcagtggatgagggagaaaaagttttcaaaaatt

SEQ ID NO: 364175 - DNA, 1386 bp, Homo Sapiens
gccagccaccatcgaggaaggggcatgtgctggacgcggacacatgatccgagggaccctgctgggtggaactaagaaagtccagcagactgtgcatgctcctgtccccactcacaggcccacgcagcgaggggggcccctcttctgtgtgcgtctggaaggtcgctgcccagggaggaaatgcctttaaccggcgtggggccgggcagctgcaggaggcagatcatccgggctctgtgcctcttgctacttctcctccacgccggctctgccaagaatatctggaaacgggcattgcctgcgaggctggccgagaaatcccgtgccgaggaggcgggcgcgcccggcggcccccggcagccccgagcagaccgctgcccgccgcctccgcggacgctgccccccggcgcctgccaggccgcgcgctgtcaggcggactccgagtgcccgcggcaccggcgctgctgctacaacggatgcgcctacgcctgcctagaagctgtgccgcccccgccagtcttagactggctggtgcagccgaaacctcgatggcttggtggcaatggctggctcctggatggccctgaggaggtgttacaagcagaggcgtgcagcaccacggaggatggggccgaacccctgctctgtccctcgggctatgagtgccacatcctgagcccaggtgacgtggccgaaggtatccccaaccgtgggcagtgcgtcaagcagcgccggcaagcagatgggcgaatcctacgacacaaactttacaaagaatatccagaaggtgactcaaagaatgtggcagaacctggaaggggacaacagaggcactttcagtaaagcaacggcaagcagctaggttgcaagaacattcctctactttctgctaagccttggaaacagttgggaaaagtagtttgaccctcacagttcacattcagctcagcagagcaagaccccagagatgcttagagacaggacacctggccatcaaacccagtttggcccagcctggttgggtgactttgtgggagccacttaacagctctgggtccctgttttaccatcctgggagcaaggccctgcagctccacgagacctttaccccgggaagaagccgccgcccatgaaagcatttctgaagcccctttctaagacaaggctcagcatcttgatatttttgacagattcctcccaagtctggctctgggaggtatgtacccatctcaaatgttcccaagataaattcatccttcaggaaatggaaatgaacttgcttactaatgtgtgattcctagttgtagccaccggatgtgctgaggcctaaatgttagcaggtgggaggaggccacagaacaataaaaacaaccaaataagatgccg

SEQ ID NO: 364176 - DNA, 914 bp, Homo Sapiens; identical to SEQ ID NO: 8810
  misc_feature (436)..(464): n is a, c, g, or t
  misc_feature (763)..(764): n is a, c, g, or t

SEQ ID NO: 364177 - DNA, 530 bp, Homo Sapiens
tccctgaagtggctgctatccaggatgactgtgttgctgcagtctttgagtggttggagcgctgtaatgtctatgttaatagctgggaaatcgcagtagcagcaaccagaccactccaatggaacaatccaagttggggtaagtttgattgagcaaaaaagtcatgctgactgtgtgatgaagaggcagaactggtaacagtgacaggccctgcagtcagcagctgtggattttatgtgcagggcagactgatctggaaaatgggaagagctgactgccaataacaccttggggggaggtttgttcagtgcatctccctactccttgtatacctctgatgacatgcagaagcttaggaaataaaacacacttgtaacatcacagggtgcaagtaagtacatgtggatgccagtgtagagagaagcgaaagctagttttcattgcaagaatccaaacagagtaacagggctttgtccactgtctccagtccatggttccctggtgttcctagagtcctattaaaaaaagaa

SEQ ID NO: 364178 - DNA, 504 bp, Homo Sapiens
atgccgtcggtttcgaaagcggcggcagcggcgctgagcgggtcccccccgcagacggagaagccgacccactacaggtacctgaaggagttcaggacggagcagtgccccctgttttcacagcacaagtgcgcgcagcaccggccgttcacctgcttccactggcacttcctcaaccagcggcgccgcaggcccctccgcaggcgcgacggcaccttcaactacagccccgacgtgtactgctccaagtacaacgaagccaccggcgtgtgccccgacggcgacgagtgtccctacctgcaccggacgacgggggacacagaacgcaagtaccacctgcgttactacaaaacaggaacctgcatccacgagacagacgcacgtggccactgcgtgaagaatgggctgcactgtgccttcgcgcacggccccctggacctgcggccgcccgtgtgtgacgtcagggagctgcaggcccaggaagccttgcagaacggccagctg

SEQ ID NO: 364179 - DNA, 508 bp, Homo Sapiens
  misc_feature (411)..(421): n is a, c, g, or t
  misc_feature (487)..(487): n is a, c, g, or t
acttgaatgatatggcacaattagaaatgcaattttagaagtaattacactgttgtgtaaatggccacctcttttgaagtctttgctacattgcttataaaacactgagttgaacatgagaaagccttttgtctgcagctgtacttttcaactggacatgaaccatgtacttttatggcacgtagatattcacatcaaatttctgatttgcagaccgattttatttttagttaacaaataagcttatcaaatgtggcttttgaactaaagcgcttttaattaaggagttataacagcatgttattttgagtagctgttactaaaatccgttgtgatggaacaatctgcactcagcatctgatatcagagataaagagagaagcatgcagtgagcatctggaagttcttgtnnnnnnnnnnncaaattaaacattctcatttgaatgcatttaaaatttttttaaattgccaattcctaagctttttncttgttagttgtagtttgctt

SEQ ID NO: 364180 - DNA, 413 bp, Homo Sapiens
  misc_feature (23)..(23): n is a, c, g, or t
  misc_feature (293)..(303): n is a, c, g, or t
ccgccagctgtacctttccaacnggaccatgaacccatgtacctttaagggccaccgagatatcccacatccaaatttcctgattggccagacccgattttatttttagttaacaaataagccttatccaaatgtggcttttgaacctaaagcgcttttaattaaggagttataacagcatgttattttgagtagctgttactaaaatctgttgtgatggaacaatttggagtgagcatctgatatcagagataaagagagaagcatgcagtgagcatctggaagttcttgtnnnnnnnnnnncaaattaaacattctcatttgaatgcatttaaaatttttttaaattgccaattcctaagctttttctttgttagttgtagtttgctttctcggacttgtataaaagaaaa

SEQ ID NO: 364181 - DNA, 566 bp, Homo Sapiens
aaggcaaagctcacgtggtggtaaagcacttgtacttcaggattgtgttgctagctgcctcgacacagccactgggaaagccagttcacccggggctcctgctggacctgggcacaggagttgctgcagctcctgccctggcaggtggaatgacatggccttgccaaagacagcggtgcctgtcattataggaggtaaggtgacaaggtggaagctggaactttgcggccatcactggagctgctttacctaggatcagggtagtgggtccccaggggcaggcagggtcaaatggatgtgctggctgggtataaattggatccaacatttttttccttttaaattactgaatgatttgtggggtgtactttgccccctgtaggaatattctattgccctgccacgtttatgtaatggtttcagtatccattgattattcttgcctgtaccatttattacagcaggagatgcaagatatgagggttagttatgttcgttaccactagggtgtcatcgtacgctttttcaggaacacaactcgcatgccttctctacatatgcaatga

SEQ ID NO: 364182 - DNA, 511 bp, Homo Sapiens
ccagagagtgagcagggcagaaaaaaacttctattgcatgatggaacagctcccagcgttgaggggacctgagagtgggcagccactacctgaagctcttggaacagaaccagacttctggccggggctcagtcagtgcttgcaagatgtttgttggcaccaggctgtgccaggagagcatcattataaactgctgatctactgtttctttgtcaaacgggaggagataacatgagggtcatgagaaatgtttgcagacggagtgaatgccttgaaagtgctgcgaccaggtgctgacacccggaggtctggctgctcaaagtgttagctgacacggaagacacacggactttccctccattccccaaaactccccttccctgactcgtcagctgcataaaaaccctctccttatctctttgtcaaggggatttgagaaatcttgctgtcttgtcttcttgctttggccaaatggaataaacctttctctgtctccagaccataaaaaaaa

SEQ ID NO: 364183 - DNA, 392 bp, Homo Sapiens
cagtcagaaaaaataaactagatgtttgtgtctacatgttctacctgttgtacctattagcatcttcctgcagggacttggggcccatggcctgggaggttggtttgggattggggttgttgggcagcctgccattcacctggcctatcctggcccttcttcatgcccaagacagttgtttcacaggagtggaagtgtgggtgatgcaagtagaaccctctagatgtaccctgtgtggtctgcaggactggactgtttgctgtgtttgtggatgttggcgatagactgtcaattaggttgtttgtgatccaacaagaacatttccaaaagtatctaggtgttctcaaataaaaagctttctttgcacaacccatggccagagcgtcaaaaaa

SEQ ID NO: 364184 - DNA, 792 bp, Homo Sapiens
tgcagaagcgcactttgctgaacaccccgaggacgtgcctctcgcacagggagcgcccgtctttgctggggctggagcggcgcttggaggccgacactcggtcgctgttggactccctcgcctgccgcttctgccggatcaaggagctggctatcgccgcagccatagctgctcagcgagggcctcaggccccagcctctactgcgccctccggcttgcgctccgccggggcgagggcaggacctgggcggccagggaaaagggcagtcgcggggaggcagtgctaaaatttgaggaggctgcagtatcgaaaacccggcgctcacaaggttagtcaacagtctgggcagtggcgacaaaatgtgtgaaaatccagatgtaaacttccccaacctctggcggccggggggcggggcggggcggtcccaagccctcttgcgaagtagacgtttgcaccccaaacttgcaccccaaggcgatcggcgtccaaggggcagtggggagtttagtcacactgcgttcgggggtaccaagtggaaggggaagaacgatgcccaaaataaccaagacgtgcctctgttggagaggcgcaagcgttgtaaggtgtccaaagtatacctacacataccatacatagaaaacccgtttacaaagcagagtctggacccaggcgggtagcgcgcccccgggtagaaaaatactaaaacacgtgaattaaaacgttcctttagaaaacaaggcagcaacgcacgagagaaggagaggaacggcagcaatttaactcccctgcgg

SEQ ID NO: 364185 - DNA, 770 bp, Homo Sapiens
  misc_feature (727)..(727): n is a, c, g, or t
gctgagtatgaggtccagagggagaaaattgctcaaaagaatgccttagagtcctatgcttttaacatgaagagtgttgtgagtgatgaaggtttgaaggccaagattagtgagtctaataagaataacatattggataaatgcaacgagcttctttcgtggctgcaggtcaatcaactggcagataaagatgagtttgatcataagaaaaaggaattggagcagatgtgtacccctatcatcacaaaactctaccaaggaggatgcactgggcctgcctgcggaacagggtatgtgcctggaaggcctgccacaggccccacaattgaagaagtagattaattctttttagaactgaagcatcctaggatgcctctacatgtatttcattcccctcatcttcaaacatcattattattcttgaccagacctgaatctaagttaccatcccttggaaattctggagaaggagtctcatgcaccacctatcacactccctcacatcctgtttctgactttggaatggactcaggaaaactaggcccctctttaaaccgtgtgatgtatttgaatgtctgttatttccagccaccctaacattcttcttcctgtgtggatgcttatttgtcaatcagtaaatttgttcgtaaagaaaattacttctggtatttaggctgtgaatgtaccttgaaggggagagttcatggagagagcatgtgttctctgnattgtgaggtcactgtgaatgattaaattggtaagggtaaagt

SEQ ID NO: 364186 - DNA, 1173 bp, Homo Sapiens
  misc_feature (16)..(16): n is a, c, g, or t
  misc_feature (23)..(23): n is a, c, g, or t
  misc_feature (120)..(120): n is a, c, g, or t
  misc_feature (129)..(129): n is a, c, g, or t
  misc_feature (1065)..(1097): n is a, c, g, or t
ccaggctggtacgccncgagtantggatatcgtcgaccaggccgtcgggggacagcgagcgcaaccctccaccccagtgttcctttgacctgaccccgtataagacggcggagcagtcantaaggacantctgccgtcactgtcaccaccagcaccatccaggtggagcacctggccagctcttagagatccgtgctgccacccactgggaagaggaagaagtagtcctggtgtcttctttctccaactcttggtgggaaaagtccttttcttccttgacaggccttggctccatctccttgggcctctgtcacggctttccttcacaggataccatcctttttctgaactcttcttcaaaaggaacatcagccctcctgattgcaaaggaatactgagctgatggtgtcatccagcagcctcccctcccaagcaaagcttctaaaactgggggtcggtgctcaagggaaggatttgctatgacctcatagaaccttgtccagtgtggccacttaccctatccttaccctccttatcctcaaagtttgggctgatgtaagactagaggctggccctcccagataacagagaaaagggagccccaaatgcaaccagcctcttgttctattcttgcctgcaaaagaacagaggtttctcaaatgcctcagtccctgagagccatttcttcccctacatcgtctcactttgcttcctattgactgctggtagaaggagatttggggtaggggctagacctccttttatttgaagggggcaagggctgagatgtggtccccaaggggccagaaattcccaagttggtcacaggtggcttagaagtgtgtgttatggttttacggatttccttgaagcctctctccttctctgcctacaaagaccctatactctcagtctccccaacccacccccaaggagctgtgggaggctttgtgttatctgtgaaactccaaaacaggggtgttgcggagaagggagagttcaaggcaaacgcaaggactggacttagctccctaggtgccacagtcagatgccggacacggattnnnnnnnnnnnnnnnnnnnnnnnnnnnnnnnnnctcactcatcacggccatctttgttgtaaccatttctgtgtttataaatgcattatctctgagaattttcataaaa

SEQ ID NO: 364187 - DNA, 633 bp, Homo Sapiens
  misc_feature (54)..(94): n is a, c, g, or t
  misc_feature (216)..(216): n is a, c, g, or t
ccaggctcaggctcaggctcaagcccaggcccaggccaggctcccaggcatcannnnnnnnnnnnnnnnnnnnnnnnnnnnnnnnnnnnnnnnnacagccaccaccacacttccagtctcctggggcagccccccagggtgggggtgggtggggacagcaatcccaaccctccaccccagtgttcctttgacctgaccccgtataagacggcgganatcataaggacatctgcctcactgtcaccaccagcaccatccaggtggagcacctggccagctcttagagatccgtgctgccacccactgggaagaggaagaagtagtcctggtgtcttctttctccaactcttggtgggaaaagtccttttcttccttgacaggccttggctccatctccttgggcctctgtcacggctttccttcacaggataccatcctttttctgaactcttcttcaaaaggaacatcagccctcctgattgcaaaggaatactgagctgatggtgttcatccagcagcctcccctcccaaggcaaagctttctaaaaactggggggttcggtgcttcaaggggaagggttttgctattggacctcattaggaaccttgttccagtgttggccattttacccc

SEQ ID NO: 364188 - DNA, 1759 bp, Homo Sapiens
  misc_feature (688)..(696): n is a, c, g, or t
  misc_feature (1500)..(1624): n is a, c, g, or t
  misc_feature (1636)..(1649): n is a, c, g, or t
  misc_feature (1656)..(1675): n is a, c, g, or t
gtcattgctgggtgcacaagagggaggtgatttgcatcatggtcatgctgcatgggcttcactgggatgctgttaaacaccagaggagccaacctatcagaatcccagcagcaaaggaaaactcagattttagaggctttttacaataaagtagcgtaactctaggtcatgattgatttcaaatgcctgccatgaatgatttgtaagtaattatgtaggatccatcaaagcagtattgtaggcttttgaattgtcccagtggatccgggaccccatttcactgtctctcttgatcgtgttaatgatgcaatcagagttcaagacaggccccatgaagtctgactgcactgggatggagaaatgaatttcttcccactgaaggaaactctttctcattcgcagccaagacgggagtgccactgttcctctcttcactcctgagatactgcttctggaagcgggtgtcacttcctctctagtacctcttctcttctctgaagtgtgtgactatctcctagtgtttaaatttggcagttactcgccatgtatgtcagcatagaaaaggaaatgtttttaccttatctcctgtatgtatgatagaacttaaaagaaatgtgcatttgttttcatagccccagcagagaaaatcctcttcatagattaaatgtgctgctgtggacaggagggnnnnnnnnnccctctacatattgaaaggcaccaaatgtaatatctgacactgttaagatgcccaaaagagcaaagttgtagtgcagatgcagggtcatttccccatgccatccacagtgtttgttagtgagtccacggctgacttgcagtgataaagaaaagcatggagctgtgtctgcagacaatggtggctgcatctgtaagtggcttcagaggcagcagccctgggcgaaatcgatgggtgtggcagtggacctgtgaagagggagaatctagccttcagcctgtccagtgttaaccactagagaaactgagctttatatccttttttaatgcctgtgaattttagcatattgaaacattagagcaaatactcaggggatttttcattaaacatccctcagataatttagctatatatcattagaaagggaaagctatcatttttattttaaaactaaacaaggccatcttataaactgtcaccaaagtcttcccttttttattgcatgtgtgccttgaatttcataaaacattaattcacaatgggggtcagaatgtactcttgttgaaacacttcttgtaccattttatgttcatattatgtttgagagggtaaaaatgtatgagcagcttaactgaagtagaactattcatgatgcttttcacacattgtggcataagatgtaaagtttgtaattaatgttaatttctgtgcattttaatattcttttataattattaatgttaatttctgtgcattttaatattcttttataattatgagcattttaataaattcatttttacaannnnnnnnnnnnnnnnnnnnnnnnnnnnnnnnnnnnnnnnnnnnnnnnnnnnnnnnnnnnnnnnnnnnnnnnnnnnnnnnnnnnnnnnnnnnnnnnnnnnnnnnnnnnnnnnnnnnnnnnnnnnnaattttgggggnnnnnnnnnnnnnnaaaaaannnnnnnnnnnnnnnnnnnnggggccgggcccccaaaggaaaggaaacagggcctatgtttttcccaaggaaacccgggacaaaaaaaggggtgggatcccccc

SEQ ID NO: 364189 - DNA, 541 bp, Homo Sapiens
gcggccgcgcgcgaagatagccagtagcgctcgaggatgcccccaaacgcggcgtcggaggagtagacatcgctggtgacgaacggctggggctcctgctggccatccaggctgatgggccagtgttgcgtcctcatctcggcgccaccataccagtgggccgccgcgtcgcccaagaacatggcgtgctccacggcccggcccggcgctgcctcctcccagcgcacgcggtagcacatgaccgtgtccttgggccgcacagtctggatgaagaagtgcagcggcagcccgtcggccgtgagcgagcagcccagcagggcgccatcgcggctgcaggagtcaaggtccagcgcgccggagcggaaggccaggcggaagacctgctctcccttctgattgcggatggagaagccgccagctttcaggtccagcagctccgcgcgaagtcgctccgccctgcgtagggagacgctgtagtagcaccaggccaccaccgcggccagcacaagcagcagccccagaaccgcggagcccagcagcg

SEQ ID NO: 364190 - DNA, 892 bp, Homo Sapiens
  misc_feature (171)..(171): n is a, c, g, or t
  misc_feature (715)..(715): n is a, c, g, or t
ccatcgcagccgcagctatgtacaccttcctgcccgacaacttctcacctgccaagcccaagccttccaaagagctgaagccgctgctgggctccgcggttctggggctgctgcttgtgctggcagcggtggtggcctggtgctactacagcgtctccatacgcaaggcgngagcgacttcgcgcagagctgctggacctgaaagctggcggcttctccatccgcaatcagaagggagagcaggtcttccgcctggccttccgctccggcgcgctggaccttgactcctgcagccgcgatggcgccctgctgggctgctcgctcacggcccactggtatggtggcgccgagatgaggacgcaacactggcccatccgcctggatggccagcaggagccccagccgttcgtcaccagcgatgtctactcctccgacgccgcgtttgggggcatcctcgagcgctactggctatcttcgcgcgcggccgccatcaaagtcaatgacgcagtgcccttccacctgggctggaacagcacggagcgctcgctgcggcttcaggcgcgctaccacgacacgccctacaagccacccgccggccgcgccgcagcgcaagagctgagctaccgagtgtgcgtgggctcagacgtcacctccatccacaagtacatggtgcgtcgctacttcaacaagccgtcaagggtgccatgcacccganggccttccgagaccccatttggtccacatgggcgctgtacgggcgcgccgtggaccaggacaaggtgctgcgttttgcccaacagatccgcctgcaccacttcaacagcagccacctgtaaatcgacgacatgtacacacctgcttatggcgacttcgacttcgatgaggtcaaatt

SEQ ID NO: 364191 - DNA, 446 bp, Homo Sapiens
agtgcctctttcagtgatatgaagttaaaaccaggaacatggaggagacatatttccacctatttctctccataagtataaaagaccataaaagaccatctagggacttcagaacccaaataatgacacaatgttaatttgcaggttctccctctgcctgccaccccacccagcaaggaggagaggaagtgttgagaagggaagagatgagtcctggccctgtcacttcttaggggtgtgcttttgaacaacctgctcaccatgtatgaacttcactcttcttgtttataaaatgaggacaatgacacctgcaagactgtgaggtttaaaaacaaaatctgtgttgagaggtaacttgcctcttttacttaccaatgatttcctcaatgcctggtgactggggctggttcatactagacgatcaataaatgctccttgaatgaaaa

SEQ ID NO: 364192 - DNA, 497 bp, Homo Sapiens
ccgactgcatgtaaggggaagtcagcccctcataaagtgaacctaaattgcttagcccccaagaatatttgttctctaatgagcctagtgtgggtaaggctgcacctggtgaagggggcagggtcagaaactccgctgctggagatcttttccagcaaggaaaagtctcctgggacctgaaaggcacttaacctcacccagactgccgctaaagaacaatgaacttaggagtcttcgctgtgctcctcttaagtttgtaagagactgtaataagtctcttactctctccgggcctcagtttcctcatctataaattgaagaatctagaccagataagaggtctccagcctggcttgactagtggaggaccccttttaccatgtatactcttgccaacaccttggaagtattttatcatgcaataatttgtgtatgatgtgtaatagagaagggattgttaaataaaacttattttagatccatgtataaccttaaaa

SEQ ID NO: 364193 - DNA, 472 bp, Homo Sapiens
tgcgcagcaagctggtccgcctgtcctccgactctttcgcccgcctggtggagctgttctgtagccgggatgacagctctcgcccaagccgagcatgccccgggcccccgcctccttccccggagcccctggcccgcctggccctagccatggagctgagccggcgcgtggccgggctggggggcaccctggccggactcagcgtggagcacgtgcacagcttcacgccctggatccaggcccacgggggctgggagggcatcctggctgtttcacccgtggacttgaacttgccattggactgagctctttctcagaagctgctacaagatgacacatcatgtccctgccctcttcgtgtgcttttccaagtcttcctattccactcagggctgtggggtggtggttgccctacctgtttttgccaaaaataaattgtttaaaacttttcttattaaaaacgttacaaaat

SEQ ID NO: 364194 - DNA, 513 bp, Homo Sapiens
tacaactggcccgtgtggctgggcgtgcacgatcggcgcgccgagggcctctcctcttcgaaacgggccagcgcgtgtccttcttcgcctggcatcgctcaccccgccccgagctcggcgcccagcccagcgcctcgccgcatccgctcagcccggaccagcccaacggtggcacgctcgagaactgcgtggcgcaggcctctgacgacggctcctggtgggaccacgactgccagcggcgtctctactacgtctgcgagttccccttctagcggggccggtaccccgcctccttgcccatcccaccacccggcctttccctgcgccgtgcccaccctcctccggaatcgcccttcccttcctggccacgaatggcagcgtcctccccgacccccagtctgggcgcttctgggagggctcttgcggtgccggcactcctccttgttagtgtctttccttgaaggggcgggcaccaggctaggtccggtgccaataaatccttgtggaatctga

SEQ ID NO: 364195 - DNA, 507 bp, Homo Sapiens
  misc_feature (91)..(132): n is a, c, g, or t
taggccggcctgcactgttatgttcaataaataagcagggtgctctgggctggggattgtgtgaggagcagagcgcagcccgtcctcatgnnnnnnnnnnnnnnnnnnnnnnnnnnnnnnnnnnnnnnnnnntggatgcgctttggcagctgagtagtccgagagccagaaaagaaatgtggaaaataagaacgctgtagcaggcctaggtgaggaaatttaggaagggtttgcggcaggtaggatttgagatgggtcttggacagttggacagtgtcagccggtaggacgggggtgcggacggaagcctgtgaggaaggcagaggatgcggagctgtgagcggagggagcagcgaggctggagagcagctgggctgcgggtcaagacgtctgcgtttaattcgggactgaaggttagcagggaagggaacgatgccagatcttgagtttaagaacttgaatcttgtaaagtaccaaatctaataaaatactcgtcctaaatcaaaa

SEQ ID NO: 364196 - DNA, 586 bp, Homo Sapiens
  misc_feature (376)..(417): n is a, c, g, or t
ttttgatttttgacgagtattttattagatttggtactttacaagattcaagttcttaaactcaagatctggcatcgttcccttccctgctaaccttcagtcccgaattaaacgcagacgtcttgacccgcagcccagctgctctccagcctcgctgctccctccgctcacagctccgcatcctctgccttcctcacaggcttccgtccgcacccccgtcctaccggctgacactgtccaactctccaagacccatctcaaatcctacctcccgcaaacccttcctaaatttcctcacctaggcctgctacagcgttcttattttccacatttcttttctggctctcggactactcagctgccaaagcgcatccannnnnnnnnnnnnnnnnnnnnnnnnnnnnnnnnnnnnnnnnncatgaggacgggctgcgctctgctcctcacacaatccccagcccagagcaccctgcttatttattgaacataacagtgcaggccggcctaggcttcccataggcaaggatgactttcagaatgttccagaaaaaaggatacttcagggggcccataactgcttgattca

SEQ ID NO: 364197 - DNA, 881 bp, Homo Sapiens
  misc_feature (270)..(270): n is a, c, g, or t
gggtccggaattcccgggatggaaccagcaggactcccctgggcgcctccagcagccgccgaccccgagggcccgacgagccctgtaggtggtgtggtgaccgccgagctgacttggcgtcccaaagcctccctggccgtgaccctagaccgcatcggcttcttcgtctaccaagcagggctaacagccctcacggaattgttttgggaaaacgatgaaaggagaaaatggatgcaagctttaagccacacaaaagctggttaccatggngacagcgctggctcgagtctgtcggccacggaaacactgcatgcttgggccagtaatgatttaggacgagtattttattagatttggtactttacaagattcaagttcttaaactcaagatctggcatcgttcccttcccctgctaaccttcaagtcccgaaataaacgcagacgtcttgacccccgcagcccagctgctctccagcctcgctgctccctccgctcacagctccgcatcctctgccttcctcacaggcttccgtccgcacccccgtcctaccggctgacactgtccaactctccaagacccatctcaaatcctacctcccgcaaacccttcctaaatttcctcacctaggcctgctacagcgttcttattttccacatttcttttctggctctcggactactcagctgccaaagcgcatccattgctgtactccctctctgcctggcctacttcagtggacaaagcatgaggacgggctgcgctctgctcctcacacaatccccaagccagagcaccctgcttatctatcgaacataacagtgccaggccggcctaggcttcccataggcaacgcatgactttcagcactgttctaggaac

SEQ ID NO: 364198 - DNA, 2645 bp, Homo Sapiens
  misc_feature (51)..(87): n is a, c, g, or t
  misc_feature (2414)..(2465): n is a, c, g, or t
agagtgagtagatgcactatgggcgaccggagcttatcgcggtggcggcgnnnnnnnnnnnnnnnnnnnnnnnnnnnnnnnnnnnnnatcaggccaaatcggccgagctcgaattcgtcgagagcgtgtggtgttgggcgctgaggcgcgagaggaggggatgggcggggcgcgcggccgttagcgcgcggccgttagcggtcggtttctactaacggtaggcgtcgccgcgattcccgaaggtcatagtccgcgtgacccacccccgtttgcgcgctcgcagtcttcgccggcgcagtcaccgcgcaggggcggccgcccggaggtagctaccacggcctgtgtcaacgactaaagctccagtacagcggcgccctcagacagctgggagggtggctctggccgggagcggcggccggtgagctaccgcgaggaggagcggcggaggcgacctcggcccggccctgcactggccgcccggcaggcgcgacatgagcctggtctggcatccgcgggatgctccttaagccccttctccggctgttaacctccggggaacggttgtgaccacaccgacacgtattttacagataaatcattcttgcggcggcgggtcgaacacgtttatttattttttattttctcaacaagcttttacccagcacctgtccagtgaaacaacttgataatcgtttcgaggggcgtccgccgggttaggaagccactgcctggcagcttgtggaagcctcatttgcaaagccacccctcagatgttttgaagatcgtgacgtcttgtaactagcagtgtgtgcacagaatcctactcaaggaacgtcttggcccagcgatgcaaagaactgaagtttcaagctggaagagcctgtattgtcctcacaatagtatagaagaattcaagagaggagagagagacagcaccgaatgaagactgtaaaagaaaagaaggaatgccagagattgagaaaatctgccaagactaggagggtaacccagaggaaaccgtcttcagggcctgtttgctggctatgccttcgagaacctggggatcccgaaaaattaggggaatttcttcagaaagacaatatcagcgtgcattatttctgtcttatcttatctagtaagctgcctcagaggggccagtccaacagaggtttccatggatttctgcctgaagacatcaaaaaggaggcagcccgggcttctaggaagatctgctttgtgtgcaagaaaaagggagctgctatcaactgccagaaggatcagtgcctcagaaacttccatctgccttgtggccaagaaaggggttgcctttcacaattttttggagagtacaaatcatttgtgacaaacatcgcccaacacagaacatccaacatgggcatgtgggggaggaaagctgcatcttatgttgtgaagacttatcccaacagagtgttgagaacatccagagcccgtgttgtagtcaagccatctaccaccgcaagtgcatacagaaatatgcccacacatcagcaaagcatttcttcaaatgtccacagtgtaacaatcgaaaagagtttcctcaagaaatgctgagaatgggaattcatattccagacagagatgctgcctgggaactcgagccaggggctttctcagacttatatcagcgctatcagcactgtgatgcccccatctgtctgtatgaacaaggcagagacagctttgaggatgaagggaggtggtgcctcattctgtgtgctacatgcggatcccacggaacccacagggactgctcctctcttagatctaacagtaagaaatgggagtgttaggagtgttcacctgctgcagccacagactacatacctgaaaactcaggggacatcccttgctgcagcagcaccttccaccctgaggaacatttctgcagagacaacaccttggaagagaatccgggcctttcttggactgattggccagaaccttccttattagaaaagccagagtcctctcgtggcaggaggagctactcctggaggtccaagggtgtcagaatcactaacagctgcaaaaaatccaagtaacaccttctgagtagcctgctgtcccacacaatagggtatgaagctgcgctcctccatcgggtttggggagggagcactctgggactgtgagacaaggaagcagggccagcagtgagactatgtagctcaagcaaagagaagtctatagtggagcatgaggagggagcagtccagatgccaacaaggaaatgcgtttatggctacaagagtgcctctgctttctcactcctctcctcccaccaaggattcttccaccttaatcttgttttcatatgcctcttcttacttcacccatgtttgttgttatgcacaataacacggttttctccnnnnnnnnnnnnnnnnnnnnnnnnnnnnnnnnnnnnnnnnnnnnnnnnnnnntactcctcacaccctcaatacaacaacacaaacatacaaatatcaatcaccacttatcatctattgcttataccatatctgcacttctctgtcgccccccctactttctctcccctctctcaccctcagaatatctcacttcacctaccactctcttctttcataacactccccccttca

SEQ ID NO: 364199 - DNA, 785 bp, Homo Sapiens
agcgggtttgcgcgctcgcagtcttcgccggcgcagtcaccgcgcagggcggccgcccggaggtagctaccacggcctgtgtcaacgactaaagctccagtacagcggcgcccgtcagacagctgggagggtggctctggccgggagcggcggccggtgagctaccgcgaggaggagcggcggaggcgacctcggcccggccctgcactggccgcccggcaggcgcgacatgagcctggtctggcatccgcgggatgctccttaagccccttctccggctgttaacctccggggaacggttgtgaccacaccgacacgtattttacagataaatcattcttgcggcggcgggtcgaacacgtttatttattttttattttctcaacaagcttttacccagcacctgtccagtgaaacaacttgataatcgtttcgaggggcgtccgccgggttaggaagccactgcctggcagcttgtggaagcctcattttgcaaagccacccctcagatgtttggaagatcgtgacgtcttgtaactagcagtgtgtgcacagaatcctactcaagctggaagagcctgtattgtcctcacaatagtatagaagaattcaagagaggagagagagacagcaccgaatgaagactgtaacagaaacagaaggaatgccagagaattgagaaaatctcccaagactaggagggtaacccagaggaaaccgtcttcagggcctgtttggctggctattgccttcgagaacctggggatcccgaaaaattaggggaa

SEQ ID NO: 364200 - DNA, 495 bp, Homo Sapiens
tgcgttggttttgaggctcacatatggtaaaagtggttggaaatctggaaatattgctgtgtatctgcaaagcagcttgatatagtggaaaaggtattaggtcattaatcatgagatttggattctagccccttagctgctgcctgccaggcctggagacctttgttctcttctttaaactgctgctttctcatcagaaaatgaagttcctctccataccccctctttgaagggctgtgaagctcgaagtggcagcttaaaaaactgcccatctcaggaggtgtcttaaaaaggaggacataccgctggctcctgcctttctcacttagccaggtttgaaacctgtgttgttttcactgtggccattttaggatttttcaaaggctttcagaaagcaacatgctaccgtaccccttatacaccaaaactggttttcattttggaatataaaagtgagatttctcccccagtacaataaagttgttacaagtggtt

SEQ ID NO: 364201 - DNA, 1145 bp, Homo Sapiens
gacattacacaggtgggtaggttatattacctgtgaactcactgtggtgtaatggaaggaatgtcacaaaatatgtcgctaaagagggcactgagtttgatagatttgggaccaaccaacctcgggtgcttgggaagcatcatttccttagaaagtcagaagtcacccatgacatttctacccccagcccctccttccatgagtacactatgtggacttaccacattttttacttgtggttaaaagtcatcagcaaagtttctctcctatgtggattctctgatgtcaaataacatggaagcacccacagaaggctcttccaccccaataacgtgcacagggtttttctcttgcatgattttttggatgtcaaacaaagccagggctctgctttccggctgccctgcctttgctccgcctgcagagctctttctggagttcgggtgttgatgctgaaccaggtgtgagttcctgctcgaggattgttcacgccgccggcttcgcccatggggctgctcctctctggtgtgagttatctggtgccggatgaggtgagagctctgaatgaaacacttcccacactgattacatttgaagggtctgtcgcttcggtgagtcctctcatcttgactcaaaggtgggtcacagcccagggcttctgtccattcatgctttgtgagagctggcgtctgctcaaagatcagcctctggcggcactcaaagggcttctcccccgcgtgcttccgctggtgctgggccagggatgagctgtgcctgaagcccttcccgcagtggttacactcgtagggcctctcctcggtgtgagttctcaggtgcaggaaaaggcaagtggtccgagagaaggatttcccacacacactgcaggtgtatggcttctttcccaagtggtgtccctcttgtgcccgccccaagggaagagtattggttgaaggcccttcccacagtccttgacactcataagggcttttccccgtgtgaatccctcgatgtgaggggtaaggttgactatgccagaagacttccacaatcggaacactgtaggggcttggccttcatgtgatgcgctagcttgcaaaggggggaggatcggtgaagcttccccaatccttgccaaataaggtttt

SEQ ID NO: 364202 - DNA, 1761 bp, Homo Sapiens
atcgaaccagccgcccatgatgacctgcgagagactcccatgccccactgcaggcctgggccccctcagggaggaagcgatgaagccagggcagcctccagtcccttgcagcaggtccccgccccgccactgcctgcgaagaagaaccttcccactgcccctcccagacgccgcgtttccgagagggtgtccttagaagaccaaagtccggggatggcggcagagggggaccagctcagcctgcctccccaagggacctcagacggccctgaggacacaccccgggagagcacggagcaaggccaggacacagaggtgaaagccagcgatcctcacagcatgccagagctgcccaggacagccaaacaacccccagtcccgccccccaggaaaaaacggatctctcgagcaactggcctcgaccctcccagctcccttagagaacgctgagctctgcacacaggcgatggccttggagacaacccacgccgggtccacccagagagggccaaagccctgcttctcaggctgggactcagcaccctcctgcccaggccactgcccattcccagagctctccagagttcaagggctccctggcctccctctcagacagcttgggggtgtctgtcatggccaccgaccaggactcctactccaccagcagcacggaggaggagctggagcagttcagcagccccagcgtgaagaagaagccctccatgatcctgggcaaggctcggcaccggctgagctttgccagtttcagcagcatgttccacgctttcctctccaacaaccgcaagctgtacaagaaggtggtggagctggcgcaggacaagggctcgtactttggcagcctggtgcaggactacaaggtgtacagcctggagatgatggcgcgccagacctccagcacggagatgctgcaggagattcgcaccatgatgacccagctcaagagctacctgctgcagagcaccgagctcaaggccctggtggaccccgccctgcactccgaggaggagctcgaagcaattgtagagtctgccttgtacaaatgtgtcctgaagcccctgaaggaagccatcaactcatgcctgcatcagatccacagcaaggatggtacgctgcagcagctcaaggagaaccagttagtgatccgggccaccaccaccactgacctaggtgtgaccaccagcgtgccggaggtgcccatgatggagaagatcctgcagaagttcaccagcatgcacaaggcctactcacctgagaagaagatctccatcctgctcaagacctgcaaactcatctacgactccatggccctcggcaacccagggaagccctatggggcggatgacttcctgcctgtgctcatgtatgtgctggcccgcagcaacctcacggagatgcttctcaatgtggagtacatgatggagctcatggaccccgccctgcagctgggggagggttcctactatctgaccaccacctacggggccctggagcacatcaagagctacgacaagatcacggtgacccggcagctgagtgtggaggtgcaggactccatccaccgctgggagcgccggcgtactctcaacaaggcccgggcctcccgctcctccgtacaggacttcatctgcgtgtcgtacctggagcccgagcagcaggcgcggacgctggcgtcgcgggcggacacccaggcccaggcgctgtgcgcgcagtgcgcggagaagttcgcggtggagcggccgc

SEQ ID NO: 364203 - DNA, 674 bp, Homo Sapiens
  misc_feature (185)..(195): n is a, c, g, or t
  misc_feature (405)..(405): n is a, c, g, or t
  misc_feature (541)..(550): n is a, c, g, or t
accatgcctggtcacacttctcattctttaaaccagacctcatttgtccatctcccccatcccccgccccaccccacggactgtcctataatgcccatacaacaggtcactgtttagaaagtgctacaaagttacaaacacagtcccttctgagcctcccaccaatgttggtgggtacaaggtcnnnnnnnnnnntctcatctatctaaggggcataggagactttttagttagagggcccaattatagtcctcctgaaaagatgccaaaagtccccttcaacacttagcaaagattcaagaaagatgaatctcacattctttgtatgggaaatgaggaacttgacatcttcaatataatggattccactaaaataagatgacgatcaataggagagcccacaangctaaaaaaatacttgactagctgttattgaaaggctgaaattcagctgacataagcagtattaatattgagctagaaaataattcgcattgaattcagcccaacttttgttttctgatttgggtctcttctaaannnnnnnnnncttctggacattgagaacaatccaatttgaaggcctcaatgcccaaatctacactcttcctcgtgccggattcgccacccaggcctcgctacgaaggggatgtgacgggcgtgtaaccccgcaa

SEQ ID NO: 364204 - DNA, 465 bp, Homo Sapiens
tggcagctagcagggcaattggcggggaggagtgcggactgaggactgaggaccaagggggcccaggccctgccctcctacccggaggggctccgtttgcattccttggtgctctctgagtgcagctggtgtcccgccctgttctgggcggacgcctgtgtgcgtgtgtgtgtgcctgtccagtgtatattgtgtcttagcttccattttaaaaattgttctgtacagagagagatgcagcaggggcgggagggcagagtgggcggaggggagcagccgcacccccagcaccgggtgtctgcggtaggaacaagagggctgagagggtctggtcctggcccaggctcccccttgggctcagcacgaaagggctttcaatgaattaagtgaaaactttttccttttttacaaaaatgcaaaaatcaacaaagctccaaacctattggaaataaaatatgaactagc

SEQ ID NO: 364205 - DNA, 1082 bp, Homo Sapiens
tggcagctaccccccctagcccagtgggcaccagcagcgtccccggcatgaatgcaaacgctctgcccttctaccccaccagcgacacggtagagtcagtcatagagtctgctttggatgacctggacctgaatgagtttggcgtggccgccctggagaagactttcgataacagcacagtgccccacccaggaagcatcaccatcggcggcagcttgctgcagagctctgcgcccgtgaacatccccggctccttgggcagctctgcctccttccactcagcatccccgtcccctcccgtcagcctctcctcgcatttcctgcagcagccccagggccacctgagtcagtcggaaaacacatttttgggaacctcagcatcacatggatctttgggtctgaacgggatgaacagcagcatctgggagcattttgcctctggaagcttctccccgggcacttcccccgctttcctatcagggccaggggctgccgagctggcccgacttcggcaagagctggatgaagccaacagcaccatcaagcagtgggaggagtcctggaagcaggccaagcaggcttgtgatgcctggaagaaagaggcggaggaggctggtgagcgggccagtgcggcgggcgccgagtgcgagctggcccgggagcagcgggatgcactggaggtgcaggtgaagaagctccaggaggagctggagcggctacacgcggggcctgagccccaggccctgcccgccttctccgacctggaggcgctctcactctccaccctctactccctccagaaacaactgcgggcccacctggaacaagtggacaaggccgtgttccacatgcagtcggtgaaatgccttaagtgtcaggaacagaagcgggcagtgctgccgtgccaacacgctgcgctgtgtgagctctgcgctgagggcagcgagtgccccaggctcccccttgggctcagcacgaaagggctttcaatgaattaagtgaaaactttttccttttttacaaaaatgcaaaaatcaacaaagctccaaacctattggaaataaaatatgaacttgcaaaaa

SEQ ID NO: 364206 - DNA, 477 bp, Homo Sapiens
cctgccttttgtctctgagcctgatgtgtgtaggggtgatggaaaggctcactgcccaggggtcagccagaggggaggtgggctgcactcctcctgcctggagaccaggcccccttcttgcctggtgctgtccctgctgtgggagacgtctggccacaggcagtgccccacccagtcttggagagagatgaatgttaaatcagaggttcaaatgctagagaactgagaagccctggtggcaggcatggtctggagtgctgggcagatgctgtttctgggcccgtctgcctggtgggggtgctgtcctcccccctgtgcacacgtgagcatcgtgcatgtggcccctctgcagtgcaggagtcactgattgatgggtgtgccgaccagcagcttcacaaatgtctgctgcaaggggaatcgtcagagtccaatgtgtgcctctacagtaatgtcggaaataaataccattcttgaaat

SEQ ID NO: 364207 - DNA, 572 bp, Homo Sapiens
taattcactggccccgaaagaaacttctctgtcaggccacaatataaccagataccagacacacgagatgttttggagggagggtggtggagccaagattgcagctccttattgaggagaacagtcctcagagatccagagtcatttctcctgtgttcagcttgaaaaccttgggcaacttctggagatttcaacgtctcacagagtgcggaaacatgactggcgcagcatcctttccggaattggtgatgtccttcctgtaagggttgattttccatctcatcaaccaaatcgggaaagccgcagcatccttttctccaagaatgacaggtggtttatctcaggcttttctgtcccggcgcctttctctccaatgcagtctgctgatgtaatgcagtgattttttgtttgagggccacaggaagaccccttgtggctgttgtactggcattccctcttcatagcagggatggtgcctctggacattttccgacagcagggatcgttgggtgaggttagcagcgccagcccgggttagcggaagcagccttcaggtctcctaggagagcccc

SEQ ID NO: 364208 - DNA, 145 bp, Homo Sapiens
ggtcctctgcagcttggaatacatgaggaagaagagtgggagacaggaggaaaggtaaggttgggagagggcaagaggaaaggaggagagtagagggaacactccatcgattgccagcacaataaactgtatcaaggaatacttc

SEQ ID NO: 364209 - DNA, 469 bp, Homo Sapiens
ggcaccagcttcctcagcgagcagggcccagggctctgggcctgaagcaagagccagcccggctcccagtgtctgcccggctcccagtgtctgcccagccctctcccagacaggagcaggctgccaccccttctacctcaccactgcccctcgaagaattttgcaaatggccccttgccccattttaagcaggagcaggtggctggtttgaagccccaggtatcccccttccctgctatgggaaaggccaagctgctgggtggggacagaagctgcaggggagagggaagcagccgtgctgtcaacatcatccggcaccctctggggtaggagaacagccattccacatgtgttccctctatccgtcctgcttcctgggcagctggtggtgctgggaatggggtgccccagccttggtgaggacagtgttgggaggcccaggggcccagtaaagtgcatttgacattga

SEQ ID NO: 364210 - DNA, 542 bp, Homo Sapiens
  misc_feature (43)..(43): n is a, c, g, or t
ggcatcattcttccagaagtgacaagcggtgcatttctggacntggcacatcagtggggtgaatttaaggtgtcagagagatacctcaccatggatgacttgacaacagccctgaaggggaacaagagtaagagagatgtttggctctggtacagcctgtgttgtcggcccagtttctgatatactgtacaaaggcgagacaatacacattccaactatggagaatggtcctaagctggcaagccgcatcttgagcaaattaactgatatccagtatggaagagaagagagcgactggacaattgtgctatcctgaatggaaaatagaggatacaatggaaaatagaggataccaactgtatgctactgggacagactgttgcatttgaattgtgatagatttctttggctacctgtgcataatgtagtttgtagtatcaatgtgttacaagagtgattgtttcttcatgccagagaaaatgaattgcaatcatcaaatggtgtttcataacttggtagtagtaacttaccttaccttacca

SEQ ID NO: 364211 - DNA, 348 bp, Homo Sapiens
gggtgtgagcaggagaaaaaagaagagatgagattgccctgagcccaaatccagaaagcagggcacaaccaagagagctaaagacccctgggtaaagccacctcctgcccccaagtccttccctgacgcagacttgctggacaaccaggtgcgtcaacatgcaggtacaggggcagacccttctcccttccctcctcctccatgcctttcacaactatttgctgagtgtcactgtgccaagccctggggctaaaactaatcaagatttggttcttctgtacacttaaaagtggttaaaatggtcaattttatgttacgtatattttaccacaatttaaaataaatttg

SEQ ID NO: 364212 - DNA, 470 bp, Homo Sapiens
  misc_feature (311)..(371): n is a, c, g, or t
cgcgaggcctgtccttccacctctgtggggaccaagagggcaaggatcgtgccaggctcaccgtgggcgctcagtaagcggccgtgcagaggacggttgagggctttgtgcagaggaaatgagagactgctctgaagcaaggcccgcctagtgagctgctaggaaaatggaagtctgggattaatcgtctctacaaggagggtgcgtgggaggcaccaaagcaggcggtcacagctcccgcaaaggcagccggctctccttccccgcctgacgctcagggactactcgcacagactgggctacttccttcnnnnnnnnnnnnnnnnnnnnnnnnnnnnnnnnnnnnnnnnnnnnnnnnnnnnnnnnnnnnnattgtaggggcagaaaggtgtgatattttcccttactcatcccaaaggtcacagcggacactcctacaaataaaatataggttagcaagagaaaaaaaa

SEQ ID NO: 364213 - DNA, 932 bp, Homo Sapiens
tggtaccggtccggaatttttcggataagagtgggtagaacgccagattccggccacttttcgagaccgagtagagacggacagtgaggaggataggacccacttacacgcttttatgtcagccgcgatcccacccccacaagcgtctgcaaaacccttcctggggccttggcgacagccctgtgtcctcacggcgcgcagaggcggcgccgcgaaccttgtgtgcattttacacgacggcggggactgaggtccctcgcagcccagagccggagcccggggtcggccgagcccgcaggaccggcttcctcgccgactctcacggcctcacccagccccctgggcccatggcggcgccggcgttggcattagtatcatttgaagacgtggttgtgaccttcactggagaggaatgggggcacctggacctggcccagaggaccctgtaccaggaggtgatgctggagacctgcaggctcctggtctcactggggcatcctgttcccaaaccagagctgatctatctactggaacatggacaggaactgtggacagtgaagagaggcctctcccaaagcacctgcgcaggttggtgactgagagtctggcagcgggtatcagggcagcctgcagaccacccaggcatcactgtgtctgaaatgccatgggcagctattttgtggtcttgagcagtcatggagcccttgaccccatggtcccccgtcttcccacttctgtcacacactctttgcctttattcaggttggaatatgttaggtaggagacagattctaggctttaatgatttgccactcactagcctcatgactctggagaggttgtgtgacgtcactgtgcctttggtatataagttaggctgagttaatgaccttctctgaaaaataaactccaaaatcatgtgactcaaaaaa

SEQ ID NO: 364214 - DNA, 553 bp, Homo Sapiens
ttttcagaaatcaatgtttactgcagagaacacagaagccagcaagcagtaggcaagggaggcgtcgcagtgagtgtgtcgggcaggctgggaaccagcgcaacggcccacgtggaccgaggactcacgcagagcaagtcacagaaagcgcagctgaaaacaaacggatgcttatcccagatgcacaggacacttaccaaggactgatggtctatcagagtaatgctcagcagctttggctggcaggacagttaaacttttggacaacagaaagtaactgggaaatgggacatctgccaccaacacgagaggccaagaccacagctgctacaggaggggtcagcgccacagtacacgcgtggcggcggcggctgcacatgcatgcctggggaatgtgagtgttcagacattgccaggagtccagcctcaccaggaaacaggcacacggggacacaggcacaaacactaaaaaccctcgctgaatccactcggctgaccggtggtcaccgagagcaccggccctgtgctccccaaaaaactgcacctgggcccc

SEQ ID NO: 364215 - DNA, 459 bp, Homo Sapiens
aacctggcggagcacgcgcgcacgcacacaggcgagcggccctacccctgcgccgagtgcggccgccgcttccgcctaagctcgcacttcattcgccaccgacgcgcgcacatgcggcgccgcctgtatatttgcgccggctgcggcagggacttcaagctgccccctggcgccacggccgccactgccaccgagcgttgcccggagtgtgagggcagctgagtcccgcagggctgcggaggggcgcgctggggcttcgacctggctgcactaacccaggctcctcctcgccccggcctccgggtctgggaaattgaggggacggcaggcccggctgccctggaactgggagacagggagaatcccctgccggggtccctggaaacagtgcccaccccacatcactacattccctcggcccgtgttagtgaataaagtattatatcctcacaaaaaaaa

SEQ ID NO: 364216 - DNA, 443 bp, Homo Sapiens
gaataggttgttcctctatttgaaagcctttacaatttcggagggaagtttccaaatcaatcagtaagtaccccccactccaggtttatccttatgtaaagtgccccctttgcacatgcaagattgaataaaccttgaaaatattatgctaagtgaaagaagccggtcacaaaggaccacatggtatgtaattccatttaaataaaatgtccaaaatagaccaacacatagaaacagaaagtagatttgtggtggcccaggattaggggagttggggggaaatggagggatatggtgtttacttcagggtaatgaaaatgatctaaaatttattgtggtgatgtttgcataacagtgcaaatatactgaaaaccactgaattttacactttaaatcagtggcttctgtggtatgttatcaatatttctcaataaaacttcaaa

SEQ ID NO: 364217 - DNA, 1298 bp, Homo Sapiens
  misc_feature (859)..(899): n is a, c, g, or t
gcggccgctgctgtgcaggtcctgggaccactcctcgcccaccgtcaggtgcctctgggtggccaggcggctgatgagtctttctgggttttctgttgcgaggtcatcaggagaatctgtgtggagagcttcaataatcagagagaaggtgcccggccaggtgaagccgaaggggaagcggatggggttgctgaacgcggagtcggcgcccccgccgtcgggcagactgaaggagtcgacgcccagcacgggggtgacggcgctgccgtaggtgcagggcggctcgggggacacgctggcctggtagtgcttgaggcacacgcggaagaaggtccggcaggcgcacggcggtggccccgcgcccccgcggcagcagttgcggttccccagcagccccttcttgttgacgaactcctgcagcttcagttcgaacaccccagagctccagacctgacacagcaaggccgagagcaccgccagggccagcgcgcaccgactgcccatgctgcttcgctccacgcgcgagcctggggggcccccacttctctccttagaacagcggcggacgcgcgggggatcgatgggccacggggagcgtgggcagaaaagcgcccttgcctcgccccagaccgcaggacccaggacttctttctgtaaaagccggtctccgcctcttcccaaggccgcggttctttatatccgccctgcgaggtcccgcggcagccccagggatgcccgaggaaaggcagctctcgggggacagcgcggcggcggcgactttcgttttcctccttcctcccagcccccgaggaggtgagggtcgccggcttcctggttttgtcttgagcttcttcgcagnnnnnnnnnnnnnnnnnnnnnnnnnnnnnnnnnnnnnnnnnttgagcttaattcccaagagagctgcagagcttcctcccgagccgattagaaagccgcggtctggaaatcccacgggcaaggcgataatccggggccagcggcgcgcgctgaggggacggtcggcggcggcgggtgtgcgcggcggcccctgcggatcgcggcccggtgtcactcggcggcggcggtcgttccgggagcactccgggctccgatctccggtgtcacagcaaagatccgcgtctttccgatgaatccagccaatgccatccagtacacacgcgcaggaccggaggggccgggccgtgggaggaggctctgcgccgcggctgcccgggttcccctgcgctctgccctcggccgggtcgggtctccgcgggtgcgcgcagaggacctccgct

SEQ ID NO: 364218 - DNA, 701 bp, Homo Sapiens
gggcgcatcactggtgtaccgaggtcggcgtgatagctaggatgtaccgcacgtggaacccgttccgctctaaagctggccgcggcacatcctgggtcgggcgtggtacctagatccacaatctaagcccagagtccaaggtgctgtacctgggctccgcgtcaggctacctaccgtctccctatgtctccgacatcattggccctagacggcctggttctacgccgtcgagttctcccatccgcgccggccgcgatctggtcaacgtggccaagaagcgcaccaacatcattccggtcctggaggacgcgcggcacccgctcaagtaccgcatgctcatcgggatggtggacgtgatcttcgccgacgtggcccagccggaccagtcccgcatcgtggccctgaacgcccacaccttcctgcgcaatgggggccactttctcatctccatcaaggccaactgcatcgactccaccgcatccgccgaggctgtgtttgcttctgaggtgaggaagttgcagcaggagaacttgaagcctcaagagcagctgaccctggagccctatgagcgggaccacgctgtggtggtcggggtctaccgacctcttcccaagagcagcagcaaatagcacccagctcaggctcgcctgccatctccccaaggctgcattgtgttgataaatcttcgggtgttatcatac

SEQ ID NO: 364219 - DNA, 579 bp, Homo Sapiens
  misc_feature (524)..(524): n is a, c, g, or t
gatatgagggaggctgggcttcccagtatactccactcatccacaagacatttactaagcacatactgtgggccaggcacaaactgggcctgcgatacacagatgaacaagacaagatcctgactgcagtgtctcacaaactaagccgtccatacacatacataaacacactggcgcaacacaatgtcatgtatcagtgacagaaaatctgtcactggggtcatgagggatgggcagtcttgctaaacaaggaaattcatcaggcagacgagtggtaggatggggagaagaaattccatggggaggaagaagcatgggcagatgtgtaggtgggaaacccttgaatggtccccaaaccataagtgatctgctacagccagtgagggcaggacacagaagacaaggtctttcctcagggaacttatcttccagagaggcgggcggccgggcaggctcagaaaaaaggatagaggaagtagtagtaagtgctacttttaaaagaccagataaagtgtcaagagttntcacaaaagggagagaggactttgggttagggatcccagggagcttcatgggctg

SEQ ID NO: 364220 - DNA, 810 bp, Homo Sapiens
  misc_feature (569)..(591): n is a, c, g, or t
ggggcggttgctatggttccgagggcaggactatgggaggctgccctgtacggaaaagaagaagaaatggcagtaaagagggcaaccatcattccacccagcccaaaaggaataagagaaaccctatctttcaggattctcaagatacagaggtagcaattttcatggagtgataatgaaaggagcagcagccgcattaatatcccagagagagcaagtggaccagaaggcaacttaaaccagattgttactgaacccgatgcaaactttccccagttcttgcatgaggggtatgtaccatgccaaggtctttactcccatatcaaccagaccttgaaggaggctcacttcaacagcctgcagcagcgagggcaagctccaacatgatgaattaggacttccttattccaacctaaactgtgtttataaaagcaattgcatacacaccaaaaaaagtctattggtttttaagtctacattttaagtaacaagttaatgggcagttgtttaattggggttttacttcactgttgtacttttaaaggggctgtgaataaatgtttatgaannnnnnnnnnnnnnnnnnnnnnnactctttctacatagagttttcaagttgagtgtcaatttcatgttaaggtagcaatatgaggaaacttctcctgtgcattgaagccatatgtccaattcagattgatttccagatctgtcagttagaaactctatgttaaacatctttttaaaatacaagtaagtcttcattcttaccaaatacagtagccttagtaaagaggtatgtagctttcattt

SEQ ID NO: 364221 - DNA, 567 bp, Homo Sapiens
caactgcccattaacttgttacttaaaatgtagacttaaaaaccaatagactttttttggtgtgtatgcaattgcttttataaacacagtttaggttggaataaggaagtcctaattcatcatgttggagcttgccctcgctgctgcaggctgttgaagtgagcctccttcaaggtctggttgatatgggagtaaagaccttggcatggtacatacccctcatgcaagaactggggaaagtttgcatcgggttcagtaacaatctggtttaagttgccttctggtccacttgctctctctgggatattaatgcggctgctgctcctttcattatcactccatgaaaactctgtatcttgagaatcctgaaagatagggtttctcttattccttttgggctgggtggaatgatggttgccctctttactgccatttcttcttcttttcctgcaggtcatgagagccgagcgccaccaaccccggaagaaaatacatatccgctgcgtttccgccctgagccccgagatcttggctgagaaagcaaagcgtgatgaccgtggggaccag

SEQ ID NO: 364222 - DNA, 760 bp, Homo Sapiens
  misc_feature (646)..(688): n is a, c, g, or t
ggggcggttgctatggttccgagggcaggactatgggaggctgccctgtacggaaaagaagaagaaatggcagtaaagagggcaaccatcattccacccagcccaaaaggaataagagaaaccctatctttcaggattctcaagatacagagttttcatggagtgataatgaaaggagcagcagccgcattaatatcccagagagagcaagtggaccagaaggcaacttaaaccagattgttactgaacccgatgcaaactttccccagttcttgcatgagggattgtctaaacctgtttatgtcataaactggtttatgtcctttggtcctgaaataaaactcaatacttcacagcagggaaggaaccaagctgtttaaaactacttatctccgctatgaaggagaagtattttcaaggaatatcagaagaaagtagaaagtgagaggaggttccagctgggcttcctgggtcaagtaggggctcagaaagctgtgaaactcactcatttcctgcatgcggacttactttggtcctggatgaataatattgaagatatgtgcttaaaacattcctaacatcagaatttgcgcctgtgttttcttccccaagaaagctataaacagcgaaaattttgttgtaagcnnnnnnnnnnnnnnnnnnnnnnnnnnnnnnnnnnnnnnnnnnngaaactaaaaaggaatgtttaaaagccccactttttcctgttgacccaggcagaaccctttatcctatgggg

SEQ ID NO: 364223 - DNA, 515 bp, Homo Sapiens
  misc_feature (20)..(20): n is a, c, g, or t
  misc_feature (28)..(28): n is a, c, g, or t
  misc_feature (85)..(85): n is a, c, g, or t
  misc_feature (106)..(106): n is a, c, g, or t
gggaacctaacaaacaaaantttcgccngtttaaaagctttcctgggggaaagaaaacacaggccgcaaaaatcctgaaggttanggaatgtttttaaagccacanaccttcaaatattaatccatccccaggacccaaagtaaagtcccgcatggcaggaaatgaagtgaagtttccacagctttcctgagccccctacttgacccccaggaagccccagctggaacctcctctcactttcctactttcttctgatattccttgaaaatacttctccttcatagcggagataagtagttttaaacagcttggttccttccctgctgtgaagtattgagttttatttcaggaccaaaggacataaaccagtttatgacataaacaggtttagacaatctgcaaaagacaggacagagattgcatattgtatttactaggacaagagatttacactgaccactctggaataagactgtgcttacttagttcaactaagtactgaaaagtcttccag

SEQ ID NO: 364224 - DNA, 521 bp, Homo Sapiens
aggaggcggcaggtgagaggttccggagctttccaggcgctctggggtccagcaggagctggtgcccgggccggttgggtctcaggcctgagaagaacgcagacgtctcgcctcatcgtcgctctgtggctttaccggcgtgagactacatttcccgccggccctcgcggcgtgcgctttctggcgccccctttctgcttccagcctcatagcccaggtgcatggaccccttagctctaccgtcgcaggactctgcccttccccaagagaggaaccagaaggaggacctatcagcccttgaaattctaaaagtcatgtcccttgggtcagaattgttcagggatgtggccatagtcttctcccaagaagaatggcagtggttggcacctgctcagagggatttgtacagagacgtgatgttggagacctacagcaacctggtctcactgggtcttgccgtttccaaacctgatgtgatctccttcctagagcaaggcaaagagccctggatggtggagaga

SEQ ID NO: 364225 - DNA, 590 bp, Homo Sapiens
  misc_feature (560)..(560): n is a, c, g, or t
tatggggtgtgataggtggaagggtttacttctgtaggagcaggatcaggtcactcagtctcaggagaagttaaaggaaacttaatcacagatgcaggttgtatagtggtagtgatgggagattaaggaattctcacctgctacctttctcactaaaacaggaagcaacgcaataaacagagtgagaatagagaaggattatttgaagattcagaccactttttctatagtctgaatatttttaccatgtacaaaatttatattcctaagtataaactttggcgattatcaaaaataaaatattttaaaactcaatttttgacccccttgcatttggggttccagatgttttggatgctgcccatttaatgtactcatttgagatttgaatatatagtcagctagttaaagggatgcagtaggagaggcttctgttatactaggggcgatttgttaggtccaaagtgattccagatcatcaacttgatcccaggcacatggctaaaattgtagtgtttttcagacaaacagatggctaagattgtagcaagaacaacttncctgacaacattggtcacctgtgttagtct

SEQ ID NO: 364226 - DNA, 753 bp, Homo Sapiens
  misc_feature (128)..(128): n is a, c, g, or t
tgagtgcagtgaatgtgggaaatcccttagccaaagttctagcttcatcaacaccgcagagttcacacgggaaaaagggccttatcagtgcagtcaatgtgggaaatcctttggctgcaaatctgtcntcattcacaccagagagttcacattggagaagagccttagctgtactgagaatatgcaatttcctttcagtgtaattatactgaagtagtacacctgtgagagagacaagtacgtgatttggaagccccaacatctaaggatatacagtgggcggattccccttaagttccaggtatgtgttacactttctaacatgccatttagaaagtgttagactttctcacctgccatttatggctcttgccgtttatgtcactgacagtttctgaggcagaagccgtatcatgtctaccacctgtgaggtccacacagtgtgtatcatttacctcctgaacctgctcaaggaagcagacctctgcttctccccatttgctagaagaaatcatgaatagtctgagtcttcctctctgacaagttagggcatggacttgacccagctttgtgccagagaacccaatatgagtgttgttggcagcttgccaagaaggactgtctttttcaagacatactggtttcatgtgacacctccatggatttttttccagcctctaagtcaccaacttgggaactgcttgtctcacgttgctttgttttttacaataataaaagcattattatttaaaa

SEQ ID NO: 364227 - DNA, 924 bp, Homo Sapiens
  misc_feature (795)..(803): n is a, c, g, or t
tgtcattaatgaaagattggttctgtccctgtaagttaggcatttattattcttaactcttcattcctgttctgtagccacccagcagtccattttccctatgttcaggccgaaccacagggcattggggaaggtttttgggattttcttattgagatattgttgaatctgtagtttaccccagctttcctaaggtacagtgaggggttggagggatctgtgtttggcccgggcagcaattgtctctaccttaaggttcagttttgagggcataaaatactactttgcattgtcatgagaacaacactagagctgaacatgtggaaatggtttctcacaatttaaaggaaaaacccactttgcacccatgatcccatcattttggttgagattttagaataaaaaatatagtgttgagatccgtacttttgtaatcagaccaccaagcatgcctgtggcaaggcagagaggaaaggtctggagccagtgtattgcagtttcatgctacctttacctgctaatcataaaaattatgttttcaaaagtagatgatactagccttacacccaaaaacatgttctgaattagatgccccctcacccaatttttattaagctttctaaattccagccacattgctgtacatcaacattggtttcattcaacagacatttttttggcctgaagatacaaggttcagaaagaggccatccctgccctcaaataactttcatactggtgtatgatgaactgaccattaatagtttaagtgcttacaagctatgtttctgttcnnnnnnnnntagtttggtataataaatgctataacccatacacatttctgacttgggggcagagacagactggctgatgttgtatagtttgtagcctggagtaagaagtgacataatttcgccctgtgaa

SEQ ID NO: 364228 - DNA, 409 bp, Homo Sapiens
agtctcatgaatggaccagtgcaggatagtgaatggatttgcttccagcactggaagcattccatgatgctggagtggctaggtcttggtgtcggttctttcacgcaaagtgtttctccagcaggacctgagaatacagcccaggcagaaggggatgaggaggaagaaggggaggaggagagttcgctgatagagatggcagaggaagctgacctgattcaagcagaccgggtgattgaggaggaagaggtggtgaggccccagcggcggaagaaggaagagagtggagcagaccaggagttggctaaaatgcttctggccacgaggctagaccattgtggcactgggacagcagctggacaggagcaagccacaggagagtggcagacccagcgcaaccagaaaaaaa

SEQ ID NO: 364229 - DNA, 514 bp, Homo Sapiens
  misc_feature (440)..(440): n is a, c, g, or t
gcggccgcacggactgggactgtttgaatacagctcggcccccagagagctccgaaccttctccctgtctccggatgccccgcgcctcgctgctccccggctcttggaagttggctcggaaaggcccgtgagctgcactctggacggactgtttccagcctcagaggccagggtctacctcgcactgggggaccagaatctgagtcctgatgtcaccctcgaaggggaacgcattcgtggccactgccacagccacagctagcgcagagcaggagggtgccaggcagctgatctgcaacgtcaccctggggggcgaaaaccgggagacccgggagaacgtgaccatctacagcttcccgggcaccactcctgaccctgagcgaacccagcgtctccgaggggcagatggtgacagtaacctgcgcatggggaacccaagntttggtcacattggagggaattccagccgcggtcccggggcagcccgccaagtttcagttaaattgccaccttt

SEQ ID NO: 364230 - DNA, 915 bp, Homo Sapiens
  misc_feature (737)..(737): n is a, c, g, or t
tcttaaaggtataatttatagcgcattctgtacaaaagcagtcttttacaagggactctgctgctcctcagaagaaatccatagccctgggccttctccttggtgtggtggtcaggggcttcttggccaccaggggtgagctggcaggtgagctggtgggggtcgtcagcaccccgtggaggggctatctgttcaggatcgaaggccactcgagaagggcaccgtgggactcgaccaagatactccttgtctgtcttcctgaattcggcaagtcatcgtttctgttcagcccaaaggtgactttcttggagctggatgcgtgtcattgtttagctggacaggcagggcctggagggtgggtggcagtgctgctcttggctcttctgaagaacagggcctttggtaagaagggggtgtcaaacttcacaaagtcgctctctgccctcagcttctgcttctctcagggaactgcaagtcccactgcttcccagagcctggggttgcccagcttcggactccagcaccccgttgtgctccaccaagtttgacatcactctcattgtcttcctcttgttgtcaaacttgctgttttctggctgggcaggcacacagagctccaggctgccgggcactgcacttctttttctgcagcctcctgcgctggggcagcgtggtgtggctcgttcgccacacactctgcaggggcactgtagggacgggcacttcactagctgcanatggaggccaggccaggcagtggacaggccactgccattgacgggcacaacatccaagtttccgcgttcctttttaggagttcgggctccacctgtcgggaccctctaggtcctgaggatgactgccactcggccacttgaaatgtctctgggcaatcccgaaccggcgtacagctgc

SEQ ID NO: 364231 - DNA, 648 bp, Homo Sapiens
gcggccgccggcgcggacggtgcacccggcgagctcccctgcgaggcgcacaccgctggcgccgccgccatggccctgcaccgccgccgctggcgcccagagagagcgttccggggtgcggcccggtccggggcggggtcaggggacggcgccaggtgtgccaagctcccgcctggtcacctgaaccaggctgggcgcgaaccggcccggccggggttaccctggtcgtggtttccgtgcaggggctattgctcagaggcctgagctggtggtagccaggcgcacagccacgggtgcctagggcccgtgccacccagggaggtcacatatggccaaaaatcagggcattttagtggtggcagcatgggacactcggagccgggcgtggcgttgtttctgctcagtgtccgcctcccgaagcctgtgcagatcagacaaggcctttagacaccaaggagctctgggacgcgagaaccagtagtcggggtgatctaagaggggaagctccgggctccgcggaagctgagtttccttcactcagcagcgtgtcttctggggtctcctgtgttcagcgaatgaagccacgggcacaaggacgcctcgtgccgaattcgccacccaggcctcgctacttgggggtgtagtcgg

SEQ ID NO: 364232 - DNA, 438 bp, Homo Sapiens
gcggccgcgggcgcgcgagcggagcctgaatcaggtcgggctgggcggcctccgcaactctgggcctggcccccgggctcggggcgtctttctggtggccggcctggactcgcgtccgccggcttcgcctggttcctcctcggccgagttcacgagctctgtagtcccgctgttccagccacctctgaggggttttgttgcttgcaggtcgtttgaccttgggcgagtttctaaacgtacttcctgtgaaatggattcatatctttatcaattttgtaggggtgtcgtgaggcttaggtggaggaattctacgtaaagccgttagcacagtttgggcacttacatgcttaagaaatggaaacttactaatatttgggaagttggtcttctcaccactaccgatcccttcatgtccttccccttcatcacccccccacc

SEQ ID NO: 364233 - DNA, 469 bp, Homo Sapiens
cgcgtggcctcgcgtctggtcgcctacccctcgcggtccactccgcccagcatggacctggatccggggcgccttggttgcgaattgccaggagggccctgagccaaagaatttagaacgagtctacgtggacacgcaagtttcagcgagcggggatttcctgcgaggccgagcgcgaggaacagccggccccggaggctcgggctcggggtctccccggggacgcggccgactgagaaggccggggcgctcgccgggcgcggcgccgtcctccgtgtcgcggggacggaaggaggcgacgcaggccaggagtcgtgcgcgcgggcggcgagggggcgctgtggcccgtgtctgccggcccgagtcccggcaacggtgggcgcgacccacctcctcccccggcggcttaattcggggaagaagaaaaaacggcatcgaggcatttcaataaaacctaagcgactcctga

SEQ ID NO: 364234 - DNA, 512 bp, Homo Sapiens
cagagtgagcgctcgacaaatgtttactgagtgcccacggggtgcctagagcctggcgggacgtcgcggggatgcggctggaggaatcggagccggccctgccctctcggcactcgcggtccggaccaggaaggcggcccgagcaggacgggtgggctgcggaccgcggtgggaaaagttgggggagcgcggaggtggcgcggaaatagaaggcttcctggaagcggtgacccttgagccggtcttgcccctcagtccctgtatccttttaagccagccacgctgacccctccgcgcctccctgaagccgttgccagcctgtctctgcgctcgccattccctccgcctggacctctccccactcaccacctcccgcccccatcagacgctgctttctcctcccagagacctccaagacctgccaagctgaggttgtttcctcgcctcgcccctcgcacgtttgttttctttcctgtagtttctcttgctgtctggaattgctgtttgagtta

SEQ ID NO: 364235 - DNA, 286 bp, Homo Sapiens
gcggccgccgcgtcccggctctaatatactccgccgattggagcatgcacgactggaaaacaacaccacttttcaaaagccctttcaagagcggcccgttccagaaggcaaagagcccggcctccttttattattctgatcgcttctttgagacgctccccctcctcttccacctcccggctttctttccttctctcgcgctccccttcttttattattatgattatgcgcagccttttattcccttttagatcagctgcatggaaaaaggggggagggaggggag

SEQ ID NO: 364236 - DNA, 436 bp, Homo Sapiens
agcccggggttagggcatttcgttgtcacctggcgacggtgaagcctagtttcctccagagagattatgctgctctccatccaagtgaagtggcaatggtgccagcctgagatttctgccctgagttttaagtacgagagtgtgggctgacaataaactcctttattctaccctcttctgttctcataaggagaaatttaaattctggaagagatgaagcttgcatttacccaggcctgttaatgaagaatgttggactaaattttgagaattcagactgcttaagaaatttgcttcagaatccccaaaggattctgcaaggagctagaaagaacattttctaacatcagttacttgttttaataaactccttcggggtaagattttgattcccaccactgatcatatcattaaaaagtgtattctctacactaac

SEQ ID NO: 364237 - DNA, 976 bp, Homo Sapiens
  misc_feature (41)..(73): n is a, c, g, or t
tgatatatgggcgactggagctcacgcggtggcggcgcatnnnnnnnnnnnnnnnnnnnnnnnnnnnnnnnnnatcaggccaaatcggccgagctcgaattcgtcgagagcggtggcgacgaccatggcgggggatgtgggcggtcgcagctgcacggactcggaactgctgctgcacccggagctgctgtcccaggagttccttctcctcactctggagcagaagaacatagctgttgaaactgatgtaagagtaaacaaagacagtcttactgacctttatgtccaacatgcaataccattgcctcagagggatttgccgaagaatagatgggggaaaatgatggaaaagaaaagagaacaacatgagattaaaaatgagactaaaaggagtagcactgtagatgggttaaggaaaagacccctcatcgtatttgatggaagttcaacaagtacaagcataaaagtgaaaaagacagagaatggagataatgatcgactgaagcctcccccgcaggcaagctttaccagtaatgcctttagaaaattatcaaattcctcttcgagtgtttcacccctaattttgtcttccaatttgcctgtgaacaataaaacggaacacaataataatgacgctaaacagaaccatgacttaacgcataggaaaagtccttcaggccctgtgaagtcgccaccattgtcccctgttggaactactccagtgaagttaaagagagctgctcctaaagaagaggcagaggccatgaataacctgaagcccccacaagcaaaaaggaagatacaacatgttacttggccctgaagaaaagtttccaaaaatgtaaatatactgtaactgtagtttttcaaatatgttcatatatattgacaatatttacagaaatcctgattattgtggaattttcttaagaggtttcaaataggtttaaaaaaataaaggatttattttccttcc

SEQ ID NO: 364238 - DNA, 490 bp, Homo Sapiens
ggactggagcctcgttttccccctaggcagacctaaatcaagcagcttaccacaatagtgcatgctgagtagattagttccaaggaagggagactggaatgctggtgtcaaggaaaagcctccctcatcatctagtctaagaccataacgggcagaagcataagaggttccagggccataggagaatgagaagtagggcacatatagggaggaaagaaaagtgaagaagggggaaatctctgaatttttttactgctgggaaaagtgtactacatgaaggatgcttggggctttgctaacctgctcaccgctaaccctccaagtctaaccatccccagaggccacacaaaccaagtgactcctgtagttcccatttgccccactatggagtcagggcaaaagtggaatagccactccatgtgattttagcatgtttaatcattttaacaataaacccccccacaaatggggtcatttaacctctaaaaaa

SEQ ID NO: 364239 - DNA, 525 bp, Homo Sapiens
aagggcagaaaatggggaggttagctcagagcagagtagtctctagagaaaggaagaatcctcaccggcaccctggggtgctagctcctttttagaatgtcaccagagctgagattaatatctgggcttttcctgaactattctggttattgagcccttcctgttagacctaccgcctcccacctcttctggtgtctgctgtgtatttggtgacacttcataaggactagtcccttctggggtatcagagccttagggtgcccccatccccttccccagtcaactgtggcacctgtaacctcccggaacatgaaggactatgctctgaggctatactctgtgcccatgagagcagagactggaagggcaagaccaggtgctaaggaggggagagggggcatcctgtctctctccagaccatcactgcactttaaccagggtcttaggtacaaaatcctacttttcagagccttccagctctggaacctcaaacatcctcatgctctctcccagctccttttgcat

SEQ ID NO: 364240 - DNA, 683 bp, Homo Sapiens
  misc_feature (659)..(659): n is a, c, g, or t
cgcatcagcatccttgctgctgccgatgctggaatggctagtgatgctgttgaggcttgagatgctatctgaggagttttgtctcttgatccgaagttctttgggtgtggtttctgaggcattaagggctccctgaatgactgcctgggcctcagagttctttttcttcagaaagtctatggtttctcgcaaatccagcagctcagtgtccttctcctcggccgtctctgccaggtgtcgcaggcgggatgtcatattcaccaggctctgctcaaaagcagccaccagattagcattggcagaaagctgagacgtcaaggtggccactttttcctgggatgattccagttccctacgaagcttccggatttgctcagattgcatcctctcctcagctgaggagtaggtggaggaggcactggaggccagggacagcactgagccgtgaacatcgtccgtggggtctcggaaggatcctgaccgaatcattcccttgggtctctcggccagggacagggtgctccccatttgggagccgctgtacagctcgaaggccgcctcgtgggtggggatgctgttggagcgggtgattcttggcgtggtggccgcagtgggactcactatgttggtaagttggccctttgcactcagagacatgngaagtgcagggggagaaggcagct

SEQ ID NO: 364241 - DNA, 461 bp, Homo Sapiens
agagggaaaaaagcaaataaacttcggaatcggacaacttaaagtctcgatatgagcctcggattgtattcgaactcctgggttctagacccagctctgctactaacttgtctgaccttccccatttataaactgttgtgggtgagaggtgggactaggtgaactctgagagccctgcactcggcgcggacgagggatttaggggaaagtgtgctgtattccccgcgagccttccccagcggccccgcctccccgggtgaatccccggcggccagcgcagcgcaggcagcgatcctggcggctgccggggccggcagcttcctggaaagttacttcttgttggagccggcaataggcaaagtgtgttctgtgaaatccgcagagccgagattgactacgttccgggaatgagagggctgtgtcattcccctcattgcctgctgcattgacggcgtaacagg

SEQ ID NO: 364242 - DNA, 401 bp, Homo Sapiens
tgcataactttttttaaaaggcattgttgccttgttcccttgaatcactttctctgggaaactagctatcatgtcatgaggacactcaagcagctctgggagagaccccctgtggctagaagctgtggattctcaccaacagccatgcaagattccccagccccagtcgagccttcagatgaccacagccccagctgatatcttgactgcaatatcatgaaaaaccatgtgtcagaactgctcagacatgttgctcccaaattctggacctgcagaaaccatgaaagacaataaatgattattgctgttttaggtcactatgttttgagctaacttcttacacagcaatagatactaatgcatattttaaccagtttcctacattaaaaccaatctgttgg

SEQ ID NO: 364243 - DNA, 389 bp, Homo Sapiens
gagctgccttctcctcagcacagacccggagagcattgccagggcggagctgagttctcctctgcacagacttcggagatacagcgaagcggagcatgttctcctcagcacagacccgggcgggcgggccagggggcaccgcgagggcggagctgcgttctgctcagcacacacccgggagacaccgcgaaggcagagcagccttctcagcacagaccttgtgggcactgcctcgctttgggactactcggagccgcatcaatggtgaataaaatccttcctgtttgcagcccttaataatcagggtcagagaccagttagaagggttcagtgtggaaaatgggaaaccaaaagcccctctgaatcctacccacgaggtttctccccag

SEQ ID NO: 364244 - DNA, 982 bp, Homo Sapiens
  misc_feature (271)..(271): n is a, c, g, or t
  misc_feature (906)..(942): n is a, c, g, or t
ttcaccattcaagagaggattcattgataacttctttttttagagaagattgatagatgctgcaacaccatggcagaccaatgatcatgatcaggagcattttttggtttctggattagaacttacgttcttcagaattcaatgcctaccctccatttgggacatgggactggagttatttagggctcatattataagtgatcagaaagtgcagaataagacaattgatggcattcttctcttgattgagagggaaaggaatggtgaagcnattgatagaagtttacttcgaagccttttaagcatgctgtctgatttgcaaatttatcaagattcttttgaacaacgatttttggaagaaactaaccggctctatgcagctgaaggccaaaaattaatgcaagaaagagaggttcatgaatatctacatcatgttaacaaacgtctagaagaagaagcagacagacttattacttacttagatcagaccacccagaagtcattaattgctactgtagaaaaacaacttctaggtgaacacttaacagcaattcttcagaaaggtttaaataacctccttgatgaaaaccgaattcaagatttgtctcttctgtatcagctcttcagtagagttcgaggtggagttcaggttcttttgcagcagtggatcgaatatatcaaggcatttggcagcactattgtaattaatcctgaaaaagataaaaccatggttcaagaattgctggattttaaagataaggttgaccatataattgatatctgctttctgaagaatgagaaatttatcaatgccatgaaagaagcatttgaaacgttcattaacaaaagaccaaataaactccagccgctctcgacgaattcgagctcggccgatttggcctgatnnnnnnnnnnnnnnnnnnnnnnnnnnnnnnnnnnnnncgccgccccgcgtgtaatccggtcccctatatgagtcttt

SEQ ID NO: 364245 - DNA, 743 bp, Homo Sapiens
  misc_feature (96)..(96): n is a, c, g, or t
ctctttaaattcgcttttacacagtgtcctagggtgactgcactgagtttcctgcactagtttgcctaggtaaatgtctgaaaatctcctaaagtntaccatctctggtggtaaatgaactcataagggcacatatgtcggccaatagcccattgtcaggatattcacagttaactcaatatttcccggaacattctgattctgcatatactgtttgaactgaatcatgatgtctttagaaagttccatgtctttaaacattccttcaagtttgctggtgaaagcagctccgcattcatgtttaagtttggacagcattgatttttcagcatctacagatgcactctttccgactaacaggcgcttggctaaatctttcttatagaaggcctcaaaaacatccttgccatagataaatctaaatatgatcataattttatccaacattttctcaagttcttcatctgtagcttctttgttgcctgcacgaagttttgaatctacatacttagctataagttcagctggtttatttggtcttttgttaatgaacgtttcaaatgcttctttcatggcattgataaatttctcattcttcagaaagcagatatcaattatatggtcaaccttatctttaaaatccagcaattcttgaaccatggttttatctttttcaggattaattacaatagtgctgccaaatgccttgatatattcgatccactgctgcaaaagaacctgaa

SEQ ID NO: 364246 - DNA, 468 bp, Homo Sapiens
aacattgcttgtctgtaaatctgtgggatggccttgaagtgaaaggcgaggttgctgtaagcggctaatcataggctgtggggacactctactatattctattccccgagcaggagatcgtgaacgaggtgaatttctgggtgactgcttaggtgacggtcgaggtgaattgcgtggtgatggtgaaaaccccgtcttgtagaattgcaagatgaaccagaactgcgccgagacgtggtggctgcatattcttgccggagactttcttcctgcatccgggctagaatctgtacatcagttacatcatttagcttataattggatccaattgaatcttcatctaattctgaagcacttaactcactatctatagaggactgaggactgagtggaggatttctgtctgagcttttcaagttacctgaatttccaggaagtataagctgtttgactataggaggtcgcact

SEQ ID NO: 364247 - DNA, 580 bp, Homo Sapiens
gacgacgatgttggagagttcctactccgtgataactcagttctaagtgcaagcagtcacgtgaaatgagcctgatagtctgcgaatgaagaaactaaaacgacctatattatatacttcataacacaagacaacgtgctcgtttgttcattctgcaagtaaatgcttaatgcttcctaggtggcaggctaaagaatatgatcattttaaagcagtcatgctttgaaaataaacaacccatcccagctgtaagctttttgaaagtgtacaaaatatgtaattgatgactccctaaatggtttgcagctttggtatttgactgaattgtaaaccattagttaaactacatttcagttatgctttgtaggaaaaacactttcctatgcattgaatgttctataactaaggagcttagtaatctactgctaaaaatctcactgaaatctccagtttaagcgatttaagcaatttacagctcttggcaaatatttgttttgggttataaaacactttttttctgactagtaaattgttcatgttctttgtttccagtaaaatgggaataaaggtttcagtactc

SEQ ID NO: 364248 - DNA, 440 bp, Homo Sapiens
tgggatcaatcttaggaaaagcaaaaaagggtcccagatcccttggccctttcctccgaggacttctatcctccccaggcctttgttttttcggctaaagggacagttcctttcaaaaggtaacagcactgggatccaagcagggggatgaaaaactcagcagagaaattcgagaccattttgcaagactgtgcccttctcctcaggaccccctgggtcagttcttgaaaaacggtgtcatatttagtcagaggccccacccccaggaagcatggatggggatgaaggcacaggggtttccaacctcaaaggccctttgtggggtcaggacacaaagtgggagggagactgatgcaggcctaccagtccctggctttttgtttggggctggaataaaaaggtgccttcagctggtgggccgaaaggcaggaagcagcctt

SEQ ID NO: 364249 - DNA, 459 bp, Homo Sapiens
actgccggatagctcggcatgcctcggctccgcggtggaatctggcctggcccgtcatccagttcctgtccccggcaggctccggcccagaccaggcccccggcctctcaccccgacctcaggtttccgccacagcccccagcccaggccctggacacgcgtccggcccctgcctccgtgcccggcccccacgccgcctcccgtccctcagatctccggccggcgtccccacgaccggccccgactaggcccccggctgggcccttcttcagctgggcgcgcacctctccttggagtagagctgcagctgctgctcctgctgcttcttccggataaacgccatggaggggtaggcgcgggcgggcgcagagcgcacaggcaggccccgccgccgcctgccgaggaggtccggaggagccggggagggcgggattggtggccggctggggagcgcgcggc

SEQ ID NO: 364250 - DNA, 1035 bp, Homo Sapiens
  misc_feature (33)..(33): n is a, c, g, or t
  misc_feature (128)..(128): n is a, c, g, or t
  misc_feature (435)..(739): n is a, c, g, or t
  misc_feature (972)..(990): n is a, c, g, or t
ccagccctggggacccttcgaaggtgggttttncggttttcaccaaggtgcttccctgggacttcctggtgggttgccacagggctgggcttgttcttcgttccccggtggaaaaacccgtgggaganggaagcttgggcttttactccaaagtatcagagcctgttcaccctccctccctttggtagctggtgaatgtgccaggtgtttcgaggtaggcttgccttctggcagcatggactttgttaaaataataggcggaaagaagaggcctgggaagggcccccagtcttttggaatgtcctggtcacagggtcatgtcagctgccagttctcgtctcccgtcctggagttgctcggtcttgcggagctgcccgcctgcctgttctggcggctccagcgcaggctgtccctgctgctttgattccaggtgannnnnnnnnnnnnnnnnnnnnnnnnnnnnnnnnnnnnnnnnnnnnnnnnnnnnnnnnnnnnnnnnnnnnnnnnnnnnnnnnnnnnnnnnnnnnnnnnnnnnnnnnnnnnnnnnnnnnnnnnnnnnnnnnnnnnnnnnnnnnnnnnnnnnnnnnnnnnnnnnnnnnnnnnnnnnnnnnnnnnnnnnnnnnnnnnnnnnnnnnnnnnnnnnnnnnnnnnnnnnnnnnnnnnnnnnnnnnnnnnnnnnnnnnnnnnnnnnnnnnnnnnnnnnnnnnnnnnnnnnnnnnnnnnnnnnnnnnnnnnnnnnccaggcgaattcttctctgatgggcgggcgagggtgtgttcgtgtgatgggttggagtgtgtgtgtctgagtacacagatgatgtgttttcccttcagcttcttacgttttctgagcatccgttgtgccttaacattttctgcttgtcctttgggacaaagcagtattttactcattctttgaatgttctcattcttttgtatcatgtgacttattaaaatcagtttctaacnnnnnnnnnnnnnnnnnnnctcgagactattctccctcgtccgaatcgccacccaggcctgcat

SEQ ID NO: 364251 - DNA, 440 bp, Homo Sapiens
  misc_feature (42)..(42): n is a, c, g, or t
  misc_feature (48)..(48): n is a, c, g, or t
  misc_feature (88)..(88): n is a, c, g, or t
  misc_feature (161)..(161): n is a, c, g, or t
  misc_feature (193)..(193): n is a, c, g, or t
  misc_feature (206)..(206): n is a, c, g, or t
taacaggtgcaaaggcccacccaggccccgctgaattttggnaatttnaaagtaaaaaatagggtttccacccatgttgggtcaaggnctggtccgtgaaactccctgaccctcatgaatctgccccgccctcaaccctccccaaagtgcctgggattaanagccgtgaagccacccgccccccagcctgaantccccaggcgaantccttcctctgatgggcgggcgagggtgtgttccgtgtgatgggttggagtgtgtgtgtctgagtacacagatgatgtgttttcccttcagcttcttacgttttctgagcatccgttgtgccttaacattttctgccttgtcctttgggacaaagcagtattttactcattctttgaatgttctcattcttttgtatcatgtgacttattaaaatcagtttctaacaaaaaaaa

SEQ ID NO: 364252 - DNA, 364 bp, Homo Sapiens
aaacatcttctgcatgtttaaatgatgcaaaaaataattgcactccataggcttgaaaacatttcacagacagttcattcctatatctttagacaccatggttgtagcagtgcctccttctgcaaggtaaacagcagtgctggatttggaatgaactgccctgttactgccattattgttgacttcacagtccagcgattcagtggagatgacccaggtggaggggcgccaccgcttaagagaatagggagttttcacacgtttcttgatcttttcacctgatcctgatttgccatcttgtgttgactcacctatctgtatactgctgccatccaggacatttgtggctgaaagatccagagaa

SEQ ID NO: 364253 - DNA, 594 bp, Homo Sapiens
gccgcacgtccagggagagccgacgctgctaggggtggctagaggacatcaccactcatcctcggggcggcgcgggcggaggcccatgggatggtccaggtgtgccgcctctcggcccggccttatcctccttcctgcacctggagcagggccaggcctgtgctgaagctgctcgcctcggggcccatcccagggagcagagggtgggcagcagcaagaacccagggccaggagtgcgccgtcttcccgggaagcggaggccggcctgtgccgcgcgtgcctcttctcgcctgcagcagtggaaaacagagtcactcgggaggccggcagcagtgggagtcgagcccgcgccacactccttagcaccggcctgctgtgagtgccaggctccgggcagggtggccggtgtggagcgggttcacagctcctctgtgctgcctgggcccctgtgtggatgcctccagggcagttggccggtcctggaaagcagagtggctgctgcaggacgcccgtgtgcgcagagctcgccttcctggctcctcgtgccgaattccacacccaggcctcgctaccttaaaccgctgagagtactgc

SEQ ID NO: 364254 - DNA, 779 bp, Homo Sapiens
tagcgaggcctgggtggcgaattcggcacgaggcaggtactggggactgtctcagtccgtgtggcatgataaataaaaggttaggatcaagtctttgtatttttcaagatgtggtagctgattattcctgttttaagtactctgaaattgatctgtgatcaataatactaatatgttatcttttaccgtattctgcctctcactattgattttaattagttaggagtatttgagctgttatttcttgagcttaatatttttttagagttaactctttaaggagataatcatggctgtagacaaggccagggctggctgacgtgccttagaaggtttgaatgcaataaagcggtgtttggcgttctcctgcattgtagtgcgggtacaaaatgctatttgttcgtcatactgttgtcagcagatgagccgcccactacagacggctactgcccagggacctgcccaggccccacccaagggctcccaagggttgagatttctgcagacctatagccagcacacttagtcctgccctatatagagttcctcttcgggaagcttttgataaggaattctcagaccgataggatgtctgtctgggctttgctgcgggacagtctaactgtgggggctaggggaaagcaggagagtatcgatcaaagagtaagccacacacggataatcagttactagggatggaggtgtgagggctcattatattattcattttactgttgtatatgtttgaaaatgtctataataaaaagctttaaaaaaaa

SEQ ID NO: 364255 - DNA, 299 bp, Homo Sapiens
ccaagctctgggatgggtcctgagcgtcccgggcgtggtccccgctggggtgaacaaggagtggctgctcgcagggctcctccgaccgcgcaggcggagccggactcaacccttccggggcttccgccaacgccgagtcccgcgggccctccgcgatcatcccctttgcgtcctgggacaacgggctcgcatcgcctgttaagctcccgggatcacacaggtcagggggtgctgtgtcccccacgatgtcctcgccggcgctgggcggaggctcctcgggggcgacggccatggcctcc

SEQ ID NO: 364256 - DNA, 417 bp, Homo Sapiens
  misc_feature (46)..(46): n is a, c, g, or t
  misc_feature (60)..(60): n is a, c, g, or t
  misc_feature (71)..(71): n is a, c, g, or t
  misc_feature (85)..(85): n is a, c, g, or t
  misc_feature (109)..(109): n is a, c, g, or t
cctgaaccggtccctccctcccaattgcgccggttgcccgctcctncccgggcaacgcancctctgcttgnattccccactccanaagaaatcatccctggccctgggnaaatgccacatgaaggcggcctgaatcctttttgtcggtgctagacccctaatcgcatcctataaccagaaaggtaaatggctttatcaaccatgaattcctctgcaaagcgaatgtgacaaaaattcttcttgcttttccgaattgctgtaatatcaccgcactgttcaaagacttcttgaataatttcctcagtagcattttctggtaatcctccgacaaacacggtcttacacccaggaggtcgttctcttgtggaaggaggtggaagatttggattttgaggaaaaagagtacagcttttgcag

SEQ ID NO: 364257 - DNA, 589 bp, Homo Sapiens
cacatccagtccagtgatccttataaagattaagagatgactggactaggtctaccttgatcttgaagattcccttggaatgttgagatttaggcttatttgagcactacctgcccaactgtcagtgccagtgcatagcccttcttttgtctcccttatgaagactgccctgcagggctgagatgtggcaggagctcccagggaaaaaggaagtgcatttgattggtgtgtattggccaagttttgcttgttgtgtgcttgaaagaacaatatctctgaccaacttctgtattcgtggaccaaactgaagctatatttttcacagaagaagaagcagtgacggggacacaaattctgttgcctggtggaaagaaggcaaaggccttcagcaatctatattaccagcgctggatcctttgacagagagtggtccctaaacttaaatttcaagacggtataggcttgatctgtcttgcttattcgttgccccctgcgcctagcacaattctgacacacaattggaacttactaaaaattttttttactggttaaaacaaccaaacacacaaaccaaaactaaactaaacac

SEQ ID NO: 364258 - DNA, 266 bp, Homo Sapiens
aaaatacccaagctccttcctgtctaggagagtttgactctagcacagccaatgctaagaaccacttcaccaatccaaattcacaaatatcagccaggtacaatattttgatactaaaacctgcctatgcctactatatagagcatatataggcagcagctccaggccctggggtacaagccagtgtcatgctggcttggagacccgcagaaactgtccagagtctgccagccctcagatttttaggaccaaagaccatgcaactc

SEQ ID NO: 364259 - DNA, 1101 bp, Homo Sapiens
ctctgagcggttgaggttggggctggggttgagctcgggttgggttcctcctggggcaggagggaaaggcgggagccaggcgtcagggcctgcggacgatgtgtgtgtgaaagggcgcgtcagccataagaagccatatgcgtgcgagccggtccccaccgtccccgcggcgttgtcaccatcatcatgaggccactggagcagcctcaggctctgctgccggggggccgggcgcggggtgcgtcgggctctgcaggttggcactcacacccagcgcgcaggatgcaaggaatagcacatctcaaaccttacaagaaagaagtgtgcctcccccgtcattcgatgaaccctggcccctgggccatctgctgtgaatgccagaccagattcgtggggccgcctgcctgtgtccaggggtggaagcagcactgccttactgggtccctctgtccctgagaccccgaaagcagagtcaaaagacggttcaatttcctatcccccataaccgccaagatgtgcccctgcctatgccaccgctttgggggccgcctccccgatgcctagggaccaggcagtgatgccctactgggtgccccaggtcctgaggtctcagcagcagatagtcaggaggcagcagagtttgaaaggcatccaagcacccctgctggatgcatgctgctggcacaactgctggcggatctgcggtgatgagtgcctgttgtccaagttccagcagctccaggccccctaccaggaccagctaccggctcctgcagcgcgtctgctgcccctcggcctcctgaccctcctccaggccatcccgagggtcatcatggccattcgccagtgttttggggtttgaagttggaatcttcagctactgtcaagaacagccacaaaaatgtgtcacgatcaagatctttgagagtccaccaatcaggaggcgtctgtgacagtcgctgtcttctcagaacagaatccacacccaggattcaacccaaatgatttctcatcaggtgattcttggttgtagcaaagttcatgtgaatgtgggtgagtttctgttatgaatgtggtcaataaatgttaattgtgaaaaaa

SEQ ID NO: 364260 - DNA, 476 bp, Homo Sapiens
ccattcagggcttgaggtgcccgagggcctctagtatgtccattactggagtccctaatcacgcctttggccagcctccttttgaaagtgtccgaagcctttttactttgcctcaagcaacctctagctcccacaattcagtgttgggtcctctgtgcaatatcatgatcatcttcctcatcccctaccttgtgaaagctaggcatacagccaaaccctccttttccccacccaccaacactactgccaatttcctaggctaccatgggtgtatcttccttgacctgcttccttcagtccctctgcctccctttgcccaggcctttctcagactgtattccatcctggggtcttatcattcagctttgtttgaatttattaatcaccatgatacctctccctccctttgtccacatgtaacttgttcttggggctctaccagatggctgaagagtaaatcctttctacctctgaaa

SEQ ID NO: 364261 - DNA, 532 bp, Homo Sapiens
accttccagggacacacaaacgaggtcaacgccatcaaatgggatccgtctggaatgttgctggcatcctgctcggatgacatgacattgaagatctggagcatgaaacaggaggtgtgcatccatgatcttcaggctcacaataaagagatctacaccatcaagtggagccccactgggcccgccaccagcaacccaaactccaacatcatgttggcaagtgcttcgtttgattctacggtgcgactgtgggacatagaacgaggcgtctgcacccacacgctcacgaagcatcaggagcctgtctatagcgtagctttcagccctgatgggaagtacttggccagtggatccttcgacaagtgcgtccatatctggaatactcagagtggaaatcttgtccacagctaccgaggcactggcggcatcttcgaggtgtgctggaacgcccgaggagacaaagtgggtgccagcgcgtccgacggctctgtgtgtgttttggatctgcggaagtaaccacaaaatattatcg

SEQ ID NO: 364262 - DNA, 413 bp, Homo Sapiens
  misc_feature (84)..(173): n is a, c, g, or t
ttacttctctgtagacagtttttactgatgagtcatttgaacgttcaaagaacaaccgattacaatgctacatgaactataccnnnnnnnnnnnnnnnnnnnnnnnnnnnnnnnnnnnnnnnnnnnnnnnnnnnnnnnnnnnnnnnnnnnnnnnnnnnnnnnnnnnnnnnnnnccacagatctcacttaaaaacacagatgccaaaatacagaacagaacagtagccgattgaaatcaacaccacataaaaaatgtacaaagctttggcagatacgaaaccaagttgaaaatccaaactttacactcgtggaactgggaacacaaacaccaggaacaaaaatgtccccccaccctgtcagtgggcctctggccggggggaaacacaggagcgagatctctggctacacctatt

SEQ ID NO: 364263 - DNA, 175 bp, Homo Sapiens
ccacaatggatttttgtttcctagttgggagtggggtggggtggggtgtctttgtgagggtgcctctgtacagctgcccaatccgcgacacccacgtcaaagcacagcatcaagttcgtttggacatcccgcaaggcctcttaccaaatgaggcgccagataacttaataagctc

SEQ ID NO: 364264 - DNA, 489 bp, Homo Sapiens
aaacctctgatcaaatccaaagtcataaagatagttcagtacgtcctctgatgacaaggtctcctgtaaataccattgtgaacagaaggaaaaccatagtgtaatcccttgaccaccaaagcatatcccttgagcctgttgtagtacttttttctgggagagaggaaattgcgatctgaagattaaaatctttggtgacagaactggagtggatatgcaaatttcaaggaagaagttttccaaagcctcaagagaagtatcctaggacagttaatgtgaatatattttaaaaagtcaatcatttctttctatagctttggtttggtgcagtcaatgtcctcttagtgattacccaatacttatttctaagtacctgttaaaagctctggatttagtttcttacttaaaacagagataatgctttgagtgcttaaggaatttcttatgctagtttggatggctctaaatggagtttttctgactaacatg

SEQ ID NO: 364265 - DNA, 489 bp, Homo Sapiens
gcggccgcgtgggtgggggtccggggtcggggggcggtgcgaggcccggcggcgtcggctgagggaccagcgggactggggcgaacccggcgtgggccgagccttggagctcgggcgtcgggtcaccgcgtcccgggactgaccacctgtccggtgcgccgctcagagaccggggtggccgcagcctccgccacttgcccttgactttacacttccgccgaagcctacgaacttgccaaccggaaacaaatgggaacgaattttgttcagcaactacaaaaggcagatgtgaaaagtagttgcagaacaattcggtgcccgctgccgctcgttgtgctgaggacgaacggcgctgcgggcctggctccctatggcggctccctgctcgcgcttcactccaaggggaacccacagaggttttggaggagttattaataaattgtctgttttgggtgacgaaataaaaaagaaattggaacctcgtgccgc

SEQ ID NO: 364266 - DNA, 360 bp, Homo Sapiens
  misc_feature (265)..(273): n is a, c, g, or t
cggctaaaaagaatgcagagatgtgcccccacccccaccctcgaccacccccgatgggatggcttggggggctcccagggggtgccctcccagacccccttgcccaggcctccccagcacctaggtggggcctggggtaggaggaacaggtttaaaaatccccaaaaaagcgaaccgtgaggaggggtgtgggcacccccggcccagtgccccctggtggaatgcgggggagcaggcagtggggctggaagcagaaacaaaatgnnnnnnnnnggggggtgggaggggaagaaaaactctatttttgtaaaaagggaaaaagacctcgtggagaatttttactggggattcttgaacttg

SEQ ID NO: 364267 - DNA, 457 bp, Homo Sapiens
  misc_feature (47)..(47): n is a, c, g, or t
  misc_feature (65)..(65): n is a, c, g, or t
  misc_feature (94)..(94): n is a, c, g, or t
tgcaactcactcttgtctgccccctaccttccctccctggaaaccanactacttgaaatcaccantactttgcctcgctggccaaagttgggtncaagtgcccctctccttgaccttgagatgaaggtccaagagcacagggacccaggccttggttaggctgagctcccagcaggacaccgcctgcagaaaggacctgccctgataatgtcccttccccagattctcaagcagatgcccaagggaggtccccacagagccagagtgcctgaggcttcctgcttgagaacctgccccctggatcttggacacttacagattgagctgtatgaattcagcgggtctcactccagagggtcagaacgtttgctttagttttttcatctgttttgttccttgagtcagtgctgttgatgacgagttgtcttgaataaatcatgtgttctttgcaaaaaaa

SEQ ID NO: 364268 - DNA, 348 bp, Homo Sapiens
tcagctgcagccccggcggccgaacgcccgcggcgcgggactccatcgtcagagaagtcattcagaattcaaaagaagttctaagtttattgcaagaaaaaaaccctgccttcaagccggttcttgcaattatccaggcaggtgacgacaacttgatgcaggaaatcaaccagaatttggctgaggaggctggtctgaacatcactcacatttgcctccctccagatagcagtgaagccgagattatagatgaaatcttaaagatcaatgaagataccagagtacatggccttgcccttcagatctctgagaacttgtttagcaacaaagtcctcaatgccttgaaac

SEQ ID NO: 364269 - DNA, 849 bp, Homo Sapiens
  misc_feature (30)..(30): n is a, c, g, or t
  misc_feature (263)..(263): n is a, c, g, or t
  misc_feature (266)..(266): n is a, c, g, or t
  misc_feature (274)..(274): n is a, c, g, or t
  misc_feature (281)..(281): n is a, c, g, or t
  misc_feature (285)..(285): n is a, c, g, or t
  misc_feature (605)..(684): n is a, c, g, or t
ggagcagttacatatttaccaaataatggnctcaaaagaaatagatgtttgaagagtgctttatatattaaaaattgctttatgttttaaaaatgatcaatgttttgattgttttgcaaggaagaaagacaatggaataacataccttcaagtatgttttaaaaaatatatatatgaacattgtgctccctgcctgcttgatcaggaaacttgtgcattacatttttttaattagctttttaatggttttatcaaaacaaaanaantacaaaanaaaaaanaaangtcctgcaagactgcagatccacaaaagctggttttatagaggatcatgaactatgcacaaactgggttcaagactttttttctcaagtttagtaggatatttagaaaaaccaaccttcctcagagtgactgcatctcattgccattacatgcgttctatatattcgatggacatacacctgcgtatgtatatccaatatgtgtgcgtgtgagcatgcgtgtgcgtatgtgcgtccgacataccacttcccgtgctgccggcgagcattgagttgtagaaaaactgttgttttaaaattggggatggaagtcaagaatannnnnnnnnnnnnnnnnnnnnnnnnnnnnnnnnnnnnnnnnnnnnnnnnnnnnnnnnnnnnnnnnnnnnnnnnnnnnnnngaacttaatatgtctgtaactctgagattaaacaacaagttcgtggctcttaatgttttcctcatagaatgtgactgttgaagaacatgcatcgaaagttgctttcgaaagtacaacgctttattgaatcttaataaattgcaatttttttcttggctgttcaaa

SEQ ID NO: 364270 - DNA, 219 bp, Homo Sapiens
  misc_feature (123)..(143): n is a, c, g, or t
gcctgtattcttcatcggtataacatacatacaaactgatcacatttaaatatagtgcaaaataaaatgattaaaaaatgccttatataaaatcttcataaatattttaagcacctgtaatcnnnnnnnnnnnnnnnnnnnnnaagacacaaggtctcactacgttgcccagactgatctcaaactcctgggcccaagcgatcaccctacctcagcctc

SEQ ID NO: 364271 - DNA, 421 bp, Homo Sapiens
cgaataggttgtgtgatgaaattctgtgtcttggaactggaattgagtttccgatgttgatgaactgattcaaccaaggtgttgaaggcacgacagccactgctctacgaaaaggcagagtacgtttttcccttctggttgtaacctggttgagagcttcccctttatcagattggcagctaaacagttgtattagataatccttaaatctgacatccagcctgttacgctctagggctcgctgcttggcctgcgtttgctttttattgtgtatccgttcccctcctacggtgtgctcctgaatgaaggtttctatgtaagcagatgatgattttacctgtcaataccagcactgtattactaacatgcaaaatactgcagatttattttgaaaattaaagttaactggtcacaaatgtta

SEQ ID NO: 364272 - DNA, 476 bp, Homo Sapiens
gagctggtgagtggcctcatgtcttaccatcatggaaaggcgagggctgggggagagagaaggggcagccaaggcctcagagtggtgtaggcctcacccttgtgctcacatgtcccaaccactgccagcggtgccacctctgaatcccagaccccacatgtaaccatcctctacctggaccacagaaggaagctccacgttctttgccagggttcagggtaaggggcatgatctaagttgggcaaaagagagtcatcctgttaccttaaaaaggagtctagggtgagccccagtctgctggtggccatcttcaccacctttggggagagatggcctgagcagacacacaaagcaaagaggtggagagaaactgtgtctttgtgtcattgtttgagtccctggacccagcccagtccccccgactacgctgaacttttcaattgtggaaaacaataaattccatttagttaagaaaa

SEQ ID NO: 364273 - DNA, 1572 bp, Homo Sapiens
  misc_feature (842)..(850): n is a, c, g, or t
  misc_feature (1427)..(1435): n is a, c, g, or t
ggggagaggcgttccgcggaggagaagaggaagaggaagttgggggagggtcctagcggggagtgaaccggaagtgtaaaggttcctgcctctcctcggccaggcggaacctctctgctgggcccggtggccgcaaaagaactttctttctcccgcccgaacggtcgccgcggccaactgcctcgcccgcctggcagcctaaccctccttctcttcttctcctctccggcttcgcgcggccctgcctccctctcgcccggcggcatccgcttgctgctgccaccgcctcctcatcttctgcccggccaaccggcctgccccgctgcagtgatgtgcgacaaggagttcatgtgggccctgaaaaacggagacttggatgaggtgaaagactatgtggccaagggagaagatgtcaaccggacactagaaggtggaaggaaacctcttcattatgcagcagattgtgggcagcttgaaatcctggaatttctgctgctgaaaggagcagatattaatgctccagataaacatcatattactcctcttctgtctgctgtctatgagggtcatgtttcctgtgtgaaattgcttctgtcaaagggtgctgataagactgtgaaaggcccagatggactgaccgcctttgaagccactgacaaccaggcaatcaaagctcttctccagtgatggatggatggactgataactccggaagaatgactctcctgtggcctcacactgctgcctgtctgtctgtcactctctatctgccagcttcttcagctaaatactttaagaggggtgaggggagagagaaattcataacaaatccgactaccagnnnnnnnnnttgttttggaggaggggcaaaaggaaccatgatcaggcttttactgggattcctgatcaagtaagcctcttccctttctaataaaatatacaccttatacccaagggagagcaaagacaaaatacaccagtaacatttgaccttttcagctccctagctaatttattagattgtgttgaaggtctgattctacaaaggccaactctacatatttggtagccctaactgtctgagcagtagtggctgctgtgatgtaaacttagggtgctgagataagcaattagctctagccttctgccttaagaatgcactctactggggatttcctggcatagttaagagcgctgcctataaggttggtgaccaaatctttcctcggtgactttaagctttatgtgaaagcttagttaaggtgaggaggggcacactcctaaacttgctggatgactgaactctggatatttctctcccctctcacatggatttcatgtctctttagataaaactgactagttttatttataaaatcttaaggtttttggaagtctaaagggaaaaaccatcccagtatgcatannnnnnnnnctcctcctagattcataccatttataatagccattggaaaacacttttcaaaactccctggctggttaattaaaaaagggggaattttaaaaattagaaattcctaggccccttaagcccttgtttaagaaaatcaa

SEQ ID NO: 364274 - DNA, 580 bp, Homo Sapiens
atgcaaatatcccagcgtagtaggccgatcaacgtaacatagaacctataaataggtgcttttacatgtagaatttattttgataaagttacgaataaaggtaataatgtgggaagcaatagcctccagtaatgctgaagcaacaggatcttagaacagcgtttgcaaagtgtgctctacagaaaactatgataatagaaatcaaaatttaaagtgtccatagtccagtcaccttgagaaactctgggataaaattgtgttttttatagcaaaattaaaataatgtgtgctgtgattcaaatgggctatatgatatgtttttttaacacagaatgaaaccaaatcagagtgtcttgcaggattcaggttctttggaccacactctgcaaaacactatgttagaaatttagttttgtccctctccctcccactggacaccaaaacagcagttatatctaaaatgtgaattcatgaaaatgaatggaaatttgtatttctcacatctctagaagaaagctgtctccatgaatgatgttaaaaagggagatattgacatatttgtatcaaagtggagaaattg

SEQ ID NO: 364275 - DNA, 638 bp, Homo Sapiens
  misc_feature (230)..(265): n is a, c, g, or t
  misc_feature (450)..(454): n is a, c, g, or t
  misc_feature (457)..(463): n is a, c, g, or t
  misc_feature (468)..(468): n is a, c, g, or t
  misc_feature (470)..(470): n is a, c, g, or t
  misc_feature (473)..(473): n is a, c, g, or t
  misc_feature (518)..(518): n is a, c, g, or t
tgactcaggggccctgccccctccatttggtactagctgtaagcggaacaccctgccccagggccggacttccagcccccagagccctctccctgtcactccctgaaacactattaatagctctgccgatagctggtgttgtcacaactgcctggaatccgaaggtggaggacaggcagccccgcgcccctgagactggagaccctccccagtgtggcatttcctgccannnnnnnnnnnnnnnnnnnnnnnnnnnnnnnnnnnntcttccttcaccagctcccctcgactcaagcccttgtcctcattatccggcccagaccaaagattccctcatccctgggggcagccctgccgctgtgtctcctttgtatcctaaatctttattttttctaggacatgttatgcctccattttcaattaaaataaagttatcggattacacccgcnnnnnaannnnnnncgtananaanaaaaaaatgtcgggccccctccgcccctcgaaaaaactttctaanaccctttcgtttgggggccgggggcccccagtaggtaaaggggaccagtggccctaacccggtttccctaaagaagaacccggggcaatgaactaggggcttgggaattcccccccaaat

SEQ ID NO: 364276 - DNA, 814 bp, Homo Sapiens
cggatgggggtgtccccagaagttagaggaatagagggaccttgatctctcactgtgctggggctcttgtcagaagctgttttactctgtgtcacaggcggctgcttggtgattcctccttcatcataggagagaagccctcccaatgggtcttccaagtcttcagaggaaaacctcctgttctgatgcccaaagctgctgggagacggaagtgacttcttggtgggaatggcaccccctgcaggcttggggtggttgggcagctctcctttcccagggtcctttgcagcttttttgctaggggctgaattagatttcttcagacctaagatatcagcatccatgccgtccaggtccttcatggcctggagcagagcctgtgggtctgcctctgagataactgaaacctcagcatcagcttcttccaggcctgccatggtgctgaagacatcatcacccaggagggactttgttctcgcctttgaagaagggaacatctgagatacacctgtggtgtctctggtatgtgaagctagtttaacaggcttctcaggtagtgtcatatcatcccctagaaggtcaccaagaaaatcatcaatggagcctttacatcctttcttggtttttggtgccatctcacggctctcgggggtgctctcagctccttcacagcactggccagctcatctggattctgcccacatcaggctcatactccccttctgagcgcccggcctatctggccccggagcgcagcctgtaacgctctcagccccggaagcctcctgttacgcaccgtgcccccgaaggtgcg

SEQ ID NO: 364277 - DNA, 609 bp, Homo Sapiens
tggccaacctggggactctggccggacggccaatgggctgcctgggccccgaagccaagccctttccagctcctccgatgaaggcagcccctgccctggcatgggggggccactagatgcacctgggagccccctggcttgcactgaaccctcgaggacctgggcacggggtcggatggacacacagccagaccgtaaaccctcacgtatccccacgcctcggggcccccgccgcccctccggacccgcagagctggggacatggcatgccctgcactcagtcaccccgagggctgagccagattcctggatgtgatggaccagctcagctgtccccagaccccatcccttctccttttcctttgtggccttaacccttctgcatcagggagccccctctgcctcttgagtaccagacctcatgggaccagaccccttgggaccacatggcacaatgggacctctgttgtacattccggttgggggatgagcgttgctatttaattactaatattattgaatgccttagaggaggccgggcgagcccggtgttctgaagacctgtggcccagcagagcctctgacagtaaagttttgatacaaaccccc

SEQ ID NO: 364278 - DNA, 510 bp, Homo Sapiens
ccgaacgtagggtttcgccgacttcccaggtttccgtaacttttccgagattatctcctcaacgttcggaggtttccgtgtgtcctcgtgtgccactgcgcccagtcccctctgcgagttcggcttcttccaacaattcaatccgtcccagtctttggcttcttccacggacttgctccgatcttctccgccggccctgtccaagcaatcggcgcacttccgacaatcctaaccgtcccggccttcggctctttccggagatttccggatctcgccctcgggcccctcctgggattaagctcgagtccgtgtttcggctctttccggagatgccacttgctcacgcctccgatcagagaacttcggctccttccgccaccgcttcgtgaaggcctcactctccggggacagcttcgactttttccgtgggtacctcggctccttccggcttcgggaacggaaaagggaaggagaacagagacgagatggatcaggggaagggatagagaa

SEQ ID NO: 364279 - DNA, 343 bp, Homo Sapiens
ctagtgcaaggtgcaacattaagccccttataattcatgctcaacagttctatagggaggtattattttttgccacattttacatatgagaaaatagaggcttggagagggtaatgtggcccaagttcacacagccacgacattcctctcctgagtcaccctttctgtagttcacgggactcaccaggcccaacgccaaggtactgaccacactgccagtaagtccaattgtgggtactgagcgccccctgcggggagggaggaaatagtgcagagtgaagagggcaggcctcatttttagactcaggtaaggggccccaggttagaatgtcccaccatctcg

SEQ ID NO: 364280 - DNA, 928 bp, Homo Sapiens
  misc_feature (314)..(314): n is a, c, g, or t
  misc_feature (469)..(469): n is a, c, g, or t
  misc_feature (639)..(704): n is a, c, g, or t
  misc_feature (768)..(805): n is a, c, g, or t
atggccgccaaatggcagggcctctggcactaaaaagcagaagattgtagtgtagctggcagtaaccgtccacttgctctaagtcagtttcagcacagcctcccacggtcttttcagggttatttgggcatcctccggcgcaacggcggccccatttcagagcagagcatcatttcagcaggtcacagccataccgggccgcattggagccacgaagcagcaggcctaatcctccaccatggccagggctcgtatccttccggccacagcccaagcccggcactgggcaccggcttgtggggcaagccgctgcngctgcacccccacaccccagccccactctcaacctacactgcgccggcggccctgggctccaccggcaccgtggcccacctggtggcctcgcaaggctctgcgcgccacaccgtgcagcacactgcctacccagccagcatcgtccaccaggtcnccgtgagcatgggcccccgggtcctgccctcgcccaccatccacccgagtcagtatccagcccaatttgcccaccagacctacatcagcgcctcgccagcctccaccgtctacactggatacccactgagccccgccaaggtcaaccagtacccttacatataaacactnnnnnnnnnnnnnnnnnnnnnnnnnnnnnnnnnnnnnnnnnnnnnnnnnnnnnnnnnnnnnnnnnncgctcctgggaccgtgggcgctggccttttatactgaagatgccgcacacaaacaatgcaaacnnnnnnnnnnnnnnnnnnnnnnnnnnnnnnnnnnnnnnacgggtcgggacaccagtgaaacttgaaccgggaagtgggaggacgtagagcagagaagagaacatttttaaaaggaagggattaaagagggtggaaaatccatggtttttattttaaaaaag

SEQ ID NO: 364281 - DNA, 774 bp, Homo Sapiens
ggatctcagatcgaagaggttcctcatgaggttttcagctttacaatgccttccgttccttcgagtttctctgtaggagtggaaccattctatggcacggagcacatcaaacttgccgttgccatgaggaactttgacaagccacattcgcaagacagcgggggaaacattgtactgaactgtccacttgttaatgctcttcgagaaactgcttggtagcctgctcctcctccggggtcagctccggcgccatgtcgggccggggcgcggcctccgcttccgcgtccccgcgcctcagcagcctggggccggctcgcgcatagtgtggccggcagggcccggcgcctgcagcggccgcaaacgccgcttctgcttccttaagaaaaatctctccgaaactgccgctctcttccgggatgaaatccttttttatattattcgctccgttcctcacactcccccttatctcctggggaagaaaaagtgcaggcgaagagctaacagccactcgggatttaaaaggaaataggaaatcaggaacttttagagccaggagcgaagggtcggcggaaatttcccgaaggccgccgaccccctcggcgccccgctttctcggccgcgctcccgctcctccacagcgccacagagctcggggccgcccagccgggccgtcctcgcggacgctggccctgcgacctgcgcggctgcctcagccgggctcctcgcgggcggccgcccgagccccccgcggctccattgagaaactgagcgtct

SEQ ID NO: 364282 - DNA, 931 bp, Homo Sapiens
  misc_feature (838)..(838): n is a, c, g, or t
acaagatgccacttgcatgatgctgtgggtgccttttcattgcaatgcctccatttcagatgtgagaaagttctgggcctgtagggcatttcaagcctaggtgtgtatgggggaggaggggatagatgttcatctatgcaccagatcctcagatccccgaggtgggttgcggggaaggcccagggagctgatggataaagccacagcttcagtcctggcagagttcactgccaggaatggctgctgactgcggggcactgatggtgggcagccagcgccgaggtgcaaacttcttcccacaaggagttccaggtgttcagcggcagccaggtcctcagttaatgggtcacctgctgctgcggccactctctgttgatgcagtaagccggttgaggggcgtcaaggggctggacaggacaccccgcaaactttccagccattcctgctgttccttctcactggggcaagtgaggacaaatctccgctctggggtgacaatggtgagtccggctttccagcgatttcctcggatgcccttgggcaggtcttcgtaggcttcatatccctgctccttgttcccaagaaaaacctggccctgctcgaaggcatccagtgggttcttgtaatagagcagcctccgctcatggcaatccagggcgaaccaccttttcttgaaaggttctttctgctgcaaaagagggaacttcttaccacagatgaccaggtcagtttctgaggatagaggtcaggggccagcccagcccaaaccaaaggagctggccagtcccactggttctccagcccagcctcctcagtcagacatcctagtgcttctccntggggcctggataggagccctcaggctctgaaggttctgcccattccccttccaaccccaccataccctttgccagcttcaccccgctccgct

SEQ ID NO: 364283 - DNA, 448 bp, Homo Sapiens
ggcgctgggaattacagcaaaggacaaacagacaaaccctggccgccctggggctaccatgctagcgggccgctgagtcggaatccgtggctgtgttaggataacttgctcaggattgcacggctggtgagcagcagtcagaactccatccacctctcctgataccaggccaggttcctttactccagagttctcaaagcaggggtctcacgtcttctttagtctttagagagacattttcaactgactccttagtggctaagcaagcttcagaaatttctcaacaagaagcttccacacaatcaaaggtccctgcctgcgtctgtagcagccaagagctgttaagaaaggagattggagcaggtggccttgtgcaggggaggggatgggtgggaggtggccgtgcaagctctgcattgtcatggacggaataaaggatttccacaac

SEQ ID NO: 364284 - DNA, 169 bp, Homo Sapiens
aaataatattttgctatgggggaggggaatatcaaatggacaagatcacttttaaatggtagtttttataagatgttataaacttgtatctttttcccattaaagtgcagggtatgttccttcgtgatatatttaggatatttaaataaaaggaaaatggggctttttt

SEQ ID NO: 364285 - DNA, 662 bp, Homo Sapiens
aaggtgctcacgggcacgggtaacgtgaacgttattcagcctaactatcctgcggcagcccgtgacttcctgcagactttccgccgtgggctgctgggttccgtgatgctggacctcgacgtcctgcggggccaccccccggctgagactttgccctgaacttgtccgggtagggagggccggaggcatgtggcctcccagacctcctgacctgggtggttgaggctcaagacagctcacccggtccagaagctccatgctggtcactagggtgctgtgctctctggcgccccacagcctggccagctccagggaccccagttgcagggcccaagcaggtgggagtggacaccaggcttcccagtggacgtccctgagcagtccgcatgcttggttctcccggagcttcctgctcaggcctcttgagaaatggatgctgtctcagaaggagttaaagctataacctgtaacctttaaaatctccagttaaagggcctgtttcttactggcctgtgaggtgcaccgtagtgccttgggcctgtgtgttaaagctgctctcaccagtggaacctaagaaatgagcaggttggcagctagggtttgtgttggaggctttcggtccagtgtcttgcagtcctacaacaagtgagaggcttgctgcc

SEQ ID NO: 364286 - DNA, 431 bp, Homo Sapiens
agcggccgccctgagacgtggcgactacagagcctttggccgcctcatggtggagagccaccgctcactcagagacgactatgaggtgagctgcccagagctggaccagctggtggaggctgcgcttgctgtgcctggggtttatggcagccgcatgacgggcggtggcttcggtggctgcacggtgacactgctggaggcctccgctgctccccacgccatgcggcacatccaggagcactacggcgggactgccaccttctacctctctcaagcagccgatggagccaaggtgctgtgcttgtgaggcacccccaggacagcacacggtgagggtgcggggcctgcaggccagtcccacggctctgtgcccggtgccatcttccatatccgggtgctcaataaacttgtgcctccaatgtggaaaaaaa

SEQ ID NO: 364287 - DNA, 700 bp, Homo Sapiens
  misc_feature (47)..(105): n is a, c, g, or t
  misc_feature (461)..(475): n is a, c, g, or t
tggtgatggtgacgatgatgatgatgatgatagccagcacatacttnnnnnnnnnnnnnnnnnnnnnnnnnnnnnnnnnnnnnnnnnnnnnnnnnnnnnnnnnnntcttgtcaggtagatgctgttattagtcccactgtattgggggtggggggagaaagagttgtgcattatatctggtatatctgttgtttaaaagaccttcgattcgatctaaagagacacttagagactcttggggacctcagatttccacccctccacagcattctgcctacacagttcccctcatttttcctagttactcggaagagcgctggacttgaaatcaaaataattgcgttatgtctttggttatgtcgcttcatcatagcactttctaaaactatttgacaaacatgtattgcatacctactgcattccagttcttgtacaagtaattaaatgctcgactaacgtcnnnnnnnnnnnnnnngacctctgcatctcctttaaaagaaaccccactctctgaattaaaaaactgtcctccccaacttcctaactcaaggccaaatattgtttgtggcccccccggccccctaaaaattttttaaaaccatttctttgggcgccgggccccttagggaaattaaccagggacatagcttgtttcccagggaaaccctggcaattaacaaagggtttggatttcctcccc

SEQ ID NO: 364288 - DNA, 487 bp, Homo Sapiens
ttaagagagatttaagaaaatcagggaaaatgttaatgttcatcttggaagtcggtaaatgggtattggtatttattttaatcacacatatacacatattttgttttaaaatgtttatgattaaattataaaaagttactaattaggctgaaaactttttatgaagttaaaagtagatcagccctatgacctatcagttgtactcccagtaaaaataagaacattgataacaaaatactgataacacagcagcatgaatgaatctctaaaaatgttgttaggttattttgttaacaatatattagtcacaaataagtacatatgtatatgtgattctatttatatgaagttcaagaataggcagaactaatctgtgctgataaaaactagaaagtagttgccttagggtatagggaactgactgaaaaagggtacaagggaactttcggagtgatggaaatggtctatatcttgtaacagaaaaaaa

SEQ ID NO: 364289 - DNA, 441 bp, Homo Sapiens
  misc_feature (33)..(33): n is a, c, g, or t
gagagaggctcccaaagggccaccatgagcccnagatatccttcctgaggcagagattgaagccatcagagctggggttgggagccagaatgcctgagtccttctgtccgtcagaatctccgctgcctctccagcccttttgcagccctgtttatttattataaatatattttttacaagccccagctcctcttcttgccccgcatatccagctcctcactcagctcctgcctccctctcccctctccaccatgggctgcagtatagacagacagatggaccctggctgtacgaagggccagggccactggggcttgggggcgggggagggtggcagtgggaggggctgtatggagaggagctggggttcaggcattgtcttttttcctccttgtatataagaatgtatatttgatgcctcataaaagaccttgtgctcac

SEQ ID NO: 364290 - DNA, 462 bp, Homo Sapiens
tttagctcatcagctattgttagtgttagtgtattttatgtgtggctgaagacaattttcttcttccagtgtggcccagggaaaccaaaagattggacacacctgctctagccaacgttcattccagccctcctgtgtcaatctgctcttcaactcagcctttcaacacactcaggtcctgcttacctgggcagtttgtggcaggagctgtggaggctagggcatacccccttccaccctctccaaagcattacttttactattaatataataactttggaggtggcaaagagaaatttatgttagagcaaaactacaaaaactctcatagatctgatactgatgacttgtacacttcagatcattatcagtgatgtagaatacaacgtattctcagctagcacgttctgctaccaattagctgctttttacagtgctaacgtacacattctgtcaccttaa

SEQ ID NO: 364291 - DNA, 459 bp, Homo Sapiens
ggcaaataatcatctcaactgcaaattccaagtgtcttgaatacactaaggcacaatgctgtagatcagttggccacaaatgcaaagggcatgtaaataggtaatggtggtgctagtagcaaattggtagatagtacatacttgccatttctatactaggaagtcctcttagtggagatgttttcattttcactggataaaagatagaaggaaggagatgatagaggaaaagcagggtgatggaagacaagccaaacactctggcatggtaaccttgtaaatatacctgctctatgtgggtgctgcatgctaggaaagtagggctgggggcttttctgcatgtttatatgcctccaactgaatttgaggagagtagaccaccagtatgcttaaatatgtgatacttgttaatgtaatacaccattcaggaataaactgagagttctgaggaacaaaaaa

SEQ ID NO: 364292 - DNA, 457 bp, Homo Sapiens
ctgcctctatgtcttttgcaagctggggtcttccttactcagaaggcctggaggccctgccagatgctgccttccggactggctgcccgctgcagtgttttcacgggagccaagccagccccgggcctgtagcctcccatgtgacagagtttcagacaccacagtcctcagctggaccacagtaaacacttgccttccccaacccatgattcttgcttggaaacatgaacctgatgttccacgtgcgttcagccaatcaaacctcaagaatgtgattgagcagtgaggctgcgttttgggcaagacactgagctctgaaataagacttttcttggaatctcaagccctcaacttacagtgggaccctaagaaatgcacttcagtttccttttatgtaaaatggtggtaaaattaattgtgttcattaaattgcacacaactatacatgtttacctat

SEQ ID NO: 364293 - DNA, 260 bp, Homo Sapiens
attggcacattgtatttttgtgttgacttgtttttagaaatgatgtgtccacacacgtacccgtgtctcttctgcatttctgtgtcatggttctgtttcttaatcacgtgcggcggtgtctaagtggtgttaccagtgtacgcgcagtgaccttggatgacagtggctctttctcacagcctcccctgagctgtgagaaacagctttctctgtacatatgcaactcctaataaaaggcatatttcttcctgttaaaaaaa

SEQ ID NO: 364294 - DNA, 892 bp, Homo Sapiens
  misc_feature (217)..(217): n is a, c, g, or t
gggacaagctggccgagtatgtcgccaggaacggcctgaagttcgagaccagtgttcgtgccaagaatgatcaaagatttgagttcctgcagccgtggcaccagtataatgcttattatgagtttaagaagcagttcttcctccagaaagaagggggcgatagcatgcaggctgtgtctgcaccagaagagggctcccacagactctgctcccgagnaagccaagtgatgctggggaggatggcgcgcctgaagacgcagccgaggtgggagcacgggcaggctcaggcgggaagaaggaggcatcgtccagtaagaccgtcccggacgggaagctggtgaaagcttcctttgctccaataagctttgcaatcaaggccaaagaaaatgatctgcttcccctggaaaaaaatcgtgttaagctagatgatgacagtgatgatgatgaagaaagcaaagaaggccaagaaagttctagtagtgctgcaaacactaacccagcagttgccccaccctgtgtagttgttgaggagaagaagcctcaacttacccaggaggagctagaagcaaagcaagcaaagcaaaagctggaagatcgcctcgcagctgctgcccgggaaaagctggcccaggcgtctaaggagtcaaaagagaaacagcttcaagcagaacgtaaaaggaaagcggcgttatttttacagaccctcaaaaatcctctgccggaagcagaagctgggaaaattgaggagagtcctttcagtgtcgaggaatccagcactacgccctgccctctactgactggaggcaggcctctgcctactttagaagttaaaccacccgataggccttcgagcaaaagcaaagatccaccgagagaagaagagaaagaaaag

SEQ ID NO: 364295 - DNA, 457 bp, Homo Sapiens
ctctgagagcccgagaaagatggggaaactgaagccctagaggaaaagaagactaaatgtattaccatctgacccacttcctggccagcctgttcacctgtctgctgttcttcattgaacaagagaaggaatcacaattggtccatgacagtcacggtcatctcattcctcttgccagtggcaggtgtatgtgtgagtttgcagctcaatcctggccaaggggatccaaggactgctgaagaggcatgtctgcacatgtcacctagaacatctccagccatcatgtgatctctgggggaggcattcccaactctctgagagaagcagaccagaaagatggaaagaaagcacctggctccaggatgatgacattgagccgatgaattaaccacctttgtgctgctctaaccttcagagttcaccttaacatgagaaaataaaacccttattgcttaaa

SEQ ID NO: 364296 - DNA, 498 bp, Homo Sapiens; identical to SEQ ID NO: 218063
  misc_feature (477)..(477): n is a, c, g, or t

SEQ ID NO: 364297 - DNA, 459 bp, Homo Sapiens
agggtgtcttggcggtggccttggtaagagaaaggggcaaggggtataattgacaaggcactgaaagtattgaagtcagagccttgggaaggatctaccgaactctcggcggtccacgcggggacagacctcagcccgtgagccttgagctccacgcggggacagacctcagcccgtgagccttgagctccacgcggggacagacctcagcccgtgagccttgagctccacgcggggacagacctcagcccgtgagccttgagctccacgcggggacagacctcagcccgtgagccttgagcccagaaggagtggcagcctcaggacgtttgccaggtggcctggaatgtgagggaagcctcagccccgccaggaacagagctggcgctgagttcccggctcggcccgggtcagaagcgaggaaagtttgccggcgagtgtcctttgtgctgcgtggag

SEQ ID NO: 364298 - DNA, 692 bp, Homo Sapiens
tgcctgtgttgccgcagtgcagtggggtgcaagggctttgtttctgcctgcctgaaagagagggctctggggatggagatgagaaacaacacgctctccttcagacaatgaggcattctgtcctcctgctgccattcttcatctccactgagagccagagctggtaggagccgagtgccacaggcattctgcattgctctactcttaggtttgtgtgtgtgatccttcccctccctgtcgcccactcctccctcctctggctatcctaccctgtctgtgggctcttttactaccagcctatgctgtgggactgtcatggcatttagttcagagtggaggggctttggcctgaaataaaatgcaagtatttaagattgttgttgcaatttgtgtctaacaagctgtagcagagaaggagggagtgagcgctggcagtatttcctttcataaatcatgaatttatcagtgtggaaataatgcttcagaactgtgctctgtagccctcctgcattgtgtgtgcagctcaagttcaccactggaggaaggattgtcttccaaagagctgggatccaactcttctcacagttctgggcgtgaaccttgttaggtatactttacctgatgctgcttccatcctcgcagtctgtctgaggtgccaggtgctgaaagagaaataaagtttgtcaacaggc

SEQ ID NO: 364299 - DNA, 499 bp, Homo Sapiens
  misc_feature (61)..(124): n is a, c, g, or t
gcatgatggcaggtgcctgtaatctcagctactcagtaggctggagcgggagaactgcttnnnnnnnnnnnnnnnnnnnnnnnnnnnnnnnnnnnnnnnnnnnnnnnnnnnnnnnnnnnnnnnngcaagagacttcatttcgataaataagtaaataaataaataaagtctgaagctccactggtcactccttttattgattatttgcagctggtctaaccagttacgtatgtctggcttgattacatggccagagcaacataaaagccctgctgggaacttctgatttgagctcttccaaaaccaggatggatgcctcacatagatcatgatgattcaatccaaaggcactttgcagtgcagtccacatgtgcataaggaccatggggagcttgtatttgggaattctgagattcctgatgtttacctacctagtctttctcttgctgccctgtatcctttgcctttaaataaaaatcttaagtgattatgctctgtg

SEQ ID NO: 364300 - DNA, 620 bp, Homo Sapiens
  misc_feature (413)..(431): n is a, c, g, or t
  misc_feature (469)..(529): n is a, c, g, or t
aatttttgtttgaaataaagtccttagttagccacttgtgtcatttccaggttttctgggggagtgcagggggaaatgggtgatgaggtatgaacggatgcctcagtgtccaagatacaaaaggcaccacatagaagtttgctttttccctgcctgtcttggtcactaccacctcttccctgaaaagggcgggccttccatgttctctcacccgcttcaactccacattgtccaagtcacagaaaaagagaggcctgaatggagattcgaccacaaacagttttaatggtctggttttctccctagttccccaactgtttgttagtattattattactacaagaataaaggattcctgagagcctgtcccctcctctcctgtggcccccttgacaggactcatccctaccaannnnnnnnnnnnnnnnnnnggatttctggggaaaaaaagaagtgaaaggcactgcannnnnnnnnnnnnnnnnnnnnnnnnnnnnnnnnnnnnnnnnnnnnnnnnnnnnnnnnnnnnactaggcagggcccggcctagaggaggaaagttccagtccatgcctgaaggaattgtggagaggtgtgtccatccatgacacccccatcag

SEQ ID NO: 364301 - DNA, 500 bp, Homo Sapiens
cactgcgactggccccacttaatgggttttcagaggtgggagcaaagaatgaagggaggaagagagctcccatcttttccattactgtatttacttaaaactggaaaaaactgaatcactgggatggtatttcatttatcttttgaaatgaagaatagatacattaatttaaatgattctctaaagactgtccttcagcatccctaaagcatttcaacactataggcacagtttttattttatctttctggcacctggtttgggctttgggcttagattaaaaagacgagccttctcctgcccctgctcccttttattccctgccatctgctaagctcgactttttatctctcaggccaaatttgactctgcaagggactttgcataacgtttcatcctcagaatcgctaatgatgggcagaggactgttacatgtgttgggagggattaaagtatatgacctcagtgccacttaaaaaataaatactgtctcaactatc

SEQ ID NO: 364302 - DNA, 992 bp, Homo Sapiens
  misc_feature (451)..(502): n is a, c, g, or t
ataagaaaattcttaaatctgcaaaagatttgcctcctgatgcacttatcattgaatacagagggaagtttatgctgagagaacagtttgaagcaaatgggtatttctttaaaagaccatacccttttgtgttattctactctaaatttcatgggctagaaatgtgtgttgatgcaaggacttttgggaatgaggctcgattcatcaggcggtcttgtacacccaatgcagaggtgaggcatgaaattcaagatggaaccatacatctttatatttattctatacacagtattccaaagggaactgaaattactattgcctttgattttgactatggaaattgtaagtacaaggtggactgtgcatgcctcaaagaaaacccagagtgccctgttctaaaacgtagttctgaatccatggaaaatatcaatagtggttatgagaccagacnnnnnnnnnnnnnnnnnnnnnnnnnnnnnnnnnnnnnnnnnnnnnnnnnnnntcagaatattactttggattgtgaaggaacgaccaacaaaatgaagagcccagaaactaaacaaagaaagctttctccactgagactatcagtatcaaataatcaggaaccagattttattgatgatatagaagaaaaaactcctattagtaatgaagtagaaatggaatcagaggagcagattgcagaaaggaacaaggaagatggtaagttgggaagccagtagttggggcttagtgacagctgctctgcatatggtaattgttgctgcctttacatgggctttacattattctttgaagttagcgaatgatgtgccattgagcattttataggtatggtcattgccatttaaataaattccattaatctgtatttactcggttgtcattagagaattaacgaatgttggacttcaagaaatttgaaccttttggaagtaataatatttaatcattggccacttgaactattatcaattctatgccgc

SEQ ID NO: 364303 - DNA, 494 bp, Homo Sapiens
ggctcggcttcggtggattctcccgggtctgggctcacgtctcctctgcgcgccttgtgctcccctatcccgcagatacgcaggcttctggagaccctgggtggacgccggaggcaagaaagaagaggagacgccgaaccacgccgcggaggcgatgcccgatggccctggaatgaccgcagcctcaggaaagctttaccaattcaggcacccagtcagactattttggccaaaatcaaaatgttatgattacttatatcaagaagcagaagctcttctgaaaaattttccaattcaagccacaatttcattttatgaagattctgatagcgaagatgaaattgaggatctgacctgtgaaaattaatctgattagctacttttgattatatccaaagcttgtggggtttaaatttagtgtacaaatgtatcataattattttaaactaatttatttgtatataaattattaataaaatgaaatattttgtaaa

SEQ ID NO: 364304 - DNA, 477 bp, Homo Sapiens
  misc_feature (14)..(14): n is a, c, g, or t
  misc_feature (25)..(25): n is a, c, g, or t
tccgcgcccaacanaagagcagctnaaaaggcccctgctgggaccaaagttccaaggcctctgcttcaggatgccaggggacccatgtgcagccgcctgagggccgggacttcaccctgaagcccaaaaagaggagagggaagaaaaagctgcaaaaaccagtagagatagcagaggacgctacactagaagaaacgctagtgaaaaagaagaagaagaaagattccaaatgaatccttcccagccggggccttccgaccactcagctgtcagggcactgcgggggcagacacctctggcctgaagtcacagcagagttcaccccagagcgcctgggcgcatcttgtggcatgcccatgggctgccgagtcctgccctctcgccacatttcccccaagttacattcccaggaggacctttttaatgttctcaatcgtggctctcagacacaaataaatttttttgtaaactctgaaa

SEQ ID NO: 364305 - DNA, 468 bp, Homo Sapiens
cagcactcttctgacacaaccaggcccatgttctctccaccatgaccgatgtacagagatattgaatgtcattagatcggtgtcctttgagagtccacctacttccaaataaaagcagataatgaacacattccaggtgacccagagggcagtccacactgtatacaccattatgtatcgaggtctgtactgaatggtcccaaacaaacccaatatgacaactattatgtgtagaaaatttccaagaataggcgcccactggaaaccaaggaagtcaaagatctgcctctctaatgatgagaccaactgcagcgcgcagaggcagatgagcgagcagcgtccggtgcagcagcccatggtgccggcggcgtccgagcggcgctgactgccagagatcctcgtcctccgccgctgcagcctcctgactccggagtagtccccgcccggcccggcccaggctcctcgacc

SEQ ID NO: 364306 - DNA, 721 bp, Homo Sapiens
ctttaaaaaaaataggaatacaaggatttacaaaaaaacctcacacagtgcaataataaaggaaagcagacactagtggaacccctagggccactgcatcttgttcatgggcaaaaggaggaagggaggtgaggtctgggtagagtgcttttcccagtcccctgctggcacttctccatgatgacaaggaagtctctgccatcctggccacagtgctgggctccctgcatgacagtgaaaacagtgacaatgttccagcaaagccaccagacaaagttcttaaggtcacaggagagaagggagcccaggatggaaggcacagcagagccatgagtcctggggcagagagtgctgggctgagtcgtattgctttgctagacttccataggaatgggcttcttgcggcgagaaaagggtgccccaccctctacttggactacactactctgaaaccttgtggcagaggcagagaaaaatctgctttatcgtgagtggtcagactgtgcttcagtttcaacaggctgccccaaaagagggcacaaggtgatcaatgggttctctgcagatatgaggacttggtgggcagagggaaaggaaagagtggcctatgaggcagatggtgatgcaaaaatgtcaagttgccattcaacttgttgtttgctaactctgaagtaagaaagatgagggaaatgtaaagattgccgtctcccaccactctgga

SEQ ID NO: 364307 - DNA, 411 bp, Homo Sapiens
agtaaaattataggaatgtgcccataaatgccaggccctggaataataacaactgaggacacagttgagacccattaaatgacacacttgcctaaactcctgggattccagaataaggggaggcctgtacccttgaggctgatgaattattcagacaaactttcattgttcacagataattgtggttccccaagggaagattttcagtgtctttaatttctactcttacagtgtcactaaaacaaggattccatttagcccagaataatacagtttcagccttgaaaatggcattcttttggggctttgtcattctaaatgtgtctgatttgtggttgcagatgaatctgtgttgctgaaacattttggttcaaatgatttcagaagtaaaacacattgaaagtatgtttg

SEQ ID NO: 364308 - DNA, 973 bp, Homo Sapiens
  misc_feature (961)..(961): n is a, c, g, or t
tcccggggtcagtgccgtagcgcccggctcctgcagacgctcggcctccgctcattcctgaccccgcagtgggcgcgatggcggaggctgtactgagggtcgcccggcggcagctgagccagcgcggcgggtctggagcccccatcctcctgcggcagatgttcgagcctgtgagctgcaccttcacgtacctgctgggtgacagagagtcccgggaggccgttctgatcgacccagtcctggaaacagcgcctcgggatgcccagctgatcaaggagctggggctgcggctgctctatgctgtgaatacccactgccacgcggaccacattacaggctcggggctgctccgttccctcctccctggctgccagtctgtcatctcccgccttagtggggcccaggctgacttacacattgaggatggagactccatccgcttcgggcgcttcgcgttggagaccagggccagccctggccacaccccaggctgtgtcaccttcgtcctgaatgaccacagcatggccttcactggagatgccctgttgatccgtgggtgtgggcggacagacttccagcaaggctgtgccaagaccttgtaccactcggtccatgaaaagatcttcacacttccaggagactgtctgatctaccctgctcacgattaccatgggttcacagtgtccaccgtggaggaggagaggactctgaaccctcggctcaccctcagctgtgaggagtttgtcaaaatcatgggcaacctgaacttgcctaaacctcagcagatagactttgctgttccagccaacatgcgctgtggggtgcagacacccactgcctgatctcacttctgtcagatgctcccatccactattaatgcactaggtgggaggagagggcggcaatgacactgcacctctcctttcccaccgcattccctggagctccctaaataaaactnaaatttaacgtg

SEQ ID NO: 364309 - DNA, 490 bp, Homo Sapiens
aattttaaaaccgggtctggggcctcccgattctggttttcccaaagagtccccattaatcccggacaatgctccatttcaaggctgtttttcctcaccttcaataactctcccccaatccccccacctctaggtgtgaaggttaccaggagagacctgagctcgctggctctgactccaaggtggcctcagtggaaagtttcaaaaggcaaccggtttggtttcactggcagggcagcggcaggcgtttgggttctggaggcccaggaatgtagaagcctccagctaacagactccacgcgcctatcctcccaaacgctctcggagataagctcccagctccctccccttttccaccttcatgcacttcctgctgtattctgtccattccagcactggccctttctgtgggtgggtgggcagaggatacaatttcctgcatgactacttgctcatgattcatacttctaaatgaaaataaaactgatat

SEQ ID NO: 364310 - DNA, 439 bp, Homo Sapiens
gcagacactgcccagatgctcggtggagggacagtgatggcctttgactcatgaggcctagagaaaagtatcaaaggtctcaccatgtaagagtgatttcccgatttcctctccctttcagttgtgtgaaaaaacagctggcccgggttcccattagcaaattaaatcatccttcaatcttaaattagaaaccagaatgatcttcaggataaaaagaacttctgaatctctgcaataggaaatgtttcgatcatgcaagtgctttcccagccaaatgtctgtgctctctgtgtcactgagggccacaggttcctctaacatctgtcactgtcacttcaccaggcaggccttggagttccatgacaaaatcacttttgtcagacaaagaatgtatcctttacttttctcaaatggaataaaattatttcttctgtggagg

SEQ ID NO: 364311 - DNA, 495 bp, Homo Sapiens
aaggcgagtaggcgtttttattccgtttccagtccttgagctcagcagatcaaaataacagtgaccctgcaaccccacagagcccgcgacacgctcgctttcttccccgccctgcccctttagtccccgctctggaaggccaggcagtttaggtgtaaataggtatcttttatggtttccaaatgaattatttgtgtgagagtaattaaatctgtaagaaaacctgttgagattcttcactatgaattatgacttctacaacatgtattttagcaaaaacacgatgctggcctccactggatagctcagtatgctgattgccagtgatagttctgtacgcgttaccaacagcgtctttattaaccctctcccacatccagtggaaatcattgctaggcggtatttgttggttggctgttagctttgctttatgatttcatgtttcttttaaaggttgttttgcatgttgaatattaaatttttttattctgtgtc

SEQ ID NO: 364312 - DNA, 557 bp, Homo Sapiens
  misc_feature (539)..(539): n is a, c, g, or t
attattattattattttttttgagatggagtcttgctctgtcacccaggctggagagtatggtgactaagatttgtagtaataactgggcctagatttaggccaattacacgacctctgattggtaagtgtgtgcttaaagtgcggtcagtgctggcataaacaatggggtttgagggcccctgatgatatctctgagggaaggataccagggctcctgcagtgttacttcactgataagcttccagtggaaccaggggctcatctggtagagtagaatttccctttactttctgcgtaaatgctgaatccgtgtcggctttctgtctccttacggcacctttggaggtgcaaagccgcctggaaaaggaataactggcaacactgtaaaatagttctctcttctccaggcttcttctgctcactccatgcccacctcaagggtgccgacactcaccagtggcctggaccgaaacactggcctttctctgagaggagacagtgtctgtctgtggctaggagaggctgcaaacaggccanaaatccagacacctaaca

SEQ ID NO: 364313 - DNA, 762 bp, Homo Sapiens
tgggtgaattcggcacgaggattctcttcccagtgcctatcggacagtgcggcggtcgaggtcccgctcccggtcccctcggaggagagcccactcccctgagagacggagggaagagagaagtgtgcccactgcctaccgcgtgagccgcagccctggggccagcaggaagcggacccgctccagaagtccccacgagaagaagaagaagaggcggtcccggtcgcggaccaagtccaaggccaggtctcagtcggtgtcacccagcaagcaggcagcgccccggcccgcggcccccgcggcccactcggcgcactcagccagcgtctcccctgtggagagtcggggctccagccaggagcgctccaggggagtctctcaggaaaaagaagcccagatctcttcagcaatcgtttcttccgtgcagagcaaaatcactcaggatctcatggccaaagtcagagcgatgcttgcagcttccaaaaacctgcaaaccagcgcttcctgagacggggccagcggaggcagagccgggaggctgcgtgggcttctgggcaggctcacgcagacgccggccacaccatccacctggccgcctccatggacccttggtggcttttgtaaattaatttttgatgacattttgagttttaagatttctgaccagcagtctcttacctgtatatttgtaaatatatcatgtttctgtgaaaatgtattatgaaataaaatgggaggaaacaccttttctagctaaaaaaa

SEQ ID NO: 364314 - DNA, 454 bp, Homo Sapiens
tgaacaggtccaatgatttcagatctgctggaaaaggctttttgtcatttgcttctatttccacaacacttacatcagtgaaattgccatctgaatacatttgatcttttgaattaaaattgtgccttggaggagtgtgaggtgaccactgggcaatatgactctttgaaggatctggaacattaggccagatgtgttttttaattaggtctcgcttattaaagcagaacagcactcccagaagagttgtcaataggaatgctaagcaaacaggcacgactatggcttcaatttctccttgagcaaactttggggtagtaaaagtgaattctggaccatccttcccaccttcatctgtgtatgctgccattcgtaccatgtacaatgtgtcactagtcaaagaggacaatgtatattctgtgtgggaagaatccacattcacagcagtttcatt

SEQ ID NO: 364315 - DNA, 587 bp, Homo Sapiens
  misc_feature (517)..(517): n is a, c, g, or t
  misc_feature (532)..(532): n is a, c, g, or t
  misc_feature (535)..(535): n is a, c, g, or t
  misc_feature (569)..(569): n is a, c, g, or t
cgagctcggtaccccctgcgtggtagtgatgatggtggtgggcttgccatctgctgaggtcaccagcttcaggattgttccgctggcaggggccctttggtctggatgatctgagtcacaggacccgtgcacgcctggcctgtgactgctgaagtctgaactggtttggtctggaccaccgacatcactttgcccagattggaaatcagagcactgcctccctgggacagagatggggctcttcaccagggtgatggtcttggtgaccccgcccacaactgtggtcaccacctgggcttgctgggccactgtcacagtgcctgacttgtgcactgtgatgatagggcgggtagacgtgttggtggcggaggaaaccgatgtccccacctgggcggctgcagtcttcagcatgcgagtggcagggttgctcaccatgactggcgaggaggccaccttcacagtggctgggagggtggtagtgccaggtgtcacagccatggtcttcacgatggtggtnacccgctgggaacanctncaacaccgtgggtgccgaggaaggggggatcttnctgggtggcagcggtccg

SEQ ID NO: 364316 - DNA, 704 bp, Homo Sapiens
gggtttatggtaattgtaacctttcaaatgagttacgtgaaaagagcatctcacttttaatacacccagatattttcttcaagtctttgtgcattttagcaggacttaattttcttaatttattctttcctttcaattatagtgacatagagtagttggccttataaatagatcccatttagcccctgaacataataccatctgcagtattataaaagtcatttagaaggtcagggggataatctagaggcaggattttggacattgtgaaggaaatgtgctccttctcagctcacttcaataactattttctgagactgaagttttttagacaagaataagaaaactttgctttcttcagttatcacatgtgaaagcttttgctttttgttaggaaaaggtgtggatgactctactgcgtggatggttacatttgctttccgtgaaatgctcagaaaatgtcaggacattccttttccaattgtgtgtcagtgcgtattgtaataaaactactgatttaaattagcataagtgtatctactttgttttactggtgatactcttgtgtcccttctattgctggcatcacatcctactgctgtcagccacacccagtgtaatccatctggctttgtagagattagcataaagacttggaaagcctctatttttctttctgagaaactgagaaatttgattgacga

SEQ ID NO: 364317 - DNA, 469 bp, Homo Sapiens
ccttcctgctggtgctgctcaccctggccacgctctgcacacggctgcacagaaacttccgacgcggggagagcatctactgggggcccacagcggacagccaggacacagtggctgctgtgctgaagcggaggctgctgcagccctcgcgccgggtcaagcgctcgcgccggagacccctcctcccgcccacgccggacagcggcccggaaggcgagagctcggagtgacggcctgggacctgccactgtggcgtgcggctcctccccgcgccgcgaggccgcgacctctgccacgtggaccgcgcgcggggcgctccctggtggcgatggcgcggcactggccgagcactgcgggggctttcctccttgttggttgctgagtgggcggccaaggggagaaaaggagccgcttctgcctcccttgccaaaactccgtttctaattaaattatttttagtagaaaaaaa

SEQ ID NO: 364318 - DNA, 1905 bp, Homo Sapiens
ggcgcgaggcctgggtggcgaattcggcacgaggcgtgtatgatgtgttctggctgcggttctccaaccgggcctttgcactcaacgacctggatgactacgagaagcacttcacggtcatgaactatgacccggatgtggtgctgaagcaggtgcactgtgaagagttcatccccgagtttgagaagcaatacccagaatttccctggacggacgtccaggctgagatcttccgggccttcacggagctgttccaggtggcctgtgccaagccaccacccctgggcctctgcgactacccctcatcccgggccatgtatgccgtcgacctcatgctgaagtgggacaacggcccagatggaaggcgggtgatgcagccgcagatcctggaggtgaacttcaaccccgactgtgagcgagcctgcaggtaccaccccaccttcttcaacgacgtcttcagcaccttgtttctggaccagcccggtggctgccacgttacctgccttgtctaggcactcgctgtccccaaaacctgtgcttggggcaggattccaacctcagttctctgagctgcttctgcaaaggcccccatgtccctccccacaccggccctgggcatagcctcagccccaggcctctgtcctgccagagccatcctcccggcgccacactccgggagcacagcatcctcctctcacctgtgggtcagagcaggacagtgatggtgtccccagggctgagcaccaccccacgccctgccctcacccctcaccaccatctgtgcactgatgagtctccagtttagccaagggcttatgttcctggcatggagaatttgttcctggctgctgtgtttccagggggtgctgggggaagggttccgtggagcgagacaaggtgtcctcgggagcaggcttccaccgggaagcgtttgggagccctgtatcacacggggcaggcgggtttctcttccggggtctctgctcttatgcatcaggacgaccccgggacggctgtggggccccgacactgtagccctatagggctctatgcgacaggggcccaggaacagcctgaggccaccacccagcaagcccgccttatcacccattccagctcacccagaaccttcaccagcaaacctcctgctgaggtcctggcaggaggccaccgtcttgttaccgtttccttttcgtttgctgagggtcacagaccccaacagggaaatcagtatctgtcttcccagtggttgccctgctcgccgggcactccacggggtcccgcccttgtgtgagatgggccaggatccttcggcaaggggcgcctggggctgggggctgattgtgggccggtggagcgccagacagaaaaggattccaatgagaacttcaggttaaagtcagatgccacctaccagggtctacagtcaaaatgttggctttttcttattttttaatgtatgggagaaaaatgtaaaattccagttcttttctaattgtgtttctgaaattaggagtcagctgccagcgtttttgtgtggctgcagtgtgcctgggcccagctcacgggcagtgggtggacctaactgcccaggcaggcgagagctacttccagagccttccagtgcatgggagggcagggctaggtgtagcggtgtctcctctttgaaattaagaactatctttcttgtagcaaagctgcacatgatgatgctgcctctcctctctgtgttgtctgggcccttgtttacaagcacgcgttacccttcctgaggggagccatgctctagcccctggagggcctgttgcaggggcagggcgggcccgttgcctttggcagctcctggagagctgtggacatgcagtccccctcagttcgtgctgcaataaaggccatcttctctta

SEQ ID NO: 364319 - DNA, 1328 bp, Homo Sapiens
  misc_feature (109)..(109): n is a, c, g, or t
  misc_feature (144)..(144): n is a, c, g, or t
ggggttagggccagggcgtggggtggttcttcagccctggggacccccatcacgttccttgtctgaccccacaggtgagaggaggatgctgtgctcccggagtgtgccnccggaagatggcttcggcaggacagaggctggggnctgaggttatgcccagggccggtgtggggagggacatgggggcctttgcagaagcagctcagagaactgaggttggaatcctgccccaagcacaggttttggggacagcgagtgcctagacaaggcaggtaacgtggcagccaccgggctggtccagaaacaaggtgctgaagacgtcgttgaagaaggtggggtggtacctgcaggctcgctcacagtcggggttgaagttcacctccaggatctgcggctgcatcacccgccttccatctgggccgttgtcccacttcagcatgaggtcgacggcatacatggcccgggatgaggggtagtcgcagaggcccaggggtggtggcttggcacaggccacctggaacagctccgtgaaggcccggaagatctcagcctggacgtccgtccagggaaattctgggtattgcttctcaaactcggggatgaactcttcacactgcacctgcttcagcaccacatccgggtcatagttcatgaccgtgaagtgcttctcgtagtcatccaggtcgttgagtgcaaaggcccggttggagaaccgcagccagaacacatcatacacgaacaaccgtaggggcctcactgaccgcagcagcacgatgtagcggatgtcgaacttgacctttcccacgtcttctcgaaggaacaacacgggactttcgatgtacttggacacaaccttgggggtgctctctcggtgccggatgatgctgtgcaggctcttggtgacgtgggtgtccaggctgcgcgcccacggttccacgggcttgcagattcccagtggtttgtcctcgccccacctttcccgctgctggaagtagctgacaaactggggcagctcagtgcgcaggttgaaggttcggggcagccagggtgggccctcggggccacctgcccggcgcgcgatggaggccaggcagtccttgacagtcagcaggttctcgcaggggaactggttcagcagcacgcctggcctctcctggctgagtttcctgtagtccttgaagtgtgagaagttgaagaggatgtcggcgtccgcctcactctgggtgagggtgaagcgcgggtgggtgaggctgctggccacctgctgcacgtccgtgtagaccttgaagatgtggccgtgggggtgcaccacggggttgatgtcaagc

SEQ ID NO: 364320 - DNA, 1160 bp, Homo Sapiens
  misc_feature (676)..(694): n is a, c, g, or t
  misc_feature (743)..(757): n is a, c, g, or t
  misc_feature (804)..(950): n is a, c, g, or t
  misc_feature (996)..(1058): n is a, c, g, or t
ggcctgggtggcaattcggacgaggcttgacatcaaccccgtggtgcacccccacggccacatcttcaaggtctacacggacgtgcagcaggtggccagcagcctcacccacccgcgcttcaccctcacccagagtgaggcggacgccgacatcctcttcaacttctcacacttcaaggactacaggaaactcagccaggagaggccaggcgtgctgctgaaccagttcccctgcgagaacctgctgactgtcaaggactgcctggcctccatcgcgcgccgggcaggtggccccgagggcccaccctggctgccccgaaccttcaacctgcgcactgagctgccccagtttgtcagctacttccagcagcgggaaaggtggggcgaggacaaccactggatctgcaagccctggaacctggcgcgcagcctggacacccacgtcaccaagagcctgcacagcatcatccggcaccgagagagcacccccaaggttgtgtccaagtacatcgaaagtcccgtgttgttccttcgagaagacgtgggaaaggccaagttcgacatccgctacatcgtgctgctgcggccagcgacggcccccaccgctgcccgtgtatgacgcgtcctcgccggcgtcctccaccgcggccttgcccctaccccctcgcacgcctannnnnnnnnnnnnnnnnnnattcactatcacccccccgcggcgcccgccagccgcccccgtgcccaannnnnnnnnnnnnnnttccggcacccctcccctgcattcttcccgactggcgccccacaccnnnnnnnnnnnnnnnnnnnnnnnnnnnnnnnnnnnnnnnnnnnnnnnnnnnnnnnnnnnnnnnnnnnnnnnnnnnnnnnnnnnnnnnnnnnnnnnnnnnnnnnnnnnnnnnnnnnnnnnnnnnnnnnnnnnnnnnnnnnnnnnnnnntccgcgccagcctagtgaccaagtgccctcgcccgttccgcgctgnnnnnnnnnnnnnnnnnnnnnnnnnnnnnnnnnnnnnnnnnnnnnnnnnnnnnnnnnnnnnnnatacgcgcgcccgtgtccccgtcccatgctgccgcccccacgctgacatgaccgcgacaccccaacgatgcgcgcccctacctcgcgctcgctccctccgcc

SEQ ID NO: 364321 - DNA, 1620 bp, Homo Sapiens
gggggcggtggcacatgcgcaatagcgagacgctggagcgcggcgtaggtggctgccgagtcttttcctgtttagggtcttatcctggcattgagggcgccggactggcgcttttggccggcttggcattgggtgggcggcttcttgggacccacatgagccagtggcatcatccccgcagtggctggggccggagacgcgacttttcaggacgctcctcagccaagaagaagggcggaaaccacatccccgaaaggtggaaagactatctcccagttggacagcggatgcctgggactcgtttcattgctttcaaagttcctttgcaaaagagttttgaaaagaaacttgctccagaagaatgcttttcccctttggatctttttaacaaaatccgagaacaaaatgaagaacttggactgattattgatttaacatatactcaacgctattataaaccagaggatttgccagaaactgttccttacttaaaaatttttacagttggacatcaagtgcctgatgatgagactatttttaaattcaaacacgctgttaatggggtttttgaaagaaaataaagataatgataaacttattggtgtccactgtacccatggtttaaacaggactggctacctcatttgcagatatttgattgatgtaagaaggcgtgaggccagatgatgcaattgaattattcaataggtgccggggacattgcctaaaaaggacaaaactaccattgaagacccttcagaatggtcctatcagaaagaattggaattccagtgtaccccaggtcaagtgaattttgaagactcagcacatctcatgcaacccagtccacaataagcctgttaaacaaggacctaggtataatctacatcagatccaggtcactcagctcctcgacatttccacacccagacccaaagtttgcaacaatcagtcagaaaattttcagagaatccacatgtttaccagagacaccatctccctcctcctggtccccctggagaggactattcacacaggaggtattcttggaatgtgaagcccaatgccagtcgggcagcccaggatagaagaaggtggtatccttataattactccagactctcctatccagcctgttgggaatggacccagtgatacaaacctgtcctggaattctacctggagaccagagctggcctgaaaattactggtgtgacttttaattagttcaggtctaatcaggtttctttattgttcccttatgtattcaagcttaaggaaaaattgcattgctgtttacctctttgctgataaatttgcagtaattacagcattgcaggaaaaacaatctgttattccagtcttaaatttttctaaaagaagacaatattttagaactgaagcattgagaacttcccttgcaaattatttttaaaattctatcttgtttttctatgtatttctttctgactagacttgtgatatgcgtgtgtttatgtacagaaatttttagtgtttttgttatgttctgttattgacccaaaggccatctttattttctataactgttcaaaatttatattaaaatctacttaggagataatttctttagaaaaaaaa

SEQ ID NO: 364322 - DNA, 446 bp, Homo Sapiens
tgtcctgaggctgtggagacttaattcttcagctgggtggttaccgtaggaacaaggaacactttagctacttcttactcttttaacaccaatggctgtgggagaaggaaaggctcaaggccagggctcagctcgcagagtccatcttctcccacagttgccacatttgagagggggcctgctgaatgcccttgctgtcccctatggcagtattgaggcctgaccgaagtctggtatgctgcttgctggctacaagaactggtcacaggatgaaaattggggaaaggatttgggggaggtgacaagggtggcatggaagtctaggggacaaaggaacagggttgggaacaaattggttaactttgattgccactcaatgtggtgctttccccctttcccttgaattctgctttgaaaagaataaatttgtacttgtttaaaaaaaa

SEQ ID NO: 364323 - DNA, 471 bp, Homo Sapiens
gcattacgatccccaaagtgtcctggaccctggcctaaagaatcccacccccacttcatgcccactgccgatgcccaatccaggcccggtgaggccaaggtttcccagtgagcctctgcgcctctccactgtttcatgagcccaaacaccctcctggcacaacgctctaccctgcagcttggagaactccgctggatggggagtctcatgcaagacttcactgcagcctttcacaggactctgcagatagtgcctctgcaaactaaggagtgactaggtgggttggggaccccctcaggattgtttctcggcaccagtgcctcagtgctgcaattgagggctaaatcccaagtgtctcttgactggctcaagaattagggccccaactacacacccccaagccacagggaagcatgtactgtacttcccaattgccacattttaaataaagacaaatttttatttcttcta

SEQ ID NO: 364324 - DNA, 118 bp, Homo Sapiens
gtaaagactgaaagctgttctgtggaagacccaccctttcctttaaacacgattctctcacttccaactccaaacttgctcaactaatccttaaaaataaacttgagctgggttttgg

SEQ ID NO: 364325 - DNA, 476 bp, Homo Sapiens
tgagccggctgccaccagggggcgcgccagcggtgtccgggagcctagcggcgcgtgtgcagcggccagtgcacctgctccggccctcgccgcggtctctgccaggaccccgacgcccagcctgaccctgccattcagcggggctgcggctccaaggcctgcgacagcagccccacctggcattcagcgcgctcccgggggcagaggtcgcggtgtcctcacgctgtggtgccggcctacaacccccacgccgggctcgggcccggcggaggagggcgatgctccccgggtaggacaaaccggtcacctgggctgcgagggcggcttaggggcagaagcggcggtccagggccgcctggcgcagcagcctgtcccagccgcggtccctgcagtccctccctggcggctgcgcagccgtcccacgacaggggccataaactctccagagcggaaagccgcaccctggtggcccggcc

SEQ ID NO: 364326 - DNA, 631 bp, Homo Sapiens
gtgacggtgaagagacacttcgaggtcaggtgtctgtgctccccattcatccctgatttccgtggctatcttgactttcggggtgaaaagtgaggttaggccctgtttccccgacccttccctcgcgccaccacactctagtggcctggcacagccccagaggtcggccgctgtagcccccattgcggactcgccacattcatattggctcaccttgtcggtgcccggttcggtcctcttggagctcacactccagttgaggaaatgaatggacacaggaactactgggtaacaaaatactaataaagggctgcgattgtgtgagtttctactgtagcgatgaatgtcgctgtcattggaacgttccccaagtgccttctagtgaaagccttacttcactcggaataacctgtggtcttttcttgaacgtgatggctctcttggttgtattcttcatgcacatgtgttacttttcctgtttaactacatgttaaagaaatgtgtatgttcctgtttaactgcatgttttaaaaaagtatgtgtatttttaagttataggcacgtgcaagaaagttcagagcaaaatagcttatattagtgaaacaataaatgtctactaataggagaatgg

SEQ ID NO: 364327 - DNA, 516 bp, Homo Sapiens
  misc_feature (458)..(458): n is a, c, g, or t
gcggccgctcgcggcccaacgagcacctgggctaaattccccgcccgtgacccgcgacgtccgagcgccgtctccggaagggagctggtggccgtggagtgtggggtcttctccctgcgccccagggccccccaaactcttctcactaccctgagttcggcgtgcgtcctccaagaatccctgggtgggctgaactgagcccttaggatcgatttgtttaaaaaccctattgagatattaggagctggattgagatgtcgagcaggaaaggagtgggaggggtctgaggtcccgcctttggaggccgcagggaccgccattccgcgaacccagccgcgcggtgtggtctcctccatccctgagtgccccgcgccctgcagagccgaggaaacttacagccagggccagggggccggaggagaggccaccgagctgcacgacccttttctgcatcccanagagcgttgctccaggcctcccagtcttcattaaacatttcttaaatcctgccccagc

SEQ ID NO: 364328 - DNA, 458 bp, Homo Sapiens
  misc_feature (45)..(45): n is a, c, g, or t
ttgcccgtggttctccctgaaaaggcgtgcaacaacctgacaacnacagcctgaattcaggccctcaaaaactggtcttgaacccggcttcgaacatcaaatggaagcaaaaggaaaacgtcggcctacaggggttggaggacggggcaggtgcagggcctgctgagaatgcagcctcttaagcacccatgcacccactcttcccagacctggggcgactcatggcgtgctcacctccagccgctggtggggggtgtcctgaaggacaggatgctctccccagacctccccagggtggtgaagctgtgccctggggccccagctaacccactcctctctctgtacgtcaatgtccctatttgaaagcagggatgatcccattccaccctgtccactctggatgagaattggccacctgatggttatttatacgtccagaagaacatcatttcccagtt

SEQ ID NO: 364329 - DNA, 695 bp, Homo Sapiens
  misc_feature (49)..(49): n is a, c, g, or t
  misc_feature (51)..(51): n is a, c, g, or t
  misc_feature (213)..(213): n is a, c, g, or t
gcccgggtcaggctggggaggaacagaactgggccctcccagagcaccntngcttcccccctgcttccccaggtctctatccagagagagtccccaggtacaacaaatgctaattagatgacagcaaattaaccccctggaggcttctcctggcagagctccctggggccggggcaggctgtggatggggcggaagggcagaagatggactgngggagggggcagagagaggagaccaaaatgaggtggtggcacagggtggggcaaggagatcctctctaaggcctctggggtctttgcctggccccatccctaaggggcggggaggggacgtaaatccctaatctttaagcccgacttgaggctgagagcagctggaagtttgggtttggtggtttgggggccggggcagcccaagctgtatggggcaggacagacagactaatgtagtgagtgtagctgtagctgaggcttaactgggagggatgccgagcttgctggaactactgggaccaagaagcggggtaccccacgcccctgcctgcactcctcgggggcgtggggcgtgccttgctccacccggactccctgggctgcgtcccacatccaccctcccgccccgtggggcaatttaacctttttcatgaaagttatttacaatgaaaagtttttaaaaataaaatttttaaaaatct

SEQ ID NO: 364330 - DNA, 769 bp, Homo Sapiens
  misc_feature (138)..(138): n is a, c, g, or t
  misc_feature (171)..(171): n is a, c, g, or t
  misc_feature (174)..(174): n is a, c, g, or t
  misc_feature (219)..(219): n is a, c, g, or t
  misc_feature (288)..(288): n is a, c, g, or t
aagtatggttcacagccaaaggatggacctatgagtgcttctgagaaatagtgacgatccaatttcgcaaaacagggttgtgctgcagagtaagtactatgaattgtgagaaaaatttcaaggctggttgtcacattntttgcccgtcctgtcatttgatcaccaaaagtncanactccaaaagggaatgcaaagaagaaacatgaaaaagatcaactntcctgggtacaatggccaccctttctctgggtgaatgaggcacagtatctgctgatcaacacatccagntattttggaacttcaccggcaactaaacaccagtgatgagaatggaaaggaggaattattctcactgaaggatctcagcttgcgttttcgtgccaatattattatcaatggaaaaagggcttttgaagaagagaaatgggatgagatttcaattggctctttgcgtttccaggttttggggccttgtcacagatgccagatgatttgcatcgaccagcaaactgggcaacgaaaccagcatgttttccaaaaactttctgagagtcgtgaaacaaaggtgaactttggcatgtacctgatgcatgcatcattggatttatcctccccatgtttcctgtctgtaggatctcaggtgctccctgcgttgaaagagaatgtggaaggtcatgatttacctgcatctgagaaacaccaggatgttacctcctaaaaaaaatttttagcatacattaaagtttctcttttacagtgataaaaaaaa

SEQ ID NO: 364331 - DNA, 498 bp, Homo Sapiens
  misc_feature (372)..(372): n is a, c, g, or t
atctttatgtttataaatttatttaatttccaagacttatgtgttcatctcaatccttgacatactcatctgccagacacaaaaaatagtggtctatttaagaggccttaatgaatgacaacatttttgaaatatgctatatgagtacaaatatttccagagcaaagagggaaaactgttgattgggtagacaatcaaattccaagcatttatctgatttacagaagtacatctactttttgtttttcactaaatgaatacaaccacttttaatatatatgtgggtgtggctgtgtgcgtatttcaaaacacacacgcacacacaataaagaaacatttcatagtggcaaaattttagtgcactgccaaagngctacaataactgtcatccacagacatccacatgcaaacactactggactagtacactagagcaaataagagagtatttagcaaaactctctggcaaaaacttttaaaacggaagtaatgaaacag

SEQ ID NO: 364332 - DNA, 486 bp, Homo Sapiens
  misc_feature (35)..(35): n is a, c, g, or t
ggaatgttagttagtaggtagacttagatcccatntctgtcctgctcccaggaagattcttaggtcctcttcaatccagcagcccctcccagaggtgtgatcagcaggatgctgaggaaccatgttgcctttcctgtcaatcacagccaccttcctgttatctcctaaatggatctggcttttcctggaggctgccatggttggaagatggtatcagagggcctgcctgggcagtctgtctccgggccagggtcagggaccctctgcctctggcagccttaacctgtcctctgctaggaccagggtgatttcaagccagggaagcaactgggaccctgaaaactgtccctccccagcccgctccccctctctgtgccctggtccccttgctgccatgtggatgctgttgtgattgctgtttgtatattatcaaaatgtttttatattaaaaatgtttggtctgaaaattaaaagcacttcatttag

SEQ ID NO: 364333 - DNA, 1481 bp, Homo Sapiens
  misc_feature (1340)..(1364): n is a, c, g, or t
ctcttcgtggtatctcttgtcagtatttcagcgggtgtaatacatcgtggtatatcaccctgtgtggagcctctctttatcctcgtcctcccttatggtctgatattgttctttatcggtttttacacgttcacatagctcttgtactggtatatggccccaccaggggtccgtgaaagtctgcaatatctggggagaacaacaccgtctccccgatacgtcccgttgttttcacaggggttttgagcacaaatggtaggtattgtgtttcaggagcattttgaactgtgaccattgccgtttggtagtgggagaacctttctgggtcgagggtcccaaaaggaggtggacacagttcagccttaacctggcccacagaggcgttttcagtcatgaaacgtctgggaaacaggagaggcccgtgaaagcctctcagagagaagagagactccagagaaggccgtccctaagaccttgagagccaggacagggtccatcaagcatgaagtaggccaagccgatagggcacagcacctcgcttgtaacaactctagtagccctctttgggagatgacatgagtggaactcacagccaccactaccaccactttagacaggaccgaggccacatactccccattctctcgtggctttccatctcagcctcggagggcaacattgacagtcctcctggcttcagctagagaaggatgctggaacaagcggctggtgttgaaagagtgggcttgaccaatttggtattgaactgttgcccagccacccctaggaacacctgtccatcacctcctggatggattccactgttagacagctacagggaatgattggtcatggggaagtctctgcgccataagccacgatcccagcgcaaaacccttactcaaatgtcttcattgacttcggtatttcatagtacctgagattttattttgagataccatcagggtgagttgcaccacttgtactcaattctaattgccccctggcaatctgggaagggttcagaaggtgggcacccagccaacagcatgaactcagagcattgttttagggttggaggaggaacacgctttctttacatcactagtgtagactcaaaagatatgcaagtgtcaaatatgcaaaagaaatagtttattcaaagagactgtgtgttactgaagaacagcataaaaatatgatttttttacttgcaaaaatgaaaggaaaaaaataccacgcattgaaatgcccagttcagactgaataattcctgctgcagcaaggaaagtacctactataatagaaattctgttttgttttctgtggttttcaagttnnnnnnnnnnnnnnnnnnnnnnnnngcactttatgtttttcaaaaataggttctgccagggacagtgtcaacacgttgcactttaaaataagcactatttcccatagcccaattgttgggactgtagtgatcgtagcattag

SEQ ID NO: 364334 - DNA, 714 bp, Homo Sapiens
gccgcggatctcagcctcttctcgcagatgggctcgcagtatgaactgaaggacaacccggggggtgcaccccgccaccttcggcagcccacacggcgccggcttattacccctacggccagttccaagtacggggaccccggccggcccaagaacgccacccgcgagagcaccagcacgctcaaggcctggctcaacgagcaccgcaagaatccctaccccaccaagggcgagaagatcatgctggccatcatcaccaagatgaccctcacgcaggtctccacctggttcgccaacgcgcgccggcgcctcaagaaggagaacaaggtgacatggggagcgcgcagcaaggaccaggaagatggagcgctcttcggcagcgacaccgagggcgacccggagaaggccgaggaattaagacaaatatttcagactggtgtaaaggacaaatatgacaacgacgtcaaggactcgcatccgtcgctttctgcagaaaggggcttcttcggtcccgagctcgcgtccaggtggccaggcctctgccggcggctccagtggctgcgattatcgggttcggtaaatgcccccacgtgcttgtgtctctttccccccttttctgtatatagagtggtttcagattgtaaatagcgcgtcagcgaacttgtctaaatcatatatttttgtctaataaactaaatgaaatgacaccccctc

SEQ ID NO: 364335 - DNA, 1247 bp, Homo Sapiens
gggactgactccagcctctgctccgggaggccctcccgggctgcctgacctcccgggaccatgcagaaggcctcccacaaaaacaaaaaagaaagaggagtcagcaacaaggtcaaaacatctgtacacaacttgagcaaaacacagcagaccaaactcactgtgggtagcctgggattaggcctcatcatcatccagcatggaccctacctccagatcacccacctcatcaggaagggggctgcagccaacgacgggaaactccagccaggctgtacaggaagcatggctggggaggcctcagaaaacttacaatcatggcagaaggtgaagaggaagccagcacatcttcatatgatggcagggcctcgattctgtcctcctcgtcctgcatctccagagcacccatccactcctcaaagagggtgctctatgcttagcccatcatagattgtggcccttcattcctgcatttgatgaatccagggaaccctctctccaacacccttggcctctctgcaactttctaacatcaggcagagtcagaggcaccatccccagaagctacaaatcttcagcattctccactctgtgaagtcagaggaatggcgggaccatagctctgagctcattggcaaatacaactaatttcaatttctggaatggaagcagtcagatattcttctgactgcacgcgtatgtggggagtgccatgttgaagagtgggaaaatatgggaagattcagtccctacaaacttaataggagaatgacattcagatttcccgagtattttgcatgtccaactgaaaactgaagtaggtttatgagagaatgcacgcctacctggatgggtctggggagtgtgtcactgtcaccgcagataattgacaagggctgatcaaatagcgatgctttcaagtctgtctccaaagccccagaaaaatctgatgcagcgcgagagccttctcatgagaaagggccaggacagcaccttctttctcttcttaacttctacagccagaaaacaggcacgagaaaaattagactaccgtgttacgaagcaaagatccaggtaagacaatgggtattcgtggccgcttatgtggtccatagtttgccatgtgagacacactattttggaaacttggaaggcaaggggtgaatcctatcttgaaagacaccgttaaaaccccctggtttccgggccacactttctataaggcaacaagttctccagccccacta

SEQ ID NO: 364336 - DNA, 695 bp, Homo Sapiens
ggtagagaatgagtaggcctactcatcaatatcaaacaggacatttagtttctttccttagaacagacataaatttaatttcatggtaatatgataataagaaaatgcttctatttttctttagcacctccatggttctcatatacccatgtctgtaaaaagtgacatgagaattttgttgggttacattttattgtatttattagattcgcttatatagatgacttaggcagaaataaagtcatgtctttagaaggtgaacaagccaacttgtgatggcctgccttttgcttttggcagttgggatgagaacaattgactctcccattggttgttagatagttgaaatggtgcgttggtggtcatacttagtgttctaggctgtgaaatcatggagttcttccacttccaagaatgactcatttgctgttggattctagtacagaatttagcagcctgatgtgtccccaaactgatttaatttctactgaagtgcccttgtgtacatttgttttgtaatttaccaaagtactacctgagtgtataatgactcctgcagtgagttaatgtaattgctgctttgaccattgttttaaatctgtgtactagagtaactgtgagcagaatgaaatcacattatctcagtgttcaaaatatcattctaataaagtacatgcattaaacaattttaaaaa

SEQ ID NO: 364337 - DNA, 725 bp, Homo Sapiens
  misc_feature (240)..(256): n is a, c, g, or t
agcgggagtgagccggggagccatggacaactgtttggcggccgcagcgctgaatggggtggaccgacgttccctgcagcgttcagcaaagctggctctagaagtgctggagagggccaagaggagggcggtggactggcatgccctggagcgtcccaaaggctgcatgggggtccttgcccgggaggcgccccacctagagaaacagccggcagccggcccgcagcgcgttctcccggnnnnnnnnnnnnnnnnncccccaacccttagtgcttccttcagaacaatggctgaattcatggactatacttcaagtcagtgtgggaaatattattcatctgtgccagaggaaggaggggcaacccatgtctatcgttatcacagaggcgagtcgaagctgcacatgtgcttggacatagggaatggtcagagaaaagacagaaaaaagacatcccttggtcctggaggcagctatcaaatatcagagcatgctccagaggcatcccagcctgctgagaacatctctaaggacctctacatagaagtatatccagggacctattctgtcactgtgggctcaaatgacttaaccaagaagactcatgtggtagcagttgattctggacaaagcgtggacctggtcttccctgtgtgatgttgaccatcactgccatcacatcacctttttttaagtagtaagaataaagccactgtatgattctctt

SEQ ID NO: 364338 - DNA, 578 bp, Homo Sapiens
acccactactggctctactggccacctctaaaatgattggtataggggcttccccaccccttagctcccctatcctgggctgaaggccacagggactgtcctctagaattcttcctcccctcccccacaccattcattcaattcgtgaaacaaatcttcaccgagagcagtttatgtgctaggaacatcattctatccttgcaacctggaacaagaccagctaccaccttagcttcatcccctacttgcaccaaccagtcccgggttagatctcaaatgccggaagtcagggatgcccaactctgggcagccccagtcagaacctctgggatctcagtgaagctggcctggcctctgctcttgctctcaaggggctgcttttcaaccaagagccttgtgagcctggtctgagccttgcacagccactgagtattttttattccttagccagtgtacctcctacctcagagtctatgtgagaggaagagaatgtgtgtccctgtgggtctctgcaagtgacagatgtgttgtttttaacagtattattaggttatgattaaagcctcatgaaatcctct

SEQ ID NO: 364339 - DNA, 358 bp, Homo Sapiens
  misc_feature (56)..(56): n is a, c, g, or t
ccgtctgtgttacagtggtgttgcctaatttcccaaggaagtgcctgctttctttntcctttttttaattttgtgaattttcaagtgctgttttgttggaagacagtgcaacgaactgagactaatggacagtgtcatcactcagcttactgggctgaggcgtctgtggagaggtggcaccggggctgcagagggcggctggggttccgtcgtgtcgggtgtcacttcaccttctgtttggccgctcgatgaggtctcgtgttgagatattgtgtgccacaacccccacagtcttcacctccgtgtgtgatgaaacttcccgtggacagccaataaaatgacgtcctctgttattttg

SEQ ID NO: 364340 - DNA, 1348 bp, Homo Sapiens
  misc_feature (1142)..(1146): n is a, c, g, or t
  misc_feature (1148)..(1150): n is a, c, g, or t
  misc_feature (1159)..(1160): n is a, c, g, or t
taaccttacggctaggtacgaggctgggtgtttaatcggcacgaggaaggagcggagcctcgacatcctgaaggggaaggtcatggcctccatgttctatgaagtgagcacacggaccagcagctcctttgcagcagccatggcccggctgggaggtgctgtgctcagcttctcggaagccacatcgtccgtccagaagggcgaatccctggctgactccgtgcagaccatgagctgctatgccgacgtcgtcgtgctccggcacccccagcctggagcagtggagctggccgccaagcactgccggaggccagtgatcaatgctggggactggggtcggagagcaccccacccaggccctgctggacatcttcaccatccgtgaggagctgggaactgtcaatggcatgacgatcacgatggtgggtgacctgaagcacggacgcacagtacattccctggcctgcctgctcacccagtatcgtgtcagcctgcgctacgtggcacctcccagcctgcgcatgccacccactgtgcgggccttcgtggcctcccgcggcaccaagcaggagaaattcgagagcattgaggaggcgctgcctgacactgatgtgctctacatgactcgaatccagaaggaacgatttggctctacccaggagtacgaagcttgctttggtcagttcatcctcactccccacatcatgacccgggccaagaagaagatggtggtgatgcacccgatgccccgtgtcaacgagataagcgtggaagtggactcggatccccgcgcagcctacttccgccaggctgagaacggcatgtacatccgcatggctctgttagccaccgtgctgggccgtttctagggcctggcttcctcagcctcttctctttaggcccagctgctgggcaaggaattccagtgcctcctacgggggcagcacacttagatattcctggacatccagatagctcacatgtgctgaccacacttcaggctctggactggagctctctggcatgggggtggggcctcagatgctggggcccagtctgccccatcttcattcctgcaccttaaacctgtacagtcatttttctactgacttaataaacagccgagctgtcccccaaaaaannnnngnnnacaaaaaannaaaacatgtcggccgccctcgggccctcgaggaagcttttctagaaccattttcgttttggcggcgccggggccccagcaagggtaaagcggaaccatgggtccaataggcctggtttcccatagggaagaaacccctgggtccaatggaactaaggtggcttttggagaatctcctccaccccaaat

SEQ ID NO: 364341 - DNA, 1018 bp, Homo Sapiens
  misc_feature (518)..(526): n is a, c, g, or t
  misc_feature (699)..(736): n is a, c, g, or t
aaggagcgaggcctgggtggcgaattcggcacgagggtctcctgggttccccttgagtggcagggcctggatggaagctaagagcttggatttctgggaacaaagggccatccccataagattgagcagaaattctggtcctcttccctgaaaaattttccccaccccagccagcatcttctgcttccccttgggttgtgaccagggagtggggagagaggctgaggctctgctcccctggagaccttctcttaggagttgggtgcttcatggaaaatccaagccttaggttcccttctgtctctggcaattagatgtgttcttggtgtcctccatgtcctttttgacttttccctgtgtccattgttagcatgtgcaaaagttccctgtcattacccaacccctgcccgcccacctcatttcagggctgtacacacagtgagtgttcctgttctctctctctttgtttggatgtattgctctgtgtaactcagtgggtctccctctttctggtttgnnnnnnnnnctagattcctgccgtttgttcatcgttgtgcctaaagcatgtcgatgtggcgtcaagtacatcgtccaaatccctgtctcttcagcttctctgatgcttgaactctcacctttgaccttgtgttgacctttgatgctgatgtgtatttttattatgtttgtttctttcttcgnnnnnnnnnnnnnnnnnnnnnnnnnnnnnnnnnnnnnngtgctgccaaattggttttgctagaacgactgctgaaagggaaatatttaaacttgcatttgaatataaaaaaaatctatttttctagaacttcataagataaccacttgattttgtgattccaattctttgtaattgtcttcagagcagccctactagcacataccgcgtggtgtttgtatttctgtgaacacacagccagtccgtttctaggctttgtttctctgtgtgcttagttttaaagacaactttgaagtaaacaatgaaataaaagatgtcact

SEQ ID NO: 364342 - DNA, 419 bp, Homo Sapiens
  misc_feature (12)..(12): n is a, c, g, or t
  misc_feature (24)..(24): n is a, c, g, or t
  misc_feature (33)..(33): n is a, c, g, or t
caaattcccttnccccttaagaanccctgtttntccatttaagcagcacattgaaaggtcatgagaatgcctgagcaggcctggattgcagccacctaggcaccatagtgaaggttataagataagcccatgcaaggcactagagcaagcctaggtaacagccatctgggccacatagtaagagtcatatgtaagtctgagttataaacctgtcatagtatgattaactgcttttgttctgtttctgtatccttgctttcacatcactacactttgtgccactgtaggcttgtttcaagttagcccaccctctttagaagtgtatgtaaaagttaaatgctgtctttgtccttggcccagtctctggatgttaatccactgggtctgagtgcactcaataaaatcctccttttctacct

SEQ ID NO: 364343 - DNA, 507 bp, Homo Sapiens
  misc_feature (84)..(120): n is a, c, g, or t
gctggtacggtcggaagtccgggatatcgtcgaccacgcgtcgcggacgcgtgggtgggcagtcccaggttgttgagacagtcnnnnnnnnnnnnnnnnnnnnnnnnnnnnnnnnnnnnnaacctgatgacttgcacagcatctttcccaccgggaagagcgggcctgctgccttccctcctgcggggtgggggtgggacagaccccagtgggggccagggccacactcagcgcagtgtgggctggacccgcctctgtgctccaggggctggccggtcttcgggggcgccggcttccaccactcgccgccccacccctgcactccgtgacctctgagaacccagctggcccctcgttagccccagggtctgccgtctagagggagcccaccggcctccggacactgtcttcccgctagagccccgtcctcctctgcggggctctccggacccccttccccctcacctccaggcagggacagaataaatgtttgtatggattttagaa

SEQ ID NO: 364344 - DNA, 371 bp, Homo Sapiens
gcaggacctggaaaaggagcgggaggagctccagcagaagaagggcacataccagtatgacctggagcgactgcgtgctgcccagaaacagcttgagagggaacaggagcagctgcgccgggaggcagagcggctcagccagcggcagacagaacgggacctgtgtcaggtaatgggactccctgccgagagcaacctaatgatgatattaattaagaccccctgtgtattaagcaaggtaagaaagtgagcagaaatacagagcctgtttttggccagatgctcatgcctgtgatcccagcactttaggaggctgaggtgagagggtagcttgaccagcctgggcaacagagggagactctgtctctcct

SEQ ID NO: 364345 - DNA, 402 bp, Homo Sapiens
ctttcttgacgtgcaaataactcgtataggctaatcaacaggcttataagttaaaagggctaccgctcggccccttggggattccatcccctcctctgtaacttggagatgtttgtttctgctgcagactcagagggttgcgatgaagagtggtgggactgagttgagaagcttatcccttcgctgggtgggaggtttctaattgccccgttctttgggggatccttaagtccagcttccaggtgggggcagcgataggaccaagttctcctagtagtctctgggaagccacttgagggaagctgccggtcatcccatgcacccattggtcttctccagcaggccctgtaggtcgtccatgttccatgccttctgggttcttgggggagaaggaagctgttg

SEQ ID NO: 364346 - DNA, 445 bp, Homo Sapiens
  misc_feature (14)..(14): n is a, c, g, or t
tgagacagagtccngaggccctcagaaattactaatccctccccagcaccccggcagttccacaggctccccgtcccagggggaggactacggcaaaggtgtcatcttctacctcagggacaaagtggtcgtggggattgtgctatggaacatctttaaccgaatgccaatagcaaggaagatcattaaggacggtgagcagcatgaagatctcaatgaagtagccaaactattcaacattcatgaagactgaagccccacagtggaattggcaaacccactgcagcccctgagaggaggtcgaatgggtaaaggagcatttttttattcagcagactttctctgtgtatgagtgtgaatgatcaagtcctttgtgaatattttcaactatgtaggtaaattcttaatgttcacatagtgaaataaattctgattcttctaaatt

SEQ ID NO: 364347 - DNA, 823 bp, Homo Sapiens
gggagtcggcagctcactatcctccactagtcccaggtttgaccgtttctcaaaccgtgccttcccatttatgctgcatccgcgccctgaatctgaaattggtcgtcctgccacgccgcctcaccgcggtataaggtcgtcccatcctgaatggccggtgcgcagactcaattgcgactttgaggctgtcagccgccacccagaggtgttaaagctccagcacttcgagcctgcctcgtgggaaagtcttaggctgagtctgtaggtgtctgcagttaagaagccagcggtctgcatatgattgctcaggggtggtggctgggtccaacagcattcactacaggcctgccttgaataccacctagcgcagtgctccgcatatcacaggggctggaaaacccaacaatttcactttcctaagacaacttgctaaaagtcacctaaagacagtctggttactgccaaagatatgctttcaaataagatttggataaagaacggaggtcagatgcccttttttcagcaatgggagtgatgttctagaccagtagaatgtacccatcctaagtgaattcatcaccagcaacaatttccagaaacttgctgacctccagattgcagcttcattagtgtgagtttaaagccaactagatgccattctcagattccacgcatatggccaagggtccaggaaataagaagaaacagggttgaggggttggtgttatggggcatttacttgaattttctatgctataattgtctcatctttaaaacggtgataataataaaattgtcagttattaaataaattaacccagtg

SEQ ID NO: 364348 - DNA, 500 bp, Homo Sapiens
  misc_feature (100)..(108): n is a, c, g, or t
  misc_feature (270)..(300): n is a, c, g, or t
aatttaaaaaaatatctttaattaaagaagacttaatttaaggcatcatactgacatctactggcttggtactaaactgtaaatttgacatacactgcannnnnnnnnaaaccctcaaaattaaaaggaatatagatgctattctgggaaagtagaaaaattaattgaaagcagtaacaacaacaacaacaaagagccagcaacaataaacccagggaggagggcatctgatttccacagttgccacattattttaaatgtacagttttnnnnnnnnnnnnnnnnnnnnnnnnnnnnnnncaggaaagtatggccagtacatagaaaaagcaagcagtttaatagaaactatccatgaagaagcccagacattggacttactagataatgaatttaaatcagctattataaacaggttcaaagaactatagcaaaatatgcctagatatctctagtaaaatggagaatatcaatatattatttttttagagaaccaaata

SEQ ID NO: 364349 - DNA, 549 bp, Homo Sapiens
  misc_feature (452)..(460): n is a, c, g, or t
gtgtttaatgacaatgtggtgtgtgtacacaactgaatattattcagctatgaaaacgaaggaaatcctgtcatgtgtgacaacgtggatgaacccaaagtcattatgttaagtgaaacgacccaggcacagaaagacagatactgcatgtcactcatatgtggatctaaaactgtcacaactcacagaaacagaataggacagtggttgccaggggctgggggaatgcagactgtggcgatgctgattaaaggtgtaacttcccgttacaaggtgaagttctgaaggtctgataaacagcatggtggctagagttaatgttatacagcatggtggccagagttaacattatacagcatggtggctacagttaaaatcatacagtatggtggctatcattaatataacttgaaatttgcgaagagagtagaccttaggtgtctgtatctccnnnnnnnnnggataattgtatgaggtgatagatgtgtattaagttgattgtgtcatcagttcacaaaataaatcatcacgctgtacaccttaaaaaaa

SEQ ID NO: 364350 - DNA, 373 bp, Homo Sapiens
gggtgaggggaccctactctgttatcccaagtgctcttattctggtgagaagaaccttacttccataatttgggaaggaatggaagatggacaccaccggacaccaccagacactaggatgggatggatggttttttgggggatgggctaggggaaataaggcttgctgtttgttctcctggggcgctccctccaacttttgcagattcttgcaacctcctcctgagccgggattgtccaattactaaaatgtaaataatcacgtattgtggggaggggagttccaagtgtgccctcctctcttctcctgcctggattatttaaaaagccatgtgtggaaacccactatttaataaaagtaatagaatcagaa

SEQ ID NO: 364351 - DNA, 550 bp, Homo Sapiens
cagccatggctttgctgcaatactctgggccattatcggttttggttttttctgggattcccataactgcaaagcaaaaaaaaggttttttaacatgagctgtagcttcccctgtttgatatgtggcccagataaaatgtgaataaatatctactgaaacatgaacaaaggacaattttccaaaagtgggaatgtgtgttatgtccatctgacagatggaatttggagatagacctctagggttaactcctgctccctgatgtggcagatgcaggacttcaccggcagaaaagtgttttacaatctccttaacctgcttccaggataagccgtatctttttctgaggcctgcagcattaagatgggttaagcaatggaacgtttgtgcatcggcaaaagctgcagaaaccagtgcatccgccctttgattaagttaaaaggaccagggaggttagtatgtgctctaatatgagtaatatagaaaggggaatgtctttgttgtactgcttgttgtaaagaatgaaataaaagattaagttgttcatcaaaa

SEQ ID NO: 364352 - DNA, 918 bp, Homo Sapiens
cagaatcgtgctaagtttataataaataattcacatacaacataggttaaattatcaaagaaattaaactgacatctttataccttttgcagatttaacacatttctaatccaccacatacggatagcagtaggtatatttcttgacatcattcagtctatttcaaaaatagatttgattgtttagaggcataatttataaagcaagataaccaaattaaacaacagaattttaactaatattggctttttgggatttcttaagaaaagattcacaagcattgctcagctactggagaataattaaatctcttctttactcaggcacttttaagtgcagtaacctcaggcttcattttaaagtactggttaacaacgaacaattgcatacccaaggaaatcaaactcaatagtggagtatttggcttgaatcaaagcccacaatccccaaaagaaatgagaagccaatgcaaactgattgacttgaatgaagagtatttctacctccttttcagtaacttcagtcccaaagcccttgatattctttgtaggcttcaaggtaagcacgcagccactgactctgtagttctctatctggatacagactatagtctacatcactgcacaccatgcaaattcattgacaatgatttccaatatcatatgccaggtagttgtatccagaatattcataatcaaatgaactgtacatcaccttgtttctcattgtagattatattcttacacaataggtcattcatggcaaagcacaacaggtgagcccaggttggaaagaatctccttcatccaagtcatctcttcctggagaatctgaagagcttgggatattcacttaggaacctattagtcaatgtcttcatctgcaaatcctgtggggataagagaagaaatacttccc

SEQ ID NO: 364353 - DNA, 631 bp, Homo Sapiens
gctcatgggtgtgcaccacaactctactgtaccttcaataatggactatgctatgaatttatacaaggagaagcactggatccaaagcatgtctgcaacccagccattttcaggctaatagctcgtcagcttgctaaaatccatgctattcatgcacacaatggctggatccccaaatctaatctttggctaaagatgggaaagtatttctctctcattcccacaggatttgcagatgaagacattaataaaaggttcctaagtgatatcccaagctctcagattctccagggaagagatgacttggatgaaggagattctttccaacctggggctcacctgttgtgctttgccataatgacctattgtgtaagaatataatctacaatgaggaaacaaggtgatgtacagttccattgaattatggaatattcctgggataccaactacctgggcatatgaatattgggaaaatcattttcaatggaaattttgcaagggttgtgaaatgtgaatgtaaaaaccaattagttctgggttatccccggaataaaaaggaaaccttacctaaaattcccaatttgggccttgcgcgtgggccctttaccccttttggaaaaagcccctgtcc

SEQ ID NO: 364354 - DNA, 1660 bp, Homo Sapiens
  misc_feature (772)..(772): n is a, c, g, or t
  misc_feature (1053)..(1053): n is a, c, g, or t
  misc_feature (1079)..(1079): n is a, c, g, or t
  misc_feature (1096)..(1096): n is a, c, g, or t
  misc_feature (1099)..(1099): n is a, c, g, or t
  misc_feature (1124)..(1124): n is a, c, g, or t
  misc_feature (1297)..(1297): n is a, c, g, or t
  misc_feature (1331)..(1331): n is a, c, g, or t
  misc_feature (1442)..(1442): n is a, c, g, or t
  misc_feature (1467)..(1467): n is a, c, g, or t
agcggccagcgtcaggccagccccggcatgctctgcggccgcccgcggtccagctccgacaacaggaattttctccgagagcgggccgggctcagttcagctgctgtccagacccggatcggcaacagtgccgcctccagacgttctcctgccgctcgcccgcccgtcccagcgcccccagccctcccgcgagggcgccccgggacggaaggatccaccagtctgtcggcgcccgccgttctcgtggtcgccgtcgccgtcgtcgtggtggtagtctccgccgtcgcctgggccatggccaattacatccacgtccctcccggctccccggaggtgcccaagctgaacgtcaccgttcaggatcaggaggagcatcgctgccgggagggggccctgagcctcctgcaacacctgcggcctcactgggacccccaggaggtgaccctgcagctcttcacagatggaatcacaaataaacttattggctgttacgtgggaaacaccatggaggatgtagtcctggtgagaatttatggcaataagactgagttattactcgatcgagatgaggattgaaagagcttctccagtgttacaggctccagggctgagcaccaccactctaaatgttacgttctatacatgatactatcgctattgccatctaataccaaggaaacatctaagtgcgattcaacacgaaatagactacccaatgcaatgtcgctatttcatgtaagcgcgacacagcctacaaccctgggttatcaanctcctcgaaagaatattgggccatagaactacgtcatactctctctaacacaagcatcaccaccaccaatttggagataaaatataaatcacacacatgtgcgtttactggactacacactttaccgtatcaccattctcctaaagaactaacgtcgattaactgctaacgcccgagaccctcatacatagacacatgtaacggcgatatatatgagacgtctcaaccgccacataggcgaactatatccgtacgcgcacatgcacgtcgctcaatcatancatcagtattccattatagagtactncacccgagactgtgtantanatcagcacatcttatgacataaagnaatccactgcttaggtctcccctcaccacacctgtcatcgctgcattctccagtttatgtaatacgtattcatgattattgcatgatcatatgagagacatacactatcattaatctgtagccgtacaacctacaactacagtgtagggtcctattaagagcagaattcaacncaacatgctctacgtgatacgatatacatctgcntgctacaacggatatcgatcgtatcatatactagtagagagacatagatagtcacgaaaatgactcaattactataaagctaataacgatgaagtaggatattaatgctanagaccaatagagagctagtatatcngaatacgttgtccatcgtggcagctgattctattagctcgctcgctgtgtgctgcgcactacgccgatgtataaagttacacgatatcgcctgcactcatatatactatagcatcaatgctatggcacagcttgacacatacgacatcctaactatacttgatctcaattcgtcgcgcaatcacatgataccg

SEQ ID NO: 364355 - DNA, 522 bp, Homo Sapiens
aagagctgctcccacaggagagggagagattccagctcactgcgcagcctgggaggaggcgtggatcctggcacgctgagcctcaggcaccagcctccctgtgctcgacagcaaagtcttgactccttcctgctgagcactgtgctaccttcactgctccaaagccagactaacagctctccaagcccttggggtgactcggcttccaggagctgttggagaaatgaggatgtctgtccctgtctgcctgggcaggccagattcctccccagcagccgggtctctccagaccctgattcggtgcctttctgtttaccagctacttcaatcccaaagtttgaatctgcagataccttactcccagccactttgccttcttactgtgttgtgtgtttttcctggtgcttcaagagcgtgtgcagggcaagtgccgtcactgggaactgcaccagatgctcagacttggttgtcttatgtttaccaataaataaaagtagactttttctatttttatttgctgct

SEQ ID NO: 364356 - DNA, 489 bp, Homo Sapiens
ttttttttgatgcttgcagagcaaccccaataacttgatcttcaagacgggaattacttctgattacactctgagaatatctgtcatctgcctttgacaccttataagttgattcttgagcattaatttctccatcagatagcctttgggttgatgactcaagagatgcttgtggctgcaacacctgtaactcttgcattggaaaaccatcttcttgctttgaagatggatacacatctgagtcaagctttctttcagcataagactttgggtcaggggaagttatgttattttgtaatgtctgacaatgagtagaggatgcaaaagatgatgactggacagcaggcaaaaacttctgggactggggagatgatgactcttgagtctgaacattttgggaagaatgcatagaaatataattctgggtcgggctagagtctggcaaattctgagcccgagaggcagaagaataagaaagagaaggggctg

SEQ ID NO: 364357 - DNA, 1973 bp, Homo Sapiens
  misc_feature (589)..(614): n is a, c, g, or t
  misc_feature (1710)..(1838): n is a, c, g, or t
  misc_feature (1848)..(1860): n is a, c, g, or t
gggagacagaagctgtctatcgggctccagcggtcatgtccggcagaggaaagggcggaaaaggcttaggcaaagggggcgctaagcgccaccgcaaggtcttgagagacaacattcagggcatcaccaagcctgccattcggcgtctagctcggcgtggcggcgttaagcggatctctggcctcatttacgaggagacccgcggtgtgctgaaggtgttcctggagaatgtgattcgggacgcagtcacctacaccgagcacgccaagcgcaagaccgtcacagccatggatgtggtgtacgcgctcaagcgccaggggcgcaccctgtacggcttcggaggctaggccgccgctccagctttgcacgtttcgatcccaaaggccctttttagggccgaccacttgctcatctgaggagttggacacttgactgcgtaaagtgcaacagtaacgatgttggaaggtaactttggcagtggggcgacaatcggatctgaagttaacggaaagctaccgcggcccatagcgctcacagccgtaaagacttaagtcgttgaccgaaagcggctttttcacttacctgggcnnnnnnnnnnnnnnnnnnnnnnnnnnaaagcctttatcggtatgaaaggttgaatgctctaggtttgagcactgctttctcggcttgctcttctggtgcagtataggcacacctagagggccacgtcagtctttgcgatcaccaaatctggttctgagaaataggcactggcaatttacacatgccttgctgtgtaatctcactatatttgctcaggcaaagtgggagaagcagccttaggttttcattctagagatgccggctttcccacctgatcggcttagagttcacgattgactgttttgggcttcatttcaccctctacataacaagcgggtggactagatgccttagcaagggtccgtgttgtgtggtgtctccagccacgcactcagctcaatcttagcacagttaaaaaatgcctttctagcaagttatctgcccagtgcctgaaaagtatcatttcttgtgttcaataaaaagcctcctaatttaatcaaggacctatgagataactgtcttttagttgtggcattgcaaggatacaaatgcagagatattttaaagtgatccttctgtaagagtgaaccaacgatatgatctgaaagcaacttcacaggtaattcaggcttatgattttactgtgtatgtatttgggagaagaaattctgtcagctcccaaaggataaaccagcagttgctttattggtcttcagatgtggctgcaaacacttgagactgaactaagcttaaaacacggtacttagcaatcgggttgccagcaaagcactggatgcaagccttgccttccagaagcttaccagtcgggttgccagcaaagcagtggatgcaagacttgccctccaggagcttaccatcacaacgaagaagacaaataaatgcataatatatagacgacataaatccatactgtacacatttaagaataaacagtccagtagtaagaggcagtacatattcaatctgctgagaaatgtagacaataactactataagaatcctaatgctacagaagtcactggctgctgggaaaccggggaaaacttggctatggacgtgggggcttgtgtcggactctgaataaagagcagaatgattggnnnnnnnnnnnnnnnnnnnnnnnnnnnnnnnnnnnnnnnnnnnnnnnnnnnnnnnnnnnnnnnnnnnnnnnnnnnnnnnnnnnnnnnnnnnnnnnnnnnnnnnnnnnnnnnnnnnnnnnnnnnnnnnnncctttggggnnnnnnnnnnnnntgaaaaattttttaaaacctttttttgggcgcggggccccaaaaggaaggggaaatgggccaaactggttcccagaaaaaactgggccctaaaccacggcttggattcccccc

SEQ ID NO: 364358 - DNA, 535 bp, Homo Sapiens
cagtaggccccagcgcaacgtacattgccctgaaacacgtggccccttatggtctggcctgtgccggcctctccagcctcatgggtccccagcacggctcctccaccccacacacgagaactacaggctccactcacaccagggaatacgcgaggtggcgagtcacagggttgctgctttcaaatcagaaccactgagttattggccatgggaggagcagagatctttatgaaaccctagaacaggtgtagtcttgcaaagaatgatttattattgtacccttattagggctactatctctgatttccacgtttaaaaaggcttccagcttgctggaagtgaaagcgtaagaaagcgcaggaagaggcagagtcagattttggaaattaaaatcccaaggctgtgacaattgcaattctaggtatatgccctagagaaattaatgaatatgtgcagagagacacatgcaagaagttcattacagttttgtttctaagagtgaaaaaaattgaaaataaaatgacaatcaacggaa

SEQ ID NO: 364359 - DNA, 160 bp, Homo Sapiens
gctgtgaagttaccgtcggtggcggccccggggccacctccgctgtcacctcctccaccggcgcccgctacattcaaccggcccaagccgtcggggctggccacgtcctcgtcctcgtcctcgtccttaaagtgcttctcctggccgttgcgccgggcgt

SEQ ID NO: 364360 - DNA, 312 bp, Homo Sapiens
aaacctgtgattcatatgatttgagatccttttacaaattctatcacatgatgcgcaggggagagctgcctgccacagagctgagcacgagagtctagcacctgcgctgcctcctaggttggggttccaccctgccccgaaggcttttgtgactctgcgtgtcaaaaggggtggcactcagaggcgccacaaggaagcagcaggactatgcattgcagagtatttctcctgtgtgcccctaagcacttagcatgtatacagagtaggtccttggaaagttcttgttgaataaatgaccaactaataccttcc

SEQ ID NO: 364361 - DNA, 523 bp, Homo Sapiens
gtttgcgcgtgcgcttcccgcccgggaccgcccagaggtcccggactaggggcggtctaggggccgctctgcctcccgccccctagtggttgtggccgctctgtcaccacggctcccggggcctctgtcggctccactttggttgagacgtctccacagcccaacaacggcggcgatctgaggagaggcaggagaaaatacggcgcgctcggcatcgtccttctgaccggggactccagcatctcagtcatcgcgtcaccaagccccagggactatggaaagactacatttctcaaccttcctagtagatgtgatgtcaccagtcggaattgggcagaagaatgtatcacttcagtccaaggcaattaagtcaacagcaatttatttacggattacctactcagttggtgccaagcctggttctagatgctgaagacagagcctagatcaagattgacttggtcctggctttcctgaagttcccagcctggtagaagagacataataaacaactagcaaacaa

SEQ ID NO: 364362 - DNA, 442 bp, Homo Sapiens
aatttaacagacccataactatattccctggtggaagcagttcctcttggtcactagagatttccaaacccacaaaacctaaggtttcttggttaaaggccatgtttgtgggatatgctgagatgaatatgctgtggtttgaatgtgtcccccaaagttcatatgttggaaacttgattcccattgcaacagtgttgagatctggggcccaatgagaggtgattaggccatgagggcggagtgaatggattaatgcagttatctcaagagtgggtttgttatgaagggggtgtttggtcctcttttctctcttgcccatgtgattccttccaccatgtttatgatgcaacaagaaggtcctcaccagatgctggttccttgatcttgtattttgcagcctccaaaatcgtgagccaaataaatttctattcattataaatta

SEQ ID NO: 364363 - DNA, 468 bp, Homo Sapiens
  misc_feature (17)..(17): n is a, c, g, or t
aacccccaaaactaaancccccccggtggaaaacagttcccctcctggtccacctagaagatttcccccaaacccccacaaaaaccctaaggtttccctgggttaaaaggccccatgtttgtggggaataatgcctgaagatgaaatatgcctgtggtttgaaatgtgtcccccccaaagttccatatgttggaaacttgattccccattgcaacagtgttgagatctggggcccaatgagaggtgattaggccatgagggcggagtgaatggattaatgcagttatctcaagagtgggtttgttatgaagggggtgtttggtcctcttttctctcttgcccatgtgattccttccaccatgtttatgatgcaacaagaaggtcctcaccagatgctggttccttgatcttgtattttgcagcctccaaaatcgtgagccaaataaatttctattcattataaattag

SEQ ID NO: 364364 - DNA, 1006 bp, Homo Sapiens
gcctcaagaggcggatattaacctcccaggacggaagttccgtttgccttcaaactctcggggaagcaactcggcagcggaccaatgatggcggcgccctgtgagggacaagcgtttgccgtaggggttgaaaagaattggggtgcagtagttcgctccccagaagggaccccccagaaaatccggcagctgatagatgaggggattgccccggaagagggaggcgtggacgcgaaggacacgtctgccacatcccagtcagttaatggatcaccccaagcggaacaaccttcattggaatctacaagcaaagaagccttctttagcagagtggaaacattttcttctttgaaatgggcaggtaagccctttgagctgtctccactcgtctgtgcaaaatatggctgggtcacagtggaatgtgatatgctcaagtgctctagctgtcaagcttttctctgtgccagtttacaaccagcttttgactttgacagatataagcaacgatgtgctgagctgaagaaagccttgtgtactgcccatgagaagttctgtttctggccagacagcccatccccagaccgatttgggatgttgcccctggatgagcctgctattcttgttagtgaattcctagatcgttttcaaagcctttgtcacttggacctccagcttccttccctaaggccggaggacttgaaaactatgtgcttgacagaagacaagatcagtcttctcctacacttgccttgaagatgaacttgatcaccgaactgatgagagaaaaactacaatcaaattaggctcagacatccaagtcccacgtcactgcctgtattctctctgtgggtggctggggcgtgttagttccctctttgggaatccatgcaggtctcccctgataacatgttccgcaatgtatgagggaaggtggggcctctgggggcttccaccagattgaatcgccatgactgactggatgctccttgggctgaccagttcccta

SEQ ID NO: 364365 - DNA, 2366 bp, Homo Sapiens
gggggaccaagatggcggcgccctgtgagggacaagcgtttgccgtaggggttgaaaagaattggggtgcagtagttcgctccccagaagggaccccccagaaaatccggcagctgatagatgaggggattgccccggaagagggaggcgtagacgcgaaggacacgtctgccacatcccagtcagttaatggatcaccccaagcggaacaaccttcattggaatctacaagcaaagaagccttctttagcagagtggaaacattttcttctttgaaatgggcaggtaagccctttgagctgtctccactcgtctgtgcaaaatatggctgggtcacagtggaatgtgatatgctcaagtgctctagctgtcaagcttttctctgtgccagtttacaaccagcttttgactttgacagataccgatttgggatgttgcccctggatgagcctgctattcttgttagtgaattcctagatcgttttcaaagcctttgtcacttggacctccagcttccttccctaaggccggaggacttgaaaactatgtgcttgacagaagacaagatcagtcttctcctacacttgcttgaagatgaacttgatcaccgaactgatgagagaaaaacaacaatcaaattaggctcagacatccaagtccacgtcactgcctgtattctctctgtgtgtggctgggcgtgtagttcctctttggaatccatgcagctctccctgatagcatgttcgcaatgtatgaggaaggtggggctctggggcttccagcagattgaatcgtccatgactgacctggatgcatcctttggcctgaccagctccccaatcccaggccttgaggggcgaccagagcgcttacctctggtgcctgaatctcctcggaggatgatgacccggagccaggatgccactttctccccaggctcagagcaggctgaaaagagccctggtcccattgtctctcgaactcggagctgggactcttccagtcctgttgaccatcctgagccagaggctgctagccccaccaccagaactcgcccagtgacccgaagcatgggaacaggagacacccctggcctggaggtaccatctagccctctgcggaaagccaagcgagctcgcctctgctcctccagcagtttcggacacatcttcccgaagcttctttgatcccacctctcagcatagagactggtgcccttgggtgaatatcacacttggcaaagaaagcagggagaatggtggaactgaaccagatgccagcgccccagcagagccaggctggaaagcagtgctgaccatcctcttggcgcacaaacagtctagccagccagctgaaacggactccatgagtctctctgagaaatcaaggaaagtattccgaatatttcggcagtgggaatctctgtgctcatgctgaagatactccagcgccttcctggagatagctggaatgagagtgactttttgaaaaattaaggctgagttcctttcggtcagctgacactaagtttttcctgttctgggttaatcataaggagccccctgccatagcaaaggcagtgagtgtcaactatctgcatctggctgagagagacccgtttcctttcagggatgtggacagggtaagggcagcaagcatggttctgttaaaggagtgtggggttaacagactagaaggaagactaaggacctgaccacccatttcagcatcttcaatgtggagcagtgttctgaggactcttctatcctaggactatgacagtgtgtattaataaaatatttgctaagaaaaaaactaacccacaactacaattaatgggccgtgtcgggccgccctcgggcccttcgaaaaagtttttcctagaccaattccgatttgggcgcccccggccccccggtagggtaaaggggaaacctggggcccaatagcccggttttcccctaggggagaaatcccttgggcccacttgaacctaaagggcctttgggggaattccctaccaccaatttacaaaaacaaccgcccccgggagggggcaaacccccggaggcgggtttcctggaaaccaaaacatcccagggaaggtgggagctctcctggaagagggccattttaacggggggagtccttacccggcgccaggggaagtgccacaagcggagagcttccgaaataattcaacaattagggcccccgccgccaacgtgcccagttgctattcggaagggaacccgggcaccgcaagattgtcaatggaaaagaccaattctggggcgcgaaacagtggggaagaccctcttcccaaataagcgggggattgggtccacaactcctggaagcccccc

SEQ ID NO: 364366 - DNA, 683 bp, Homo Sapiens
gggggcttgagagctgggttctattttccctcctcaaactgactttgcagccacggagaggcaggggaaatggaaggtgatgcagtcgaagccattgtggaggagtccgaaacttttattaaaggaaaggagagaaagacttaccagagacgccgggaagggggccaggaagaagatgcctgccacttaccccagaaccagacggatgggggtgaggtggtccaggatgtcaacagcagtgtacagatggtgatgatggaacagctggaccccacccttcttcagatgaagactgaagtaatggagggcacagtggctccagaagcagaggctgctgtggacgatacccagattataactttacaggttgtaaatatggaggaacagcccataaacataggagaacttcagcttgttcaagtacctgttcctgtgactgtacctgttgctaccacttcagtagaagaacttcagggggcttatgaaaatgaagtgtctaaagagggccttgcggaaagtgaacccatgatatgccacaccctacctttgcctgaagggtttcaggtggttaaagtgggggccaatggagaggtggagacactagaacaaggggaacttccaccccaggaagatcctagttggcaaaaagacccagactatcagccaccagccaaaaagaccaa

SEQ ID NO: 364367 - DNA, 570 bp, Homo Sapiens
  misc_feature (463)..(472): n is a, c, g, or t
cactgcctcgtcgcgggctgctcgcacatcaggcggccgcagaggcggtgggcgctgtgcctctgccctgttcctggcgcctttgccctgctcccgacggagaggagcgggctcgcgggagcgcccagcggctcacagcctgctcgcgcctcctcgcaccttccccgtggcccgcagagcccgtccgcggcgacgcgcacggccggggctggagtcccggggtggggatcgctgcgcccggccagccccctccgcgatttccaaagaaaaccgaacgcccgctagggccacgctcccgcggggaaaacctgtagagaagaggtcgctgtcactcaaggtgtgtgcgcgtcgccgaccggggcgagctcagcccctggcgcgccgtcgtcagcctgcatttcaccggcccctgctgcgccagcccaaaggaatagcagcagttctttgtttgatattaagaagnnnnnnnnnntctcttctaaagacagtatttcaaacagtctaaaacactgcaaggctagtccctcgtgccgaattcaccacgcagcctcgtacctaccgtattggtct

SEQ ID NO: 364368 - DNA, 510 bp, Homo Sapiens
ctggtcctttgcccttgtgaaaaagcagaaggtccattgagctggttaacactccagctgtctgtggtggccaagctgaaagagctttgtaacactggggttgcaggcacccacctctagacgctaccgcagagccagagcccaaagccctcaccccggcctctgcacttgcccatctgcgtgctccccctctcgcaaggggtttctgcagagggggctactgaacaggtgagccacacccctgtcgcacgccctgcaaggggaatcagggaactcttccgtttcattgctttgaccacatcctataaatcttgttctccttgtctttcagctccaatttgtttatacattcagtttttacttttgactttactcatgatttattatagaaagatgtttaacaattttcaagcaaatggaataatttttgctcctctttcgttgttaatttattattcattggagttagaaaattgttgctaaaataaattctgcattttgaaatttaaa

SEQ ID NO: 364369 - DNA, 685 bp, Homo Sapiens
  misc_feature (593)..(593): n is a, c, g, or t
tcccgggatcttcccctaggcgcgtggtacccgaggccgggccggagccgcaggccagccgcgattccttcgggcgatgctgggggctttccggtcggggccgcagcgcttccggagccgcgggcaggtgcaagcggtcttctctgtcttctttatggccagtaaaattctccagaagagatttatggcagcctcactcccagtagtttctgcatttagtgagataaggaatggattttcttctgtgtattgctgacacgaacaggagacggaaatactgagtagaagagggcggttccctggctaaggccccaccctcaagcctggatacccgcggccctaaatgagaagaggcgtttctgtttggggcccaaaaagttgccttttgacccaccacgccccctatcctgcccccatataaaccccaaaccccaacctccagagcataccagcaggtgaggagatacgaggcaagccgactgacggcaaaacgacgtagcagagaaagagagaagaggagggacgtctggacaccgagagatgttttgggctcggggcagtcagagcggagtccagcccctgggcggcccaantccaggggaagatcaccttcccacttcatccatccccacccttccagctccccatccatcctgctgaaagccatttccaccactcaataaaa

SEQ ID NO: 364370 - DNA, 664 bp, Homo Sapiens
agcactgggagggtccatagtgtcggggaatttgtgagaaatcattcttgcacttggaaaaaccattgtgtgggaaggaaagaatgataatgaagtgggcagatgtaaagagaccggcaaagttcacgtgactgtggatctcaagaattaccggccaactgaagtggactttctgcagggcgactgcaccaaagcgaaacagaagctgaactggaagccccgggtcgctttcgatgagctggtgagggagatggtgcacgccgacgtggagctcatgaggacaaaccccaatgcctgagcagcgcctcggagcccggcccgccctccggctacaattccccgcagagtctccggtgcagacgcgctgcggggatggggagcggcgtgccaatctgcgggtcccctgcggcccctgctgccgctgcgctgtcccggccgcaagagcggggccgccccgccgaggtttgtagcagccgggatgtgaccctccagggtttgggtcgctttgcgtttgtcgaagcctcctctgaatggctttgtgaaatcaagatgttttaatcacattcactttacttgaaattatgttgttacacaacaaattgtggggccttcaaattgtttttctcttttcatattaaaaatggtctttctgtgaactagcaaa

SEQ ID NO: 364371 - DNA, 410 bp, Homo Sapiens
caaggaagaatgatccggccccaaataagaaaccctgggctggtcagcaacaacccctttgttttgagaagagaggaggaaagaataaaagaagtggggtgaagttttggtttggtagaggaaacttgaagacattttccctggaaaggaagagaggaagaggagggagatgtctgtaaggacgagcaaaccgggtgacagctgatttcctcatattgaagtaatgaaaactgcaggagtggaatgacagaacctttggtcatacttgagggcgtgaagctcaaatgaggaggaaggaaaggatccaggggttagaaagagcccctgtgtttcttgacatggaagtggcctaagaccttaatgagtcctagttataataaattcctaataaaaacccagtttatccctgc

SEQ ID NO: 364372 - DNA, 329 bp, Homo Sapiens
agagatttaaatgtaagatcggaaactatgaaaatagtaggaaaaaaacataggagaaaagctctgtgacattggtctagacaaggcttaaaccttgaaagcacagagaacaaaagcaactatagacacatggcattaaattaaactaaaaagcttctgcacagcaaaggaaacaatcaagagagcccaacaacctacagaatgggagaatatatttgcaacctatacatctgataaggggttaatatataaagaactcaaacaactcagcagcaacaaaccaaataacccaattaaaaactgggcaggccgggcatggtggctcacac

SEQ ID NO: 364373 - DNA, 439 bp, Homo Sapiens
  misc_feature (28)..(28): n is a, c, g, or t
  misc_feature (47)..(47): n is a, c, g, or t
aaccttcctaaactaaactaagcctccnggaatgaaggtggctggcnacccaggccccgaaatggatcccccaggagccccagcttcccaaacccccaacatcgaatcaaacatctcccatcccccaagtgcagtaacacacaaaaaccaaacactctgccccgggaaaggccctggtgcgattcctcagtaggactcacacccaccctacctagaagtactgggctggccctgggtactgcatccgtgtgttttgataagggggtgatgtggccacgcccttatctagatttcactttgtatccactgggcacagatattctagagaacttatctttcactcttgtaaaagccacatatccacatctctttcattttctcagtgtgttatgcagcaatttattaaagtatttattgtctaataaatactgccaagtgg

SEQ ID NO: 364374 - DNA, 537 bp, Homo Sapiens
  misc_feature (30)..(30): n is a, c, g, or t
  misc_feature (75)..(75): n is a, c, g, or t
caattgcttcccaaaaaaaaggctacgaanacctggtgcttaggacctcctgggagcaagctggtctggaaaggncgctaagcctggaagagaaggaagcaatggcaagtcaccttcaccttctaactaactagcctccggatgaggtggctgcaaccaggcccgaatgatccccaggagcccagcttccaaaccccaacatcgaatcaaacatctccatccccaagtgcagtaacacacaaaaaccaaacactctgccctgggaaaggcctggtgcgattctcagtaggactcacacccaccctacctagaagtactgggctggccctgggtactgcatccgtgtgttttgataagggggtgatgtggccacgcccttatcctagatttcactttgtatccactgggcacagatattctagagaacttatctttcactcttgtaaaagccacatatccacatctctttcatttttctcagtgtgttatgcagcaatttattaaagtatttattgtctaataaatactgccaagtgg

SEQ ID NO: 364375 - DNA, 493 bp, Homo Sapiens
actgcggggttcttgagaactttcacagctttcctcatcactgttgtcttgacagttattctgtccatcgcagatgaagctcttgtcaatacagaggccgttcttgcagtggtagcgggcggtggagcaaagcagagggtttgctgtgcagttctcttcatcgctgccatcgggacagtcctcaaacccattgcaccggaagcgaccaatgatgcaatggatgccgctggcacaggggaagaaggtcgggccacatttcgacttagccttggggcactccttctcatcactcttgtcgaagcagtcaggcagcccgtcacactgccaggcgcccgggatgcaccgtccattgctgcacatgaagttgcctggtatgttgcactcattggtgaagttgttcccggggagcagctggctctccgcggcgctgctcagcagcaggcacagcggccccagcagccacatggcgcggccgccgctcccgctgcccggc

SEQ ID NO: 364376 - DNA, 1208 bp, Homo Sapiens
  misc_feature (1009)..(1009): n is a, c, g, or t
ggtacgtcttggtcctatttatgcctgatcgcctgcctactccagctcatcatccatccctccttaccagccttgtcggatcacccaatgggaaaggcagcctacctgtcacttcagcactgcctgcacttttggaaaatggaaagacaaatggggacccagattgtgaagcctctgctcctgcgctgaccctgagctgcctggaggagcttagtcaggagaccaaggccaggatggaggaagaagcctacagcaagggattccaagaaggtctaaagaagaccaaagaacttcaagacctgaaggaggaggaggaagaacagaagagtgagagtcctgaggaacctgaagaggtagaagaaactgaggaagaggaaaagggcccaagaagcagcaaacttgaagaattggtccatttcttacaagtcatgtatcccaaactgtgtcagcactggcaagtgatctggatgatggctgcagcgatgctggtcttgactgttgtgctggggctctacaattcctataactcttgtgcagagcaggctgatgggccccttggaagatccacttgctcggcagcccagagggactcctggtggagctcaggactccagcatgagcagcctacagagcagtaggaaacctcacacctagccagtgccctgctctgagacactcagactaccaccctttccccaagtataacgtcaggcccaagtgtggacacactgccgcccatcccatcaggtcatgaggaagggttcttttaacactcggcacttctgtgggagctattcctacacagtgacttgatgttcttggaggatcaacaaaactgccctgggaaagcatccagtggatgaagaagtcaccttcaccaaggaactctattggaagggaaggtctcctgcccctagctcaggtggctggggagaactaaaacaccttcactggtggttgggggtaaggagcggggcacgggggaggaggaggtagggggcagtaaaanacttactctcttttttcctctctgtaattggttatcaggaagaatttgcttaatgactaacaccctaagcatcagacctggaatttggagttgcaaagtgactatcttcccatttcccatctcattttcaataacttcagcctcccattctttcctttggaatgagagtttctttttacagaagtaggaaaggcttctc

SEQ ID NO: 364377 - DNA, 525 bp, Homo Sapiens
gcatgtaccctgtgccccagcgatgccactctgtgcatatttactcaggagaaatgaaaacatatgtctccagaaagattggtacataagtgttcttagcagttttcttcacgagagccccaaactggaaacagcccgcacgtccatcaacaggaggatagataaataaataaccatagatccacgcgcaaccgagtactgtttagaaatgaaaaggagcggtcgcctggtgcacaggacagtgggaacaaatctcagaaacgcacgccaggtggaagacaacaggcacgtgtccctgccgtacaacgccattcatgtgaaccactaggagggaacgaggtctgtggtgactgagagcgcgtgcgtggttcggtggggatggcctggtagagggctggtaggaggggtgcctgggggcccggcatgttttgttcctgtctggatcagtggttacgcccagaactccgagcagcctgtgatccctgcgttttactggatgttaaataaagacgaggagcccacttg

SEQ ID NO: 364378 - DNA, 713 bp, Homo Sapiens; identical to SEQ ID NO: 69382

SEQ ID NO: 364379 - DNA, 458 bp, Homo Sapiens
actatgtgatcatctaaaaaagggggagctggcctccaccccatgttccatggattcggaacaagatttcagacatctgcatgagtgacaaactttctgaacacaccaccaccaataatacttatcagcatcataaagtatctcttaaacactgatcttggcagggacggaactcctattcagcagtttttgtggaaagcagtaatgcttgcaaaacgtgtgtgtcattcagcattttaagtggagactatgcatttcatagtatatttgacagattagtactgtgtcctgtgttttgttccagattcttcagtataaataagctctatatcaaaaagttgcctgtctaaatagaaaatgtcttgctgtgttttgtcctatggaaaatactgtaattcaggattatgtttacaattgatccaggtgtttgtttctaacttctgtaatacatacaatgc

SEQ ID NO: 364380 - DNA, 711 bp, Homo Sapiens
  misc_feature (345)..(455): n is a, c, g, or t
  misc_feature (457)..(481): n is a, c, g, or t
  misc_feature (510)..(596): n is a, c, g, or t
caatgggaatagcctctttatttagaagtatgtaagcagtttcatgaatagatctgactttaagcattcattgaggtttttggcaagaatagagtacggtatatgaaggtgtttcctaatctccctgacaccaggaataatctagggctcattagagatgtcaaagatctgttctagtttcttaacctaaaacaagagtgttttagttccattttataggcggggagtctgagccaaacatgttatgtcactttccaagtctccatagcacagaagtcttctgtctccccatcctgactttcccagctcatagggactgtcaaaggcagcagctctggccggctnnnnnnnnnnnnnnnnnnnnnnnnnnnnnnnnnnnnnnnnnnnnnnnnnnnnnnnnnnnnnnnnnnnnnnnnnnnnnnnnnnnnnnnnnnnnnnnnnnnnnnnnnnnnnnncnnnnnnnnnnnnnnnnnnnnnnnnntagccaggcatggggtatgtgcccacggnnnnnnnnnnnnnnnnnnnnnnnnnnnnnnnnnnnnnnnnnnnnnnnnnnnnnnnnnnnnnnnnnnnnnnnnnnnnnnnnnnnnnnnggataatagtgagactctgtcccctaccaaaaaaaagcaaactatatacagatataaagtagcagctctgttgctgatagaaggaacagtaatgaggagcctgcaggtcttattc

SEQ ID NO: 364381 - DNA, 373 bp, Homo Sapiens
  misc_feature (21)..(21): n is a, c, g, or t
ctatgttcgattctgttttgntttgttttgtcctggctttgaggcttgttttgttgtcctgtgtctgtctgaataacctgcgtgtctaaaaccacgtgaaatgtgaatgattattggcaatattaccttgacagaatcatgggactttgagaagagggaggacagaggcctctgtcgcactaacgctctcgtggttgctcgactgttgtatctgtgatacattatccgactaaggactctgggctggcagggccttctgccgggaaagctagaaacactaggttcttcctgtacatacgtgtatatatgtgaacagtgagatggccgtttctgacttgtagagaaattttaataaacctggtttcgtaaaaaa

SEQ ID NO: 364382 - DNA, 913 bp, Homo Sapiens
gtcacggtctaaccagaaagtgggcaggtctcaggtggcctgggagctaggggcctgcccctcggaccctggggcaagaagagcaccctgccgagtgaggtcctacctgcaggcagtcactgccccggccatgggcctctcaaggctggcacgaagccattcagggagagggctccacaacaagctgagggtgcccgactcaaactgtagaaccgggagtggacacccacagacgcccaggctggatgcgtgcgcaggcacactggatctcgtggctctctgggccgctgccaccgcctttgaacgtgtcggggagcaggagccaggccagagcctggcccagaggacagcgagaagcacctgttgatgctggggccactggaggaagctccatccctctactctcagcccacaccaggcggccagctcagagcaccaggcgtggcgcaagcagggtggtcgtgggcagccagtcccgccctgctgcctggactgtgcccagcgggatgtgggcccgagcaggccagagaggccgagggcctggggtctctgcggcagccacagcccgtggtgagtagcagccttagctgtcctggagataccggggcctcgtggagtctaggcaggctggggcactgtggctgtggccgtggccaggtgagaagccccattcgcgcaggaaagactggccacctgggaacccacgcctccacggagggacttgccggccacaggctgtgggctgcccaagaggactgtgcaggcagggctgcctgctgattggcagctccggatcaggcccggtgcctgcagacctggtgctcccctcgggcagggctgggtgccgcagccgcctgctggcttttctggcagctcctctgtatcagaaccaataaagtgcacttgttctcgg

SEQ ID NO: 364383 - DNA, 851 bp, Homo Sapiens
gacaagtgagaaagctttattaaagcacacatacatgtcaggggggtgggaaacaaaagagcaagttacagcccgggatcccaagttatgccttccattacaattgcaatccacaccaaatcaatctttgaaaacattcctccattcggttcatacatacagtagaaaccactgtggctgcccttaatccagtgtgcttataggaaatcagttagcagctgactctgttgaaagggatttcctctctgctatacactccttccacacacaactttgggtagaaacgcttatgagaatagaaaggtcagtttgatcaatgagtaccagaagatgaaacttagctcactagacccttctttgaaaagcctcaacacactacacccatgtaatatgtaggtcaaatttaggaaacaatagcaaaaacaggaactgaaagctcatcaagcaggaagtcagaataacagggagactctgtctacattcccttagagcccttaacagtccccagcctggagaaacactgggccaattgagataacacttggctcttctggttgacacagtgggatgtagaccatgctctgtttgataacacaccccagacgcaaacactaagacagatgtggtacatgaggatgaatatatctcatctttcattcgagaaatgaggagctctctctccaatgactgcagtatcagtttaaaatgcagaaaattcagcatgggctgtgagacactttaccctcagtcactctggtcctctgagatcagctagaagctctcactgggcatcctcgtgatttagtccaaatacattatctaattaaagtgcttttcaaaagcaggtccat

SEQ ID NO: 364384 - DNA, 643 bp, Homo Sapiens
  misc_feature (51)..(51): n is a, c, g, or t
  misc_feature (219)..(219): n is a, c, g, or t
gaagaaagcaaccccaggaagcctggccccgaagactgtgaggtatggccngggccttgctgtgctctggactggacaagaggcaccctgggctctggacacagccagatcttcagccaattgcatctccggcccagggcaggccctttatcttatagcccagtggtgcctctctcctcacctaggaaacaaagccaacaggatctgcaccaaactctntgcctcccggacattggaaggactaaataagatcagagacctcattcctagatggaacgaggaatggtagcgaccacgatcctcccctcccaggatctgcgccacaagggaagatcagaaccttcagctgccagaagcactgtggcggaaatgtaggtccccatccaggctgatctgagcttggctttctggagcacgcaaacctcgatgcactgaactgctgccggacctcaccttgccaggcccactgtgctcacactcacacatcgctccatccactggaggctgcagaggcaagatccaccaagaagatggtcttcctgtccaggatgcccttccctgagagaagtgtatttaatcttaaattcagatgtttgtttgtctacccacttaaaacaccctgttgaataaaaattactcaagg

SEQ ID NO: 364385 - DNA, 905 bp, Homo Sapiens
ggggatgggctctgaggcggcgcagctgctggaggctgccgacttcgcggctcgcaagcaccggcagcagcggcggaaggaccccgaggggaccccctacatcaaccaccccatcggtgtggcacggatcctgacccacgaggcgggaatcactgacattgtggtgttacaggcggccctgctccatgacacggtggaggacacagacaccaccctggatgaggtggagctacactttggggcacaagtgcggcgcctggtggaggaggtaacagatgacaagactctgcccaagctggagagaaagaggctgcaggtggagcaagcgccccacagtagccccggggccaaactggtgaagctggcagacaagctgtacaatctgagggacctgaatcgctgcaccccagagggatggtcagaacatcgagtccaggaatacttcgagtgggcagcgcaggtggtgaaggggcttcagggaacaaaccggcaactggaagaggctctaaagcatctgttcaagcagcgggggctgacaatctgatcagtgcttgaagctatccagaggcacaactccagcctcgttcaggccggacaggattcatacgccatcttttctgtgtctcctgagctccctccatccttcccagatattagaggccaaaaaaagacttgcattttttctcagtctgaaggtctcctgctaactaagctgagccccgcgtggtgggaatcagatgtacccatccatttctgatgcactcaccgcctctccccaagtcttgggtctgtttgctattttgcatggtgggatctctggcccctcagggacttgagattatttaagtactagttcctaacacgttctggaaaataaaaataactctgggttaaggtttaaagaa

SEQ ID NO: 364386 - DNA, 993 bp, Homo Sapiens
ggcacctccatcctgtgccgaattgtcccagacagaccgtcgccattgctcggtcactgtgctttgcaggcctggggcgcagctctccaagcctgtcctgccccgccccaccccactgggcttaggttagcttcgtgccttagtatctcgggcccactgcaggagccaacaccctctgctgtccagggggggtctgtggccctaagattggccggcctctccatgcatctggccagcgtccccttggagacaccttcaccctcaagcgctgcagaagcatgaggtgagggcctgcagcgctctgtaccgtttagggtgttggaccagccgggagcctggcaggcctggcccagcggccagggtgagtgttctcagaccccgggcagctggtggttctccagggccaggtaccccttttgtgtgtgcgacctctgactaggtccctgtgggaatggggcagatggcggccatcaccactgggtcccagggcagaagcttacataccggccttgagcagcccgaccttccaccgctgcctggatcccaagcctcagccgacccaggggaccttggtggcaacggtgtgactgacagcaccacccctagcctttgcatgcccaggggtcgagagccagtatccggcccagacaatgccacccgccatggaagaaaagctgaccctgcccacctgctgcagacccgggccccgggccgaggttgctttctgtgacgaccgcctggtgacgctggacaccaggagggttatggcactgccctcccctcctggagcccctggcactgaccacctggacttgacctgactcctggtcactggccaaacacccatcctcaccccagccaccccgggccctggctggtgccgtgtgacacctgtagcccacctgtgtgtctttgctccgcccacccctgcgtggcgccggtcaggcgcaaacctggcgccagtgtctaaatgtccatcattctcagaccaac

SEQ ID NO: 364387 - DNA, 450 bp, Homo Sapiens
gagcgtcgtccgggatggagggtgctgaactagggaagtgctgctgctgcgagaccccgttacctccggccctccaggatctgggctgcgatcaactccttttcggggctctcccacccctcgaggcttgccagggtgggtctccagaggccgacgaataaccaggtggagctgggggcctccagctcggatccgctccacggcctgggcatgggtgaggccctgcgttgactctccgttgatgtggagcacgaggtccccgacctccaaacgaccacagcgctgtgctgggccatccttcagcagcccgcgcacggccagcggagtgtccccagctacatcccggcccccacctaaggtgaggccaaagcctgcgtaaccgcgaaccagctccacagagaaatgaccagaggcccgggatggcttcggagcactacgtgccttaccctg

SEQ ID NO: 364388 - DNA, 546 bp, Homo Sapiens
aagattacttgaggggatggtgcgtaaatggtgggccagtttgtatatgagctgcaggggcaagacaagtagatgaggctagaatgttaactcagggaacaggtcctaggtagtttccatggcatgtcccccaacagccctctccactgcttttatctcccagctgttagcgtgctggactctgcggacatagaggtcacagacagtcgcctgcctcatgccactattgtggatcaccggccccaggtcggggacctcgtgctccacatcaacggagagtcaacgcagggcctcacccatgcccaggccgtggagcggatccgagctggaggcccccagctccacctggttattcgtcggcctctggagacccaccctggcaagcctcgaggggtgggagagccccgaaaaggagttgatcgcagcccagatcctggagggccggaggtaacggggtctcgcagcagcagcacttccctagttcagcaccctccatcccggacgacgctcaagaagacccgtggcagcccggagcctagtccagag

SEQ ID NO: 364389 - DNA, 470 bp, Homo Sapiens
gaagttggtgtagaccagctgtggagctgaaggcacagtctgccccacccccacctccccactgtggttagtcagaggcatcctgctccaagctctgcttttccttcctctgaaacaatgccattcttgcttctattgctacacatctccttctggctcaggtgaaatccatgcccttctgcttatagacctaaagttcaggtacttattattggccattgatcttgaatttgccctctcctagtgctgcagtcccacttcaaagccattttctgaggaggatggtttaggtctggcaattgtccttgaaaaatcccacccatgttgtaccaccttggtgagtcatatgccactcatcagcttgggaatgatggctgccaactcccaatctcccaggaaggcagggggcagaatctttttttcacttggcctgctacctccattaaaaaaccattctcttacagtttaaa

SEQ ID NO: 364390 - DNA, 827 bp, Homo Sapiens
ccggggagggatccagagtcttggggatccagagtcttggggctccatgtgagtttgctgtaccggttgtcccggtcacggcatggggcgagcggacactccacgacaccccccgcccccggctgcagggtttggggtccaccggggcgcatttctgatcccagtggctcttcgggtgctcttggccggaagaactcccagacctttcactcctggcctggccgatccacgaagactcgggccccggcgcgtccaagcagcacaatgagtagttcttgacccgaggtcgccctgaaggtgtcgcatgaagagcttgcttcacacacaacaggattcgatactttgccaattcaaggccctggtggctggccgggaaaggtggattcgcccttggctaggtgccaggcaggtccgcctgtgcgggtgcccctgacttcgacccctagcttatgtcacagcccgaaccagatcgactggtctggtagcagcctgtcactccagactgtcctccaccccagacttccgcaaactgatgggctctttgcgccgtgcagggtgggaggagaagaccaaacgaagtaacgtctgtaaaaccccttcctggacagcgtaaggcctccacatctaagttcctgtcattaaaatggagacagcaaagccgaccctatccagtccttgggactgttatgaacagaaaatgatgcaatgtatgaaaaactgctttgaggagaaaaacaacacagtgtgtttttggaagatgtgattgatttgtaaaccgcattaaatgctctgaaataaaatgaaagtaaaaataagtaaacaaaata

SEQ ID NO: 364391 - DNA, 471 bp, Homo Sapiens
cgctcctctgcggagctcgctctccccactggtccccagtcccgcagctacgcggcctccgcacggttaagcagcacgggccgggcgtctgcaccttcggagaaaagccgccgcccaggctccgcgctgcggcgttacctgttaagaagcagggaggcggcgctgagacagagcagcaggaagcagaacagcgggtactggcggcagatctcgcgtcccacgtccagtcgcagccgctgcttcagcttctgccccatcgtccgcacccagggcaccatctccgtaacggcgaggccgagactgcgctactggctgaggcagaggtcaaggcgaccccccatccacacctcgcgtccccgccccaccgacttggcggcgcacacagacgcctaccggcagttagccgccgcaggctgaggtcgcgtccggctgggcccagccccacgccccccgccgcgcgtgcgcggccgc

SEQ ID NO: 364392 - DNA, 1119 bp, Homo Sapiens
atcaggccaaatcggccgagctcgaattcgtcgagagcggggcggggggcgtggggctgggcccagccggacgcgacctcagcctgcggcggctaactgccggtaggcgtctgtgtgcgccgccaagtcggtggggcggggacgcgaggtgtggatggggggtcgcattgacctctgcctcagccagtagcgcagtctcggcctcgccgttacggagatggtgcccatgggtgcggacgatggggcagaagctgaagcagcggcttgcgactggacgtgggacgcgagatctgccgtccacgtacccgcatgttcgtgcttccgtgcatgctctgtctcagtcgccgactccctgcttcttaacaggtatattcatatttgaatgatcttctggtcatttgtggctggagttgtcacattctactgctcactaggacctgattctctcttaccaaatatattcttcacaataaagatacaaacccaagcagattaggacttcaggaatgatttcctcaagggtccatagctgtgctgtgagtggtaaagtgaaatgtaaacgacataggccttctttgctacttgaaaactaccagccatggctagacctgaaaatttcttccaaggttgatgcatctctctcagaggttcttgaattagtgttggaaaactttgtttatccgtggtacagggatgtgacagatgatgaatcctttgttgatgaactgagaataacattacgtttctttgcatctgtcttaataagaaggattcacaagtaaaaaatacagagtttttacagcaagctgctttagaagaatatggtccagagcttcatgttgctttgagaagtcgaagagatgaattgcactatttaaggaaacttactgaactgctttttccttatattttgcctcctaaagcaacagactgcagatctctgaccttacttatacgagagattctgtctggctctgtgttccttccttctttggatttcctagctgatccagatactgtgaatcatttgcttatcatcttcatacgatgacagtccacctgacaaaagccactgaaccggcttctcccttgggtccattctggcgaaattcgagaacc

SEQ ID NO: 364393 - DNA, 526 bp, Homo Sapiens
gaattatacatgtccatcctgatatctcctgaagtcagaaattagcctccacatgtgcaatggctttaagagccagaagcagggttctgggaattttgcaagttatcctgtggccaggtgtggtctcggttaccaaatacggttacctgcagctttttagtcctttgtgctcccacgggtctgcagagtcccatctgcccaaaggtcttgaagcttgacaggatgttttcattactcagtctcccagggcactgctggtccgtagggattcattggtcggggtgggagagttaaacaacatttaaacagagttctctcaaaaatgtctaaagggattgtaggtagataacatccaatcactgtttgcacttatctgaaatcttccctcttggctgcccccaggtatttactgtggagaacattgcataggaatgtctggaaaaagcctctacaacttgttacagccttcacatttgtacaattcattgattctcttttccttccacaataaaatggtatacaagaa

SEQ ID NO: 364394 - DNA, 621 bp, Homo Sapiens
  misc_feature (20)..(20): n is a, c, g, or t
  misc_feature (153)..(177): n is a, c, g, or t
  misc_feature (399)..(399): n is a, c, g, or t
agccggagacccctttcgtntgagtcctgctgttggtgtcggagcacgaggggaggcacggtgcggagagcgtcgcatatgcgcgggaaatcaagaactatgatatttttctgtttaaacagctttttttaatttgctatggtgtttataacnnnnnnnnnnnnnnnnnnnnnnnnntcccaggggagtagcaggagccctttgcctgtgtgctctgtccagtgtcatgagacgggagccctttgctgtgtgctctgtccagtgtcatgagacgggagccctttgctgtgtgcctctgtcccagtgtcatgagacgggagtccctttgctgtgtgctctgtcccagtgtcatgagtacgggagccctttgctgtgtgctctgtcccagtgtcatgaggncaggtgtttgcaaagcccagctctcggttccgatggggtattgctgacctacttttctaggggaaatgctcttaaacactgtaattatgcatttctaatgaaataaaatgtatttatgaccacagcagccttacgcttttcctcctgcgagacggttcgccagagagtgcctgtccctggggggttgggctcgctggccttcaggccacgctgctgccctct

SEQ ID NO: 364395 - DNA, 512 bp, Homo Sapiens
ataatctaaatgtctctaaattttccactttgtgttttctaaacacaaattgtattactcatttgagcataactcaagaattcagcgatgataaattgaagggctgaatgtgagaactccattaattccacttcttccaagaaagttaacctcaggaaatactgtttgaagagaagaaagtagtaccaaacaaaaaccttaaacagtacttgaatcttttttgcgctgagactataaagaattcattctaacatcttgtttcataagggccacatcattcgttggagcatgatagtgtgatttgtgtacaattgttacctctcagctgctgaagttcacacttcaaggatcctaggagctctgtgaggggtcgtcccagcaagatgctgatttgtctttcagttggtatggtttctgtgatcggggtaaactcccgtctcccactattcaaaagcagcccaactcatgctttggaatccactgaaataaaaatagttacatgaagtttaaaa

SEQ ID NO: 364396 - DNA, 389 bp, Homo Sapiens
aaggccaggtgaggcccctccctttccaccattgccctggccctgtggccattcattcttggggtttgtctgagtcttccacagagagcagcaaagagatatgggagttgggtgatcagtgtatttactttgcagatttttctggaaataacctctagctgctgctatttgcaaggctgggattggcctccctgtcttttccaacaatcaggaccccatcctgtctgttcctgttcttctcccagcctctgccctccttctgtctcctgggtggtctcccgcttcgctcctggcctttgcatgttccatctcttctctttctcccctcttcgccaccctggttgatggggagtcggaaggggaaggaataaagagatcttcacacaggt

SEQ ID NO: 364397 - DNA, 648 bp, Homo Sapiens
  misc_feature (457)..(507): n is a, c, g, or t
  misc_feature (511)..(511): n is a, c, g, or t
  misc_feature (626)..(626): n is a, c, g, or t
gaggggcaatttgctgaagcccactgcccttccagtactcacaagccaagggccctatgggatctgtttcacaggactcatgcttatggcagctgagcacatctgtcctgtatgtctgccagcagccacgtccctctcactcctgtgacgacagccttgactatatttagaaattccatttctgattgcatttcactgctgaatggtcctagaatcctttattgcccttgtcccatcacaagagacagccagccacagccacttttatctcaacaacatactgaatactgacagaacaaacaggcaagttgtagattcaccaggatttatacatatttgattttttattaccaatcaaaaataaattccatatatcgtttagcaaatatcattgttttgtgacaaaagacacaagagtcataacaacaaaactccccgagagtcaaactcataacgnnnnnnnnnnnnnnnnnnnnnnnnnnnnnnnnnnnnnnnnnnnnnnnnnnncggncggctgtcacctgcctacccatttgggatgccctttggcaaaggtctcccttacgtgggaaggacacagtggggtggggccagttccgggggtatgggctcatcccgggggaccnggggttggaaataggggagggg

SEQ ID NO: 364398 - DNA, 321 bp, Homo Sapiens
cccccctgaactggaaggatactacctgtacaacatctgtggacacctcatgctctgttcaaggccatcacaaaggaaccgccagggagaagcagccggctctcaaagctcccacgcagctctcccgccactggccactcgctggcgacccgatggaaggttttcaggctcctcacaaaggagagagggaagaaaagatcttttgccctggagatatggtcctgaaatctctcccctggcttattccataccatttcccttgcagatttgcagaaacatggcatctttcactgcattctttgaacaatcatgtagtcgatt

SEQ ID NO: 364399 - DNA, 527 bp, Homo Sapiens
  misc_feature (15)..(15): n is a, c, g, or t
  misc_feature (48)..(48): n is a, c, g, or t
aaacctccggcctcnaacccctacctggaatgagggatttaaaacacnattaacatgaaagcctattcaaggcttggaaatgctttcatttctggctgctttttgtttttcatttcctttcagaagatttttctaacttagggtctgtcttgcatgtattacaacccagaatacagtgtttggaaccctaaatctgtttgtgcgtctgcatcaaaggaacatttgccttcactgggtgataacctttgatgaaatgagatatgtcccaagtaacgttaactgtgaagttacacacagtagctgacttcaaagtgccctgttcctgtaaattttattttaaactgttaccatagtcttaagttgtttatgctttatcagactggctaatgtgaaagcataatattatgaagtttattctgccttatgagaccttaaaaaatggatttcattttacaggctaatgttgtaactgactagtatgtaaaataaatcattcctgtgtataaagcagcaaaacctaaaaaaaa

SEQ ID NO: 364400 - DNA, 570 bp, Homo Sapiens
  misc_feature (415)..(443): n is a, c, g, or t
ctttcttttcaatgggcttaagtccctcgctgaactttggggtacgcctccctatctgagcccccgctcccgatcgtgggctgaaccttgccttcgggcacggcgctgataggctggatccagcgctgggccaccctctccttcccagctggttggtgattttgacaagaggcctgagggctgtccagaactgctcaccctgcctttttctgggggctgagcccccacaacctgtcttttccaagtggataagcccaggccccatggagagaggctcagccctagggaaaggctgctcttgctctccctcccagggcttgaggctccctatacttttctgtcttccaggttctaccctccccacagacctaagctgctcccagtctcccagaaccaagagttcttgggttgggannnnnnnnnnnnnnnnnnnnnnnnnnnnnaataaaacatctttaaaatgtgcgagttgtatgtcagtcatagaagccggattccccacatttgaggatgaaacggatgcccaggaggagctgtggctggacccatgaggatgggggcctggactca

SEQ ID NO: 364401 - DNA, 796 bp, Homo Sapiens
agacgaatgtaggttactatctcttctatttaaagatgagcttctctccttgtctgttttccttttggcaacggaattttgaaggcctgcagatgacaaaggcatttgtctgattaaagcagaagtaccctgttcaagtttttcagtagatgcagatcgtttattggcagttttgctctcagaattcgccattgcagagcctccccatgaccatcttgtgtttgctgataatcatcagcaagtctcctccgttccaaagtacgataaagaatggctgtaaattgtttccgttttgtgcttcatccttctggtgtcttttttcttctgcagctattctccgttgttcttctttctcttttcgctccttcagctttctctgtctttcctccatctgtttttcatattggagcttggtctttctttctttttcaagtagttgtgtttctttattggcgtcttgctgtctccttttctcctctctgcgctctcttgctaatctttgttttatgtcatttttaagcatggatccatctattactggtttaaatgtcgatcttatatttgaggaatgggttgcaacacgattaaccacatcttgcttcctcctttccttagcaatctcgtttgctgcagcaaccatccgtgcccgcagctctctcaaggatgggctgccgccagcgccagctgcggcgccgtccgccatcatcggagtcgggaccggaggcggtggtggctctccgcatacattgcgcaggcgtcggcgcggcctccgcttgggtcgtggccgggctccgct

SEQ ID NO: 364402 - DNA, 485 bp, Homo Sapiens
gcggccgctgaccccggcccctcgctcctgcatcatcgacaaggatgagctgaaggacggcctgcgtgtgctcatccccatggatgacaagctgctgtacgccgggcacgtgcagaccgtgcactcgccagacatataccgcgtggtggtggagggtgagcggggcaaccggccccacatctactgtctggagcagttgctgcaggaggcgatcatcgatgtgaggccagcctccactcgcttcttgccacaagggaccaggattgcagcctactggagccagcagtaccgctgtctctacccaggcactgtggtccgagggttactggacctggaggacgatggggacttgatcaccgtggagtttgacgacggagacacgggcaggatccccctctcacatatccgcctcctgccccctgactataagatacagtgtgctgagccgtccccggcccttctggtgccaagtgccaagcgccgca

SEQ ID NO: 364403 - DNA, 528 bp, Homo Sapiens
gctccggtctctctcggtgatgactttgggttttgactataggcgcagaatccgcatttgctgtgatgagttgaatctcttagtgccgttctgcaatgccgagactgacaaggccacaactctgcagtggaccacagcattcctgaaatacatccaggaaagacatggagattctcttaaaaaggttagtggtaggccaggtagattttcagaattttacaaattttacttaacaatgtccctcctttttcctaaggataactcaaactatcctttgtttcctggaatctaacatcaaatactaagtccagtatgagcaaagctctgctctttaatgatataacttgtcatttattaaagtaatagtcacagcctacatgtgttacactcagtgtgtaaataactgtgaagaggcaattgtcagatagcaaattgggcacctgctgtgtacggtatattgcactggggctgacgggtgtgtaggacatgatatttgccctcagaaaaacttgtgaaagggataaaagc

SEQ ID NO: 364404 - DNA, 779 bp, Homo Sapiens
  misc_feature (20)..(20): n is a, c, g, or t
  misc_feature (41)..(41): n is a, c, g, or t
  misc_feature (759)..(759): n is a, c, g, or t
ggcagaaggcgcagaatccncatttgctgtgatgagttgantctcttagtgccgttctgcaatgccgagactgacaaggccacaactctgcagtggaccacagcattcctgaaatacatccaggaaagacatggagattctcttaaaaaggaatttgagagcgtattttgcggtaaaactggccgacgaatagctgaccagaccggactccttggtgacctgtcctgcacaggggagtttacagagcagcccctcgatggagatcaagtgatcggactgaacaggaatcctcggggggtgaacagccattccttcgtgacctgtgcaacgccttctgcaaccctggagctctgcccggctagtctgactcgaaaagggcgtgactcaagctggacggggactccagtagggactttgagagcacattttgtaaaaatatttatctagacgcaaatgcttatccatgaatgtcctcttagaccatttggggatgaagccatcttaataattagtaataattaattagtaataattagtaagcattttctcaatgctctgattccatcatgttttcttaacatgataacttaaaaaattgacatcctttgtactttctttaatcttaaaaagtacacggctttttacttatttaccttttaaaattgcccctttagcaattggaacaagttaaattgttaactaaaaacagtttgggaattttattttcattcgttatattcacacccccttgttctgacnctgagtcacgtgctgctgtg

SEQ ID NO: 364405 - DNA, 531 bp, Homo Sapiens
cgcatctccggcgggcgaggcctctcctagtccctgaccaactgggagcgcgtttctcggcctggggcgggtgaaggagctcccagttggcaccgcctggaatggcgcgaccccgcagccgaaggagacttgaaaatttttcctaactaccgttctgctccgagtgactgctacctgcgaggacagacagcccacgcggctccgggccgggcgatcttccgcgggaaccgggaacgtttccgaagacccccgcaggccggcgccctgcctcggcttcccagcgcagcggggtcccgggctcctcgcggattagaaagttttgctgggctctggcggcgggagagacagtgaagttgaaaccgtgaaagggagaacatgggtgaatcgcttttattctgtcttttcggaatggggaagcctttctaaagcattaaataaacccagaagccatcaaggaaatgattgatcggcttgacaacataaagtttgaacaaaatacacaagcaaagtcaaaagataacaaatgagtgt

SEQ ID NO: 364406 - DNA, 523 bp, Homo Sapiens
tcagtcattcccctggggctcaagcgctgggccgcccactcctgcctccctcatctgtgtcccgagttcctgaagggacatgggtggaatgatggcagaatccagggtctgcagcacctgctgttgttgccaaccagtctcccaaagctccttgctccccaccccttgcgaacaggaccagattttgtttggagcctcagcatgccggggcccagatgatggagcataacgggtcccagccaattgtgatgatcctttttgctcatttcccagcctttcttgctgttaggggctaccatgggaccagctctggccagagggaactaagcaaatccaatagagatgtttctggggaaggttttgcagcccactccccatcttcctgctataaatgtgggtgtgatggctggatctggggcagccaccttgctaccatgaaggaaaggccaagacaatcatccacagctattccctccagcatctggttctgtacaaaaattaaatgcttatttgtttaagtctc

SEQ ID NO: 364407 - DNA, 372 bp, Homo Sapiens
  misc_feature (46)..(46): n is a, c, g, or t
  misc_feature (53)..(53): n is a, c, g, or t
  misc_feature (61)..(61): n is a, c, g, or t
  misc_feature (87)..(87): n is a, c, g, or t
  misc_feature (176)..(176): n is a, c, g, or t
aattttgtggtttattatttattattttattatgaaggatgaaagntgaattntaagtttntggggtaggttttatgaattttaatntgggttagaatgatgaagaagtattaagagctttttggtttttttaatgaagggttaatttaagactgtgctggggacccagtgtgttngctgggtccctccccagctgagctgtgactgctgagtactggaaggaggttgccagggtctctgctacctttgtctgcatccctcccttgctccctgctgggtggtccctcacccaggcctccaatgtggttggccctggggactcattacttctggtagctggctttctataaaaatgggtcaaacccaaaaaaa

SEQ ID NO: 364408 - DNA, 895 bp, Homo Sapiens
  misc_feature (583)..(592): n is a, c, g, or t
ttttaattttttacagctttattttagacagatagtttaagaaccaaagacatacctctgtaatgataaaggaaagaaaacaagctttccttttaagaaaccaaagagcacaaaataagactgtttcattatacataatcaccacaggatattaggcactctgacagggttaggcaagattcttggtgtgaggtgaagcacaggcactttatttgtacagtgctgctgattctaattttgaaggtaggtattataaaagtctttacttgtcaccttatttctggccccaacacagcagcctatagttttaaaagttctgtttctccctggtctttgttcgtatacacatcgaaagtaacttaaaaacaaggatccaagggggccatacttcatatgttatctaaatgttaatatgagaactcaaaagtaggcagattatatgaatacatattcttacctctgctacaaataaaaacaccccaaacccttcatcatacttttataaaaatacagatattaaactgtagccttttatataccatttctgaaaagtatttagttgcataaatagatgccaggatcnnnnnnnnnnaagtattaattacttaaaaaaaggcttaagtctttcaggtatttagagagctctggaaggctttacccagttgacatacggtggtagtagaaatattaaatatgcaacacacaaagcctgcaacttgacattggtcactgaaacaaaaattgaattcctaaatccaagcaatcaaaagatgtttattttttatagaaagatctgtaaaaaaataataatttttcaaacagctttactttcatagagaaaactttctacagaagttgactaagattttaaattgtaccatcattaaataaggtg

SEQ ID NO: 364409 - DNA, 462 bp, Homo Sapiens
  misc_feature (13)..(13): n is a, c, g, or t
  misc_feature (21)..(21): n is a, c, g, or t
cagtgcattaatntggctgcntaagccactggccagagaaccgtgtggtggccttcttcagcctggctctactgcttgccccactggtggagacgcttattctactggaccggctgctgtaccttcaggaacagggtttccatgctgagctcctgcccatcttcagtcctgaactctctcccagaaacctggttctggtggccaccaagatgcccctgggtcaggctctttctgttctggagactgaagacagctgatgcagcctgaggacacatctcagaccccatcatctgaaagtgcccagagagcacagtggcagagtacatctcatccagagaaacagcatcctgcatcctccagagtcctggttccttcagtttcatcccctttctctccttccatggattatgtaatacattgtaaagttttaattaattaaaaattggatatctgtttccttcc

SEQ ID NO: 364410 - DNA, 438 bp, Homo Sapiens
  misc_feature (25)..(25): n is a, c, g, or t
ccctggctctaactgcttgcccccnactgggtggaaaacgccttaatcctaactgggaccggctggctggtaacctttcaaggaaacaggcccctttcctcccccaggtttcccatgctgaagctccctgccccatccttcaagtccctgaactctcctccccagaaaccctggttcctggtggcccacccaagatgcccctgggtcaggctctttctgttctggagactgaagacagctgatgcagcctgaggacacatctcagaccccatcatctgaaagtgcccagagagcacagtggcagagtacatctcatccagagaaacagcatcctgcatcctccagagtcctggttccttcagtttcatcccctttctctccttccatggattatgtaatacattgtaaagttttaattaattaaaaattggatatctg

SEQ ID NO: 364411 - DNA, 676 bp, Homo Sapiens
gggtcgccgcccgggctcggtcagtcggtaccttcatgaaggtctctaccgcgcctttggccgtgttccaggtaggtggtgcccagatggctgcgctggttcatagaggcagacgtgtctatcaggaacagtaagatgggcatagtgctggccggggacaccggggcccgaggtgctggagaaagaggagatggtagaggtggagcgccggtgcggcgaccgccgctacgcggggcgggggagcacggcccccgggaggaaaacactgtcatgggtctttcctccggctgcggggagtttctcccccgatagttgagaggaaactccccagacccagtgctccccgtcgtacccccgcctccgcctcctcctgcctgcctgcccgctggggcgggcgcccagccgtctgtctgtcggttcgtcccccccgcctacgggggtcccgtccccgctcccggcccctgtgtgtgtcccagcgggagacgggcctggctccccaccccacccccggtacaggagtggggacctgggagctggcgaagaggggagtgggctgagggaagattggcctggggctgttgggagaagttctcagggactccctccgcaccccggcggtgtcaccactttctcggacgcgtggtcgacgatatccctaattccggaccgtaccagc

SEQ ID NO: 364412 - DNA, 1244 bp, Homo Sapiens; identical to SEQ ID NO: 121734
  misc_feature (291)..(324): n is a, c, g, or t
  misc_feature (809)..(817): n is a, c, g, or t
  misc_feature (1115)..(1128): n is a, c, g, or t

SEQ ID NO: 364413 - DNA, 250 bp, Homo Sapiens
aaccaggtttttaggttgtgggtccggggctatgggaacctgtcccccatgatggatcttggtagagacacttccctctgtcatcgtgcccaggaggatgctgcaggtgactacctgcagccctgttctcattcatttggatgccctccagaaatctggggagccatacacctttagagccttttttgctccttatcaagttggcaaggcttggccaattcctgttcaaggctgcattaaaggcatgttc

SEQ ID NO: 364414 - DNA, 443 bp, Homo Sapiens
cccccggccccggagccctcccgggggcgccagaaagccactttgggcctgtccccaggaaaacgtggtctcagctgtggggccgtcgagcaggcctcgacccctcttcctgacctgaggagaggcccagcgcctcaccctcacccagtctttgtgcagggcgccggcggccattgtgtccgggcggggaatggaggacccggcaatccccaactgccacgttctgggcctttggggaattcagagcaaaccagcggcatttgttgggggtctccggccttcaacatcacagacaggcctgggggtggccttcccaaagtcagattgcagatctgaggcagtttccccctccctgcgtccctcactgaaaccttgaaccccattgagaagtccctttagggtttcggacgcctccacctcaccctgggctggtgcttaaatag

SEQ ID NO: 364415 - DNA, 465 bp, Homo Sapiens
aatctctaaaataggactgttatgaagattaaaggagtttatacaagataagtacttactgcagtgcttggcacagttaatggtcagcacacattagtctcattacttccaatttcgcttctagaactggtcctcaaaacagtccaatgatgttgctggggcaggaattatgtgaacccaagtggtcaggtgaggaaactgaggcaggagggaaagatgtgctagagacatagactcagtcagtctagttctgccacgcacaagacacaaagccaactttgggttaggtctgaaagtgaacgggagggtgactggcaaacagtcaaaaaccaaaacgattcaacagagagggtgcctgtccaagtgtcccgtgacccttcctgtgcagtgtggggctgtgggcctgtccacctgtcgccctcctccctcagaccccgtcagtgctccctggctggcagggctggc

SEQ ID NO: 364416 - DNA, 504 bp, Homo Sapiens
tgatgctgggaaactgaacagtgagaatcagccgaaaaaggctgtggtagcagataaaacgattgaggcctctatcgatgctgtgattgcacgagcctgtgctgagcgagagccagatcctttcgaattttcttctggatcggaatctgaaggagacatttttactagccctaagagaatttcaggcccggagtgtactactcccaaagcttccacttccgcgaacaatttcacaaagtcaggatccactcctctgcctctttccggtggaacctcaagttccgataactcatggacaatggatgcctccattgatgaggttgtacgtaaagcaaaactgggaacaccttcaaatatgccccccaactttccttatatctcttctccgtcagtgtctcctcccactcccgaacctctccacaaggtgtatgaggagaaaaccaagctgccttcctccgtggaggtaaagaagaagttgaaaaaggaactaaagactaaaaaaaa

SEQ ID NO: 364417 - DNA, 773 bp, Homo Sapiens
agcggacgggcttcagcttcttagcctgggaaatgtgagggctagtgcagcgctgagcccagacccctcacacagcgctaccggcaacttgcttaacctagaggtggggggtgacgtccctgtcggccccgtcacctggggccccagcacctctccttggctttgcagacgatgttccacaggagcccgtgcccacgctgtggaacgagccggccgagctgccgtcgggagaaggccccgtggagagcaccagccccggccgggagcccgtggacaccggtcccccagcccccaccgtcgcgccaggacccgaggacagcaccgcgcaggagcggctggaccagggcggcgggtcgctggggcccggcgctatcgcggccatcgtgatcgccgccctgctggccacctgcgtggtgctggcgctcgtggtcgtcgcgctgagaaagttttctgcctcctgaagcgaataaaggggccgcgcccggccgcggcgcgactcggctgcactcctcacgcgcctgtatgtccgcgcgtgcgtgtccgcgcatgcaggtgtgccagagcgtgagcgcgcgcaggcgagcgctccgggcgggggtgcgcgcggggccgacggtgggtgcagtgcacgcgcgcgggtccggaggcgcccccgaattccccgcaggggcaccggggcgtgcgtgatcgcacagtcatgtccgatgccgtctgcgtgtggcgtgcacctgagcgcgcgcagggccccgcggttcggggtcccgttgcccacg

SEQ ID NO: 364418 - DNA, 438 bp, Homo Sapiens
  misc_feature (245)..(269): n is a, c, g, or t
  misc_feature (297)..(395): n is a, c, g, or t
ttataatatcccagtctattaaacgaaggcctattctaatggagtatgacctcatcttaacttgatgacatccaaaaagactctatttccaaataaggtcagattcccaggttccaggcatcagggctttgacatatctttttaggggacacagttccatccataattctccctgaagctaaagatgccgggaataaaaagctcttagcagcttctgtttctcttctcatttaactctcttgccnnnnnnnnnnnnnnnnnnnnnnnnngaggcagagtcttgctctgttgcccagnnnnnnnnnnnnnnnnnnnnnnnnnnnnnnnnnnnnnnnnnnnnnnnnnnnnnnnnnnnnnnnnnnnnnnnnnnnnnnnnnnnnnnnnnnnnnnnnnnnaggtccccaagctaagaaagggaagccgcctggcaaatatctc

SEQ ID NO: 364419 - DNA, 445 bp, Homo Sapiens
taatagcagaatatttcatggccgaactcttgatagtgacaaatcagtaaatacaaccaagaaaaagaaaatgaggggtcagagttgcaataccccaaatgaaaaataacagttttttcagggctttttgggaccagaactcaggcacttggattttatgaccttaaactttttctgcatctctctaaaacttgtgttttcagaccatcctgtgtataaagcaggagagtttctactgcaagtgacaatcagaggtgactatctatatttgcacttaaaatcaaagtagttcaacatgcaaatgctagggtctagccctgggtaagggccatgctggtgtactgtgttgtgatgatggaaccagtaaatcaaaattatggaaatttgcactgttgaaaagcatgctttagctttattttcaattaaaaacactgtttgggaaaaa

SEQ ID NO: 364420 - DNA, 510 bp, Homo Sapiens
  misc_feature (16)..(16): n is a, c, g, or t
attggaattcacccancatgtggggaggtgttcacgactttggaaatcacaaagtcgtcaggactagacatcactcagaaaggctgctgaggctaggcctgctgctgtttagttctccttgtcatattctcatttctctcaaagataagaatgctctcggataaaatgagcctgtgctcatgacagctgctctgttactcagggaccagtgcagggctgtcttacgacacttagatgagaaagtagacaaggaaagaggacagcagtgggcatctgccttgtggtcttgctgacagcgagaagcagtgggactgcttccttgacgccttagcttggagccccgttatgaggtgagccaaggctgactctcgcaagccaggactgagcttccctcggaaagacctttgagtggcaccattcacctaagttagcttttctggtcgctattgtttttatcccctttgctttgttgtttctgtgaaaatatattttcagttaagaaatgctaaa

SEQ ID NO: 364421 - DNA, 1273 bp, Homo Sapiens
  misc_feature (465)..(520): n is a, c, g, or t
  misc_feature (633)..(644): n is a, c, g, or t
  misc_feature (684)..(692): n is a, c, g, or t
  misc_feature (763)..(772): n is a, c, g, or t
  misc_feature (783)..(822): n is a, c, g, or t
gccaggagtggacttggttagggctaccttctcattggttgcagccagaggcacttctgcccgggctgcctctcccccgctagggcctggtgcctctggctggaggctccctcccttggccgtcccaatagagcccggggctacttccactggccaggctcccgggcatctggttgaccccagcctggggaggagggctggtctccgctcctcaggggcttagtccgtcccaccccttcccttccctggcgccccgggcccaggcccctcagctgtcagctggttttgatggcctcccactgccccacacgccgcgggacctccaggggcgactctagtggcctgaggagatgtatttataggcccccagcagggctgctcccccctcggccggtgccccaggatgggctcctcccggcgggggcttggccaaagctttcttaataaaatgcctttcccctcatnnnnnnnnnnnnnnnnnnnnnnnnnnnnnnnnnnnnnnnnnnnnnnnnnnnnnnnngacccgcacaaaaaatcccacaaacgccaacgcccaaacaccgataatatacggaccccgaaagaccccttttccaacccccccgatctgggcgccgcgtttttgtgtggggnnnnnnnnnnnntaagaaaatttccccgaaccttcttttttgggcgcccggnnnnnnnnnagaaccagacaaatggggatacctttccttccccccccaccccgtaccacgagaacaaggtccttagtttnnnnnnnnnnacaaaaacctnnnnnnnnnnnnnnnnnnnnnnnnnnnnnnnnnnnnnnnngaggggttcccggacccgttcctctttgtcgcccccctcttcacgcggggggcccgtttccgccgggccgcttaccccttctcatttccgcgcccccgcccggcctttccccgcttgcgcccgcaggggaagagaggtgtggcgcgtcccccatccaaatgccccccacgcggccccgggtatggcgcgccccttcctatacgcgcgggggcgcagagaaccgcaccagggccgcgggaacgcgcggtttttccatattgtggggaggccaccccgcgttaattaaattttcctccaccgccggtgggtaaaaaacacggcgccccctcaccgataacattccccctccacttttcccgccgcattaatatatcaaccccgaagtgcgccggccacaccctcccgcccgcccgtttgttttctgcgaaccaatatacccgcctttcttgcc

SEQ ID NO: 364422 - DNA, 326 bp, Homo Sapiens
ggtgtagccctacagcacacctagactgaacgggatagcctatggcttctaggctgtaaacctgtacagcatgttactgtactgaatactgtaggcagttgtaacgcagtagcatctgtgtatctaaacatctaatcacagaaaaggtacagtaaaaatatggtatgaaaaattaaaaaccacacctgtttagtgcacttaacatgaatggagctttcaggactaaaagttgccctgtgggagttagtgaatgaatggcagattaatgtgaatgtgatggtctacacgctcaggctacactgtatttattaaaaaccagtaacagg

SEQ ID NO: 364423 - DNA, 501 bp, Homo Sapiens
gctggggtatgcaggaagagaccagggtagctaaacaaagcctggcctggcaaggattgaaagaaacacttgcaatgctgtcatcttccttttctcatctgtctgtttctgttccttcccttttgcaccaagtctttccctattgtttccccctttataccctgaaagccaaaatgcacaccatggagctccccccggcggggatcttccttctgctgtggtctctcccatatcatgctccagattccatttgtcatccacacccctacccacctgtcctttcaacattttccaaaaagacctccacctttgggcatgcgcagagagagggctgctgcccacacatgccagtttcttagtatgcccaagggtacatgggcctggtgtctccctttcttcttcactaccaagtgcaggcatgggtccccccacatgcctcctcccagtgcagaggactctgattttgtttgttttgtttcgagactgtctaaaataaagaaa

SEQ ID NO: 364424 - DNA, 426 bp, Homo Sapiens
ttggatgaaggtgaatgactaaagctttgctactggggctgaggattccggataccaagacgcaaacactttcactttgagctgggcaaatcttacttggcatcaacttggatggctcgcatatgacaggaaactggattgccaaggcatggcagactgagctggaggaagatgtcagaaatgtttgccctgaaatcagttacggacaaaatgttggctacaacttgaggagaaaaatcacccccaaaggagtggacatttcctaacaattctgtatggaggaaggtggggtaattgcattcgtctgcagtagacacgagttcctcggacctgtataatctcccaaagccaaggtttggtaataatgtagtccccaaatacctgaaagctgtctttaaaaatgcaggtaagcatgtgactggcaaa

SEQ ID NO: 364425 - DNA, 240 bp, Homo Sapiens
tttaatgttcaaggagcactttaatagtcaacaaattgatgcagttttgtcacaatactttgcataattttatagtaacagtaaaattctgaatcactttatagtaaaagaaaagacacagaggaaaataatttccctgtacaatgaaattttcatacactatatgaagatttcccacatctgtcaagttttggctcagaataaaagatagctaatatatttcactcttttttctgttac

SEQ ID NO: 364426 - DNA, 334 bp, Homo Sapiens
  misc_feature (48)..(48): n is a, c, g, or t
tcagctgtcctgctgccgctgccctccaacctgcttgtgtgtgtgtgntcgctgtgcttggtggaagtgtgccgtgctcgtgccggctcttcccagcagactggtatctggctgtaacgtttgacgtcttcatattgcccagtctgtattgaggggtgatgtacatggccatacagccaaatgggtctgtgtaccagtgtggggattccaagaacactgcctgtcccccacagcaaatattgatgctgttggtcagccaaagattttcctctcctttgctgcttaaacttgtgccttaatattgtacataataaatggataaaatggcaaaatg

SEQ ID NO: 364427 - DNA, 877 bp, Homo Sapiens
  misc_feature (47)..(65): n is a, c, g, or t
gggaggcagcttgccaccgggcgggagcaggtagtggtactgcgaannnnnnnnnnnnnnnnnnnccggggagcgggagcgagggctatagcggcctacgcccggagactggcagccaggggtcttgaggaccctggacaggtgatcgtccagtatcgtctgcgggtcttcctcgtagctgccggagggcagtagggagagggggtgctgcgtgggcgccccctcccgcgaattgagtgtgagctcggagccctctctctcttcatcctctcggatctgctgcaggcgctcctccaggctgtggcggctctccaactccagcttcagcttttccagcctcgagatcagctcagctgcaaaggtggcgggttccacgggggtcatctccttgggcaggcggtgggttctcgggaaatgaggtagagacacttggccattggccttcacactgcgatgcatttctctctggagctgtttcttactgcccacacgataaggaggaattccatctacactgctgtccgtcatggacatggaatcatccgtcagcgcatcactggatatctcactgtcgttggcgctggtggctggtgcaaagacatagccagaacctatgtgataaggattaacaggatcgctcctcttgaaggacctgtatcactgtcaacagtttccgtggacctcacactcgccgtggccctcagagtttgctggacaagccaaccaggttggcgaaagtttgcacttggaagtcggcacaagtccactcctcttcttcattcaaggtgggagataggcacaacgaactttaaggctccgaagtccccccattactcatgtagctgggtttctccccaatctcaatatcgagtataaa

SEQ ID NO: 364428 - DNA, 1473 bp, Homo Sapiens
  misc_feature (137)..(137): n is a, c, g, or t
cttatgtctccaaggacactcctatgttgctttacctcaacactcacacagccttggaacagatgcggaggcaagcggaaaaggaagaagagcgaggtccccgagtgatggtagtgggccccactgatgtggccaangtctacagtgtgtcgccttctgctcaactacgcagtgcgtttgggccgccgtcccacttatgtggagctggatgtgggccagggttctgtgtccatccctggtaccatgggggccctctacatcgagcggcctgcagatgtcgaagagggtttctctatccaggcccctctggtgtatcattttggttccaccactcctggcactaacatcaagctttataataagattacatctcgtttagcagatgtgttcaaccaaaggtgttgaggtgaaccgaaggccatctgtgagtggctgtgtcattaacacctgtggctgggtcaagggctctggttaccaggctctggtgcatgcagccttcagcttttgaggtggatgttcgttgttgttctggatcaagaacgactgtacaatgaactgaaacgggacctcccccactttgtacgcactgtgctgctccctaaatctgggggtgtggtggagcgctccaaggacttccggcgggaatgtagggatgagcgtatccgtgagtatttttatggattccgaggctgtttctatcccatgccttcaatgtcaaattttcagatgtgaaaatctacaaagttgggggcacccaccatccccagaactcctgtttaccctttgggcatgtcctcaagaggataatcagctcaagctagtacctgtcactcctgggcgagatatggtgcaccacctactgagtgttagcactgccggagggtacagaagagaaccctgtccgagacaagtgtagctggcttcattgtggtgaccagtgtggacctggagcatcaggtgtttactgttctgtctccagcccctcgcccactgcctaagaacttccttctcatcatggatatccggttcatggatctgaagtagagatcagcaggaagccttgctgcctgggacatagagatcatctggccacccctagaggcagatgggctgagataaaagactgttggggccacctgaccagtaaactgtggactagtagaaagttcatattctacctctaaaaacaggtagtggtaacctgactcttctaatcttgaaccaaaaggaaaaccatgagactgtaattggtttcttagaccacctaagatgccactttgaattctctaagaccctggagaattgcatttctttcactgtgctactatgtggtttttaaaaaatcaatgctttatattccatatgtggttcttacccatttatctaggatgaaagtgtgaattagagggactccttccaataaagttcaaacttaaaaaaaatcattttaataaatatttttgccatatcata

SEQ ID NO: 364429 - DNA, 505 bp, Homo Sapiens
agcacagaaaacattgctttattaactgcgtttgccaacacacgaggagtgcaaagggctccctatgacacaagccctggtggggccggggtctggaagcccccatgagtgagcaggacaggatggggctgggaactatgcagcagcggcaacacagaatcatgcagggcacagcgggcactggccacacccaggtgaccatacattctattgctcgttaagggttgcgcacatggacaatgtacaaaaaggagaaataggtctttgcgttaatgaaaaatacatttttttctctacaaaggaatcttttctaatacaagaaaataaatattgcaacataagccaaaaataatttaaaattgctcttttcaatatattttcaatatttctcttgtatattaacaatatggcacatcactttctttgaaacaaagacagaatggtgtctcctcctgtgacattcatatatccccccaccgtcctgcaaataatgggtgccgagctt

SEQ ID NO: 364430 - DNA, 181 bp, Homo Sapiens
atttaaaaagtaccaaacgctcattattaagaacttagacaatacataagtatgcaaagtagaaaaaggaaagtttcattagtgaaaaaagcaagtgtgaccccgtttttgttcaataggtacatctgactgtgaaagaatccctccgtgtttgcttcttgatgggaggtatctgtctcaa

SEQ ID NO: 364431 - DNA, 548 bp, Homo Sapiens
agggcaggatgctcggtgaggggtggtggagccgtagagcaaacatccttcgagagccaaatgtgcgtgacctttgacctttccccttcaggagtgtacagtgagggaatactcgggtaagcacagaaacacctgcaaaaacaactcacacattcgccagcagggagtcggtcaaaccaaccaggcccaggctgtggaatgttaggcggcggttaaaagtcacgagatacgcaccttcagatgggaaagatggacaccacctgtctcagcgggagaaagacagctgcagaagcttcacacaatttagcccgattcccacgaataaacagaagaaagggcagacaagtttgtaccgacggaggaaggcactgggaccccgcttcagtcgggcacgagtttcccccagagaggggaggaggcaggcagaggacttcactttctatgtaatctttgcctacagagtttgacgttttgtaactgtcctgtataatttgtcatctgaaagcctgaaaaaaatagccaattaaaaagctgccattggaaatgag

SEQ ID NO: 364432 - DNA, 407 bp, Homo Sapiens
  misc_feature (365)..(365): n is a, c, g, or t
gcttctccatcttctgcgctgagcctgcgacgctcctggccgacacgccggttaacgacggcgcctggcacagcgtgcgcatccgccgccagttccgcaacaccacgctcttcatcgaccaggtggaggccaagtgggtggaggtcaagtccaagcgcagggacatgacggagttcagcggccttttcgtcggggggctgcccccggaactgcgcgccgcggagctcaagctcaccttggcctcggtgagggagcgggagcccttcaaggggtggattcgtgacgtgagggtcaactcctcgcaggtcctgcccgtggacagcggcgaggtgaagctggacgatgagccgcccaacagcggcggnggaaggcccgtgcgaggcgggcgaagaggaccagggcccgtg

SEQ ID NO: 364433 - DNA, 516 bp, Homo Sapiens
gcggccgccttgaatactggaacccagacaacaagtgctgcagcagctgcctgcaacgcttcgggccgcccccctgcccgggcgccctggagacaggggacacatggaaggaggcctcactacttccactcctgagcagggaactgtccagtctggcgtcacaacccctgtctcgcctcctggatgagctggaggtgctggaagagctgattgtactgctggaccctgagcctgggccaggtgggggtatggcccatggcactactcgacacctggccgcaagatatgggctgcctgctgcctggtccacctttgcctattcgctgaggccgagtcgctcgccgctgcgggctctgattgagatggtggtggcaagggagccctctgcctccctgggccagcttggcacacacctcgcccagctagggcgggcagatgcattgcgggtgctgtccaagcttggctcatctggggtttgctgggcttaacacccaataaagaactttgctgactact

SEQ ID NO: 364434 - DNA, 424 bp, Homo Sapiens
  misc_feature (32)..(32): n is a, c, g, or t
  misc_feature (78)..(79): n is a, c, g, or t
  misc_feature (93)..(93): n is a, c, g, or t
  misc_feature (138)..(138): n is a, c, g, or t
  misc_feature (149)..(149): n is a, c, g, or t
  misc_feature (239)..(247): n is a, c, g, or t
agcagataccttcaccccctttaaagtttccnacccaaagcccacaataatttttcaaaacgggtcttggcggatganncccagcttggtcanctcttgtttattgtggggacctggaggtaatggagagccaaaaanaagtgctatanaacctaatttggctagagcaagttcacacgacacgaccgtgctttaaaaacttgctctccattatgtacttccttccatcaggatggggnnnnnnnnntggtggggatggtgagtaaacacaccagtggtttcatcagaggggaactcactactcaggaggtgacggtgacgtggtgccggtccctgaagtacgcgcacaagctccggaggttgcgggagcattcatcgcccctggaccccgcagtccccctcggactcaggccagagccttctc

SEQ ID NO: 364435 - DNA, 1001 bp, Homo Sapiens
  misc_feature (41)..(77): n is a, c, g, or t
  misc_feature (534)..(542): n is a, c, g, or t
ttaagatcatataggggaacggagccttcgcggggcggcgnnnnnnnnnnnnnnnnnnnnnnnnnnnnnnnnnnnnnatcaggccaaatcggccgagctcgaattcgtcgagagcggaggtggcagcggaaggtgggagcgacgactgcaaaacggcagcgatggggtgggtaggcaggccgctttcagcgcgcttctaacaaggtggagagaggcgcttcacttccctaccgcccttaccgccgctccgtcttgtctcccaccgactcacagggaggcttgctgctcctccgcggccgttacagagggcggggcttctgcggccgctaccgtttccctggggctaggttgcttcgcagaaggctctggccctgagtccgagggggactgcggggtccagggcgatgaatgctcccgcaacctccggagcttgtgcgcgtacttcagggaccggcaccacgtcaccgtcacctcctgagtagtgagttcccctctgatgaaaccactggtgtgtttactcaccatccccaccannnnnnnnnccccaacctgatggaaggaagtacataatggagagcaagtttttaaagcacggtcgtgtcgtgtgaacttgctctagccaaattaggtttatagcacttttttgggctctcattacctccagtccccacataaacaagagtgaccagctgggtcatccgcaagaccgtttgaaattattgtggcttgggtggaaacttaaaggagtgaagtatctgctttccagaaaaatcgttgtcattcaaagtgaaattaaacttgttttctttgcaataattcgcctttatttccttgtatatctgtaaactcttcacttttttgtaattactagacaattcggacttaaaaagagcctcagcatgtgtatttcgggaatttgtggagcttcataatgtggacaccttatcctttctaattgagttaagtaccaggtacttggaagtacattaatttctattccg

SEQ ID NO: 364436 - DNA, 341 bp, Homo Sapiens
gggcttccagcttcagaacaacgagaaaacaaatttctgttgtgtcctggttcccatttgtaattggcaccctaaataaaccgttttctgtagccctggaaatggctgaaaatgaggggagggaaataaagtgctataattcagagcatggagcacaccttcctggttcacctgagctggattcggagaggtaaaatggccattacctcgtctaagctgccacttacagacacagtacaggatgaggcccaggcccacagagacaacaatgatggccacagctaagatgatccagaaattattcctccaccagctcattgcagtggaatcctgagaagaat

SEQ ID NO: 364437 - DNA, 751 bp, Homo Sapiens
atcggcgggcctggtgtccaagacgggtcattctggcgcgataccgagcccactacgaatcgggtcgtgcggacaagagctgcgagaagatcatttcatcgcccccaaaatctactgctgtggggctggagtagccgcggacgcgagaatgacacacggatggtggcgtccaagatggagctacacgcgttatctacgggccgcgagccccgcgtggccacggtcactcgcatcctgcgccagacgctcttcaggtaccagggccacgtgggtgcatcgctgatcgtgggcggcgtagacctgactggaccgcagctctacggtgtgcatccccatggctcctacagccgtctgcccttcacagccctgggctctggtcaggacgcggccctggcggtgctagaagaccggttccagccgaacatgacgctggaggctgctcaggggctgctggtggaagccgtcaccgccgggatcttgggtgacctgggctccgggggcaatgtggacgcatgtgtgatcacaaagactggcgccaagctgctgcggacactgagctcacccacagagcccgtgaagaggtctggccgctaccactttgtgcctggaaccacagctgtcctgacccagacagtgaagccactaaccctggagctagtggaggaaactgtgcaggctatggaggtggagtaagctgaggcttagagcttggaacaagggggaataaacccagaaaatacagttaaacaaa

SEQ ID NO: 364438 - DNA, 701 bp, Homo Sapiens
agcggagcgcacaggaaggggcggggatagcacctaggagctgggcatagagaggtggggcctaggccccagcttgtggccgaccccgcccatcctcgagcaggtaccagggccacgtgggtgcatcgctgatcgtgggcggcgtagacctgactggaccgcagctctacggtgtgcatccccatggctcctacagccgtctgcccttcacagccctgggctctggtcaggacgcggccctggcggtgctagaagaccggttccagccgaacatgacgctggaggctgctcaggggctgctggtggaagccgtcaccgccgggatcttgggtgacctgggctccgggggcaatgtggacgcatgtgtgatcacaaagactggcgccaagctgctgcggacactgagctcacccacagagcccgtgaagaggtctggccgctaccactttgtgcctggaaccacagctgtcctgacccagacagtgaagccactaaccctggagctagtggaggaaactgtgcaggctatggaggtggagtaagctgaggcttagagcttggaacaagggggcaataaacccagaaaatacagttaaaacaacaaaacaacacacgaaatgacaatacaacaatataatcactgaatacgtaatacacaactacaacataccacaaagaacaatgaccacaacagagggggg

SEQ ID NO: 364439 - DNA, 783 bp, Homo Sapiens
  misc_feature (82)..(82): n is a, c, g, or t
cacaccatggcgtcccacattgccccccgggagccccaggtcaccccaagatccccggcggtgacggcttccaccagcagcncctgagcagctcccagcgtcatgttcggctggaaccggtcttctagcacccccagggccggcgtcctggaccagagcccagggctgtgaagggcagacggctgtaggagccatggggatgcacaccgtagagctgcggtccagtcaggtctacgccgcccacgatcagcgatgcacccacgtggccctggtacctgaagagcgtctggcgcaggatgcgagtgaccgtggccacgcggggctcgcggcccgtagataacgcgtgtagctccatcttggacgccaccatccgtgtggtcatctcggcgtccgcggctactccagccccacagcagtagattttgggggcgatgaagtggatcttctcgcagctcttgtccgccacgaccgaatcgttagtggctcgcgtatcggcgcccagaatgaccccgtcttggaacaccaggcccgcgatggtggtcccggtcttgcgtgcgtgagggaccttgagccccgggaggacgcgttccaatgatgcatttctttggcagttctcgaaggagaagccccctcggggctccagggctggcttcagcatcttggggcaggcagaggggattaggggtcgcgggcggatgagtcggccagacaagcggggccagtgagcagctaaaaagtcctctgctaggcttcacgatcccgagaattccggaccggtaccac

SEQ ID NO: 364440 - DNA, 560 bp, Homo Sapiens
  misc_feature (203)..(258): n is a, c, g, or t
  misc_feature (325)..(383): n is a, c, g, or t
gtgtgcaggattcctcttgttccagccttaccttcccgatgatcctagcacatacttgtgtgtatatacagacatgttacagtgccaagtgtacttcctactgtggtgtgatttaaaaaattgaaataccctaaactggaagaactcctcaaggtctaaactgccgaatcgaacttcctattgtaatggaaatgttctatagnnnnnnnnnnnnnnnnnnnnnnnnnnnnnnnnnnnnnnnnnnnnnnnnnnnnnnnngtgtctagtgtgacgaagaattaagaattttggctgagccaccacgtttagctgagtataattttannnnnnnnnnnnnnnnnnnnnnnnnnnnnnnnnnnnnnnnnnnnnnnnnnnnnnnnnnntcaactgttttgcactcaacaaagacatacctctgagttggcaaccagcagggtggataacgggccagtggtgataaaatcaaagaataggtaatgaaacaatcatccagttaacaatcagcaaggttcttcagagcctaattaatgtttaattctaaataaattgcaacaattaag

SEQ ID NO: 364441 - DNA, 1504 bp, Homo Sapiens
ttgaggccaggtgcggtggctcacgcctgtgatcccagcactctgggaagacaggcgaagtcaccacgcccagccaccccatctctattttaaagaaaatgaaaacgtattatcatcggtcctatgatcaccaacatttggcccaaacaaagtcacaatactcggaaattcggggggtgaaactgcagccgccgcgtcccgaacttcagaagggtccccgtcagcaccacagcagcttctgattgagcgcgatgacgtcactgacgaagccgtctgcgccgatgaagtcccccgcgatgatgttggtgcaccgtgaacccggccccgggcactgctctcggacccacgcgctcagccgcggaaggttgggcagcgtcatcttctccagggactcggacgggtgcgccagaacgtactgcaggttctccgtgaggttgatgccggccacgaacaaccctcctgggcggccgcagctcttcatggtctccaggtatcggatgagggcctcggtcttcaccctgtttccccaccagtaggggactcctggccacagctcgtggtgccggcgcaaggagctctcgtcttcataggagacgatgacctgttggccccgggaccacagctgccgcagtgtcggcacctccccacgaggacacagcatgtccccgaagatgttcttgatacaggcgaccaggtactcgtgcaggtcctcgctcagcccctcgaagtttctgcaggccaggatgaccacctcgcgtggatgccgctccagccactccgagatttccgtgagtgtgtcctccaccagcgccgttgtgtacaccatatggacaaagtgcaggttcttctccgagccctccagcatgtgggctatccgcagatccaggtaccgcaccccggcatccagctgctctgtgacgtccagtgcctgggtgacggaccatttcagcacgacagggcgcgtgatgcagggcaaggccttgttcagcagctgcagcagccgggactcctcgtgcgaaatgggggacttcttgttcaggcagtacgtcatcgtgtcgtggctccctgggatggagaggtggtggaggggcacatcccagagccggggacacagtgccgacatccagtcctcgttggcatttctgcagtgcagcctcgagaagctgttggaagcgctcacctgcccgcccatcagaggtgagccctgggcaaccttgagtcccacacgcagggggagttcggaattcgaattgttggtctcgagcccagaatgaaaggcctggtctccctgggccgcaagaaaggacgagatcctctcggtctgcagctcctggcggctgcccgcgttggcttcacaaggttctgtaataatcctgctgccttctcttccacactgaggccaggcttcccaggtggctgcagattttgttcttatttacatcttcccaaaagccttcctcccagaccctaagccaacaccagctacatgaactcagatcttccc

SEQ ID NO: 364442 - DNA, 306 bp, Homo Sapiens
cgttgtaatagttaaagaggcttagaacaagctaacaggcaatagaaatatgtatatcagattttttaatgtaacaaactacatgttaattgttatcttattctttttatctttagtagacacttttaaaagaaaagacaattttgttgtgtttaactcaccaacacgtggtgtataatgaagacagaactataataaattagttttgttctgattttttagaacacttgcaataatgtatcatttatagttcttgctagttgcagtggtaatatttttcacatccataaaaacaactaccaaaat

SEQ ID NO: 364443 - DNA, 525 bp, Homo Sapiens
gcggccgcctgcccaggaccggcaggtacgcggccttgcggcgccgcagcaccagcgggctcccggactaccgggcgccgccgtcccccgagcccccgccctccccggggagtgcggacccggactccagccctctggccaaggccgcctccccctcgccacccctgcggctggagggctcgccccccaccaggcgggactccgggagctcccagtcggatgacccatccagcagcaataagggctacacacccctgcgggaggccggcacctccaccgagtcggtcttggacgcagtagctggtcaaacgcgagactctgctgtggccgcccccgttctgggtgcggagcagagctcgccggagggtgccagccaggagccacccacggccgagcaacctcagccggtgcagaggcagtttacaaacaaggagaaactcatcatgatttccaggtctcatgccataggggtagaagaagaactggaaagcacaggcatttagagaaaggggtgggttggggaga

SEQ ID NO: 364444 - DNA, 533 bp, Homo Sapiens
cctccatcaacaagatggagggagctgcaggctcccttggagctgggctctcgcgggttggaggggctgaggcctgccctggggcgtccctgggcgccgccgtcctgtgctagcagcccggggcgctggccctgcctaggcctttttactgcctgccaccgtctcctggtccggaatggttgatggagactccatggaggctccctccacagcccgctctatcgccgggcgcacccgctgcggcccctgcggggagcagaatcagggacagatggcgcccggtgagggcgggccccacaggccacctccacgaggggtcttctcttttgttcctcgtctacacctacgtcttcggcggatgtcatggtgctgaaccatttcccggactccacgtaaagatggaagcgattccgctttcgtctcgccctggcggttcttagtgggattacaattgaggatgttagtttggatgaaagttggtgaaatacttaccttatgtctggaaatacagataatgtgatttttaaaaaaca

SEQ ID NO: 364445 - DNA, 591 bp, Homo Sapiens
  misc_feature (44)..(44): n is a, c, g, or t
  misc_feature (63)..(63): n is a, c, g, or t
  misc_feature (73)..(73): n is a, c, g, or t
  misc_feature (87)..(87): n is a, c, g, or t
  misc_feature (92)..(101): n is a, c, g, or t
  misc_feature (105)..(105): n is a, c, g, or t
  misc_feature (122)..(122): n is a, c, g, or t
taacctgggattaagaccggggttttaggttaaatagtttgaangggccctgttggggataangatggggtanttaggaggaatttnggggnnnnnnnnnnggtnatctgcagatatgtggnggccccatctctccccccacacccccacagagctaactgggttacagtgttttatccgaaagtttccaattccactgtcttgtgttttcatgttgaaaatacttttgcatttttcctttgagtgccaatttcttactagtactatttcttaatgtaacatgtttacctggaatgtattttaactatttttgtatagtgtaaactgaaacatgcacattttgtacattgtgctttcttttgtgggacatatgcagtgtgatccagttgttttccatcatttggttgcgctgacctaggaatgttggtcatatcaaacattaaaaatgaccactcttttaattgaaattaacttttaaatgtttataggagtatgtgctgtgaagtgatctaaaatttgtaatatttttgtcatgaactgtactactcctaattattgtaatgtaataaaaatagttacagtgaaaaaaaa

SEQ ID NO: 364446 - DNA, 403 bp, Homo Sapiens
aggggaaggtgccccccagggcagcctgccttgtaaattaccctgaaaacaaaaacatacagcgcctcctcggcttgggacccccaccgataaattatggccaggctgtggagcaaagcccaggaaagactggttgctggagagttcctcccccaaaccccccgagcgatcaaaaggcctctgggtccggaaaagggctcccggggtagctggcatcctgagtaaatgggagcctaaagcatcccaaagggtttcccctgtgttttcaggcaaagtccaaagccagaccctcttgcctcacaaatttgccaggagatttcacccaggtcctctgtggcttcatacccacctcttcctgcacttttctgtttgccagcctccagccttagaccccatcagagag

SEQ ID NO: 364447 - DNA, 449 bp, Homo Sapiens
agctttggccatggggtttacctcaccctacttttacgcaagagtatgtggtggcctaacacaggtgggggaccctgcttcaataccagcctttatccacagatgaccccacgccttctgctccagagcatcagggttataacacatgggacacacggggcacacatacactcccacgcaacatccacacaccccacaaaactacctgagcccacatagtcagggcagggacaggcacagaacaaagtgggtgcacagggactcgcagggaggtcgaagagctgagtctcgtcgggaggctgagggggaagagcgggcactgggctgcgagtgtgcagagctggaggtgggggactgcggtaagtacccgtcctggggtgcgggccctgctgggaagcattgggagcaagaagggttagatcctcaaaggaggataattcttccagaag

SEQ ID NO: 364448 - DNA, 464 bp, Homo Sapiens
  misc_feature (86)..(87): n is a, c, g, or t
  misc_feature (96)..(96): n is a, c, g, or t
  misc_feature (99)..(99): n is a, c, g, or t
  misc_feature (104)..(104): n is a, c, g, or t
cggtcccgtggcggtccgggcctcctggctcacgttcagcttgcggagctttggacacatctttcctagtcagtgcgccccttttnncccgggttnttntcccnccctttaaaatgggcgaaaaagagaacttcagcttcggttttccagctcccaaacagttaagtgacttcctgcaaacgctacagtcccagcaaccagccttccaatcaaaagtaagttggttgatgtcactggcattggctcggccaatcacaagggcgttccgaaagcaagcgctcgacacttgtaaacgcgaagagctgtagtgaaactggacacatctttgtattttgtgttgctggtagtaaatttgagttatggatgagaggacaggggtgatgaataaatgcagtgtgaatctataattaaaaaaaccccattatgtcaggataagtccaagaataaacacaaatgagtaagaa

SEQ ID NO: 364449 - DNA, 643 bp, Homo Sapiens
tgtcctctcagtgctttccaggggccttcctgtgcccagcttctgggcccactcctgtgaggtcactgctgcagggccttcctgcctggacagagttggagctaggccactagaccaccccacagggcatagccagggggaccagcacaggaggggacggagaggagctgcaggagggctggggggaggctgcagtctcggaggggggcctcgccgggtctggaggggacagcagagacagcccgttccccctgccgcctgagggcaccagggagagggctgtatgtccctcacgccacactgtgtgtgcagtcagcagtgtggccacagatgggggccactctctcaacctcaggtgtcctcagggcccagaccgctgctgggcacagccaggctggctgccagctggttccctgccccgtggctgggggacagagcagcacgtatcagctgggctagggtcagggggccactggtgcgcagcctggcacagcctggcaggcttgaggcccagtgtgctgggggtggtcacacagccgtcagccacctccagctcttccagggcattctagatggggtcccgggagggggcaggttttggtgccaatttgagtgtataaagttttaggtaaataccaaaaaa

SEQ ID NO: 364450 - DNA, 498 bp, Homo Sapiens
gttttgtttctgatttcatgttcctttgaggtacagtcagatgaaaatgctgagttctgagagagttccaatgaggagctgcctttcagctttggaaaatatgcatctaaaacaaaaccaaacattattgtaatctgacacaggcaaaattatggttcccacacccaaaccccaaatgaaacctgggattttgaatgtggctctaagagttaacattgctgtctgtatgtcgtgtatgctaggtgatatcctcagtagggattgactactagactgtgtgttttatcaaagtgtgtaagaataaaaactcacttgcacgaattgaaacgtaaagaaatgacacttgtgaacgtgtgaacgttaacactgtagttgatagatcttaagctgctaattgttgagagagatttaaatttatgttctgtctggtcgctgcagattctcagcagcacttttactgtatatagaaattgaaataaagacctcagctattaaaaa

SEQ ID NO: 364451 - DNA, 507 bp, Homo Sapiens
  misc_feature (15)..(15): n is a, c, g, or t
tcctccccaactccncaaacactgtggaaggggagaaggaagtgatccacagcattcaggccacttggggtctagaccatggtggtgccagcctggggggggcagtggccctcagctctgcccgctggagcggttgagtgcagaagggtgcgcctcttccctctacccccgcaccacctgctgtgtgccagcctgagacggttcctgcctgtcttgggggttggtggagggtggaggcagttctgccagccgtggcagggctgctatggggcatccagggctgtgggggtctggaggaggggacatgaggtgagaggtatcctggccgagggcggggggcagcggggggtctccctccggacctacctcagggagctgagcgtgcaggcgctccagggcaggcctgggacagagtcaaggctcagagaataaaggtagctaatctcatcataatatttttattagaatgttctgatgataaaaataaaacttgttttctttaaagaa

SEQ ID NO: 364452 - DNA, 1129 bp, Homo Sapiens
gcgacggggctaccgtggttttatcagtgcaaatcgtccagataggtccacttagcctgctccggccgttgtgccgggcatttggcaaaccaagcgtgctgggccacccagtcgcacccgactgaaggggccttggccaggagacggcacttccagtgatgcaggggaacctggccgaccgtggtccccgcctcaagtgcatgctcgccattaggtctacaagttccccagcccctgcgatgagggcccattgcacgtgctataggaactgcgcagggttgtggatttcctttaactcaggctgcacgtgtgcgcaacacagggtagccctggacggcattcagtgttttggtggcaatggctacatcaatgactttcccatgggccgctttcttcgagatgccaagctgtatgagataggggctgggaccagcgaggtgaggcggctggtcatcggcagagccttcaatgcagactttcactagtcctgagacccttcgcccccttttcctgcacctagtggcctttcttgggaagtagagatgtggcggctttcccaccctgcccacagcaggccctcctgcccagctgctcttgtcagccctctggcctctggatgaggttgagttctccacaacagctcccaagcatcatgggcctcgcagccgggcctgtgccacggctagtgttgtgtgatttaaaatggactcagcaggaagcatattgtctggggattgttgggacaggttttggtgactctgtgcccttgctctctaacttctgagcccacctcccagggtaggcacctgggggcatgcaggtgcccacctcccagggtaggcacctgggggcatgcaggtacccacctctttctcttgggtgaggctctggcaaggagatctctctgctcaagcacagcagaatcatggcccctctccatgaattggaacttggtacaggttaagtatccctaaacctgaaatctgaaacacttgtggttccaagcattctgggataagggcaaattcaaccgtgtcagtctctataactgggggggacacacaatactaaaacctagcctaagccaggcgtggtggatcatgcttgaaaatcacaagacgttcaagag

SEQ ID NO: 364453 - DNA, 413 bp, Homo Sapiens
acccaggggttctatggagatcccctctgcctcggagggtctggagtaggcctcagacgctgcgtgtgtaaaaagcgcccagcctgttcccacattctgagcagtagggtcaggctggcagcacgtggctctgctggctctccaggccacagaacgtggctctgtgtccaaaggactcttatctccacggtggccccacgtgagcctccatggcgtagcccaggccagctgggccaaagtctgccaggagcaggacggggttctccaggggtgtgtttccccgaattcactggaaacggtgtcacaagcacgcacgcctgggtggtctcaggcgtgggctccctctgctgagtggagtgagagtcgctgcctctgacagggttgttttaaataaatcacccggtaaatagagc

SEQ ID NO: 364454 - DNA, 1753 bp, Homo Sapiens
  misc_feature (321)..(331): n is a, c, g, or t
  misc_feature (343)..(708): n is a, c, g, or t
ggagtaagtgaaggcgggggggcggttaaggataaagggatcatgagcggggaacaggggggaatatgatatagtggacggcggggcatatacaaagagactaggggagggggcggaaaacgtggtcgcagaggtgcggtaatagaggggattatgtggaaagggcggttgcacgttggggaaatgaagcgcaggcaggcgggtagaaaagtatggtgggacgaggcggcaaccgcacctaaaagtttaagggtgttggtattttgaggaagattgcgcgataaaatttttggggaaatgaggtgcatttgtgtagccaannnnnnnnnnnatccgccaaatnnnnnnnnnnnnnnnnnnnnnnnnnnnnnnnnnnnnnnnnnnnnnnnnnnnnnnnnnnnnnnnnnnnnnnnnnnnnnnnnnnnnnnnnnnnnnnnnnnnnnnnnnnnnnnnnnnnnnnnnnnnnnnnnnnnnnnnnnnnnnnnnnnnnnnnnnnnnnnnnnnnnnnnnnnnnnnnnnnnnnnnnnnnnnnnnnnnnnnnnnnnnnnnnnnnnnnnnnnnnnnnnnnnnnnnnnnnnnnnnnnnnnnnnnnnnnnnnnnnnnnnnnnnnnnnnnnnnnnnnnnnnnnnnnnnnnnnnnnnnnnnnnnnnnnnnnnnnnnnnnnnnnnnnnnnnnnnnnnnnnnnnnnnnnnnnnnnnnnnnnnnnnncccctcccccctccacgctggtgcagagggaccgggtcaggaagcgcggcctctccccagtccaagaccacgcctcctccgcctccccactcccccttcactcctcccaggaagcggtgatagacagttctgcgtggttctccacccccaccctccccctgctgagtggaggagttgatgtgtctcattataacagccaatgcagccgccatccacgcacaagcaaagaagcatgtcccatttaaatacacccacgcagccccagcgcccttagccgatcggggcgctcagcccacacgcaccgctgctcggggcttggagatccgcgcaggctgggctcccggacccggcggaccgacgcgcggaggatcgggatccggcgctgtggggctggggtgggcgggggaggctgggcccggggcctctggcgcgacacccgcatgaggacgcgagtgaaatagaccaaggtggaatttccaagggaaaagcttcggggtggttttggtccatttctccagcgaagaaagtagacatggcgagcgactccccggctcgaagcctggatgaaatagatctctcggctctgagggaccctgcaaggatctttgaattggtggaacttgctggaaatggaaacatacggcaagtttataaggggtcgtcctggcaaaacgggcccagcttgcaacccttaaggtttatggatgtcccagggggaatgaagaggaagaaatcaaaccagaaattaacatggtggaaagaaataattctcattacccggaaaatttgcctacaatattattggggggctttttattcaacaagaaccccacacaggcatgggatgacacccaacttttggttcggttgatgggaacttttcgtgggggcttggactctgtcaacccgaccccggattctaggaaccccacaaaggtgtaccaccctgtgaaaataagggagggggaattgccattacatcccggccaggggaaaaacttttaacgggggggctgtaaaatccacctgggcgcacccgcatata

SEQ ID NO: 364455 - DNA, 470 bp, Homo Sapiens
gtcccaaccactgactccagcatacggtttaaacacttggagtttcttgatatctgaggaagaaagggccactgactttttctttcctaggaggcaaaagtggatggaagagagaaggggtttgctcagatgggcatgaacagcccctgagccccatccccactcccctggtgggccctgatgctctcccacgcagggattctcaaggtggatggtgtagagaaccatcagcctccttttcccacggtgacagaaggcagtgcaggcagaggtggcgagggggcagctggggacggtcagtgtcaccgggaatgtgaaagtgggccccctcttcctgtcgggctaacatgctgtttgccttacagggaccagtgtatcagttgcgtggagatactagagacacacttgcccagctgggaattgcagagctagtgcatttctcccaaagcacagactaataccccagattt

SEQ ID NO: 364456 - DNA, 402 bp, Homo Sapiens
  misc_feature (322)..(322): n is a, c, g, or t
gcggccgcacacgcggcagttgtgcggcttcacctcgctgtgctgcatcatgtggcgcttcaggtggctggtctgggtgaaggccttgtggcacacctggcacttgtggggccgcgtgccctggtgggtcagcatgtgggtatgcaggtggctgagctgcttgaagagcttcccgcagtgcgtgcacgcgtgcggcttgatcccactgtggcccaggatgtgggtgaccaggttgtacttggaggtgtaggacttctcgcaggtggggcactgccagcgcttctgcgagccgcccacgtccacgtagtagctgtcatcgatnctgcacgttcacgtccaccctctccaccttctgcttggtctcctcgctctcctggggctcggctttccggggcagcagag

SEQ ID NO: 364457 - DNA, 640 bp, Homo Sapiens
  misc_feature (414)..(422): n is a, c, g, or t
tcaaggatgcttttcagtcaagataatgtgccttgtttccagccatattaagataaaaatggaaacctcagtaaattttggaatgccagcccaataaggtacaacatacaacatggttgaaaatgtcctccctgccagaaggctgtcccattgcctgtgtcctacccattttaaaatatatatatttttttcaataagaaatgctagaaagcaatagggcggggaatgccgcacctctcaggcaatcagcacaaaaattatttagaaatctttggaatcacttcacttatacatacattatctcgaaagcactggccccgaactgtgtttctgctaatatgaagttaattagacaatcaaactttgagccttgagcgatgggcactacagcccatcaaggtatgtcaagaaagnnnnnnnnntgtgtattttcctttatgaccaaaccaggaggttatacagctggcattgcatacatgacagatgtgcatatttgtaaccttaaataaacagaagcagggaggtaactgtgtatattatctagcaagagacagcagcagacactcgccaaaaaagacagaaagggacaagagagacacatagacataataaaataacaacaataaaaatcctccaaaaa

SEQ ID NO: 364458 - DNA, 430 bp, Homo Sapiens
catgataaaaactcttcagaatctaagaattaaagtaacatacctccaaataataagagccatttatggccaacctgtagtgaacatccctctgaaagggcaaaaactggaagcattttcctggagatttagaacaagacaaggatgccccctttccctgctcatattcagcatggtagtggaagtgctagccagagccatcagaccaaagaatggagtgaaaggccacccaattagataaaaagtaggtaagctgtctcccttcccggatgatataattttatactcaaaaagccctaaagactcccccaaaaagctcctggaactgataaataacttcagtaaagtttcagaatacaaaatcagtagcattttttaacatttgagagtcaaaccaagaacccaatcccattttcaatagctaaaactg

SEQ ID NO: 364459 - DNA, 481 bp, Homo Sapiens
aaaatttcaagtggagtcgtcgtacaatgagagtgagtgtcttgacattttcacccaggccctcctgtcatcacatcaccggctgtcactggcgggtggccgtaaacgtcctgcgttgctatattaggatctctgcagttcaggcttcaaaaccagttcagtgtatccgggcgacgggtagtggtggtgcatgcctgtctgtgtgccccgctggcgagctgtagttgcggcttgcgtgcctcgcggcccactacagggctgcagacaatcgaggcgagggcgctggccgccagcagctcacagcgcgggggtcatgtggtcgctcctcgagggtttcgtttttgttctgcttcattaagactggaatcaagcttacatgtaaactattggtaatttaagtttccttttgtgtcattcagtgtaaaactgtctaatttgaaaaaaaatgtaggttatgaaaataaagatttaggcactgttc

SEQ ID NO: 364460 - DNA, 1210 bp, Homo Sapiens
tcacatgtttacccctacgtggtaagatggaaacttagattaccaatagttctacgtgtaaggcttgattcccgtcttaattgaagcataacaaaaagctgaataccctcgtaggacgcgagcacatgacccccgcgctgtgatctagctggcggccagcgccctcgctctcgatttgtctcgccgtccctgctatatggtgctcgtcgaatggccattcgacagattcctgctaatctactggctcgccagctgggcacgcagacaggcatgcaccaccactacccgtcgcccggatacactgaactggttttgaagcctgaactgcagagatcctaatatagcaacgcaggacgtttacggccacccgccagtgacagccggtgatgtgatgacaggagggcctgggtgaaaatgtcaagacactcactctcagagaacgacgactccacttgaaattcatgtctggtgaaacgggacccggtttttattcttctatttccaaatgataagcatcatcacacgattttacaagttaaaatgccatttgtcactgctgcatctctgattctataacctgagatactgctgggggtaaaggagggtgttaacttaaaaacaaaaacgtatgaaagccactctcatcgctgtatgtgacacagcacagttggcatggaccgccacagcttcctattatgataactctcattttcttctgagcagaaactcttgaagctagtatcaggtcattgcagaacattatatagcaatctgtatttcacctttaattaaaaaggatgctataaaaatcacctccgagcaaggtttcagttcttgatgcagaagactgctgctggctaggcagtaactacagtgtaattgaccggagggcagcagagccctcccagtggcgactggctaatgcacgcgctgccctcctcatgcagctgttgagctcccacttcggtcgacaaagtgaaggactaagctggctctaaccacacacacacactgcgctgcaatgctcacaccttgggggaaaggacttctcattattaaaaaccaaggactcactggcggacgggcaggccttgtgttttgggaatggctgatggcgccctggcccttccgtagcgaagatgcagctcgtaggcccaggcctcgaggttgcctcccagctttctgagtattgagagtttgggtttcacag

SEQ ID NO: 364461 - DNA, 303 bp, Homo Sapiens
ttttttttattgctacagagatgtttattctaaatttaaataaacgcataaaggaacttctctaaactttttgctcagaggaccaaacttgaacttcaattggtgaaggaatcctggaatactgttcaggggagcagagaatccccactcatatcctctctcttgcccctctcccctaagggttttgatctttgctgtccactgttctccacacacgcaacaaatagacaatgtgtcccaacccaagaagctgaaagtcctgtgaagttcaaacagaaaattgtcttaataggctgcacgtgg

SEQ ID NO: 364462 - DNA, 1240 bp, Homo Sapiens
  misc_feature (84)..(289): n is a, c, g, or t
  misc_feature (298)..(319): n is a, c, g, or t
acaggccatggttggccaacacgccttgttaactccccagccagttttgggagggttgaggccaggaggctccatttaaggtcnnnnnnnnnnnnnnnnnnnnnnnnnnnnnnnnnnnnnnnnnnnnnnnnnnnnnnnnnnnnnnnnnnnnnnnnnnnnnnnnnnnnnnnnnnnnnnnnnnnnnnnnnnnnnnnnnnnnnnnnnnnnnnnnnnnnnnnnnnnnnnnnnnnnnnnnnnnnnnnnnnnnnnnnnnnnnnnnnnnnnnnnnnnnnnnnnnnnnnnnnnnnnnactctctcnnnnnnnnnnnnnnnnnnnnnngatagtctccaaaacacaagaggtaaggtttaagtcccattggcttacgacaggaagatatgtgcacatctgcagagctggtaacagggaggcaggcattccctctgatggttgctgtttcttaatgaggcatgtgttgtggtaactaccacaagggggaattgatagataagacagaagttttgaaacagacatcccagagtagatctgctgggcagtgcttagtgtccatctgaggtttgtaatgataaacgtaaggtacaactggtggccaggctggctgttttctcacctaatgatggtgacttgggtttgggcacagaggtgaatgattgggtttacccagggttagggttttactagcggaacagaatggagggagacagaggggtgtagggtggactacggaattgatgctacacaagagggaagtgaaggcagaaggttactcatgcagattgttcctggggtcctgagtaccctgacaatctgctgctggtcggagggcactatgtgctcccctagcacctccttcaccacatgcttcctcttggtggcctgagacatgctgaagtcgtcccacactggttaggaacgaagagactgtcaactcctcctcctgagttccttggatggcaggctcagaacccaggactgttacttagtctctggccctcggctcccaggaacgctgccggagcaacaccgccgtctaggctggacgctgagagaggatcgtccacgactcacttcaaggctgaaccaagaaaacacagtaaaggaacttgccggcggccgcgacggtagcgtcagttagaaatcaggtctccagtgttcccagttcccaccagtccaactgcgaggagtgcgacgtgagtctgagtctgatccctccgaaaaccgtacttccggccctccgct

SEQ ID NO: 364463 - DNA, 572 bp, Homo Sapiens
gaggaaattaagagagcagaggatctgtgtcgtctgatgaaggagaaacttgaagaggaagaaaacctcacccgggagctgaaatctgagattgagcggcttcagaaacgaatggctgaattagagaagctagaagaggccttcagcaggagtaagaatgactgtacccagctgtgtctgagcctgaatgaggagagaaatctgaccaagaaaatctcctctgagctggaaatgctcagagtcaaagtgaaagaactagaatcttctgaggaccgcctggataaaactgagcagagtttagcgtcagagttagaaaagctgaaatcattaactctgagctttgtaagtgagagaaaatacttgaatgaaaaggagaaagaaaatgagaaattgataaaagaactcactcaaaaactagagcagaacaaaaaaatgaaccgagattatacaaggaatgcttctaatctggaaagaaatgacctacggattgaggatggcatctcttccacactgccgtccaaagaatcaagaaggaagggtggtctggactacctaaagcaggtagagaataa

SEQ ID NO: 364464 - DNA, 636 bp, Homo Sapiens
  misc_feature (565)..(565): n is a, c, g, or t
  misc_feature (609)..(609): n is a, c, g, or t
gcggccgcggctggcagcacatccgcggggctggcgtacggagagccggtggggttggagttggccacggggcctgccacgttggcgtagctgatgttgaggcagctgctgctctgggggtcttcttgtaccttctgcacgatggcgctcacggccttgtgcacctgctcgggctcgccgctgaccgtcaccacgcgctcctgcaggttgatgccctccggcttctgggacagctgcacccatgctcctgactgttccatcacggctttcaccgtggcgcctcccttgccgatgatcaggcccgccgtgctgttggggacgatcagcttggcctgcttggctctgtcggggttcatcgtggtttggggttgaaggatgttgaccacctcaggcttggtcatcgcttgtgggatttctcggaccttctcggcaataaagctgtgcacagcattcaaggcctctgccgtgcccctgtactaggcatacccgctctgtggttccggggtagaagtcctttggaacttggagagcttgaatggtggctccggtctccttctgcagctgncacgaatggtctgccccgcccttgcccaatgaatggaagcccgncgccgtagtctggggatcagtcacctt

SEQ ID NO: 364465 - DNA, 587 bp, Homo Sapiens
agaggctgcttcctgctgtggacttgattagcagccccatggacagtcactggactgttagcgaggcaggagtccagaggagccagggtgacaccattttaaaatcagcaccgtcttaaactagcaaggcacactccttgccacacacaagccatggtcctaagatgtttacagctaaggaagcagcttggtgatgcctgcaaagcaaactccaagaacagaaagtccagacgtccaatacccataattaggtctatgctttcaagatagtaagagtcatgctatgatgactgacacactaaaatgtcaaggatggttttctttaaaccaatagaatgataaaccttgtcatgctctctgctcagctgcacatatgcacagcttcacttcgctttgcagacaagacttctgtgtaagaaaaatggaaaaagaagttggtgtgtcctctgcttgctttctgctctgtaacagagtcatttctaataaacgtgcctctttcactgtgctctgtgactggccttgaattccctcttgtgtgagatctgagaagcctctcttggggtagagaccccctcttccaggaacag

SEQ ID NO: 364466 - DNA, 1422 bp, Homo Sapiens
  misc_feature (1201)..(1208): n is a, c, g, or t
  misc_feature (1210)..(1210): n is a, c, g, or t
  misc_feature (1212)..(1220): n is a, c, g, or t
  misc_feature (1222)..(1242): n is a, c, g, or t
  misc_feature (1244)..(1276): n is a, c, g, or t
  misc_feature (1278)..(1282): n is a, c, g, or t
  misc_feature (1284)..(1313): n is a, c, g, or t
  misc_feature (1315)..(1318): n is a, c, g, or t
  misc_feature (1320)..(1321): n is a, c, g, or t
  misc_feature (1323)..(1323): n is a, c, g, or t
  misc_feature (1331)..(1344): n is a, c, g, or t
  misc_feature (1352)..(1355): n is a, c, g, or t
  misc_feature (1358)..(1358): n is a, c, g, or t
  misc_feature (1363)..(1366): n is a, c, g, or t
gggatattgatttttatataggtatttatttcagaattgatattttgagaaaaatacatgtgagtcattttttctgtttctcttttctcttaacgattatcactgtaattctgaatctgaaaggtaaaacaattagtcaaaatattattgccatcattctacctgtgttatgaaactacttattcatagttaattctcattaacacttacatttccataaagaaaactcaagtattaataaaagagactttactggcttaagagggctgtgaaagatttttgatagtgaatcatgaccctaagggagagatttgtgtgataaaagtattgtatataatagatcagcgatttttgtaaggcaaacagaatttgtaagttggcagatcttcctaagttgcaaaatgtaatgatgagcttggtggagaagaatgagtcgttcttggaatacctatgtgcagccactacccatctcaatgtcaccttgtttgcattcttggatagcttgtatatgtagtagtttgatgaataatttaaagaaaaacacctaaaatttgaaaaatgattgtaggatcaaaaaaggcagatgaaattacttaatactcagtgttttggagagtattccttttagtttgttggttggctggtttgaacgatagaaatatgcagcatgcaatatatgcttatatttcattttaatttctgatatataatgaacttcttgggagaggtactgaatctttgatgttttttgtcattgttctcaagtgcaatataacaatgtaaccaaatctagataatttcaaagttgtcattaatttagtaagcctaatataaacaaatatttgtattatttttgttagcaggaaagagtgattaagtgaggttatttacccctaaatggtccattctgcattgtatttcaggctggaaatgaattattctttaccagttttgaaacactttgaaatatcctaaggtaacttggaagctgtgtagtatatcaaattaatttgctacctaataacatagaaagtaaatatctttgtggtcacccacattgggtgagacagaaaatgaatctgttctaaaatttgtaatttgctaacttgatttgagttagtgaaaactggtacagtgttctgcttgatttacaacatgtaacttgtgactgtacaataaacataagcatatgggtaccaannnnnnnnanannnnnnnnnannnnnnnnnnnnnnnnnnnnnannnnnnnnnnnnnnnnnnnnnnnnnnnnnnnnnannnnnannnnnnnnnnnnnnnnnnnnnnnnnnnnnnannnntnnanaaaaaaannnnnnnnnnnnnnaaaatttnnnnccnccccnnnncccaccaaaaaattttaaaaaaccttttttgtcgggggggcccgccccccaaagag

SEQ ID NO: 364467 - DNA, 1019 bp, Homo Sapiens
tggtctaggaaatttacggggtccatattcaatgtaagccataatgctctaaatgttgccgagatcttcgtatgttccacattaagacttcggattctttacagggactatgcttgttgttgataacagttctgtgtagtctcaatcgacttacccataatggcggttacgcatacatcgttgtggaaagtctcccacgagagctaacgatgaaacacggacctctcaccttctgatctccctgtgccgtcctctaagaataacgcgttttgcatggatctacacactttgttcacccacgagttttccacttctgccctttgaagacttggtgaacctccctatgggtctccctgtgggctctgccactggacagaacggcctcctagctctctccgctctgtcctggtagcccttcgtcgataggctttgtgttgcctacgtaagtgctgtcctggcgtgtctgtggctgggccccgagggtggaaacgtattcgcgtctccccgtctcctccttaacctgggactctccgggtcttctgagtatttgcatgctgcgggtgtctaggacagagttgcttccactagaagcctggagacatagcatctttgatagcataagccagattatctgtgtgtgcaggtggtgtcgcgtgtagcgtgcatgtgtgaatcgtgagctagtcatacgttgagatgtgactccacaaacacctcgtatatagcgagcatatacaaccaatgtgggtagacctaggtgttctctacagaggggtgtgtgtgtgctgatgcgagcgcgtgtgcctagaatatatattactctcagaggagattctgttgcttttgaataggaatttgttttgtgattagttcgccccttccccaccccttaccagatgttaagcagctatgaaacattctctgtactagttctggtctccttttgactggactgtggctctgaaccttgagcatagtaccacggactccgtgggcgctcaataaacacacatgagaac

SEQ ID NO: 364468 - DNA, 498 bp, Homo Sapiens
aatgtagaagttagtaaatttaaagctgttgaactagaggagatagctgaggaagtgcattcaaatagagaagatgtcagaggagaactttggggttctctcagtggttagagataggatatgaggaaaaacagtgcaggagactaaggaggagctctcattgagttaggaaaatcaagagggatgccctggaagccaaatgaaggcagtgttttgaggaagaggggtgatgggccatgtgaaagccaataggtcacatgctgctaatgggtcaactaaagtgaggactgagaagtattcaccaatttagcaatgtggagctcattggtgacccctcataagagctgtgttggtggaatggaggaggtaaaatcctggagggagagaacataagaatgagagaacagttgacagtgcatgtaaacaactctttcacggaactttgtatttctgaatttttgtttatttggctattaataaaatcatatctgatataaa

SEQ ID NO: 364469 - DNA, 713 bp, Homo Sapiens
cgcgggaggtggcctcgggggtcgtagctactcaccggcggggcgctccgagtccatctgccccgtagcccggcagccggggcgggagggctgcgagcccggggcgcggtccgcctgaggcctgagacccggggccgcctgcgctcagggccgcggtgccggccgcgcgggagcctggcggggacggcgcggtcagtgttcggctcctccgcagtgactcaccagcgtcctgaagctattgatcaccattggctgggaaggaaaaacagaatcagctgttccctgcgaaaggtatcatatgtttcttacaaagtggaggtttgtggcagccctgcatggagcaagtctgtcagcaccatctttctaacagtatgtgctcacttcatgtctctctcacattttggtaattcttggaatgtttccgttattaaatcagttatagtgatctgtgattagtgatctttgatattactgtcataattgcttggggggcaccatgaaccacccctatataagacagcaaactgagtcgataaatgtttttatgtgtcttgacaactgcactgaccagctgcctccctatctctctccttctgctcagacctccctatccttgagacacagcaatactgaaattaggggccaggcatggtggtggctcatgcctgtagtcccagctacttgggagactgaagcaggaggattgcttgagc

SEQ ID NO: 364470 - DNA, 272 bp, Homo Sapiens
gtgtggttgctttatagcgccaccggtctgtgtgtttaagtatgtttttgcattagcgtgtagtggtctttcctttctatatttagtcctcctttctaaaatctcttgtaaggcagatgtggtggcaatgaattacctcagaatttgcttgtctgtaaatgatctcatttctccttcatttagaaagcttagtttagctgtatatgaaattcttggttgaagattttctttaataatgttaaatatagtcccccaatcccttctggcttgta

SEQ ID NO: 364471 - DNA, 490 bp, Homo Sapiens
  misc_feature (79)..(79): n is a, c, g, or t
atatgacttctcagtccctcctctcttctcttggctttacttacaccacattctctggttttcttcccctctcacagtntgctccctttccgccaccttttcagggtcttttctccctccctgacctttatagtttgatgtctgtatgacttcggcttggctctcatcttcctctacattattttcctatgtaatagcatcttctcctgtagtttaaaatactgcctgtatgctggtaacttccaaaatttatatacaattcagacctctctgaacatcagacctgcatatccggttacctgcttaactccatttagaggtctcaaggtctcattgacattgcaaacttaacatttccaaaatggcaggttgctttctattccttctctccagttaaatctatccagttgctcaagctagaaacccaggagttattctccattcatcccttctcttcactcccatgtccaatctaatagcaagacaaaaa

SEQ ID NO: 364472 - DNA, 595 bp, Homo Sapiens
acagctttgaagaaactaggactgcagtgggctcggataggcccattgaggtttttagaaaagcaggatttgttttgttagggaggcatgattttggtgagatctttctggaagagttttccgcctctcctatggtgagcccagcgtgggcaccgggccgtctcagccatgttcccagggctgggaggacagctctggcccttcttaggcctagcctcgtcccaagctaaatgtaagccagttgggctgtgttaaaggaagcagtgtttttggttcgattctgcctctgtagctcaaggggggcagcccccagagtcctgtgcattctgccaaggctccatagctttgccaaatgcacggagctctgccattccggtgcagtgcaggccttgcgaagggtttatctgcgttcgtctcggtgggcttctcctgcatgggagttgtgttcctgtgcaagggggagctttgctccaggacaggatgactgtcttccctattcttagggacaagtcccaagatgccagaaaggcagtctcccaaggacccaccatgcagaagtgtcaataaaccacaagttctgaactctgtaaaaaaa

SEQ ID NO: 364473 - DNA, 523 bp, Homo Sapiens
  misc_feature (33)..(33): n is a, c, g, or t
ccaaataaggggcccccctcccctctccctctncctctccctaaggtgaaccccaacgtgggcaaccgggcccgtcctaaacccgtgttcccccagggctgggaaggaaaagctctggccccttccttaagccctaaacctcgtccccaaagctaaatgtaaagcccagttgggctgtgttaaaaggaaagcagtgtttttggttcgaattctgccctctgtagcctcaaggggggcagcccccagagtcctgtgcattcctgccaaggctcccatagctttgcccaaatgcacggagctctgcccattccggtgcagtgcaggccttgcgaagggtttatctgcgttcgtctcggtgggcttctcctgcatgggagttgtgttcctgtgcaaggggagctttgctccaggacaggatgactgtcttccctattcttaggacaagtcccaagatgccagaaaggcagtctcccaaggacccaccatgcagaagtgtcaataaaccacaagttctgaaaaaaaa

SEQ ID NO: 364474 - DNA, 371 bp, Homo Sapiens
  misc_feature (16)..(16): n is a, c, g, or t
  misc_feature (43)..(43): n is a, c, g, or t
  misc_feature (51)..(51): n is a, c, g, or t
  misc_feature (254)..(267): n is a, c, g, or t
tgctggtatcagcacnatctgtttactctcataacaccccctnagagttgnaaggaaggcctctgcacccagacagaccctggatctccttccttccttcctcccgcccgcctgcctgacaagcacgccccacgccccgggaagacgggagtcagacagatggcaaattgagggatcgggagctccgctgaggagagctggcatctgacacgtgtctgggaggcaaagccacgtttcccaggacagaggagtcnnnnnnnnnnnnnncaccaagcaattctcagcttccttgtagtaagctgtgaattctcagaccaacagataaacctgtacacaaagatcagtttgaaatacagactaaacgataaata

SEQ ID NO: 364475 - DNA, 483 bp, Homo Sapiens
cggcactgacggccatggcgcgttcgaacctcccgctggcgctgggcctggccctggtcgcattctgcctcctggcgctgccacgcgacgcccgggcccggccgcaggagcgcatggtcggagaactccgggacctgtcgcccgacgacccgcaggtgcagaaggcggcgcaggcggccgtggccagctacaacatgggcagcaacagcatctactacttccgagacacgcacatcatcaagccgcagagccagctgggtggccggcatcaagtacttcctgacgatggagatggggagcacagactgccgcaagaccagggtcactggagaccacgtcgacctcaccacttgccccctggcagcaggggcgcagcaggagaagctgcgctgtgactttgaggtccttgtggttccctggcagaactcctctcagctcctaaagcacaactgtgtgcagatgtgataagtccccgagggcgaa

SEQ ID NO: 364476 - DNA, 476 bp, Homo Sapiens
agtgtggacacgctggagggattagggccaggatggcccagctgccctagtgtgtgcttgccttgtccctcggggtagatgcttagctggcagtatgagttgtgtgtcctgagggtctttgctagtgtggtggaaagataaaccttttgaggtgaagagccagggggtcaggaaatatggcctatctgccaggcagggtggatgaagtcatgaatgtctgggagtttttctgtgtggggaggagacagagacccataactaaatatgctctgtgtaaagtcctattctttcatcttccactttattggcagttgacattcccttactcccaatcaacactcttaaatatttgtactgtttgtaaaacttagtacatgtccctaaatatttaactgttacttgtaaacttgtgtaatttattatttattttaatcaaaattctgaatatttcatttaaatgaaagttggaatattgc

SEQ ID NO: 364477 - DNA, 1699 bp, Homo Sapiens
  misc_feature (765)..(778): n is a, c, g, or t
cccctgggataaacgggagaacccaagaggcccccttttttcgttcttaactggtgataaaaaaccaaggttcaggacttttattttatagagccaaacttgctggtggaggggccatgttctcctttggacccagttaaactgcaaacgtgcattggagcccttatttgttgccccttgccattttaggtgacctttcccacagagctgcgccttcttcacgggtgtgaaagtttttcccccttcagcccctcaggtagatggaagctgcatctgccccacgatggccagtgcagtcatcatcttcaggatgtttcttcaggacttcctcagctgacaaggaattttggtccctgcctaggaccgggtcatctgcagaggacagagagatggtaagcagctgtatgaatgctgattttaaaaccaggtcatgggagaagagcctggagattctttcctgaacactgactgcacttaccagtctgattttatcgtcaaacaccaagccaggctagcatgctcatggcaatctgtttggggctgttttgttgtggcactagccaaacataaaggggcttaagtcagcctgcatacagaggatcggggagagaaggggcctgtgttctcagcctcctgagtacttaccagagtttaatttttttaaaaaaaatctgcactaaaatccccaaactgacaggtaaatgtagccctcagagctcagcccaaggcagaatctaaatcacactattttcgagatcatgtatnnnnnnnnnnnnnngaagtcatgctgtgtggccaattataatttttttcaaagactttgtcacaaaactgtctatattagacattttggagggaccaggaaatgtaagacaccaaatcctccatctcttcagtgtgcctgatgtcacctcatgatttgctgttacttttttaactcctgcgccaaggacagtgggttctgtgtccacctttgtgctttgcgaggccgagcccaggcatctgctcgcctgccacggctgaccagagaaggtgcttcaggagctctgccttagacgacgtgttacagtatgaacacacagcagaggcaccctcgtatgttttgaaagttgccttctgaaagggcacagttttaaggaaaagaaaaagaatgtaaaactatactgacccgttttcagttttaaagggtcgtgagaaactggctggtccaatgggatttacagcaacattttccattgctgaagtgaggtagcagctctcttctgtcagctgaatgttaaggatggggaaaaaaaatgccctttaagtttgctctttaatcgtatggaagcttgagctatgtgttggaagtgacctggttttaatccataccccaagacggtacataatcctaccggtctaaatgtacataacaatatagtttggaattctttgctctactgtttaccttgcagattgctataatttcaaggagtgagattataaataaaatgatgcactttaggatgtttcctatttttgaaatctgaacatgaatcattcacatgaccaaaaattgtgtttttttaaaaatacatgtctagtctgtccgtttaatagctctcttaaataagctatgatattaatcagatcattaccagttacgcttttaaagcacatttgtttaagactatgttttgaaaatacgctggaatggatt

SEQ ID NO: 364478 - DNA, 429 bp, Homo Sapiens
ctgtgtgtacatgactgacaagaccagtggtttcctttaatacctcatcgacgttcccaggcactttttgtatttgaggtgtgtgaagtaataggttggcccttgtcttgagcgtgatactgaacacaccgactaataaaatgggggcctttggctgcacaccaggcgctctgggtactgatgagctcgcccccaactccatgccaggaatcagaacggttgcccgggagagtcggcagaaagaggaggaaccggatgcagtgatctacctggtttgtcctggtgtccagtaacttggagttcttctttcacacgtggctggcacagaggagacactcataaatacccgagttgaataaaatagtccattgacatggagacgcatgaagcagcattcgtccatccaaaacgccgatgcttctttagagt

SEQ ID NO: 364479 - DNA, 1121 bp, Homo Sapiens
  misc_feature (134)..(366): n is a, c, g, or t
acacgataggctaggtacgaggccgggtggtgaattcggcacgagggaggcttggcagagcaggagccctcggtggcagtgcttgggtgtcgaggctctgaggctccggcctcacctctccacggggtcgaagnnnnnnnnnnnnnnnnnnnnnnnnnnnnnnnnnnnnnnnnnnnnnnnnnnnnnnnnnnnnnnnnnnnnnnnnnnnnnnnnnnnnnnnnnnnnnnnnnnnnnnnnnnnnnnnnnnnnnnnnnnnnnnnnnnnnnnnnnnnnnnnnnnnnnnnnnnnnnnnnnnnnnnnnnnnnnnnnnnnnnnnnnnnnnnnnnnnnnnnnnnnnnnnnnnnnnnnnnnnnnnnnnnnnnnnnnccatccttggctgttcaagtgtagagccaagaatgttaaggaacgtggacacaaaggatgaggttggaacagaagtttaataagcaaaagaagaaagctctccccagcagagaggggacccgaaagagggttgccaactaggaggctgaatctgggggttttgtgaactgggaagaggaagaatgtgctcactagtctgtgagctgtcttggagaaagcacaacttcgcttggcccgggaccttagcctgggaccaaccagaggctgaagtgaaattttggcccaagaccaatcaggggctgaagtgaaagttgggcccaggaccaatcagaggctgaagtgatgattcatagaggctcggctcacagtccaaagcatgtccagaaaacgaaagtggccaccagagcctgttagtccaagctgcaccgatttgtaagcccccaccatttcacagactctggtcagagggaaacagtccactggggtttgggctgcgagaaacatcctccccaaccgcctgacttccttatcacatcctgctggggaaaggcccaagaaacatccttatcaacattctcccaggcaacaagctatactgcccagatccctcctgcccaggcctataattactccagcctgtaagcggcagtgggctctggcatttagttggtcccctccatagagctgccaactctctctctttctttaaccttcaccttcccttcaaaatctaacagagcccaccatatacatgc

SEQ ID NO: 364480 - DNA, 914 bp, Homo Sapiens
gagtgatctagaggatccctgccatttatccatggcacctctcccaaagagggggctcgcttcccccattttcaactgatccactgaggagagggaagggggtgactttcccttcttcagtaggaaaggcacatttgtagggcctgaaactctcccgtatttgctgactcatgggtggagtagacttctggctcccagctccactggcccatggggcctccattgtatcaagtcagcataggctgcccacctaatggtggagagcatgaaactgggagcatcctgtggggggcttgtgggggaaaaaggtggttgttttaacccaccgttgtttgggggtggtgttgcacactagtagagaatagagtctatgcctttggcaaatttaactgggagtttggattcccacttaagggttttacttcttgggtcctgtggatggtggttcttcgtgtcaggatcccagcccgattctgcaaatgcctccatggggtttaaaaacatgaggctttccaagttcttgcccagtatctggggcagcctccagagtatcacctgggagttcaggttctctccagggctccaggtgtgtgtttatctcgccccctccagctctcctcatcctgctccccattgctccatgtcaggctgttccccattgtgccctgctgatgctttgggtccagggcctcctcccaagtgtggctttaaggagtaagcttgaggatgatgttttttaattattgtaaatcattacctcatttccagcctcccaggctccatccatcccagcatcttttattctgccattttcctcaccttgtgctatgacaatggggcgttgtgtttccacagagacttataggagtgttcagtgtatagtttcttaataaacactttattttctaatgaaa

SEQ ID NO: 364481 - DNA, 504 bp, Homo Sapiens
agcccagcgccttcccacactgtggcaggaatagcactggcggcccacgcgcttgtcagggaacagaacagctctcgcccgacgcctggcaggggagcagggaggctgcagcttccccagcgaccagctgtttcccaggctggcggactccacggaccggctccgcgtctcctctccagccttctgttctctctagaggaagatctgcgttttgtctgcactgtgggccgactctctagtggggagcgtcagaccctctaaagtggctgcctctcgggaaagcttccacacctgtcatcagattctccaaaggggctgtttgatgcaagaaacgggaagccccgggggtactaggagcagggcttgctgccattgggcatggtgaggccccggcaccctgcccaggacgggcctgtgggctgagctgcagatgggcattgaggatgccccaacagcaaggtgcagaaggcatccagaagcaaaggaaactgatgaccagcgtca

SEQ ID NO: 364482 - DNA, 691 bp, Homo Sapiens
catcttcctaacaaacgtaaatatatttattaataaacaattttcatgtaccacaattggctagggtctcaaggcataaaatggccttaaggggaagcttaccattaacgataggaaacaaattcattttcaaattatattcttggtcatcctgggctttatggctggcttcatatcatatccgattatgtgaaaacaaagtgtgacctcgtaggatggtgacattgcgaaggatttctccatgctgtgtgtccactgccttcatctcctccacgatcatggagaggttccggacgtggaggtccagccgggcactgagcaggcggaagcgctcccggagcaggtctgtggtgcccagcatgatggagacagacttgttcaggtagtagagctcctcggcatgggtgtggaagcccaccgtgcaggagagccggacgtcatccaggtacttgagcatgctgtgcacgtggttgtcggtggcattgatgttggtgaagatggtgccaatttcaatctcgtgagaagccatgcgtccttccagagactcagagctctccacagtgcggttctgggcgtagtgggtatggtactgaagatcatgcatgttctcttcgtggtcatccaggaaggacgagatgttatccagctgcagctggataacaggttcgcgaggggggtcccctagagtcga

SEQ ID NO: 364483 - DNA, 1272 bp, Homo Sapiens
gggaatttcccgaggggcccccccaaatttttttgttagggttagagctcttttctggggccctgggatttttgttttggcggccccttcgggggcatttgtgggtaaccagtgggcttttgcccccaggcctttcctacaagaagaaagctctgactttccttggtggaccctggaggcccccgggaggaccaggggggacccctggatccctggtttcacccttaggcccccatggccccccggcgggcccgggtgaccctgtcttccctgcaaattcccggtttcccctgagcccctgagggccctggagaccccggggggcccttctggccctgggggccctatgtccccttttgggcctggctgtcctctcggccctccagttccaaagctgccctttgagcctttgaggcctgggaaccctcgagggccaacagggcccctttctcccacaggcccggcctctccaggttgcccctgaggaccctggggtcccagggggcccaagctgccggggtctcctttcgggcctctgccgccaacaggccctttcacgcccatatctcctttgaatcctcttggtcctggagggccgggggcacctcgtaggatggtgacattgcgaaggatttctccatgctgtgtgtccactgccttcatctcctccacgatcatggagaggttccggacgttgaggtccagccgggcactgagcaggctgaagcgctccccgagcaggtctgtggtgcccagcatgatggagacagacttgttcaggtactagagctcctccgcatgggtgtggaaacccagcgtgcaggagaaccgcacctcatccaggtacttgagcatgctgtgcacatgcttgtcggtggcattgatgttggtgaagatggtgccaatttcaatctcgtgagaacccatgcgtccttccagagactcaaacctctccacagtgcggttctgggcgtactgggtatggtactgaagatcatgcatgttctcttcgtggtcatccaggaaggacgagatgttatccagctgcagctgcaagcccatgacctggagtaccaggtcgtgcatgctctctgagttctggctgatgcgctgtgaggaggcccccagggtggcctggatgttcttgaccgcctctcccagtcttggtggaggtggtgcgcaggccgctgaagagccgtgtgtagttctgcccatcggtgacatcttctggagggtcaggtctcctcgtctgtctggataacacgttcgcga

SEQ ID NO: 364484 - DNA, 1174 bp, Homo Sapiens
  misc_feature (1090)..(1126): n is a, c, g, or t
tctcgggatccgagggtggtgctggagctgatgccttcccgccactgcatgtagcgcggcttggtgacggcgcgctgcgcgtgctcctcctccgtgggagcttcaggatccaccgccagcattttcttgtacatgtccttccgcagcttgggccgctcacgggccttggtcagctcctcctctaggtaagtcctgacgcccattttgcagtcgagcacacaaggtccgtcgaagccatcgagcaggtcctgcagctgcaggtagctttcgccgtcgcgctccaacacgccgtggaaggcaggcacgcagccgcgcagcgcgtcagccatcagccgcgccaggcagtagcgctccggctccgagcagcgcttcaggatcagcccgctggtgcccgccgccttaaaactcccagtgtgccctgccagctgcacccaggcgtagcgcttcttgaaagggcttatgaccggcagattgaccatggtccggatcttctgccagtggtttttctgacccacgtcctcgcccgcttccagctgcacgttgccgcggctccggctctcactgtcgctcagcaggtcgtcctccgagtcctcgagcagcgacgaggagccagtggaggagaccgacgaggtggaaaggcggcgcggctgctgcaggtgcgaagagcccgctgccgggaggcagtccctctcccgctccggcggcccagggctggtcgggggcacgtcgggctcctcggctgtcacggtcagctgagggatcaccggggccgggggagcccgcggaagcccgttggggacctgtcccccacgccgcttggccccgcgggcccggggctcccccgcggcggcggccgcagcgaccgccgcacagcgcgcctcgaagagcaggcgcagctccccgacactccggcgcggggcccgctccagccccgggctgcagggcctcgcgccccccggccgcgccatgcccgttgggcccccgggcagggtcatttcccagtgccggcgccgccgctgagcccaccagcccgcggcgcgccggagaccccgctctcgacgaattcgagctcggccgatttggcctgatnnnnnnnnnnnnnnnnnnnnnnnnnnnnnnnnnnnnncgccgccaccgcataagcctgcgttcgcctatagtgatctacatttcc

SEQ ID NO: 364485 - DNA, 540 bp, Homo Sapiens
gcggccgctcgcctgccgtcccgagtcccaatcggccgggcctcgcgcggcgcgggaagcgctccgccagcagcaagaggagcgcgcgggccccgccaccctggttccgtgccccggggctccagcgcagactcgggtcctggaccccggccgcctcggggctcctctggctgctcccagggcacagctgtaccaggagcagcagcgcggccagcagcgctgcgcgtcccgcctgcctcatggtgccgccggccaggttgtcggcgagcgtctgtacggtccaagattgagctccagtctctgtccctcggggcaggctgaagacgccttggggaacacagggtctgtcccggggctgtcgccagccttatatagtgccaggacagctccgactgacgtcagcgaagaacatgcactgattgtagaagcaatgacagccacagcttcgagtctgacggctggcgggcccccggaggggcgcacctccctacaccagccttcgtgcccctggggccagcgctggaagcagcactggacgca

SEQ ID NO: 364486 - DNA, 917 bp, Homo Sapiens
tcgaatgtctcagctcaaggttctgcacaaagtgtttagtactggagtagcagaagttccacctgatactcgaaatgtcgtccgggcctctcacctgcttaacaccctgtacaaggccattcttgaatatgacaatgttggagaagcctctgagcaaaccgtctccctccttttctctctctgggtggaaacggtgcggccttacctgcagacggtggacgagtggatcgtgcacgggcacctgtgggatggcgccagggagttcatcatccagagaaacaaaaatgttccagttaatcacagagacttctggtatgcaacttacacgttatatagcgtatcagaaaagacagaaaatgaagaaaaaatgagtgataacgctagtgcgagttccggcagtgaccagggccctccagcaggcagcacaccatggtgtccttcctcaaacctgtcctgaagcagatcataatggctggcaagtcgatgcagctgctgaagaacctgcagtgtgcggagagcaccacctgccaggcaggagccagagatgcagaaagaaaaagtttatacactctctttctggaatctgtacagtcccgtcttcgacatggagaagattccactccacaggttcttactgagcaacaggcaaccaaggagaacctgatgaagatgcagtccattgctgaaagccatcttgaactggatgatgttcatgatccactgcttgccattaactttgcaaggatgtatttggagcagagtgactttcacgagaagtttgctggtggtgatgtatgtgtggatagatcatcggaatctgtgacatgccagacttttgaattaacgctgagatcctgcctctatcctcatattgacaagcagtatctagattgctgtggaaatctcatgcaaactct

SEQ ID NO: 364487 - DNA, 487 bp, Homo Sapiens
gctaggaatagtgatcctgctataatgtgagaacccaaatcatgtttataaaataggacgctgggagcagttgcaggccacagtgaagtgtgttgcttctgtcactttatattcttatatttcctttccctcagacagtaaactgttgatactcgtacttgtaaaaaattgtaaggcaatttttagtattgttgtcaaagaaaagcttggattacattaacatttgtattcagtcttttaggtgatacaccagagggggctgggaattgtctctttgttcctataagtagatcttaatgtaaaatagtaaatgtccattgaaaagcaagtaatacagcctgtgctaattgggagcacttgaacaattttgttccattctgagtaacttttgagcaagtaattctaagctttgtcttgtatccttgtgtgaaattgcataatttttaccctatttgatttcttaaataaagatgtttgctcaaaaaaa

SEQ ID NO: 364488 - DNA, 827 bp, Homo Sapiens
taggatgtgatagatctggtccctctccttgaactacccctccacacgctctagtcccttcaacctaccggtctattaagtggtggcttttctctccttggagtgccccaattttatattctcaggggccaaggctaggtctgcaaccctctgtctctgacagattgggagccacaggtgcctaattgggaaccagggcatgggaaaggagtgggtcaaaattcttctctttctcctccacctctcaaacttcttcactatagtgaccttcctaggctctcaggggctccttcagtccccatcctatgagaaactagtgggttgctgcctgatgacaaggggttgtttcagcccctcagtcatgctgccttctgctgctccctcccagcaggattcaccctctcattcccgggctcctgggccctgttcttaggatcagtggcagggagaaacgggtatctcttttctctcttctaattttcagtataaccaaaaattatcccagcatgagcacgggcacgtgcccttcaccccattccacccttgttccagcaagactgggatgggtacaactgaactggggtcttcctttactacccccttctacactcagctcccagacacagggtaggaggggggactgctggctactgcagagacccttggctatttgagtaacctaggattagtgagaaggggcagaaggagatacaactccactgcaagtggaggtttctttctacaagagttttctgcccaaggccacagccatcccactctctgcttccttgagattcaaaccaaaggctgtttttctatgtttaaag

SEQ ID NO: 364489 - DNA, 559 bp, Homo Sapiens
  misc_feature (315)..(316): n is a, c, g, or t
  misc_feature (324)..(324): n is a, c, g, or t
  misc_feature (344)..(345): n is a, c, g, or t
  misc_feature (370)..(371): n is a, c, g, or t
  misc_feature (389)..(390): n is a, c, g, or t
  misc_feature (425)..(426): n is a, c, g, or t
  misc_feature (457)..(458): n is a, c, g, or t
  misc_feature (472)..(473): n is a, c, g, or t
  misc_feature (481)..(483): n is a, c, g, or t
  misc_feature (507)..(507): n is a, c, g, or t
  misc_feature (535)..(535): n is a, c, g, or t
ggtcgcaggagaataaagatccgtacgtattcattaaaacctttttagatttatgtatttcctacgttagtgtagaccttttacagttcattctgtctttcgtttctcctcaagtcttagtgccagcagtagaataggccatcttttgccagaagagcaagtatacctcaatcagcaaagtggcacaattcggctggactgtttcactcattgccttatagttaagtgtacagcagatattttggtaagttctttgaatgtgtattacaaggtacatgaaaaggtatgttttttcaaggtacttcttctttgctnngtgaaacntagaaaagaatttaaacctnntaagatccaaagtgcgaatgaggtnntatggtaataacacactnncagataagggaatggggtggcccattgcatcgttnncctttctttctggaaaacaaataaaactatnncaagtgccctcagnnaacctgtnnncataaaataaaataattatacgantgtgaccaaaaataaaggggccatgtcnacagaaataaaagtaaaatttata

SEQ ID NO: 364490 - DNA, 298 bp, Homo Sapiens
ggtcgtctggctgggtgggccccggaggtcgtggctcgggagcaggaaggcgtaggggggccggcctgctgtgatgacattccaattaaagcacgtgttagactgctgacgcgggtgatgcgaactggagtctgagcctgcccgagcggagctgggagggggctggcgggcgggcgcgcgcacacccgctgatctatcactctcgttcttgtagctcccagccgaggacgtcggatgtcatcgtccttgctgctttgccaccccattcccgtcaataaagtggtttgaacccaaaaaa

SEQ ID NO: 364491 - DNA, 1053 bp, Homo Sapiens
  misc_feature (115)..(147): n is a, c, g, or t
gggctttcagcgcctgcaggttccgggaggtcagctcccagccgaggacgtcggatgtcatcgtccttgctgctttgccaccccattcccgtcaataaagtggtttgaacccttnnnnnnnnnnnnnnnnnnnnnnnnnnnnnnnnntcatcgaccaatatctaaaaccacattacttccccctacaacacaaatactacaaccccccgtctataataccccaccaaaaatcatactaacctcctcgcgcgccccctcttgtctccccgaaaaacattttttttaaacaccccccccttttgtggcggctggtgccccaataacggcgcagtgcgacccttggctcttaatccgtcctcctcttaacaaaatacctcgtggtcttaacgaaaaccgggccggagtccattctccccccacaacaaataaaacccctcggcggcgaaaaacacgaacggcctatccccaaaacaaacccaaatcagggacccccttataggggcctttatttctgggagatcctcaccccctcaggagacccctccccacaaacccgcgcccttactaatatcaccgatcatttcttctcgtggccatcacttaatagagtaacattcacgttgtttgtgacaactttcgcctataagagtcacctcctcggcttcacctatccctgaccatacgctcccccttcatccacccgtttgttctttttaagaacaccccttatctatttctccccgtagccgcggaacctcttaattccacccttttgcccccccacttttccttaacccttacagtttcctttccctcccctctcccacccctaaacacccccgtattcctacacacacccatattttttctctcatcccctaacgtaccgcccacctcatatcattcatgaaatttaaccaatatgcgcggctcggcttataattcttccttatactttataacgatgtaccattttgcgtctcccttgagtccactgcgcaaaaactaaacgcacggttctatcacacttctaacgccagggagcccccctct

SEQ ID NO: 364492 - DNA, 476 bp, Homo Sapiens
  misc_feature (26)..(26): n is a, c, g, or t
tacgggaccgactgacctgtctttgnaaccagaacatcccaaggaaactccttcgcaatggcgttgagtgggaccccgggatccaggctggcccagggcggcaccctcagggctgtgcccgctggagtgctaggtggaggcagcacagacgccacggtggcccaagagcccctttgcttcttgctgggggaccagggctgtggtgctggcccactttccctcggccaggaatccaggtccttggggcccaggggtcttgtcttgtttcatttttagcacttctcaccagagagatgacagcacaagagttgcttctgggatagaaatgtttaggagtaagaacaaagctgggatacggtgattgctagttgtgactgaagattcaacacagaaaagaaagtttatacggcttttttgctggtcagcagtttgtcccactgctttctctagtctctatcccatagcgtgttcccttt

SEQ ID NO: 364493 - DNA, 519 bp, Homo Sapiens
  misc_feature (29)..(29): n is a, c, g, or t
  misc_feature (50)..(50): n is a, c, g, or t
  misc_feature (58)..(58): n is a, c, g, or t
  misc_feature (73)..(73): n is a, c, g, or t
  misc_feature (79)..(79): n is a, c, g, or t
  misc_feature (120)..(120): n is a, c, g, or t
accgaattaaccttgtctttgggaaaccnaaaaaaatccccaaaggaaantccttcgnaatggccgtttaaantgggancccggggaaccccagctggcccccagggcggacaacccctncaaggctgtgccccgctggaagtgcctaaggtggaggccaagccacaagaacgcccacggtggccccaagagccccctttgccttccttgcctgggggacccagggctgtggtgctggccccactttcccctcggcccaggaatcccaggtcccttggggccccaggggtcttgtcttgtttcatttttagcacttctcaccagagagatgacagcacaagagttgcttctgggatagaaatgtttaggagtaagaacaaagctgggatacggtgattgctagttgtgactgaagattcaacacagaaaagaaagtttatacggcttttttgctggtcagcagtttgtcccactgctttctctagtctctatcccatagcgtgttccctttaaaaaaaa

SEQ ID NO: 364494 - DNA, 456 bp, Homo Sapiens
  misc_feature (41)..(54): n is a, c, g, or t
ggtattttttaggtgcgataacccagaaagggcccgttggnnnnnnnnnnnnnncctgaactcctcaagcagcgattggagcccaagcacccctggagaggaagggagggtccccactggcccgtggggtctgagttcaggggtgtggagggagcagactccaccggcccaggcccagctaaaagggggccgacccctttccccaggcacagccccaggctggcaaagggagggccctgggctgggtgcagggcgcgccaggagtcccagccagggtggccccggcgggggcgggtccagctttggaagccaggctcccctgtgagccgtggcttgtcctgtcttcgcccacgggaggctggacagaggctgtagccaacacaatcacctttactttgtactctgtgtgtatgttttggttttctgtgttttaataaatcctttgggaaaggattt

SEQ ID NO: 364495 - DNA, 700 bp, Homo Sapiens
  misc_feature (616)..(633): n is a, c, g, or t
gaccaaccagcattcttcatggtggactgcttatcattgaggatctttgggagataaagcacgctaagagctctggacagagaaaaacaggccctagaatatgggagtgggtgtttgtagggctcacaggctaacaagcactttagttgctggtttacattcaatgaaggaggattcatacccatggcattacaaggctaagcatgtgtatgactaaggaactatctgaaaaacatgcagcaaggtaagaaaatgtaccactcaacaagccagtgatgccaccttttgtgcgcggggaggagagtgactaccattgttttttgtgtgacaaagctatcatggactattttaatcttggttttattgcttaaaatatattatttttccctatgtgttgacaaggtatttctaatatcacactattaaatatatgcactaatctaaataaaggtgtcctgtattttctgtaatgccttatttttagggggaaatttgttttctttatgcttcagggtagagggatttcccttgagtataggtcagcaaactgtggcctgcagcctgtgtgtgcacgccccatgagccgaaaagtgggtcttatgttttcaaatggttnnnnnnnnnnnnnnnnnnttgaaacatgtgaactatatgacattcagatttgtgttcataaataaagttttattggaacataaaa

SEQ ID NO: 364496 - DNA, 545 bp, Homo Sapiens
  misc_feature (314)..(323): n is a, c, g, or t
tgttaaaataggatgagtatgttgctggtcaaggcagaaacgctaacttccaactgtggtctgttaagagatctgctgggaaccttcagaagcactgccttccaaggcggggccacagcttggggtgttcagcaccttgaggacgggtggagcttgttcaacccaaagatgtgtgcgatgaacggatctacacactggaaatacgtatcaaaactgcaacagcaaaatcatattttgtaaattaaaattgtgtttacttactgtgactactgttcagtctttattcagaaacctttttataggctttcttagcnnnnnnnnnntccatatctatggataatgtctcaatcttctgtatatatgttttattaatatgtaaatatttagattttttaaaattactatgttctttaaaaaagaattcaatgcaagcctggttgtgaaaatggtgtataacattgtgttgtggtatcaattcccaagatgctctttatgtctgatctggaagaatacaataaattactttaattgaacgtgaaaaaaaa

SEQ ID NO: 364497 - DNA, 906 bp, Homo Sapiens
ggactcctactctttgaccctgatggccaaagccagagacgcaggccctaaaggtaaaaacgtcctctctgtattctctggcttttactccctagtgtctctgcataagtccctttgaggctgttagcctacccctccatctcttccattgacaaggaggatatgaatgatcttgacactgcttatatgagggcggcaaaagccctgctctcaactgcatgtgagaaaaaaacatctcacttaattcttccctcgccccttggtccctggctgtggacatgttaaacatttgtgaaaactttggccacgtccccatgagtggcaaggcagggtaaatggctatgccaagtgaaagaagaccaaagacaaaaagaccatgtcattcagcagcttaaaacccctcaacagcttcacattgcccagagtaaggatcaacatacatgtaataggttctcaaaagccctacatcatctgggtacaagctccccctccaaccccactctgtactatctccccctacccccaaccccagctgggcactccagctctactggctgtatgtctctctcctaatttttctacttaccacagggcctttgcacacgctgttccctctgcctggtagacttatccatgctccttagggaagcctttcgtggctcctcctcccccaggttaggccccctggttatttacacttgggcatcatgtgccttccctttgctgcatcatttgacattcatttgtgtgattattcatgtctttcccttcccttcccttccccttactcggctggagtcctactggggcagcgacagtgtctcttcttccttgctgttggatctcaggattaagcacagtgcctggcatacagcaggtgctcaataaatacttatcaaattggaa

SEQ ID NO: 364498 - DNA, 835 bp, Homo Sapiens
  misc_feature (647)..(648): n is a, c, g, or t
  misc_feature (653)..(653): n is a, c, g, or t
  misc_feature (655)..(656): n is a, c, g, or t
  misc_feature (662)..(663): n is a, c, g, or t
cggtccggaattctcgggatgggcttcctgcggctgagtggcagcttccatccggtgggttttgctcggcgcacccgggaggcggggccagcgaggcaagatggagttagtgcaggtcctgaaacgcgggctgcagcagatcaccggccacggcggtctccgaggctatctacgggtttttttcaggacaaatgatgcgaaggttggtacattagtgggggaagacaaatatggaaacaaatactatgaagacaacaagcaattttttggccgtcaccgatgggttgtatatactactgaaatgaatggcaaaaacacattctgggatgtggatggaagcatggtgcctcctgaatggcatcgttggcttcacagtatgactgatgatcctccaacaacaaaaccacttactgctcgtaaattcatttggacgaaccataaattcaacgtgactggcaccccagaacaatatgtaccttattctaccactagaaagaagattcaggagtggatcccaccttcaacaccttacaagtaaagacaatgaagaacagttgaaacatgcaaaatatggagcttttcatgtaattactcttttactgtttaccattcactataattcacaattaaaattgtgtgactaaccnnccccncnncccccnnaaacaaacactgtcggccgccttcggccctcgaaaaagctttctaaaaccattcctttgggcgcccgggccccagaagggtaagggaacacgggccataacctgtttcccaaaggaaaaccctggccattgaactagggcctgtggattctcccccaattaaaaaaccgccc

SEQ ID NO: 364499 - DNA, 507 bp, Homo Sapiens; identical to SEQ ID NO: 70952
  misc_feature (477)..(477): n is a, c, g, or t

SEQ ID NO: 364500 - DNA, 484 bp, Homo Sapiens
cagccaaatcctttattgaagctatgcaaactttctggccttccaggaaggtttgggtctatatcctataacttcatcttacaatttttccaactacactgactgatcccttacaaccagccttaaatctcacacccttcctcccaccatttaaactaggccacagactgatggaaaagcagagggagccaaccaccatctgctaactgtgctacatacctaatgctttccacgtattatctcatttaatcctcagcacctccaaaaggaaaaggctaacttccctttgaagttaaagaaacagagacttagagatgaaaagtagttgaattatgaccagtggaaccgaggccggaatccagtttgaatctaaggagtcttttttgtttttctgtattagtattgtttagagagagtttcactctgtgtcccaggctgcagtgccagtggtgcaaatctcagctcactgaaaacttcatctccc

SEQ ID NO: 364501 - DNA, 446 bp, Homo Sapiens
agaacagcagattcagaaaaaaaggttagtattgtagtcccaagttttataaaagacatcaagtaaggccagcaatagaggaatcaagtttctttttcgggttccctggggtgatttcctatcagcttcacgttcatgagctggggatttgcaaaatgtgagatggcctttgactttgtttttgatgcgatcagcagcggcactgtctgcaatccaggcccagcattctcagacagcgtgcagtacggatgcttctggctggcagggaggtcgtggcagtgggctgactagtgtgctgtgttgggagggctcaaagggtgatggggcaagcctacgtgcaaagggagttcctttctggtcgtgccctcctttttggctggagctaggccacagagattggctgccattctcattcctggatggggtggaggcaggtcccagacaac

SEQ ID NO: 364502 - DNA, 742 bp, Homo Sapiens
  misc_feature (135)..(135): n is a, c, g, or t
gaacttgagaagtggggaatccacgttctccttgtcagcttcagtgctcagctggatcagagcggagctcaggtctatgagctgtcccaccaccggtgaaggtttggccacatttttattcatgtctggagtgtntgtcatgaggtcgatcagaggcctgctttcagatcctacagccacgtgtgcttctggggtatcgcagaagtcgatgagaggaaggtcaatgaggggctggcttgcagcatctggagtgaccgcgagtggttccagtttgatatctacaagaagagcctcactaggggctgcatctccacccggcttggcttcctcccgagctacttctgtggcagtacttttggagaaagtagaatcgctttcctctggagaaaagttaagtgcctgaggcacacgggaaggaggagaacccctgtcaggggacacatccaccagcctggaatctgtctttctgttgctctcccttgttggttcagttctcattgcagagttcttgcggggctcagaggaacgtctccgagctggcacacacaggggagagcccacggccctgggcatcgttttgggggtcatcggtggaaggccagagcagcgccggctggcgggtgtgggcaaggctgacacacgccgtgcgctcagcaggctttgtggtgctggcccagatgagcgtctaaccggggtgctgtggacagtgaccctgccaactgacgtgcacgactgcggccgc

SEQ ID NO: 364503 - DNA, 448 bp, Homo Sapiens
agccctccaacatggcgcctggcacatcaccctaaaaagtcatttcttggagaagcgatggatgacagagattaatctgagagttactattaatggagaaacttagaacttaccatttttcctgtgaggtttcggtgctgatacttctattctgtgagttctggcaattgtgtccgttcacccagcctggtgatgcagcaggtgtcacagaaggaccctgtcccagctggtcctgctccactgctaggatggtgtggcctctgatctgtgaccgtgtcttgaggggagaccaggcccttgatcacaagcgtatccatggtgaggttccgtggatggaagctcatggatgttccttcctgatgttcatctgccaccatgctattgaatgcatcttgtttataactgtcttctaaatattgaatagaaataaagcatttgtacagtaaaa

SEQ ID NO: 364504 - DNA, 890 bp, Homo Sapiens
  misc_feature (152)..(189): n is a, c, g, or t
gcaggaccagctgggacaggtccttctgtgacacctgctgcatcaccaggctgggtgaacggacacaattgccagaactcacagaatagaagtatcagcaccgaaacctcacaggaaaaatgttcctctacaggtctgcagctgcaagaccnnnnnnnnnnnnnnnnnnnnnnnnnnnnnnnnnnnnnntgaaacaccctcaaaacgaacaacatcagctcctgtctgcatctctagctgcagggccctcaaactagaatatcagctcctccccgattcttcacctgcatgaccctcaaactagaacatcagctcctgtacagatttccaactgtagggccctcaaactagaacatcagctcctccccaagtcagcagctgcaagaccctcaaattaccaactcagctcctcccggagtcttcagctgcacgaccctcaatctcgaagatcagatactctccgggtcttcagctgtagggccctcaaactataacatcagctcctctccaagtattcagctgcacgaccctcaatctcgaacatcagcacctcttcaggtctgcagctgtaagggccctcaatctagaacatcagctcctccctgagtcttcagctgcacgaccctcaaactagaacctcagctcctccctgagtctacagctgcatgacccttaatctagaacatcagctcctccccgagtcttcagactgaacgaccctcaatctagaacatcagtcctctccaggtctgcagctgcaagagcttcaagactagaacatcagctcctctccaggtctggcgcatgaaagagccacaaactagaacataggatacttccccgagtctcacactgaatgagcctcaaaatacaaaatccaatccactccg

SEQ ID NO: 364505 - DNA, 1105 bp, Homo Sapiens
ccggagaagtgggggtggaggagggggaccgagcaaggccggcgcagcggggcgttttcaccgcgcgcgttcgggacggcgcgcggggctcgggtcacggcccgtgtggcggggtccgcgggctggttttcttcgggcgcgggggtcaggcgcgaccccagttctcatgactctcccagggagcgggtgcggctgtttcgcagggagcgggttctgcggcgacggccgagccactcgcgccccaaggcgcgcctggtcccagcccggcctgcaggccccaccgcgcccgcgctcccggagacgacgccggagggaggcagacgggccagagtcctggtctccggcaggcgggcgaggagagagcgggtttttagatgcaaaagcaggaaacaaagcaaacttgtagaagctccagatcctggagcgcgccagccacgcctggggccgcggcaagagggaccggcggctccagggtcacgccctgccttcccgggagggagccctgtgctcctaggttcagttccttccgaaatgccctcgtcagcgattctccgcccgcccggggccctctgcccgccgccacttttcgctccatttcctcccttagctcagcccgacctggcgctgcggcgccgtcctcgcggtcctccggcgcggcctctcctggagctgggctgggagtgggccccgggcctcggcactcggcgggtggcggcgtcgccgctgcgggactgtgggactcccagctcgggccgtgtggccgccctgcctcgccccacttcctggccgcctcaggctccccaggcccccgaagcccggcgcgggcagacgcggaggcgcggcgcggcctctccccgggaggagagaacacaaagaaaagctctctccaatccggtcagagccgtggcggcgcaggcaggcgacagtaatccacctcctgtttgcttaaaaagtcgagcaggctggtgagaaaggaacaatcgggcctgcgatccgcccgcagggggtgggagattaaaattgttgcttcgtagccgagcccgcgtcccgagaatcgccggcagctcgcgctttctcaactttgaaaatttcttatttggaagag

SEQ ID NO: 364506 - DNA, 202 bp, Homo Sapiens
ctccagagcactttggtctagactaggctttgggtggttccaattggtggagagaagctctgaggcacgtcatgcaggtcaagaaagctttctttgcagtagcaccagttaaggtgaatatgtattgtatcacaaaacaaacccaatatccagatgaatatccgagatgttgaataaacttagccatttcgtacacatggaa

SEQ ID NO: 364507 - DNA, 1478 bp, Homo Sapiens
cggccgggtggcgcgggaggaagtcacgtgggagcgcgggctcacatgactggccgcgcgatggacccgctgcccgcggctgcagtcggggcggcagctgaggcggaggctgacgaggaggcggatcccccggcgtcagatctgccgacaccccaggccatcgagccccaggccatcgtgcagcaggtcccagcccccagtcgaatgcagatgccgcaggggaacccgctgctgctgtcccacaccctgcaggagctgctggccagggacaccgtgcaggtggagctcattccggagaagaagggcctcttcctgaagcatgtggagtatgaggtttccagccagcgcttcaagtcctcggtatacagacggtacaatgacttcgtggtcttccaggagatgctcctgcacaagttcccctaccgtatggtgcctgccctgccacccaagagaatgctgggagctgacagggagttcatcgaggccaggaggagagccctgaagcgcttcgtcaacctggtggcgcgacaccccctgttctccgaggatgtggtcctcaagctcttcctgtccttcagcggctcggatgtgcagaacaagttaaaggagtcagcacagtgcgtcggggacgaattcctgaactgtaagctggctaccagggccaaggacttcctcccagctgacatccaggctcagtttgccatcagccgggagctgatccggaacatctacaatagctttcacaagcttcgcgacagggccgaagcggatcgcgtcgcgggccatcgacaatgcggcagatcttctcatattcgggaaggagctaagtgcaatagggtctgacacgaccccgctgccctcctgggccgctctgaatagcagcacgtgggggtccctgaagcaggctctgaaaggcctgtctgtggaattcgcgctgctcgccgacaaggctgcacaacagggtaagcaggaagagaacgacgtggtggagaagctgaacctcttcttggatctgctgcagtcctataaggacctgtgcgagcggcatgagaagggcgtgttgcacaagcaccagcgggccctgcacaagtacagcctgatgaagaggcagatgatgagcgccaccgcgcagaaccgcgagccggagtccgtggagcagctggagtcccgcatcgtggagcaggagaacgcgattcagacgatggagctgcggaactacttctccctgtactgcctgcaccaggagacgcagctcatccacgtctacctgcccctcacctcccacatcctccgcgccttcgtcaactctcagatccaagggcacaaggagatgagcaaggtgtggaacgacctgaggcccaagctcagctgcctctttgcgggaccacacagcaccctgaccccaccgtgctccccgccggaggacggcctgtgtcctcactagcgcctgaggctgaggtggtgctccctgcggccgc

SEQ ID NO: 364508 - DNA, 534 bp, Homo Sapiens
gcggccgcagggaagggggcggggccactgcctcccggggctcccaccatgctctgcgataccgcaggtgaggggagcggggccactgcctcccgcggctcccagcatgctctgcgaggccgcaggtaaagagggcggggccgctgcctcccggggccctcggcccgcgcccagcactgccggccgggccggactctcagcagtttctcggccccctggagccacagagcggagcacggaccacacggcgtcgctggagccccgcggccaccggctccagggccggaaggtcgcgcgggccacagagaccgcaacgggccagagcgtcagctcgcgggcgcccccggtggccagtccgggctcgggcccgcggccccccgccccgccacgtgcgcgctcccaccgaggtcctgcgcgggtgagaggcccagagggggaagctacagagctgggccggcctcgaatgtaaggatcggcctgcgcccacggccagccatggcccctctcagtagtttcggatccgctccaggcgtg

SEQ ID NO: 364509 - DNA, 454 bp, Homo Sapiens
tcagggtctctgggcaacgtccattcagggtgcggcatggctgtcacaaagctttatttgagcaaattattttttcactttaggagacttctacaagtttgtttcctgtttcaaatgtgtgtgtgatgtgctgtttatttatcagcttgaggtccatgggggcagccttgtgactggaagggtggatatgggagacacattctctacctgctccgagcctggtcctctcgcaggaatgctgctgctgcctccgccgccactgctgctgccacctcttatatgtttcagacactctctgcccagactcatttttaactggaaatcatcacagcagtgggatatcagagccccagacagcactgcctcttcctccccaccccactgcccccaccttaatgtgaatttgactgatgaatgaagagcgtttctaataaagtttgtcattcagtccttc

SEQ ID NO: 364510 - DNA, 490 bp, Homo Sapiens
catacatgaatatgcatatctatatgcatagatgtacctatcctgcacccaaaaaggtgcctggtattggcactaaaatcatgtagttatactgggcagcaataataattgggcatgaggctgattactcaatggtgagggtaggtatatgtagatagatgtgcatgtatgtgtttgtatatataattttataagtttcacgcataaattaatacatgcctgtgtgcatacatatgtatgggatatatttgtatatatatgtacaggtaataaacatccccaaggtttgtggctggccatacacataggcatcagtttaacaaccatcagacctcagctgtacaataacaggtgttttgtttaattaaaattatactgttctgcagcatttagacatttgtcacatttcattagctttgacaaccatactgtaacattaaacctagcattccacaagagaataaatataagattgaaactgtaaaaaaaa

SEQ ID NO: 364511 - DNA, 1103 bp, Homo Sapiens
tggaccggtccggaattcccgggatctggctggcagtcgccacccggtcccagagtaaataagggagagacactcccgagcgccgtaaatagagtccaagtgggcggagagccgtcccgcgccgcccgctcatgtctctacagagccgactgtccggccgcctggcacagctgcgcgcggcggggcagctgctcgtccccccgcgcccccggcccggacacttggcgggtgccacgaggacccgcagcagcacgtgcggtcccccggcgttcctgggcgtgttcggccgccgtgcgcggacctcggcgggagttggggcgtggggggcggcggcggtggggcggacagccggggtgcgcacttgggcccccctggccatggcggcgaaggtggacctgagcacctccaccgactggaaggaggcgaaatcctttctgaagggcctgagtgacaagcagcgggaggaacattacttctgcaaggactttgtcaggctgaagaagatcccgacatggaaggagatggcgaaaggggtggctgtgaaggtggaggagcccaggtataaaaaggacaagcagctcaatgagaaaatctccctgctccgcagcgacatcaccaagctggaggtggacgccatcgtcaacgccgccaacagctccctgctcggaggcggtggcgtggacggctgcattcatcgggccgccggccccctgcttaccgacgagtgccggaccctgcagagctgtaagactggcaaggccaagatcaccggcggctatcggctcccggccaagtacgtcatccacacagtggggcccatcgcctacggggagcccagcgccagtcaggctgccgagctccgcagctgctacctgagcagtctggacctgctgctggagcaccggctccgctcggtggcgttcccctgcatctccaccggcgtgtttggctacccctgtgaggcggccgcgagatcgttgctggcccgctgcgagagtggctggagcagccaacgaccaggtgggccggtgatcatctgcgtgtcctcgagaaggcgaggactctacgaacccggtccccctattcccgggctgaagccccca

SEQ ID NO: 364512 - DNA, 486 bp, Homo Sapiens
attatttataatagcccaaaattgaaacagccctaatttctatcaactaacaagtgaataaacaaaacgtggcatatccatacaaggaatattattcagcaataaaaaaagagatgaagtactgatatgcaccacaacatggaaaaaccttgaaaacatatcaagtgaagaatgccagacatgaaaggccacatattatatgatttcatttatatgaaatgtccagaacaggcgaatatatatagagagaaggcagattagtggttgcttaggctgaagggttggggaggacaaaggggtgactgctaattagtatggggtttcttttttggggtgatgtaaacgttgtaaagttgattgtggtaatggtggcacaactctgaatatactaaaaaccactgaattgtatactttgaatgtttgaactgtgtggtatgtagattttatctcaagttgttataaaaaattaaattacaaatgcaaaaa

SEQ ID NO: 364513 - DNA, 438 bp, Homo Sapiens
cactctgggctttggaaggtgcaccgtatgcacacccataatatagggcaggggttagcatttcagacccctgttcctcccttgacaagcaagtgcttttctccagggaagacgttcaggttcattcatagatccattggtgccgtgggcagctcagtaacaatagctctgctgcctaccagctgctggtgaaggtgttgagaatacctaatgaggaagtcagggcccctgcgtgcttcagcaagagctggatgcctggcatggcaatcaatggacacaaacctttggataatttccgtccttggcggtgtgttctatagcataggtatgaagtgggtgctatgggagctcagaagaggggcttttctcttaactaatgggtggccaggaaaggcttcctggagctcaaatgactgagtggagtcttcaacattaaaa

SEQ ID NO: 364514 - DNA, 474 bp, Homo Sapiens
aactcctccactccacagcagggcagccttctgacgttccctattagagcctgggaagttcctccaaggaatatctgcctatgcattgccattacaggatgaggctgtttgtgaactcatcccataagaagcagcacaaagcaaagcattcaaccaaagaaactcttcctataaccttctcacttgaaaactgtgataaaataaaatgtttttcttcgatgatttaaagcctagcaaaagtctttagaataaacagacctcaggtctcataaggacccctaaacaaagaccagccctcgtcacaccaggtcacagctgctaagtcccccttgtattcctgtgctgaagtaacaggagtttagtgtgaacatcagaaaggtattttgggggttacagacacagcacaaggaattaagaaataaagagcagcagagacactccttggcaaagaaaaggaagagagcactaaaggtt

SEQ ID NO: 364515 - DNA, 413 bp, Homo Sapiens
  misc_feature (26)..(26): n is a, c, g, or t
tccacggttgccccactttgtctttntaaggtaagaagccttcaccttccagcttttgtctggcctgtgctgcgtgggagccactggtctgtgcacatccacggtgggtgagtggccaagacaagcagtgtgatagagtccttggtgggtttagtcatctcggaagtcgtagggcagctatggaaaccactgggttctggaacgttccagccaggcagtggttgttcctcataggtaggtggccttggccttcatcccagcctgggatgctccattgcatttgtcacctagtcactgtatatacgtgcacatttgaccttttggcacagcccaggttccaggtgcgtgacctgccctttttctcattcccttaactgacattatttagtgtcagaggccgagcacagtggctc

SEQ ID NO: 364516 - DNA, 218 bp, Homo Sapiens
  misc_feature (40)..(40): n is a, c, g, or t
ggaaaagtgatcaacgcacagtgcggcttatggatcctcnccacccactcaccacccacctgccagattatctgttggcaaatcccaggcctgatagcatttcctctgtcagtatttcagtgtatacctctaaacaataagggatttaagagaaaacataatcctggtaccattgttatacttgaaaaagttgcctgtgcgcagtggctcatgcccat

SEQ ID NO: 364517 - DNA, 464 bp, Homo Sapiens
  misc_feature (371)..(412): n is a, c, g, or t
cgcacaaccaagggcatttgatatgaacagttgttaaaaagcaggctggtaccggccggaatcccgggatatcgtcacccacgcgtccggtctacatgcctctgccgggtgccggtattgaggcacccagggagctgttactggcgtggaaataggtgatgctgctacctctgctgctgcactcacagccacacttgatacacgatgacaccttgcttgtttggaaacatctaaacatctagtagatgacttgcaggctgttggctaccagtttcctgtctgaggtgtatatgttaacttcgtgatcagtttgtatgtttgggactcttgtcctatgtaaagttaaggtgggccgggtgcaatggctcacnnnnnnnnnnnnnnnnnnnnnnnnnnnnnnnnnnnnnnnnnnctgatggtgaaacctcatctatactgaaaatacaaaaattagctgagtggtg

SEQ ID NO: 364518 - DNA, 439 bp, Homo Sapiens
tgaggacaccagcaaagagcccagcctttctacccagacgttacctgtgatcaagtgctctgggcagacttcaagactttctgcttcctccactttccagtcaatcaagtgactccctcctggctgtgagcccataactggcctctctccaaaagcctctgcccaggagcatgggcatcagctacctcacgggaaccagcctgctgttcagaccagtctgaccccctacccctttcaccctgtccctcctcagagtattttttgaagtggttgcattatagagatgggtatttgtagggccggagggatggtagtgatggggagaaggtgaggaagggtcaccctctgtcacctgtctgcctggctggcacctcatatctcagcagagaagccagtggtggccacgcagccttataaagcaggttttggtttctacctt

SEQ ID NO: 364519 - DNA, 1408 bp, Homo Sapiens
  misc_feature (14)..(14): n is a, c, g, or t
  misc_feature (1097)..(1159): n is a, c, g, or t
tactttcacagggnggagaaccctgtggacattacactcccatcagaggagtgcacaaccatgatagacaggggcctgcagttcgaggagaggaacttccttctgaatggcagttcccagaagacttttcatagtcaactactcagaccctctgactatgtcaatgagaaagaaattaaaaatgaacctatgaattcttcgggcccaaagaggaagagagtcaagttcacttcctacaccaccatcctcccagaggacggcggcccatacaccaactccatcctgtttgacagcgatgataacatcaagtgggtctgccaagatatggggctgggggattcacaggactttagagactatatggaaagtctgcaagaccagatgtaaactcccttcttatgtttgtattcacctttatgccttctgtttttggaatgctggagcagtgagttcgatcagcaataggggatgatgtaacaaagtttgatttgtggaggtctggtgggattcatttctaagcaggtaaaagagggtcggagagctatagaagctgggttttaagtttggaaatgcctctaaaacagccacatgtggggactggagaaattctaagacaacagttttatggactgcctggtacgagctcagtgcaaatgtattaaacctgaccccacagacattgttagtcatctcgtgacaaatggccatgtggaattagaaaagatttgggtgttgatttttctatttctagaccttttaaagcacagtggacacttattgccccttggcctgagtttagacatacatgaaagatgactgaatgtagctatcctgatttgtcatgagcgctgctcattatttttatatacatttgcacctgcacctgttcctttgacctctggaattctttttgaaacatgaagagaagaaatttcaatcttttccttgagctctgtttgatttacacatgagttttcttccctgggatttgccatgccatgttaatttcctgggtctccatgcacgatgtcaaggtttttcccagttttttctgcaacttccatcattctaagggatgggtatcccaagaaagcttnnnnnnnnnnnnnnnnnnnnnnnnnnnnnnnnnnnnnnnnnnnnnnnnnnnnnnnnnnnnnnnggtaataaacacctgggggaaacaaaaggggatttttacactttaaaaaacgtttttaataatacccggtgaacgggcaagaggtcccaatccttctttttaccaagttcttacctaaagcatggaaagctttttctaaaacattttttgggcgcaaataaaaaagtgttggtcccaaatccgacataaagacaaattttgtaatctttttataaatgcgtccccgctgaccactaggtgttttaaaat

SEQ ID NO: 364520 - DNA, 1060 bp, Homo Sapiens
aagcgaggcctgggtggcgaattcggcacgaggctcagagccggggccgggccagagcggcgccccgctgccctgtccccgcgtgcagaccccgggcccggccccggccccccgccaagccatgctgtgcggccgctggaggcgttgccgccgcccgcccgaggagcccccggtggccgcccaggtcgcagcccaagtcgcggcgccggtcgctctcccgtccccgccgactccctccgatggcggcaccaagaggcccgggctgcgggcgctgaagaagatgggcctgacggaggacgaggacgtgcgcgccatgctgcggggctcccggctccgcaagatccgctcgcgcacgtggcacaaggagcggctgtaccggctgcaggaggacggcctgagcgtgtggttccagcggcgcatcccgcgtgcgccatcgcagcacatcttcttcgtgcagcacatcgaggcggtccgcgagggccaccagtccgagggcctgcggcgcttcgggggtgccttcgcgccagcgcgctgcctcaccatcgccttcaagggccgccgcaagaacctggacctggcggcgcccacggctgaggaagcgcagcgctgggtgcgcggtctgaccaagctccgcgcgcgcctggacgccatgagccagcgcgagcggctagaccactggatccactcctatctgcaccgggctggctccaaccaggacagcaagatgagcttcaaggagatcaagagcctgctggaaatggtcaacgtggacatgaacgacatgtacgcctacctccttttcaaggagggggaacacttccacaacgaccgttttaaagggggctgagattcagggacttccttgcggggggcttcttgaaaccggcccgaacttggaaggagattttttccattcgattactccggggccaaggaccccccttgcttgaagggcccccttggaacctgcctggaaagttcccgtgggagggaacccagtgggccaaggggagggtcttcccccaatttggggcccccgggggccccaagagataatttc

SEQ ID NO: 364521 - DNA, 208 bp, Homo Sapiens
cagtagcctcgggggctccctcagcctgggtcagaggaagcgagaagaaagtctaaaaatccgaaggtttagtcgcacgcacgtttataataatagcaaaaggcgggcgtacccgcgccgcaggttgcttaggaggaggactgggtttcctgggcgttcctgggcgccggggcgctgagaagatgctacccgcggcgggcgggtgcgg

SEQ ID NO: 364522 - DNA, 459 bp, Homo Sapiens
cagccggggttattgaagccagctttctcaaatgtggcttccagatgtgcaagttgcaaattttattgtatttgtagaataccaatttttgttttaaactgtatttccaatctatttctccaagatgcttttcatatagagtgaaatatcccaggataactgcttctgtgtcagtcgcatttgacgcataactgcacaaatgaacagtgtatactcttggttgtgcattaacttacatgtataatttttggcatctgtgttcacaaatgcatgtgttagcaaatcacctttatttataagtgacaataattgaagttaaggatataaagaaacctgcatttgtagtccagcgttttcatttggtccataacacaatgtatggaaatgtgaaagacaattttgtacatttgtttgttactaactcagatcattaaaatgaaaacaatttttttaaacaag

SEQ ID NO: 364523 - DNA, 630 bp, Homo Sapiens
  misc_feature (465)..(465): n is a, c, g, or t
ctgaaaccggagggtcatggtcatcatcattgttccaagccatagatagaagatgaagtcaccacccccgatctcagagctcatcagagtagagcttgggctggaccatgcccttctctgcagtgagcagttttctctgtggagctctgtgcaacctggagccagtcctgcctggggtaagaggaaaaaagactccttccccccagccccacagcctgtacgcaaacacaccgggagacatgacctgctcagaggagacctggaaccaagggaataaaatgagagtgggttgggggcttggctgttagttattttttgcttgtaagtggacaatttgtggtgtggtgtgtgaatttggggtcttaaatccagatagctgtttgctgtggacagcccctgtttttgaattacagggcatttcaagtgaaaaaacccccacccgaaagcgggggagggaaaaaaacnaaaaacttggtcggcgccctcggccctccaaaaagctttcttaaaccatttcggtttggcggggcgggcccccctagggaaagggggaaccggggtcctaggctggtttccctaagggaaaccctggggtcatgaaataaggggctggggaattccccaccaaat

SEQ ID NO: 364524 - DNA, 490 bp, Homo Sapiens
ctgctaccccagcatcatccacaccagaggagcctgccaagcaggacctcacagctctttcagggaaagcacactttgtaagcaagataacatctagtaaaccttctgctgttgccagtgaaaaatttaaagaacaagttgatcttgcaaaaaccatgaccaatttatcaccaaccattcttggcaatgcagttcagttgatctcttcagtccccaaagggaaactgccaatcccaccctactcaagaatgaagacaatggaggtttacaaaatcaaatcagatgctaacattgcaggtttttctttaccaggacctaaggccgactgtgataagataccctccaccacagaaggctttaatgcagccaccaaggtggcaagcaggctacctgttccacaagtgtcacagcagagtgcctgtgaaagtgccttttgtccacccaccaaacttgatcttaaccacaaaacaaaactgaacagtggagcagc

SEQ ID NO: 364525 - DNA, 541 bp, Homo Sapiens
cgcaagaaaaagttccctcctaaattctattaggattttggagaatttttgcacagtaagaagctctgggttgctccttgggcttctcaaaagggaaaagttcaattcaaagattgtaaactacgaagtattccagccgtgttgctgatctagttggatagttgtacctcaaaaaagtaggtgagaactggcttcctcattgtcccaggatgtcaaatactaatgacataagagctcacttacgtgccaaaattcacttttatactagtttttcagtgctttaatatttgtaacttaaattttaaaactcgtatttacaaacactactgtaacttcagtgaaactgaattgtgcgattgaagctttttgcttatcatagtatttattacactacttaattcagtaaatatataaaagtagccttcaatttatttttatattattttacatgtttttacctgcagttgtgtatgtgaatttaccttggtaatcgagatgtcatgctaaggaccaataaactatcactgaacaagaaaaaaaa

SEQ ID NO: 364526 - DNA, 444 bp, Homo Sapiens
tggagattaaaggacagggcattgatggaaggtaagggccaggagaagaggccttttctgctgtgtcccctcacggccttgccctcgaattctgcaggccctgggctcccctgacacctgtcatatttatggaccagacactggggcagcatcaggcacagtctgtctgggtgcaacttcttcagctgtctggccgcaccttaaaaactatttattcaccaaaagccccaggcatttcagaaggtggcactcaggtcaccctgaaaagcccccaggggcttgcaattctggaaaatattttgactagctgcttggctggatgtacaaagaaataggcattattttattgctgtaatattgtatgatactttaactgtacaataatgttgtcacttactgtaaatgtactatggttttattaacaataaacactcattaacaatg

SEQ ID NO: 364527 - DNA, 556 bp, Homo Sapiens
  misc_feature (37)..(37): n is a, c, g, or t
  misc_feature (44)..(44): n is a, c, g, or t
ggagttagctagcccagatagatcctcagaaagaccntggagcntggaccaacgtatcagattgagacctttgcacaagcgttgggttctcagtttaagtcgggcagcagggtgccaatgacctttatcactaactctaatggagaagtggcccatagagtaaggacttcagtgtcagatttctcagggtatacaaatatgatgtctgatgtaagtgagccatgtagtacaagagtaaagacacccaccagccagagttacaggtaaggtcccaaaagtggccaggctggaggtcttctaatgtaattttgttttattttgagaacactgccattggaatgtttctacacgatcctattaagaataatgtgatgccctttcaatgcaacttttcatatttagtttattttgttagcgtgattttagctctgtttgtattatgatttttaatcaaaatcaatagattaaaaatagtttgacattcaaagtgacaatgtttagcaatcaaatttacatgtatagatcgtcagggaatagcccaaatgttttaaacgca

SEQ ID NO: 364528 - DNA, 958 bp, Homo Sapiens
  misc_feature (94)..(148): n is a, c, g, or t
agcggtagccggtggttcaggtggccggtcgggctggaagggcggggatgagggatgggacgcatccccgggggatgctcctccaaagcttttnnnnnnnnnnnnnnnnnnnnnnnnnnnnnnnnnnnnnnnnnnnnnnnnnnnnnnngtctcacgttctcatcaagagttggaagagggaaagcttgaaccagcttaggaggacctcatctggtactcttgatgaatgaaacagcaatctgaatggctgaaaaaggatggacccagcactccagggagaaaacttggcattctttgggaatctaacaggatgcagtgaacccaagccttttgaagagctcaccaatcagactgcccttgtctatccatgagcagatgtttgatagtattgcggaggccctctagtgggtatgctgccaagcaactggagtggcacttgggctctaatccagttgtctatccctttcaccctggcatttcatcagccaaacaaaaaccaactaactcagaaaaaaaggaaagcccctcaagggtcctttgaccccgatatctacatagatgctatcggggtcccctgaggggtaccaaacgaattcaaagctcgaaatcaaatagctgctggattcaagtctgtccttttcttgtggtctactataaataaaaatgtagactggactacattacctatactataaccaacaacgatttgtcagttacacccaagggatgccattaaagggagtatggttgaaacaattggggtttcacccggccaaaattgggcccggtgaacaactcagaaatatgctctcggaccttgatattttggggaaggtccactgtttgtgccccgggttccccaatataacaggccccgattgttatactattcacttaggggactataaaaggcctaccactctgggaatgacctcgtagaattcgggaaggagagcct

SEQ ID NO: 364529 - DNA, 535 bp, Homo Sapiens
cctccttatctacagcgaccacacttgactcatagcagactcaaggttgtgggatgcgtcggatgctgcgtggcattcaagcacccgcaggcaaggaggctgccaaggtcgagggctgcggagtcccagggcccatgagtccggccggagtctggtgtggacactctgaacacacgcagaggccttgtggcactcacctcagttacagccgaccaccccaggaatctgggcatggctgagttagggaggactccaaggggcagcgcccccgtccacaggcccccgtccacaggccccgtgacatcagcgtggacacgcgcctgtcaggttcattgtgtgcacggccgggtccctcctctcatcccgggtgttcatgatgtagtagtggtccgtctccacggacagatgcagacctcctgctcccccgctgggaggggcggaggatgtgctcttgtgagctggtggttgcgccctttttaagttgagtctatgagtctgaaatgctaataatttctgtccctctataggaaatggg

SEQ ID NO: 364530 - DNA, 573 bp, Homo Sapiens
ctcggacacaaccccggcttctgctcgaggcatgaaggtggctgtccggaagcagcggaagaagatcaaggccaagatgttagggacaccagaggaagcagagagcagctttggcctatggtatcggggtaaagctgaatcctctgaggatgagaccagcagccctgcacccagcaagctagggggagaagaggaggcccaaccacagtctccagctcctgatccgccctgttctgccctccacgaacacctttgtctgggggcctcagccgccccagaggcctgacttaggggtctggctgtggaaggatgtgtggcctcaaatgaggacagggctcccgccttcacagccctcgccaggggtctgccccaatcctggcctgcatcagggcaggacggggtctcagcccgcctccctctctacgtctctgtaccgagcctctggggccagatataagagtgcctctctgagtctcagtttccccatccatgaaatgagagctgactgcctagctcccagggctttgtgcagacggcctgagctcatgtaataaagaactgcccgtaatacac

SEQ ID NO: 364531 - DNA, 506 bp, Homo Sapiens
gcgccagcagcctggcgaagccgcgactccgcaggctaaagagcgagcgcgggggcaggccgggcggcccgggcaccagcacggacaggagcccgaatgggcgaccgccggcgcaggcgccccagggaaccctgaggacccggcggaggccgcgcagcagctcgggcgcccctcggaggcagggcagtgccgcttcagtcgggaggagtttgagcagatccttcaggagcggaatgaactcaaagccaaagtgttcctgctcaaggaggaactggcctacttccagcgggagctgctcacagaccaccgggtccccggccttctgctcgaggccatgaaggtggctgtccggaagcagcggaagaagatcaaggccaagatgttagggacaccagaggaagcagagagcagtgaggatgaggctggcccatggatcctgctctccgatgacaagggagaccatcccccacccccggagtccaaaatacagagtttctttggcctat

SEQ ID NO: 364532 - DNA, 435 bp, Homo Sapiens
agcaaatctcgcattcgtgaccgccagacctacgggatgtgtaaggcacattctcaatctcatcacttgtgagagttgcattgcctagtccagcagccgtgaaggactctctgctgtttttcctctgcttcatttgacacatgagagagaagagatgaagatggaggcgggccctgccccggggacatgtatatctctctgaatgtccttgacagacagcagcagcccagcaatgcccagcccccatcctgtctgtatgcaccctggtgagcattttctacagtctcctaaacgctcccattattctgttttgcaggtgtgatgtgtggcacctcagtgttgtcatagcttctgcctcctccgtgtggagagagggcataaagacagagctgagatattatggctattccagaaaataaaatattttttgaaacc

SEQ ID NO: 364533 - DNA, 1382 bp, Homo Sapiens
  misc_feature (194)..(194): n is a, c, g, or t
  misc_feature (875)..(875): n is a, c, g, or t
aattggaagaactgcttcgaggaggagctcatctgccctatctgcctgcacgttttcgtggagccagagcagctgccgtgcaaacacaacttctgccggggctgcatcggcgaggcgtgggccaaggacagcggcctcgtacgctgcccagagtgcaaccaggcctacaaccagaagccgggcctggagaaganacctgaagctcaccaacatcgtgggagaagttcaatgccctgcacgtggagaagccgccggcggcgctgcactgcgtgttctgccgccgcggccccccgctgcccgcgcagaaggtctgcctgcgctgcgaggcgccctgctgccagtcccacgtgcagacgcacctgcagcagccctccaccgcccgcgggcacctcctggtggaggcggacgacgtgcgggcctggagctgcccgcagcacaacgcctaccgcctctaccactgcgaggccgagcaggtggccgtgtgccagtactgctgctactacagcggcgcgcatcagggacactcggtgtgcgacgtggagatccgaaggaatgaaatccggaagatgctcatgaagcagcaggaccggctggaggagcgagagcaggacattgaggaccagctgtacaaactcgagtcagacaagcgcctggtggaggagaaagtgaaccaactgaaggaggaagttcggctgcagtacgagaagctgcaccagctgctggacgaggacctgcggcagacagtggaggtcctagacaaggcccaggccaagttctgcagcgagaacgcagcgcaggcgctgcacctcggggagcgcatgcaggaggccaagaagctgctgggctccctgcagctgctctttgataagacggangatgtcagcttcatgaagaacaccaagtctgtgaaaatcctgatggacaggacccagacctgcacgagcagcagcctttcccccactaagatcggccacctgaactccaagctcttcctgaacgaagtggccaagaaggagaagcagctgcggaaaatgctagaaggccccttcagcacgccggtgcccttcctgcagagtgtccccctgtacccttgcggcgtgagcagctctggggcggaaaagcgcaagcactcaacggccttcccagaggccagtttcctagagacgtcgtcgggccctgtgggcggccagtacggggcggcgggcacagccagcggtgagggccagtctgggcagcccctggggccctgcagctccacgcagcacttggtggccctgccgggcggcgcccaaccagtgcactcaagccccgtgttccccccatcgcagtatcccaatggctccgccgcccagcagcccatgctcccccagtatggcggccgc

SEQ ID NO: 364534 - DNA, 708 bp, Homo Sapiens
  misc_feature (676)..(676): n is a, c, g, or t
gacattgcaaccgaaggtcataaggccgctagctccgctgggacagaggcttgagagaactaacggctcggtgccttctccctggtctcagaccatcgtctctgcactgcgaaggcatttggtagcctcaccactgagatactaactagacctagactaggagctttatcaggttctaggaggtcctttaggaagactctcaaaggcaaatccctgatcccccgccccacccttagccctgccctctcaccagagcaaaattcactggggacttttcccaccacacatggaaatctgtccactcggaatacctctgttttccatttcaaattgtagggggaggggatggaacacttccagtgatggtaagagatctgttatgaaacgaaacaccccccgtgttaataacttggtctgaaatctgtttttatgagccgggccccctgtgcctctagtatacttgtattgactctcatagttacccttttagttttactgtgttctgtgaaaatttgtaattggttgagaatcactgtgggcgtccattcttattcaactaaatctccacaggttttttgagctggtgtggattagtttaactcttgtattcaaccattagtgctaccaccttctcacattacaatacaattactggaagcaagtactgcatttcccnggcaacaaaaagggaaaataaaaattgctaat

SEQ ID NO: 364535 - DNA, 452 bp, Homo Sapiens
  misc_feature (77)..(90): n is a, c, g, or t
  misc_feature (174)..(235): n is a, c, g, or t
  misc_feature (246)..(270): n is a, c, g, or t
aaagacagtgaggctaggtctttcattgcagcctgggcgacagagcgagactcggtctcaaaaaataataattaacnnnnnnnnnnnnnntacaaaagttagttgcacatgttgccatatgctcgtggtcccagctactcagcaggctgaggttgggagatcacttgagcccannnnnnnnnnnnnnnnnnnnnnnnnnnnnnnnnnnnnnnnnnnnnnnnnnnnnnnnnnnnnnattctgtctcnnnnnnnnnnnnnnnnnnnnnnnnntctaggctatgctccctagtatgggaaatctagtctagtcatttgacagaatcaggctttgcaggccatattgtctctgtcgtaactaccaactctgctggttaaaagggaagtagccacaaacaatatctgaatgatggattatggctgtgttccaataaaactttatttgcaaaaacagg

SEQ ID NO: 364536 - DNA, 475 bp, Homo Sapiens
  misc_feature (308)..(325): n is a, c, g, or t
aggtgggtgctcgccctggtcttcgggctgtcgctcgtctacttcctcagcagcaccttcaagcaggttctgaaaacagccagttacttcccaagagttgcacagagaagcctgcacacttccatctggatatttagttaccctcttggaaacagtctccactccacccatcacattctacctccaaggactggaacacagacttattcccacctccccgcttctgggctcttggctggccccaggtctctgacaatcctcccttggggccagaggtactcaaggatgccaagagggatattgagttnnnnnnnnnnnnnnnnnnaggtgcaaaaaaaccccttgggtattggcctaaccaataaacacttttctttggttaatcattgctattatcaaaaaatcttaatataaaaatctaggctatacaaagaaaattactcaaatacaaatgttgttcacattgtaaaaaaaa

SEQ ID NO: 364537 - DNA, 1046 bp, Homo Sapiens
  misc_feature (97)..(158): n is a, c, g, or t
gcacgagctcctccgctgactaatatgcttaaattcagggcggcggggccggcgcctgcctggagggatggggctgccgggcgcgtaggggccatgnnnnnnnnnnnnnnnnnnnnnnnnnnnnnnnnnnnnnnnnnnnnnnnnnnnnnnnnnnnnnnggatggtgaacctggcggccatggtgtggcgccggcttctgcggaagaggtgggtgctcgccctggtcttcgggctgtcgctcgtctacttcctcagcagcaccttcaagcaggaggagagggcagtgagagataggaatctcctccaggttcatgaccataatcagcccatcccgtggaaagtgcagtttaacttgggcaatagcagtcgtccgagcaatcagtgccgcaactccattcaagggaagcacctcatcacggatgaactcggctacgtttgcgagaggaaggatttgctggtaaatggctgctgtaatgtcaacgtccctagcacgaagcagtactgctgtgatggctgctggcccaacggctgctgcagcgcctatgagtactgtgtctcctgctgcctgcagcccaacaagcaacttctcctggagcgcttcctcaaccgggcagccgtggcattccagaacctcttcatggcagtcgaagatcactttgagttgtgcctggccaaatgcaggacctcatctcagagcgtgcagcatgagaacacctaccgggaccccatagcaaagtattgctatggaagaaaggcctgccgaggctcttccccgcttgacgggtgcagcggacttgctccagctgggtgaaggaggcccccgctgaagcaactcgccctcctggggacccaagctttcaagccatacgggccagggctgcacgggacagacgaaccaagggcagcgtgaaggaaaaccttgggatttgacccccttactcgaggttgtcatcgttggactcggtacaccaacccgaggttaccagatgggacctctacggaaagacgttggcccttcagccgtccattcgggaaagattaaaccg

SEQ ID NO: 364538 - DNA, 456 bp, Homo Sapiens
tttcaatctgtagctggcgctgatacaatacaatgtttacctggccaaagagggttcgaggggacaagctggcctcacaataagatgcacagtgttagctaggtcatcgtgacaggcatgcctcacaccaagacggactatcaagacctgagccgacctgacttacataaatgacaaacactagtgctttacaaaggtggctggagttctccatcttctaaaatcaacatccaatccccttcagtcagcatcttcagtattcccttgaggactggaaaaccaaggcagctacgtccatctgtaacgcacccgcaccggacaggcacgagatgtcacgtccacctggcaccatccaaagagggtaaattggagaaatcacacctttcaaatgttaatctgacactgtaaacagcagttgagttctcatttacatgggcaaagaaagcactttaaact

SEQ ID NO: 364539 - DNA, 933 bp, Homo Sapiens
taactctgggaaaggcatttcacctccttgggccttatcttcctcatctgggaaataggttacctgcataatccctgcgttgtggcgttgtggtgaggttaaatgagtcacttcacacaaaatgctttgcaaggtgcctgacagagaggaggccctcagtaggagcgggctggcactccagatctctttcagttagttgctgttttgtggtgcttagcaaggcacctaaggcccaaatgggagttagtgttgattgaaggaacaatggaagatgtgatctccaggcctgccactctcggagtgccccactcccatctgctatagactccaggggctgcaaggtgggcaggggtggaatctataggaatgtgagtactgtctgcagagtgagcacctcacataattttcaaacacatgtatgtgctgttctcgtgaataaaaatagggtcattgaaaagcatgattgcgcttgtggctttctggccaccagtaatacaagtaggatggcacatgggttctgggaaatgttggatgttgaaaggcaatctccgtgcctgaaaaggctgggagctgctgcctcactcgcccctggcactgtgcgctgcttctgcagtgcctgtgctctccagcagggagggagcacctgccctgtgatgtgatgggggaaatctatcccatgtctgaggtgtcacttgacgtgtgaggaattgattaggtgctatcacttggcccagccacagcagcatccgatgaggttcaattcatcacaccacttcagactcccagcactccgctgccttgtacacatactctggctgctaatgaatttcacgacagcggcggcttttcattttcaactacttagtgctgagttgcaagcctcctcacgttaccttgagaagcgggaacatgcaggctgcaatgcggaggggt

SEQ ID NO: 364540 - DNA, 571 bp, Homo Sapiens
ggaagagaaagggcagatgtaattggtccatacgcaacagttagaagactgaggctggcagagtggattacaaacacccaccactccgtgctgtccacagacaactcccttcagacagggcacaggcgggctaaaagtcaaaggatgaaaaacggcacgttacaccgacaggagtgaaaaagaaagagctggaatgcctttgttactgtcaaaacttcagagcaaagacaattacttgggtccagggtcctaacgacagatcagtccaacgagaagacacggtgatcctaaatgtgcatgcgcggagtatgtcccgttaggacaggggtgaggaacaggctgcggctgcccacacttgtaagcgccccacatttctgcacgcgtagctaacgttagagagagtctttctatacactcacatcctatgtagtaaacacagtgagcttcggctgggaaaagcggctgctccggccgaggaaatcctggtcgtgaatgaaaatgcatctctgtgggccctcacaggcccacgcagaggtgaatgaatttggctgtcttctgcatctgcatctcc

SEQ ID NO: 364541 - DNA, 610 bp, Homo Sapiens
  misc_feature (341)..(352): n is a, c, g, or t
cccccctggacgtctgtaagacccttctgaacactcaggagaacgtggccctctcgctggccaacatcagcggccggctgtcgggtatggccaatgccttccggacggtgtaccagctcaacggcctggccggctacttcaaaggcatccaggcgcgtgtcatctaccagatgccctccaccgccatttcttggtctgtctatgagttcttcaagtactttctcaccaagcgccagctggaaaatcgagctccatactaaaggaagggatcatagaatcttttcttaaagtcattctctgcctgcatccagccccttgccctctcctcacacgtagatcannnnnnnnnnnngcagggtgctgcctatgggccctctgctccccaatgccttagagagaggaggggacggcacggccgctcaccggaaggctgtgtgcggggacatccgaggtggtggtggacaggaaggacttgggaaggggagcgagaaattgctttttctcttcctccctgggcagaatgtagcttttctgcttcactgtggcagcctcctccctggatccttagatcccagaggagggaagaaaatttgcagtgactgaaaacagt

SEQ ID NO: 364542 - DNA, 972 bp, Homo Sapiens
  misc_feature (695)..(695): n is a, c, g, or t
  misc_feature (783)..(783): n is a, c, g, or t
  misc_feature (874)..(874): n is a, c, g, or t
gctggaccggtccggattccttggacagaagttccttccaacagtggggggacagctgggcacagctggtcagggattctcatacagcaagagcaacggcagaggcggcagccaggcagggggcagtggctctgccggacagtatggctctgatcagcagcaccatctgggctctgggtctggagctgggggtacaggtggtcccgcgggccaggctggcagaggaggagctgctggcacagcaggggttggtgagacaggatcaggagaccaggcaggcggagaaggaaaacatatcactgtgttcaagacctatatttccccatgggagcgagccatgggggttgacccccagcaaaaaatggaacttggcattgacctgctggcctatggggccaaagctgaacttcccaaatataagtccttcaacaggacggcaatgccctatggtggatatgagaaggcctccaaacgcatgaccttccagatgcccaagtttgacctggggcccttgctgagtgaacccctggtcctctacaaccaaaacctctccaacaggccttctttcaatcgaacccctattccctggctgagctctggggagcctgtagactacaacgtggatattggcatccccttggatggagaaacagaggagctgtgaggtgtttcctcctctgatttgcatcatttcnccctctctggctccaatttggaagagggaatgctgagcagatagcccccattggttaatccagtatccttatgggaaatggagggganaaaaggagagatctaccctttccatccttttactccaaggtcccccactccacggcattctttcctcaacaaactcagaagctcccccttnctactttgctccataagggaaacctggcttcgtttatgggaatttggctctggcccaccagtaacaggtccaattaaaccttccaaggaaaaatggaa

SEQ ID NO: 364543 - DNA, 695 bp, Homo Sapiens
caatgaaggttttcctcttgtcctcccctctcaaggctcagtcacctcaacttctttttgcctactagatatccaatccatcacctcgcctcccctggccctagctcaattaccctcttaaacccattcctgctcagcaaaacttcctctagttcaccattcattcatttgaacattaggaggcaatttagtgacctgttgtacctgaccatgttcttaagggggaggtctcacgtctcattcccagaaaagtctaccatatagatacatattccccgccccgcgcccagatttctggtgaatgaaatcacttgtatcttattaggtacatatacgcaaatccttaacctcaattctctgtcctcttcatgtcttacccagatatctcaggaagatttctcttttccttctgtttgcctccctcttcgacttacttgggagtcagcatctgaccacagtcgtgactggtaatgatgatttgtgcaaatactatcaaggaaaggacatgaattgtcttaattttagacccattaaaaaaccgcacaggcctcaatcttaaaagtcctatctaaatacccagaaatacccttcagaatttttgaagctatgcccatgtacaaaattttcttccttccctaattttaatggtatactaacaccttaggtaaataaaatatttctttactattttattg

SEQ ID NO: 364544 - DNA, 333 bp, Homo Sapiens
aggtgggttccatcaattctgtgtccccaggtcccccagcaaggtggggatttgccttcagctccatggagcagggctctagggcctcagtagtgcccaacagcacagccaagtcaccaaggggaccaagcccatgggcacctcccctctggtgggcatttcagataattttcttcaggagccttgaacaaaagggaaatcacaactgaataaatgaaggtaccaaaatttacatcaatcagtgttatatgatgtatgttggacagtaatatatatgtttcaaagtaataattttgtatatattttaaataaagtattaatactatttcggtg

SEQ ID NO: 364545 - DNA, 352 bp, Homo Sapiens
ttagaggtctgttaggcctgccaaacggcgaccagctccccctggagcgagggcaggccttccctttttctttccccagacacctacttgagactcaccaatttctggcctgttcaggagcctcagataagtatttgtacttgagaccacctcacacaatctgtatgggcccaaccctgatctcaaacctccttccctctgcccaaagctgtccttcctatggcaggaggggtgggggtcccaggacgtgcctcatacatgacttgagcttgtcagtccactgagtttccttctacgagatcaacgcgaggggcctgtatcttgaattaaaacctactcgcttcctttctgc

SEQ ID NO: 364546 - DNA, 301 bp, Homo Sapiens
gcggccgcggcgccccgaaggtaatcattaccaaatgaggaggaaaggacgatgtcatcgaggctctgcagcgaggcatccttcttccccatgcagtgttaaacactcccctacgcgagaaacgctgacctacgctcaagctcaaaggatggtagagatagaaattgaagggcgcttgcacaggatcagtatttttgatcccctggagatcatattggaagatgacctcactgctcaagagatgagtgagtgcaacagcaacaaggaaaacagcgagcggcctcctgtctgcttaagaact

SEQ ID NO: 364547 - DNA, 538 bp, Homo Sapiens
agtcggtgctccggggaggtcacctgacgaggaggtaggcttgggtgctggagaaaccggggtagatgggatgtcagctcaggctggagaccatgcgttggggatcggtgctgggtgggtcaatggggtcgccgcatcctcatcacttcctagttggcaccgaaagcttggctcactttcccactgagtgaggtgttctgcacggaattgaagggcagagaaacccccaaaggccctgagccctctgtatgtacacacatcggcacaaccccctccagctgatctggaagccccgtggctttaccgggctgttggtcttctcatgcctcaaagatggggtggaaggccagtaggagggcagaccagtgtggatggggagtctgtgagtgctctggcaagtgcaccgggatgaaactggagggagggacccctcagtggtgtctgattgatacatagatgatgatcttagcttcttctgtgtctcttgaagtgccaacaagaggaataactgaataaattggttgctgataataaggaa

SEQ ID NO: 364548 - DNA, 534 bp, Homo Sapiens
  misc_feature (48)..(48): n is a, c, g, or t
tagtgcttgctaaggaagacttcacagaggagtcacaccttaaaaaanaaaggaggggttattcctgcttttgccgtgctgtgatccagggcagagctccaggcttcatacggtaaaactctctgggaaggaaaggaactcagagtcccatgcagaaaattgttcagctggaggggtatcagaaagatggatttccaaagccaactgtttcctgtagtgtgtggatctctgcaagcagagcctcatctttcaatttcagctacatgaaagaggaagaaagggaaagatatatgtcatacgtgatatactttatgtggctttgaagaccccttttgtggggctacggctaaagaacatagttccctgggatggaattggctcttcctatttccctacttcatgaaaactccagtagaagaccttagaaccttgtcctggttacatggatatgtttactttgtgaaaattcatcaagcactatgcacagtcatgatttgtacatttttttgtaagataacttcatataaaacttac

SEQ ID NO: 364549 - DNA, 568 bp, Homo Sapiens
  misc_feature (97)..(160): n is a, c, g, or t
tttggatttagactttcactcttgttgcccaagcggggagtgctatggcacaatcttggctcaccacaacttctgccaccagggttcaagcaaagannnnnnnnnnnnnnnnnnnnnnnnnnnnnnnnnnnnnnnnnnnnnnnnnnnnnnnnnnnnnnnncctgaggacagtggagtagaaaagtggaaagaactcatgattctgatgccatcactgcattaatgaactaaccttggaaccaccatgtgagatactaaaccccatattgtttaaggtatgtttggttgggtgtgttgtttctagcagccaaaaccatcctaactgatagaaccctataccaaggctcattactaagagtctggaatcttacaaacatattaaagccaaaagacaatgtgtcagattgtctggagctgatccccagcaaggcacagagaagaacggagaggacaggcgaccaggaccttcacgatgacttcctgtcggtcaccaacctgttttccaaccctcctttcttcacactctgtctgtaactcatcctaacagaaggctgaccaactgatatct

SEQ ID NO: 364550 - DNA, 261 bp, Homo Sapiens
cacatcttctgccaccacatgaatagactaaaaagaaaggagagtcccacatcaggccaagtggtgacctgtggctatttcagctcagaatgtcagcctctgaagcatcaggtttgaatgactttggtgtcatgggattctgtccattgtccgtttgagtctgctgacatgcttcctctggaaagtgcagtttggcatggatgagtcagtggttttttattttggggtgttttttaaaaaataaaaatgaattgctttgag

SEQ ID NO: 364551 - DNA, 471 bp, Homo Sapiens
gcggccgcaacgcaacggacactggctggaaccccggaatgagccttcgaccctgaaatccttggggtgcctcgaggacgactggccgaaaagccgcattccctgcctcacaggccggaagtcccagcccagtccccgcgcgcgtccctcttcctcctcatactttcccttgactgagagctcctctaacccctgttctgatgggggagggcggtcttcccacttcctctccagaactccagaaagagcagtgtgcttatgcttcagtccaggctggagaggttggggccggggtagggaggcaggagccatgtcagttctgaaggagggtgaggcggtgggggattgcagggggcggctgagagaaaacctccttgagggccagggattccctttcccactctgaggctctggccagagggagagaggactctggacctaggaaaagaggcttttggctccaggtggtca

SEQ ID NO: 364552 - DNA, 436 bp, Homo Sapiens
  misc_feature (354)..(394): n is a, c, g, or t
aagctgggcaactgaagaaactgggcttggccctccatcctgccttgaactcaatctcttaaaaaaacaccctggggctcttgaaccctggcactgctggccctcccttaaccctactgggtgttgttctggccctcactgccggcgcccacagtcaggtaagctcacctggggtaacctgggaagtcagacctgcccagctcggagactagctgccccctcaccctcccctgtctgagagaaaacctccttgagggcccagggattccctttcccactctgaggctctggccagagggagagaggactctggacctaggaaaagaggcttttggctccaggtggtcaggacannnnnnnnnnnnnnnnnnnnnnnnnnnnnnnnnnnnnnnnnaccaagatccggaaagatgaataaagacaaacatgacaaact

SEQ ID NO: 364553 - DNA, 501 bp, Homo Sapiens
  misc_feature (25)..(25): n is a, c, g, or t
  misc_feature (469)..(469): n is a, c, g, or t
attctctcaaaacaggggaaggttnaggggcaactaatctccgaactgggcaagtctgacttccccaggtttacccccaggtgagcttacctgactgtgggcgccggcaggtgagggcccagaacaaacacccagtagggtgaggagggccagcagtgcccaggatcaagagcccccaggtgtctgtaagagactgagtcaagcaggatgaggccaagcccagttcctcagtgcccagcctccctcttacctccccctccccaagaactcaccatctggacacaagaggtgcttccaggcaaactggacatctgaccgccacacctgagggcacagagggggagtatgaggaggaagagggacgcgcgcggggactgggctgggacttccggcctgtgaggcagggaatgcggcttttcggccagtcgtcctcgaggcaccccaaggatttcagggtcgaaggctcatntccggggttccagccagtgtgccgttgcgttg

SEQ ID NO: 364554 - DNA, 778 bp, Homo Sapiens
  misc_feature (26)..(26): n is a, c, g, or t
cgacaacttcaagtccgacatctggnccttgggctgtctgctgtacgagatggcagccctccagagccccttctatggagataagatgaatcgctacaccctgtgccagaagatcgagcagtgtgactaccccccactccccggggagcactactccgagaagttacgagaactggtcagcatgtgcatctgccctgacccccaccagagacctgacatcggatacgtgcaccaggtggccaagcagatgcacatctggatgtccagcacctgagcgtggatgcaccgtgccttatcaaagccagcaccactttgccttacttgagtcgtcttctcttcgagtggccacctggtagcctagaacagctaagaccacagggttcagcaggttccccaaaaggctgcccagccttacagcagatgctgaaggcagagcagctgagggaggggcgctggccacatgtcactgatggtcagattccaaagtcctttctttatactgttgtggacaatctcagctgggtcaataagggcaggtggttcagcgagccacggcagccccctgtatctggattgtaatgtgaatctttagggtaattcctccagtgacctgtcaaggcttatgctaacaggagacttgcaggagaccgtgtgatttgtgtagtgagcctttgaaaatggttagtaccgggttcagtttagttcttagtatcttttcaatcaagctgtgtgcttaatttactctgttgtaaagggataaagtggaaatcatttttcc

SEQ ID NO: 364555 - DNA, 527 bp, Homo Sapiens
gggagggaattgtcaacaaagggacgagagacgcgcaactccgctccgcactgtgcgccagcatccccggggcacggagggcgctgcggcccgcccggagacccccccacccaggctggatccgggccctggggcccagggagcgggtgtggacaaatcctccaagatttaacttccaagaaaaccggcggcggagcgggtggaggaggcgaggatgtgtggccaatgcacgcggagtgcaaggccgcctagttgggagccgcaagagcctgcctggtgtggcaggcacacggaacccaatccctgtctgtccgctgcggcctgggaggggagcgccggcctcaccagaggaaggagcacgaggggaggagttccgagaggaaataattagtgaaatatttgcagaagatgctgggatgtggatttaattccggatggacagtggtgcttctgattccctcagtctgtttccccacccacgatctcctctttccttggcctagacacaccaaaaataattcaataaa

SEQ ID NO: 364556 - DNA, 381 bp, Homo Sapiens
gtcttttcttgctggtattttctaatttttcctataccaaagaggctccaaaaatttgtttttatgaatatattattcatgggagggtcagtttagtggcagagttagattttttaagatagtagaatttcatgagatggagtgaaagctctagttagacatggacctcagagctggaagcccagaatccaatccagatttaacaatggcttgttgcacagcatggagaagttgatttaccttcttataacagtttcttctttaaaatatagattcagtattagtcaagtcccaactatacagatagggatgttggagaattaattaaagagtatctataagattctttgacttgactttaaaatgtatcaataaagtagt

SEQ ID NO: 364557 - DNA, 429 bp, Homo Sapiens
cctccattttacccctttaatcatatttttcccccatctgggtaatggactgaaacctgttttagagttggctatggtctgttctggtgggaagctgaagaaactggatgaaattaggtcaggctctttagaactgcctttaacgtgcctttttattcatttgaggaagataaggctaaaaggatgggctgtttgaagcaaataaattagaaatatttctttggtcacaaccttgaaaataagttttgatactctatgtcattaagagacaaccagtgtttgggtatgaaatgcctgtcttattctcaaagctcaatcaagacacccagtaagccacataatatactaaaatggtaagttttcttgtaaggtctgttttggtttaagaaacatgaataacaacaaagaataatacacagtccacacaca

SEQ ID NO: 364558 - DNA, 1866 bp, Homo Sapiens
  misc_feature (888)..(901): n is a, c, g, or t
  misc_feature (1032)..(1032): n is a, c, g, or t
gccctttcgccctctcacccccacattcctccccccgctcaacaaaacatggtacaggcccggatttttccatctggatagtttcaaagtttcactgctccagtgtgatcattcttagatgtctaagaaagggaatttggtgggatctaagtggggacagaaggggtcctctcgtcctcccctccagcaacttttggttttatgttagaacctaaccctaagcccaggcttttctctccactgactgcctgtcagctagtctctccaccttggccatttccagccagctcccacccatcttttcttgaatctcttcctgtttcccttaggacgactgaggtgtgggctgacggaatgccctagttgaggtagtataggtgctcaggcccctaatccagacctctacctgttgctaccccccttcccctccctccaggactaagaagcaagatttcccaggtgctctgaaagctaattacttactcatcgaaggatctcaaatcaaagctgacccagtcttcatatccttcaagttcctttccattcctcaaggctttgcttcgcgtctatattgatcccacagccactgcacctgcccttgccacacttgcatctcaagggcatcttggaagtatttgaccatttcttgagatatggggggaaaaagtctttgtattggcatcttggttccagactcccctttccaaacctagaaaaatacagtgacctttgagcatacccaagatccctttctcactgttgcctgtcccctaactcacctccccacagcccctatcctttccccctcaacaaaaacaaaatctaccttacttgaggaattaggtaggtaaggaatgatcacattggagtttgggattaaaaacaccnnnnnnnnnnnnnntgcattgtggttctctctacactggctaaaaaatattggctctacactgtaagttttaaacgttacgttttctgtattgaattgtacgtgtgggattgtgagttagcattgtgtgctgttgagttggcccncacaggttacatttcacccttcttagttgcagccccatcagtcttaatgaaggaaaataaaaacaaacacaaagccttaagctcttggagttaccttccttttaccaaattgagcattggttctaaccaccgtggagccttgggcctacattgtggaaacaaggccccttcctgcccttcgtgttccattctctttagagcattacctttcattccactccagtgctcagcacgttcctcaattcccaatgcgaacaatttagttgtggcttagaaaaccacttttgcttgctaatttttctaacacttctgagacctgtggtttgggttcaccaagatttttgtgccaccaaatctcgtgttaaagaagtgccgagaactgtgggccttattataaattttttctcacagattgaaaattaagcgccctttgacctttttcctcttgtgttctcgtggaggacatgtgttcaggctgagtgagtctactataattaaaaagggctcttggccatttttgtgttcaccttattccaccttacttgctccgattacgcccagaaaatttcttcataggtgaatcgtgaaagcaatgtgttgacttgaaggacccaggtttgaacggttctacttgttgtttggggaccaagttttgccccttttaattatttttctaacaaatggggcaacaacataggtatcaacacaaatataaataggcccctagaattaggtttttaatggccccaaaacacgataacacatacacacatcaaaataacagataaataaacacaacaacaaatggcgacggcccccatcataaaagatacc

SEQ ID NO: 364559 - DNA, 652 bp, Homo Sapiens
  misc_feature (13)..(13): n is a, c, g, or t
actgacactactntatgtcggaagtattgaggaaccaatatgaagaggcttccagtggccaaagatgtgacagttagagcatcagtgtggataataacaggaatggattgaaatgcatcgaatatgcttgtctctctgagtccataatactaaaaaattaattggtcacctttgaaggataaatagaagcccatatcattgttttgaaaaattgtaaatagaagatatgagcatttatcctgccttttccatgtactgtatcatgggggatcaaataatagacggggaggtttttccttatagaagtatcccagctaatgaattaagaagggttgattgaattttaatatcaccacttcgtaacctcaaatgaatgaacagatcaagacattgagtagcagtgctgctgacatcacaaaagaaacacccaggcattattgcctcctgatgggagaatgcactaccttctatgaaattatcttgctaaattaatggaatctgtatctcatgtagcctctacatccaatttacaggagatcagaagacagaagaacatgttaaactacatcatgtgggtacagtcagcaaatttcagacgatgggaaactgcaggtcaaacaacccaggttcttcaacaaataaaatgcaaggg

SEQ ID NO: 364560 - DNA, 659 bp, Homo Sapiens
gattctaggcaggctgctgcactgctggtgctgctgctgttaatagacgggggctgtgctgaagggccaggaggccagcaggaagaccagctctccgcggtgagtgtgtgtcccatccccatatcaccattgcctctacttcggttgagacttgtgctctaggttctgatactttctctggctgccaaggttgtcattaggtcctcacatctgaggaaatggttccgcagcctcctaccacttgcccctggaagccagtcccttccccttgtgacttacgtgtccagggtatttgcccatcttccttccctgatacccccttggcacaggaggaagacagcgaacccctcccaccacaggatgcccagacctctgggtcactgttgcactacctgctccaggcaatggagagacctggccggagccaagccttcctgtttcagccccagaggtttggcagaaatacccagggatcctggaggaatgaatggctgagtccccgggctggagaggggctgaattcccagttctggagcctggctgcccctcaacgctttgggaagaagtgacatgtcatcccttgatatgtctgcatgcaaggtccacacccaaaagtgtcaatgtttgccccccaaataaaattgtctggcttctgaaaa

SEQ ID NO: 364561 - DNA, 469 bp, Homo Sapiens
  misc_feature (14)..(14): n is a, c, g, or t
tcgatggcaggtgngtcttcataaactatactgccttgtgatgcctccctagaaatgagaggtctcaataccagctcagaccatgtggaccgcggatgagattgctcagctatgctatgaacactatgggatcaggctgcccaagaaggggaagcctgagccaaaccatgagtggacattattggcagcggtggtgaagatacaatctccagctgacaaggcctgcgacacccctgataagccggtgcaagtgacaaaggaagttgtgtcaatgggaacaggaacaaaatgcataggacagtccaaaatgaggaagaacggtaccttctccaccaactccagttggcagccaccctgaaagaggatagcatctttgtcccaggaactcaaaaaggagtgtggaaacttagacgagacctcatttttgtgtttttctccagcctgggcaataagagtgaaactccgtctc

SEQ ID NO: 364562 - DNA, 907 bp, Homo Sapiens
gcaggctggtaccggtccggagtatggattctaggcgcgtttcctgaaggtcgatggccaggtggtcttcataaactatactgccttgtgatgcctccctagaaatgagaggtctcaataccagctcagaccatgtggaccgcggatgagattgctcagctatgctatgaacactatgggatcaggctgcccaagaaggggaagcctgagccaaaccatgagtggacattattggcagcggtggtgaagatacaatctccagctgacaaggcctgcgacacccctgataagccggtgcaagtgacaaaggaagttgtgtcaatgggaacaggaacaaaatgcataggacagtccaaaatgaggaagaacggagacatcctcaatgatagccatgctgaggtcatagccagaaggagtttccaaaggtaccttctccaccaactccagttggcagccaccctgaaagaggatagcatctttgtcccaggaactcaaaaaggagtgtggaaacttagacgagacctcatttttgtgtttttctccagccatacaccctgtggggatgcctccatcattccgatgcttgagtttgaagatcagccttgctgtcctgtcttcagaaattgggccaacaactcatcagtagaagccagtagtaacctggaagctcctggaaatgaaagaaaatgtgaagaccctgacagtcctgtaaccaaaaagatgaggcttgagcctgggaatgcagccagggaggtcaccaacggaagcagctcaccatcagagtatggcaagcagaaaagtggcccaatctcaccaggcatccacagctgtgatctcactgtagagggactggcaactgtcaccagaatagcccctggtagtgccaaagtgatagacgttaatagaa

SEQ ID NO: 364563 - DNA, 496 bp, Homo Sapiens
gcggtgaagcagtgggagcagcgctggatcaagaactgcctgtgcggtgggctctggtggcgggtgcccctcagctacccctgagcccagctgcccctcagatactcctcagctacccctcagctgcccctgagcccggctgctgcaagagccaccgctcgccctggactctcctcggcgcggttaacctcagcccgccctgcagggctgttgaaggccgtgggccggacgcctgcgtgaccagcagagcttctgaggaagcccctgcctttgtccagctgggcccgcagtccacacaccactctcccaggacccccagatccctggaccatctgcatccagaggaccgtccgtgacggccgggggtccaggcggaccttgtggtgacccggctcgggcgtctcctcggtttccttgcctcacccgcggagagcgctgaacctggacaagcagcggctgggaaggacaggtccaataaacgccctctgcgcccagg

SEQ ID NO: 364564 - DNA, 507 bp, Homo Sapiens
ccttagacagaatctcactctgttgccaaggctatgtcatgctattctgggacttaaagaccttgtatccacggaaagttctacctgaagaggccacgtgcagaatatggtgcagagaagcggaaggtgccctagggaaggggtccaaagtcaagtgcctccaagagccagggaggaactaagaagagtgaaggggcggttgggccttacccggcctctcccctgctgagattggatgggtggcaggctctgacttcatcccagtctatagtctgggccaaccaagccttgaatcgcatggaccttccgaggcccaggacacagaagagctggacagcttggttcctatggagtggcagtggctacttcacgccagttcattgctaccacacaaaataccagatttgtagctttaaaacatctcacgatttttaaatatcaccaatcagatatttaaagatgaagcccactagacttagtgactcactctcaacatacagagtatgg

SEQ ID NO: 364565 - DNA, 459 bp, Homo Sapiens
ctcctcctcctccctcctgcaggtgcagtggccttggtcttggaaactgaagggagaaggtctggcccccagggtggggctctcctttccctcccccagccccgccgtcagcactggccctctgtgaggttcgatacttgaacgccccctgccctgtgccttggacctgggcaaagctaggaggaggaaacagcacaactcacagtttgagctggggggtggtcttggcaaggctcctgtctgtacccctccctaaccttctcaaaagaggtgcacagcctctcgggtgacttggaaactcctggacaaattccattctaacttattttgacatgtatacaaaccaactgtttagagattccacttgtgcaaagccctactgtgtttttatgttcctgtttaaaagagaagtttacttagcaataattataaataaatgaatattctttagtgaaaaaa

SEQ ID NO: 364566 - DNA, 1003 bp, Homo Sapiens
  misc_feature (445)..(562): n is a, c, g, or t
gacagagccacccctgccgtgggaacctgtccgtgttcctgcgtggatcctgtgtttgtggctcccactccccagccccccagcagcccccagccgaggggcccagggcccacagccagcggtggaggtgtcttgctccgggcccgtagcccacgccctctctgggtggcagggccttctgaaggaaacttgcaggcgagcccaacgtggtggggggccttcctccctcagaggccatggggtgagaggggctcaggcagccaaggaggcccaggcgtgctccctcttatggagcccctcccatggagctctcttcccgccgcactttctaccccgggcagaggcgcttgcccacgggacgtttggggatggacctcggcccccgcccctgcagtcagcgtcagtgctcatctacgttaataaagtggtcctatttatggcggcnnnnnnnnnnnnnnnnnnnnnnnnnnnnnnnnnnnnnnnnnnnnnnnnnnnnnnnnnnnnnnnnnnnnnnnnnnnnnnnnnnnnnnnnnnnnnnnnnnnnnnnnnnnnnnnnnnnnnnccacaaatgatactagcacaacaccaagttttgtggtgaagcgagaggggccccccaaattagtaggaccgataaattacaacacgaagacagcggcggacgacaatatacacagacgtcgtcgagaaagagagacacacgtgaactacgtggtgtgctccttttgtgtgagggaggcacacccaccccaaactaccgcggaggaggagagcacacacattatgtggggacgaacaaccaaccaccacaacaaaaaaataattaacacccccccgaaggaggagaaaccacaaaatcaacacgacgcgagagcatatacaaaaagagcgatgtaacaacacacagccaccgaactaataatcttggccactgcatgaagaaaaaaagatgtagcaacacacaggaaagtagtacttaccaagaacaaaatattctaacacg

SEQ ID NO: 364567 - DNA, 314 bp, Homo Sapiens
ccatgcccttgaccagccttgagacctcgagcaagacaaggcaaccattctgaggctgagtttcctgctctgcaaacgacatgacaccctcggctggatgttgcagcggtgacactgaagtagtgacaccagacgatttctgtacttaatgtgatgtcagcacttagtaaacattcatatcccctgcctccagagttccttaaggttcaattgatggaatgcctcctctgcaccagcacctgggcaggtttgttgttgttgttttgcgacggaatctcactccagcctggacaacaagagtgaaactccatctc

SEQ ID NO: 364568 - DNA, 448 bp, Homo Sapiens
gcggccgctgcgagccagtgacggcaggacttggaatcatctgggctggtggagatggagccggcaggcagggagggcaccaggttcggctgccccgcctctgcccaggctggaagtccctcaccttgctcctgtggccactgatgagacgtgtgctggtgccctcggcccagctgacaaaccacagcgtgcccgccgtggtgcccacgatgcccatgtccacgctgtcatcgaagctggcactcaccacagccccgtccagcaccagctcgtgttccatgaacacagaactggcgcctgagcccttgcacctcagctccgacacagcccccacggcccacaggcgcagccgccccgtgctgctgccgctgaccaatcgagaacccgagaacagcaacagcccaatgccaccgtcatccgcctcccaggacaagaagcagcggccggc

SEQ ID NO: 364569 - DNA, 938 bp, Homo Sapiens
gctgggtggcgaattcggcacgagggcggagatctccacgctggccctcagccacagtgcccaggtcctggcctctgcctcgggccgaagcagcacgaccgcccattgtcagatccgcgtctgggacgtgtctggcggcctctgccagcatctcattttcccccatagcaccaccgtgctggccctggccttctcaccagatgacaggcttcttgtcacactgggggaccacgatggccgcaccctcgccctgtggggcacggccacctatgacctcgtgtcctccacccgcctcccggagccggtgcatggtgtggccttcaacccctgggacgccggcgagctcacctgtgtgggccagggcactgtcaccttctggctccttcagcagcgtggggcagacatcagccttcaggtgcgtcgagagccagtcccagaggcagtgggggctggagagctgacctcgctctgctacggggcacctcccctgctctattgtggcaccagctctggccaggtctgtgtctgggacacgcgtgccggccgctgcttcttgtcctgggaggcggatgacggtggcattgggctgttgctgttctcgggttctcgattggtcagcggcagcagcacggggcggctgcgcctgtgggccgtgggggctgtgtcggagctgaggtgcaagggctcaggcgccaggtccagttctgtgttcatggaacacgagctggtgctgggacggggctgtggtgagtgccagcttcgatgacagcgttggacatgtggcgtcgatgggcaccaacggatgggcacgctgtggttcgtcagctgggccgagggcaccagaacacgtcatcatcagtggccacaggagcaagggtgaaccaagtggactacagcccccgggcagtcccaatgcgccaatgcagtgagggatgggc

SEQ ID NO: 364570 - DNA, 474 bp, Homo Sapiens
  misc_feature (263)..(275): n is a, c, g, or t
aaaaagatgtataagactgtacagaaaacattgtaaaatttagagaagctaaagaagtgcagtcctatgctacacagatggaagggaagaatatcctacacaggtaattgggtatggcaagcaaggctagaactgaggaaaaacagaatcaggcccagcctaaaagcagcacactactgacatatggaaatgtagatttccattccacaaatcttactatgtttctaagagaaactagaagtccagatttctatggaaattcnnnnnnnnnnnnnatgtactggcagaaacaattttaaataccacacaggacaaaaaagaacacatctgtggaagaatttggccccgagccaccagttttctactcctgcaatctacctacttatctttagataattcattaatatttctgggttgtgcttaacctacacacgcaaaaggttacacacactacaggaaatctatcaccacttt

SEQ ID NO: 364571 - DNA, 538 bp, Homo Sapiens; identical to SEQ ID NO: 14493
  misc_feature (504)..(504): n is a, c, g, or t

SEQ ID NO: 364572 - DNA, 462 bp, Homo Sapiens
tcctctggttgatgaaatgccagcgtgaaagggatagccaaatggactaaagcacaagtgccactctagttactcagcagagtccccaataaaggtccaccacaataccaccacacatccgctcggggatgaacaagggctgactgagtgataagctcttgaaaattcttaagctcactgcatcccttcaggtctccaaggaatgctaaatctcctccctgccatgagagacacgaagtgaacctagtgttgggagatggaagctggatggccctcaggggctgacccgcagggtgctggactttgagatatagcagagagagcttggcatgacttattactccaggctatagaatcccggaaaagagctaccatggagctgactggaggaccaccttagtgggaagagggacaatcagggcctctggcctgccatgtgcacaagcataacaattgcttttg

SEQ ID NO: 364573 - DNA, 281 bp, Homo Sapiens
tttccaataagtgagtaaataaaccctcctgatgaagaagtagtgaaaaaaaatagtttagaacattaagatagcactaccctttcccccttaagctcattatagtaaggaacagcctatttagcaatttcaacttaactgcatgtaaaacagtaatatccttggtatgttgcttccaaaactgtatttgaaacttaaatgaatttggactatttctaagcatcagaataaaggtatgtgggaagggaaaacgttgagaggtaataaaacgaaacatttgc

SEQ ID NO: 364574 - DNA, 567 bp, Homo Sapiens
  misc_feature (27)..(27): n is a, c, g, or t
  misc_feature (39)..(39): n is a, c, g, or t
  misc_feature (47)..(47): n is a, c, g, or t
cgcattgggaaatgccaggttttaccntaaaacttgccngaaatttnaaccccatttccatttacttactaacgaacagacctgatttttatttaaaaacacaatttagctttgccaacagaagagtaaaggaaaccataacttataaatttgtaatgtgttcctccttgttggagacattagccagtgtttagttttagaccaacttatacaaacagagtattgatttgtacacattctggagacttgctatatcatggtttgctatggcacagactcagcttagcatggggacattttgaacttcattcaaagttgagtagttactggaacctttgacattgccttgtaatgaggtacttccaaaaaaagacccctaacaatggcataatagtgaggtctctctgtgcatatacataatatatatgcaggataaatgtgtgcaccaatcaaatctaaaattttatgtgactgtcaaatgaatattatttgggttaagatttttcatttctgatttggatagaaaattgctattaatcttgtattaaaatagtttttaaaaatcta

SEQ ID NO: 364575 - DNA, 877 bp, Homo Sapiens
ctgtaatttgcaagcttctaaaagggggttataataaaattctggttcactaagattcccatttgctaagctctggttaattgaggtgcttgcctgtgttatgcccttggcttttccaatgtgtcttactatggaatgtttccagaaagacattactgttggctcctggaacaacgttccccaaagcccagcgatgattggtccagcaccacccacccttttagatgatgttgcacaatggctgttggctattttttagccattttgggcctgatgttgcctttgcggccaaaccccaggagctcccctttctttggaggtctgcagaggtctcttgaggactcagcctgttcgtgaatggccttggcaggctgcatgctggctctgtcatccttggcctttttcaggtggttccttccctttgggtggaaatgggactttgagatcagggtggttacataccgaatgcgggtgccctcggcttaggcatttgggcttcctatttgaggagatgtctgtaagcacgtgcccgctgagatcacggacaaagccagaggcctgtctggctctgatagtactcaagctgcttctccgccagttctacccgctgtaacagattctcaataaagtcctggagccgggctttcccttgaacctccttctcagctgccgcttccaggaaatggttgaatgtgacaacttctccgacttgttgctgctgctgcagccgccgcctccggtgctgatgctgcgggagcgaagcggttttcagacgagccgtaaatcagactgagccgggccggctcccactccccgccgcacctccgcgccgggaccggcggcgtccagggcggagcgaggcgcggctagccccgct

SEQ ID NO: 364576 - DNA, 424 bp, Homo Sapiens
  misc_feature (17)..(17): n is a, c, g, or t
  misc_feature (35)..(35): n is a, c, g, or t
  misc_feature (60)..(60): n is a, c, g, or t
  misc_feature (145)..(145): n is a, c, g, or t
ggaccataggcaggcanctggaggtgccaacgagncctgggctgggtcccacctcaccantctgctggctctggcaaccctggcctttaccctggaccttgtaggggtctcctgcctagctgcctagcaaactggcctctaccanaagggctctcttaggcatgtaggaccctgcagggggtggacaaactggagtctggagtggcagagcccccaggaagcccaggagggcatccataccagctcgcacccccctgttctaagggggaggggaagtccctgggaggccccttctctccctgccagaggggaaggagggtacagctgggctggggaggacctgaccctactcccttgccctagatagtttattattattattattttggggtctcttttgtaaattaaacataaaacaattgct

SEQ ID NO: 364577 - DNA, 518 bp, Homo Sapiens
gaatataaactggctcagccactttagtaaacagtctggcagtttttaaaaaagttaaagttaccatttgactcagaaatctcacttctaccatatacacccaagagaactgaaagtgttcacatgcaaacttgtacacagattgttcacagtagtattgttcatagtagccaaaaaaacacccaaatgttgaataaattgctgaataaacaaatcatggcatacccatgcaatggaatatttggccattaaaaggaatgaagcactgacgcatgctacagcatggatgtgtcttgaaaacatcatgctaggtgagagaagtcgaacatgatacagcaactccatttatatcaaatgtccaggacaggcaaatctacagaaacagaaaggctctacggctggggaaaatggatacactgggagtgagagctaaagatatgacatttattttcagggtgatgaaatggtctaaaattgattgtggtgatcgctgcacaactctgaatatacaaaaaaaa

SEQ ID NO: 364578 - DNA, 176 bp, Homo Sapiens
gaaatgagatcctgctgtaggaatatgttatccagaggcagagcaggaggcatggtgtgattttaccatatctatgcacctataaagtacagcagcagtacaaaagcccttaaataacgtaggttaaatatcaaacgttttgacatataaaaggtactgaatgaatagtggctaat

SEQ ID NO: 364579 - DNA, 507 bp, Homo Sapiens
  misc_feature (33)..(33): n is a, c, g, or t
ttataaacagcccctaaaaactttacaacgttnacacagttttttaaaaagagactgtatacacttgatttgctttcaaaataaataaggtccagctaagtcttaggaaggttaacgtcgggtaggaatgctgaatcatgataaggtttggttttctacagattctgttccggtgcctttcctatccaggcaccacctgagaaagttgtcatttgaggtcgcacttgggaagttacatctgtgaagtttctgtcattcgtccagatctgtgtgtgtagcatgtgctgaggaagcacgtgctgggctgtgcctcagacagtgcatcaccgggcacccagaggcttgcctggctattcctgttctggtgtgtgtggagtgttggggaggaacagatgcagatcaacctgtggctgttttcccgtctaggttctcacaggtatctcctgacagaggtacttaacaatggctctgctggaaatttctataaataaaatgtccaaaatggtg

SEQ ID NO: 364580 - DNA, 646 bp, Homo Sapiens
ggtcttcacagggccgctgagtcacttcttctacttcttcatggaacattggatccctcctgaggtccccctggcagggctcaggaggcttctcctggaccgcctcgatctttgcaccggccttcctcatgttgttcttcctcatcatgaactttctggaggggaaagacgcctcagccttcgccgccaagatgagggggggcttctggccggcgctgaggatgaactggcgggtgtggacgccactacagttcatcaacatcaactacgtccctctgaagttccgggtgctcttcgccaacctggcagctctgttctggtatgcctacctggcctccttggggaagtgacgaccgctgggagaacatcaggtgcactgtggacgtgggtctgggggtctcacccgcccagcgagagcagaaccaatccagtcaggatgtcactgactctaaatcaggtgattcaagatgcccaaaaatgatggatagagaaacagaaatctctgaatgtcagaaccctgtcttttaaaaaggcagtcactgccttcaggtggtgctgccccagaaacttaaaatttagtcgaggcagtttcaattgttactgtggaccgaattaggatcccaataaacgataatgcaggtttttc

SEQ ID NO: 364581 - DNA, 312 bp, Homo Sapiens
tatacttgattgtattattagtctgtttttaaatgttttgcccggtttttctcttcaatatttgtgtatataaaccgatcttcgtgatactgtacatagctgtttgaaatgccagaatgacttctgacattccaagtttttcacaaaatatattttatctgtgattagccatttgactaataatactggctaacagatgttgaaaaaaattgtctgttttctcattaattttggtctaaaacatgtttgcacttgtctttgacttgtgttttattaacattgattggcatattaaaagtcactctggcattt

SEQ ID NO: 364582 - DNA, 299 bp, Homo Sapiens
  misc_feature (96)..(96): n is a, c, g, or t
  misc_feature (299)..(299): n is a, c, g, or t
aaaaaagggattaatagcttttgacctcaagtcttttgtcttctgagtgttggagcttggctgaagacatgtttaatactgtacaatttctgaagnatggttattaacactgtgctgttaagcatccatttaaaaatatttgttatcttctttgcctgcctgtattttaaaaagaaatacaaagttgtaaaagtaatggatttctttggatgctgaatgcagtgatgttatcagtcagattctttccttggctcagttgtgtttgtatttcctttcttaattccccaaatcttggctgn

SEQ ID NO: 364583 - DNA, 1134 bp, Homo Sapiens
  misc_feature (200)..(215): n is a, c, g, or t
tgcctgtcttgtctgtgtggcttctcagatggtggagggtgctgggagctggcagggtccttccagacagtctcagcctctctccgccgcccccaacaggctgtcaaacaaaaccggagagggggtgggggagcccagcctcccagcgtgctgtgcccgcaggcacccgtgtgacatccgcacgtccagctccgtgaccnnnnnnnnnnnnnnnncacaagtgagtgagagatttcgaacgcccacccctcgactttgaaatctgagcaaaacaagaaactggggtcttcctctcccccgaacctctccccagctagtcttccctctgttcttcctgcctccagccgcccgcgccagattttgaaatctcggagacaaaactagtactgtaagataaatttttttgtactgtatttattgtgtataacgatttttttaaaggagaattctgtacatttagaactcttgtaaattaaaaaccgatcctttttttaaaactgtccaagcaataaatagaaaagataggatcaacaccaatacaggggtggcgcgactcgaaaagggtacacccgccggagggcccccgactgactctcccccccaagatatttgaccagaagctgtccccggttgtcgaagccttcaaaagcagcacagccgaggagccagtggccagacgcgtgggagagcgaaacaaacgtcgggacaggggaggctcctcccccagaaagggaccgttaccatgtgtggcggggggcgaccttttctggcggaagaaccgcccctggcactttaaacgtctccacgacgggggagaacttatagagccccctcgagaagggcgttgacagcgggggctccgcagcgtggcctatatggccgcttcccggacacaattctgcgcctaggccgacaggtgttctcccttctccccggaatgcttcttgttcccccagcgaggttctctgttatttactgggcgccccggccggggggcccactccggggctagcgggtgattgatgcccccgggccgcccgggggggccgctagcagcaagcctagagggtagatagttccctgctgagggtagacgctggccctgctgttgcttgaactgaccgcctgtagccg

SEQ ID NO: 364584 - DNA, 341 bp, Homo Sapiens
caaactcctctcttaccacccgcagctgaactcctctcagcgttcaggtgttcctcatcttctcactttctctgccatgccgttctgctgtttgactgcttttctcttcatctcttcatctgctcctggagcctggggtttggggtttatatgggtacaggatacgggggtgtggtgggccaaagggcaactttttgggtacgaaaacagaaatgcctgttcccagttagggccatgggtctccaggcttgagggtggggcctttgctggggagccgccctcttctatgcagtatttccctgtctcttttctatatcaatacctcaataaaatttagtttt

SEQ ID NO: 364585 - DNA, 467 bp, Homo Sapiens
cctttcaatcttttccttgcttctggcatgagttaccatctcttttaagaaattggttatgcatttgaaaatacacgtagctatacatactttaaacatatcatttagcaaggatgctccttatcggaccgttgctgggaacagagaacacgacagttccagactgtttccaagattggatgaagagattcaattgacaatgctgtgaagagagggatttggagcttgttgggggaggtagtgttgacttccttgtgcaatctaggattgagtgggggatgcagttggaaggcaagagaagtaagactcctccatcttcctggtccagagaaattatgctggatccccctacccttaatgagaaaggaggtgtttgtgtttccagcatctatgagatctgattgctaatgtagctacctttaaagaattctgctatttacaataaaagtgagatctccctcctccaa

SEQ ID NO: 364586 - DNA, 341 bp, Homo Sapiens
  misc_feature (235)..(235): n is a, c, g, or t
  misc_feature (241)..(241): n is a, c, g, or t
  misc_feature (264)..(264): n is a, c, g, or t
  misc_feature (293)..(293): n is a, c, g, or t
  misc_feature (316)..(316): n is a, c, g, or t
cttcttaatataaatgtttatcaaatactgtgttaatacaaaatagcaatttcacaaacacagaaagggtccaataccagcaggacatttttttaaaagtcatgccgcaaacgccactctcagacattgtagacattataggtctataaaagtgaatatgaaagacaatcatacagtttccgtttcctcccaccccagagaaaggccttaagaagcagcgaggcctgcacctgangaggtngggaaagctcctagcggaactgngccagtgtaaacaggactggggggaaagntgcattttcggtgaaagggccangagcctgaaatttgaaaatgctgat

SEQ ID NO: 364587 - DNA, 1190 bp, Homo Sapiens
  misc_feature (102)..(116): n is a, c, g, or t
  misc_feature (712)..(768): n is a, c, g, or t
  misc_feature (813)..(813): n is a, c, g, or t
  misc_feature (816)..(818): n is a, c, g, or t
  misc_feature (821)..(822): n is a, c, g, or t
  misc_feature (824)..(824): n is a, c, g, or t
  misc_feature (872)..(926): n is a, c, g, or t
gccccccttacttacgcttcaaatctgcctaccaggttttccatttccaggcagtcttttttaattttttccagcctgggcaacaagcgaaactctgtttcnnnnnnnnnnnnnnngacagtagcttatgttcatgtcaagcacctctcatcacagtcgagttccaaggaaaaattcccagcgttttctgcattgggtgctgtgtcatctgaaatcggcacattccatggaggaaggagtcctgctttgttgcatgtatcctagggtttaatgttggtaaatgagtcactctagcatttgtagaaggctccctgagactcctgcagcagtcgaccaagcccaaggacataattgaatctggagagtcctggggccttgttttgaaaaagacttgaaatacacataggaagaaaggcataaaaataaatgttcacttgtctctgctgtgagtatgtgttccaacttttcagtgatggctttgagaattctcaaacttgactggctctaagtgtatctggtggcttttgtatcgtaacctgaaactggcttagtactttttcctaaaagctcaggatttgagaatgaggaccccttcgccaggaaaacatgtatacactcaaaattttgcttgcagttctagggtgtttagacccttctcagatacctgtgcatcttatgggttttgtttttctctttgagacagtctcacccnnnnnnnnnnnnnnnnnnnnnnnnnnnnnnnnnnnnnnnnnnnnnnnnnnnnnnnnntgggttcaagtgattctgcctcagcccttgaatcagcctgggatnacnnngcnngnacccccacaccccagctaaatcctggcatttttaccaaaaaatggaannnnnnnnnnnnnnnnnnnnnnnnnnnnnnnnnnnnnnnnnnnnnnnnnnnnnnnatgcatccgcaacgcccggcggcttcccgaaatggcctggaacccacacgattgcccctcatgcccccccagagttccgggcaaccttaaggccaaggacagaagtcgctccaacagcggaacaccgcccgccacggaccccgcgtactttggtatatcctgggcaccgccttcccctccgcccctaaactctcagcctgccccgcgaagtagtttctcccgcgtctcgaaacggcgccgagagatgccgtgcaagtgccccgt

SEQ ID NO: 364588 - DNA, 449 bp, Homo Sapiens
cacatgtgtgtccccatgtgcaccttgaggttgcccttagtggtgaaggcccggccgcagatggtgcagccgaacggcttctcgccggtgtgcgtgcgctcatggatctgcagggcgctggccgaggagaaggtcttcccgcacgactggcagttgtgctgcttgggcgtccggcgcggtgggggggccagcatgggcgccaggcccgggcccatcactgtctgaggcccggcggggacctggacgcccgcgggcagcgggggaccctcgcccagcgccatggccttgccgtgaccgttcacttccattttgatcatggtgggtgcggcgctggagatcaggctaggagtgctttggctgggaccccgctccctgctcaggaacagcaggctgaagggcgcctcctccttgatgcccgcgcggccaggggcgcctccgctgcccggggc

SEQ ID NO: 364589 - DNA, 560 bp, Homo Sapiens; identical to SEQ ID NO: 73860
  misc_feature (354)..(378): n is a, c, g, or t
  misc_feature (386)..(386): n is a, c, g, or t

SEQ ID NO: 364590 - DNA, 502 bp, Homo Sapiens
gtgggcacactgcagtcaccaggcgccatttacgctgcctccaagttatcctactttgataagatgagtaacgaaatgcccatgacgcttccggagacaaccctggaaacactgaagcataaaatcaacccctcggcgggggaggcgttcccacaaacggtggacgtgctgctttacactccagggcatcttgacccagccgaaaaagttgaaaatgctccccccaagttatggtgtgctttgaacgaaggcaaggtgaccgtgttcaatgctttttcatggaccatccaccagcactcctttaaagtgggccctgcaaaagtggtgagtacccgaagcgtcaggaaaaaagcctctgaattcacgtgatttttgaaacccaagtgtgttcatccatattcgacagtaggatacaagctattccacagcctcactcggtttctgtaaacagggggttttaactttcacctggagttttcaaattaaatgtaagcttgttccc

SEQ ID NO: 364591 - DNA, 844 bp, Homo Sapiens
taaataaatcacatgactaagctgagcaagtcacaatccttgtttgcacttgtatgaggcgtgtatgcacaaatccagaggggggcaagagatggagggggcaacccaaagcctggctggaacctggaaccaggacacctggcctgccaattacatgccacctcatatgaattcccttaaatctgcaccttcttctgataagcaaaatgcagcccttctgctctgaggaagaaaataccattaaaaagaaggcagaccaccaaacagcactggccataagccacaagttcactctagggacaaaacaaggcgatgttccccaaagggaaaaattcactgcgatctgcaagccctggcaaccaaccgagagaaagaaccaggaaggcaaggacagtgatcatggttgctagagcctgctttgcacacacgtcatcaacagacagcagtcaacaagctgcctagggcctctgcagagccagatcaaccccacagcctgtgagccaggccttaagctgcctatttgtgctgaagcgggctgcagaacgacccgtgttatccaccctgagcaccaccaacactaagcacaaatgacaacaccatctcacctgaaccctgtccaactcacagctgcctcactggcctttgccactgccctctctgatggagcaagggtctggccttccaagcaaatgtcagcctcagattcaaaagacacataggaaggagcaacacccaacacactgaaaactcctgcccgatccacaaagacccccagtgcaagcgatgggcagcatcagattgatcgaaaccacaccctttcactttatgaatttttatccacact

SEQ ID NO: 364592 - DNA, 1090 bp, Homo Sapiens
  misc_feature (856)..(881): n is a, c, g, or t
agcggaggttctccggctccagctcctgcgccgcctgttgctcgctcctccgggcggtcgcttcccgccggtgcccagggtaggcggcccgagagcgcgcaggcagccagcctcccgccttcgtcccctccccgtaccgcaggagccggtccgaggggtccggagcgtccctgagagcgcggaccccggcagagcagcccagtgcacccgggacatgcgcgccgagacccccggcgccgcgcggcgatgaacgcgaccttcctgaaccacagcggcttggaggaggtggacggcgtgggcggcggcgccggggccgccatgggaaaccgcacccacgggctgggcacgtggctgggctgctgtcccaggggcgcaccgctggccgccagcgacggggtccccgcggggctggcgcccgacgagcgcagcctgtgggtgtcgcgggtggcgcagatcgccgtgctctgcgtgctgtcgcttaccgtggtcttcggcgtcttcttcctgggctgcaacctgctcatcaagtccgagagcatgatcaactttctggtgcaggagcgccggccctccaaggacgtgggcgcagccatcctggggctgtacttgagcgccatctgggtccgccctcgccagcgctgctgcaagaaggaccccggagacccggaccctcgccccgctctctgcgctctgccgccgcctccgggcgggcagctacgtgcctggggcgcccgggcggggacgcggcgagactgtcggcgggggcgcgggaacggactttggacgcccggctctgtcctgtgtgcgctgcagcgttgcggcgtgggcagaatgtggggtgagggttcttaccagnnnnnnnnnnnnnnnnnnnnnnnnnnaagacgttcggggcagggtgggagtgggtatggagatgcaatttgggactgcggtcgctcgcgtgggagttttgtgtgtacgttggtgcgggtgggttcggaacacggtgcgagtgggtgaagatgtgaagcgtcagagtcgctgagcttgttggcctgatcttgcgtttggaaagaaatcttgtaataaaactgcaaccgtagggaaa

SEQ ID NO: 364593 - DNA, 607 bp, Homo Sapiens
  misc_feature (17)..(17): n is a, c, g, or t
  misc_feature (23)..(23): n is a, c, g, or t
  misc_feature (146)..(146): n is a, c, g, or t
  misc_feature (210)..(305): n is a, c, g, or t
agaaattactatcatanctgctntgaccttcaggggcttgactagactaagatggagatggagaagatggtgttatgtctccctctttacccctgacacatttccagggtacttgaggcttccataagaaacacagagatacacanaatgacagagtgttagaaggttagatatagaaaggtctcagggatcatctgatgcaaccccttnnnnnnnnnnnnnnnnnnnnnnnnnnnnnnnnnnnnnnnnnnnnnnnnnnnnnnnnnnnnnnnnnnnnnnnnnnnnnnnnnnnnnnnnnnnnnnnntccagactcttcgtaactaggccaactgaaatgctggtgggcttgacattaccatcctgctggagatgttggggagcacttgtaccacaccttcagtatccaccatggtcactcctctttgggctaggtgagcgcatgcctccttctgccaggtgtagaacttgatccatgggtaaaagagcctaggcccccactccatttccagactgaagctcagggtccccagaaactcccaggtaactccagagtctagggtgaggtatgggaacaagaatggtaagttcacacccaggaaggatttt

SEQ ID NO: 364594 - DNA, 388 bp, Homo Sapiens
attataagcatccttgccagtgccatgcggtatctcactgtggttttaatttgcattttcttaatgactaatgatgttgagcatcttttcatgggcttattgcccatttctatatcttctttggagaaatatcttctcagaccctttgcccactttttaattgtgtcatttgtccttttattatgggtgattagttctttatatattctgcatacaagtcccttatcagttatctgatttgtaaatattttctctcattgtgtggcttgtctttccactttcttgatgacatcctttgaagcagaaaagtttttaattttaatgatgcccaatttgtctatttttcttttgttgcttgtgcttttgttgtcatatcttctttgttatt

SEQ ID NO: 364595 - DNA, 933 bp, Homo Sapiens
  misc_feature (44)..(44): n is a, c, g, or t
  misc_feature (637)..(637): n is a, c, g, or t
  misc_feature (656)..(781): n is a, c, g, or t
catgagtttagcaatgttattcgcctctcattatttaaataatntgaagttttccccaataactagtgtcttagaagtcatgaaaatttcagaaaatgacaggtctcctgagttcgtgatgggagttgggcagcagtcgcatacgagcacctggagagtccttgccagttctttggggatggggagctcttaagactgccctgagaccgccctttgacctcattatggtcctttctagatcaaatgctgttttccatgaccgtctctgttcttcccatacgcgaatggcaggcattcagatctccaagaatagaggactaggagagactccaccacctatgtcctcacagttaattatcgatttgtgtcagttgcccattttctcacttcctgtttgtgtgtcaaggggtattaataaatctttgcctatttaaagatattagccttggattttcaaatattgcatattttgacatgtaaaaatttgttagttttattttttcaaccgatctgacctgtatagttgggcttgaggaagcttcctcattctacatgttactatggattttctaatattaacacagggttgtattttttccatataactttctattgaatttctttttccatatgatanggtggtgaaggtttagccnnnnnnnnnnnnnnnnnnnnnnnnnnnnnnnnnnnnnnnnnnnnnnnnnnnnnnnnnnnnnnnnnnnnnnnnnnnnnnnnnnnnnnnnnnnnnnnnnnnnnnnnnnnnnnnnnnnnnnnnnnnnnnaaatgggagaaataagggcacctacccccataagggtagtttgtgtgatttacacaagttaaatacactttcaatcagttagcaaagaaagtggaatgttcaaggctggtatttggtttcagggcagcccattattgggtaagcccccaacg

SEQ ID NO: 364596 - DNA, 560 bp, Homo Sapiens
cgtaaatagtttgagcattagaaatcaacttgaaacaataaaatgtatgcttccttgaactgtcatatcggttgacctgcaaaattcacctttggaacgtgacacaatgttaggcatacctcccttttttctaatacatggaatacattttgttggaggtaatttatgtgattcatataccactgctacagtgttagctgacaacatatagtatgaggtaaggatctaattctgtttcctctcacatgattacttgatagctaagcatctgattggtttactgctttaccactgagctgaaatgccgtgttttccatttattaaaatcacacatggctcctgtttttgtcactcagcactttttctccatattcttcaagacgattgtgagtatggtacgtaacaggaattacatctggtaagttgtatagttttgtgtaggaactctatattcatagcatatttgtggaaatgatacctatggaggtttctcacactggtgtgtcattatacattaattgtacaatatgcattttcagtaaaatatttgaaaactgtaa

SEQ ID NO: 364597 - DNA, 504 bp, Homo Sapiens
cggcgtagcgctaagcttctcggcagcacctgcccaactctgtagaaggcgctcagtgtatacttttattaaacgattgaaaagactcgttaaatctctttcctacaaaccttttaagaaacatttttcacctcagaaagcttaggttccaactgttgaaaaattttaaatctgcttgatttaaattcatgttatgcccatatgaaagtaagtaaacaaataatcgaatcataaagcaagcggagatggaactaaaagctatatatacatccttcaaaattttccttattccaatcaataaaaacaatgctgcctcctctatcgggaatgccataaattattctgattccacagttgtgaaaaggtattggtatgctatacgaatacacattctttagaagatatccttgttaaaaatgttcttatccaagaaagtatgattgttaataacttagcccgctactaatacaaaaataaaacagcttattctgatgcatataacgt

SEQ ID NO: 364598 - DNA, 270 bp, Homo Sapiens
aatactacatgttctcacttataagtgggagctaaatgataagaacctgtgaacgcaaagaaggaaacaaccagacgctggggtctatttgagcgtggagaatgggaggagggagaggagcggaaaaggttaactgttgggtactgggcttaacacctgggtgatgaaataatgtgtacaacagaccctcaggacatgagtttacctatgtaacaactatgtaacaaaccttcatatgtagcccccaaacctaaaataaaagttcaaaaa

SEQ ID NO: 364599 - DNA, 433 bp, Homo Sapiens
atggaactgaggccccaaatatggtatcaagcaccgaagcacagagcacaactcccagccctgatggtatccgagtctgagtttgacagtgaccaggacacaatccttcagcccgagaaaagatggaaagagggaatccaaaggtttcccatgaatggttccatcagaaatggagcttccttcagttattgctcaaaggacagataatggcgcagttcattgtaaagtggaaggaccccttgaatccaagaccagtcagtgggagttacagcacaaaacccactcttttagaatagttcattgaccttcttccccagtgggttagatgtgtatccccacgtactaaaagaccggtttttgaaggcacaaaacaaaaactttgctcttttaactgagatgcttgttaatagaaataaaggctgggtaaaactct

SEQ ID NO: 364600 - DNA, 482 bp, Homo Sapiens
agccctggctgacctccatagtgtatcatgttcctgctaccttcctgacccctgtgctcagcctggaattgttataggaggtagcaagggcactcagaaaagtcagttggaaccagtgtcttggtgtttactgtttcatgtcttagttcctgagttgggggtggggtttgatagggaaggggtggtatagctagaatgtgaactaagaacttctccatctgctttactttttctttcttcgacaaactgtcaccttttttactccaaactgaccaagaagttgtatttgccatttgtggctactcaagtcttactgtccagccaagggcccctacgtctcagcccaatgggttggttaaaaaaaagagagaagccactctcatttctgtatcacagttgcccttttttagcaagtgtgtgaattcacagtgcttttctatgaataaatcatggatcacataaaagatcatttttctaaaagc

SEQ ID NO: 364601 - DNA, 389 bp, Homo Sapiens
gaccagacccttacttcttcactgcaggtccttgttctttctgtgtaccagggaccttagtccctgggtagagggaggcagaatctgtggtagcagggctttctcgaaggtctttggtggctcctaggctgttgtagaatgtcagagactctccatccctagccagccttgtccttgatgccctgcaatggtggttttcaaactgtgagtgcctgtgttccaaaaagtcctggatcacttaaactgatgggttgaacttttccttcccatgcatatctcttccttccccaaattggattaaaccagaagagctccattgtcatctagtttatgtattggagttccagtcaacattttgttaaagaaaaaagcaaagatttctgctaaat

SEQ ID NO: 364602 - DNA, 1558 bp, Homo Sapiens
  misc_feature (853)..(913): n is a, c, g, or t
  misc_feature (1199)..(1210): n is a, c, g, or t
  misc_feature (1506)..(1514): n is a, c, g, or t
ggcctgttacgcacatcgtctgcagtctatgacttctggactcatcggctgattggacaccaggaggagtttgatctcctgccagctgggggatgtttctggaggcagtctggtcccccacaccgcgtccggtctgagcctgccccctggataggctgtaatttgcctcgaagttcagcagttcatcttcatgggaaatttgctgagcccccaccagggaaccggatgatgaaacagggatacctcacagcttggccatttgaggcaaaggcagcttcccgagctgatgctaaagaagacagactttcccttcctcccagcagcagcagtgcagagcccgcctggagggatgtgggggctgtgcagggtgcagcgctcaggtggatcctgggaagcagcctctggatgctgagtggagggagccactgagcacagcaaggcaccaaagcccctggagaaaccgccagggcgaggtgcgaccatcatcaggatcaaagcagacggggcgtgggtggggaaggggctctgggaccagaccccccacactactgcgtctttgtttctatcagtctttgtagaagcaggtggtggtggaaattccagcaggtgggtcccgcagaggccctgaggcctcacttttcggatcttctgtcccagatcctgctccctccctgctgagcctggggttcccctggcattggccccagccttctgaaagccggcgctgcagccagaggccgcacgctgcactgtcgcgacgcagagaggcttctgtgcaggctgggatcgggccccatgtctgtgctgtctagtttgtgttcaaaatgtcagaataaacacagaataaatgttnnnnnnnnnnnnnnnnnnnnnnnnnnnnnnnnnnnnnnnnnnnnnnnnnnnnnnnnnnnnngggggggcgcgcgcgcccccagaaattttcccccggggggcgcccacacacattatgccgccgccaccaccgcgtttttgtgtgtatcaacaaaggggggtgccccactaaatatagtggaggggctgttttttatataaaacgtagggcagcgagggcggcccgcgcggtttatatacacaaagcggcggtagaggaagcgggaaacacacagcgcagtgtaaacatgggagggaacaatctctttgtgagaagaagagagacggccctccatatcaatatgttnnnnnnnnnnnncgagagagaacaccaatagtggtgtgtcgcgaaaaaaacatctcctactcttagcgcgagagatatatatttcagggagactctcttactggaggcgggacatactaattcacagataactttctaacaggagggtactctatacgtggggggtgtgtgccacacaaacgcgacgggcgcgtcatgtatgtgtgcgccgagtgccggtggcgtgggtgagaggacacaatttgtgtgggtgcgctccatagcgcgtgagggtcttgttatgcttgtgattgatcagagagaaatcnnnnnnnnnatatcacacgcggggggggacacttgccggtgtcgttctaaacc

SEQ ID NO: 364603 - DNA, 499 bp, Homo Sapiens
gaggaagtcaggccccacaagctacctccaccagatcagacactgatccagggaaagagccaggaatggcagtgtcttccctcttgccaaaagccctggggaggtgaaggaagagaagactttagggcaagcagcccaaaggggtaaatgaaagcaagaggctgctgccactgacctgctccattcagaacaagactggatgcttctgttgagctctccattatgtgggacccattcctcaccaaaatgaggagagacagtgactgttcctgccacagtccttcccagtctaacactattcctgggctgcatgatattcccctgggagcaaagtgacaggcacttagatgcagcatttcaccactcatgctactaatcatctacctgctactactgtaaaccatggttccagcagcctgttccacacccccacaccatcaggatagcacagggaaactgtagtttaagtggcaaataaaaacatttgcatcaaaaaaaa

SEQ ID NO: 364604 - DNA, 591 bp, Homo Sapiens
  misc_feature (21)..(21): n is a, c, g, or t
tgagtttgagtctgtcgctcntggctctcccgacacaacagcggcgccacctgcccgcaacggactcccaggagcctcgagctcctcatttccaaagctgaactgccccgtgtctgattccgatttctcttgagcgcgtttcggagccggcccagaacagagggaagccagacacaccatacccggcccaacagtggcagggcggctgcgggtgctggtcaagctgggtcacccggcactgagtgacgatcagcaaatactcagtggacgaaatatttgcagtgcagtgaggtgaggggcataaccgcggagcgtattcgaagagatgagagagactggggattaggccaggcttgaagggaagaatggtttgagcaccgaggacaagaattaattccccaggcctgggttccagccttgtgcggctatcacgtgcttgaaacctggctagtccggagtgagatgcgctttacgtgtaaaatacaggattccaaagacgtcgtataaaataatttgtatattgtttgcatgttaggtaacatttttaatgtattggattaaataaaatgcattaaaattatttttacattc

SEQ ID NO: 364605 - DNA, 364 bp, Homo Sapiens
acttttggctaatttttaacatccaaagctaataaataatcaagaagaaatagagaacattaacaaaataaattatgttctatttgggaatacctaatatcagatactaacaagtacagtgataagaataaaaaagataataatcacacataccttctaggttagtagaaaagttaggaaaagatattaaatttaaagaaacaatattttgcatgcacacaaaaaacaaagaacttcgctcatgatgtggaaatcatgacccagcagcaatccgtcttcctggtccagatcactggaaggcccgggtggggccccctgggggcagccacgcagaacctgctggacttaactcgccagaaaaatc

SEQ ID NO: 364606 - DNA, 446 bp, Homo Sapiens
gttcccgccactagaccacgctccctcctgagcgcaggtcctctctctcccttcaccctttctccataccagggcctaagtccgccttactcctctcctccatgtacttgaaccctccaggtggtgccgggctggggctggggctggttagaccacttctgagaactggactatttcctgcgtaaaccgggcgctcaggcgcttggacccggcccaagatttgactccggttctcaccccgccctctcctggggtggtggtgggggctggggggccgcttgcctgccccagggtcaggctgggcaaggtccctagctctctacccaagctgttactccctcatggggcgcctaaggagactcaagtggacccatcatatatgggggctgggcctcgggactctcgctctaataaaggactgtaggccatggggcctaaaccaaaaa

SEQ ID NO: 364607 - DNA, 694 bp, Homo Sapiens
  misc_feature (506)..(506): n is a, c, g, or t
  misc_feature (589)..(589): n is a, c, g, or t
  misc_feature (668)..(668): n is a, c, g, or t
  misc_feature (679)..(679): n is a, c, g, or t
tgatgtctcgttgagtcgcggccgccttctcatcgctcctggaaggtcccgagcgcgacaccatgtcggagcccgggggcggcggcggcgaggacggctcggccggattggaagtgtcggccgtgcagaatgtggcggacgtgtcggtgctgcagaagcacctgcgcaagctggtgccgctgctgctggaggacggcggcgaggcgccggccgcgctggaggcggcgctggaggagaagagcgccctggagcagatgcgcaagttcctttcggacccgcaggtccacacggtgctggtggagcgctccacgctcaaagaggacgtcggtgatgaaggagaagaagaaaaagattcatttcctataacatcaacatagacattcattatggggttaaatccaatagcttggcattcattaaacgtactcccgtgattgatgcagataaacccgtgtcttctcagctccgggtccttacactcagtgaagactcgccctacgaaactntgcattctttcattagcaatgcagtggctcctttttttaagtcctacattagagagtctggcaaggcagacagggatggtgantaaatggcttcctcagttgaaaagaagattgcagaactcgaaatgggactccttcacttgcagcaaaatattgaaattnccgagatcagnctgccgatcattcca

SEQ ID NO: 364608 - DNA, 1227 bp, Homo Sapiens
  misc_feature (1022)..(1075): n is a, c, g, or t
tttttttcctatgactgctctgccatgttgctttgccgacctcgcccctgggaaggggaccgggcaaggccacttccagagggttgtgggtgatttttttaagggtctgcgggtcccttgggggtcgatgatcacccttccggacccccgagaccttgcccctgacgtcttcactggtccttcttcggggggagttcgctcccgaacatgcgcagcacgtccactgcccgttccttgacgggccctgggccgagtccctggtgccctccggctcagaggtgctgccgcgtgcggtcaccgcacctctgggctcaaagcggtttgctccatcttgatgggccgggccgctccaccggggctgccgtcggggtcggccgggggcgcgggctgcgagcgcgctgccgcctcggccctgcgtccggatccccggcgggcgccgtcgtctgggacccggtgcaccggccgtttgcgaggcccgggaggggtggggcctgcggccagagctgcggcttgggtcgcgcaacagccgcaccaggaagccgatgtacttcatggctaggcggagcacctcgttcttgctcagcttccggtcgggcgggtgcgtcggcagcagcttcctcaactcggcgaaaacgccgttaacgttctgctgccgccagcgctcccggctggtgggggaacacgcgcgcgggccaccgtctggggctgatgcccatcagccaggtccagctcacagtggcttggtctccgcttcaaccggctgctagggaagatgctaaaaggtcctgctggcccaatgtagacactgttgaggaaggggtgagggtggtagtgcagggccaaagtgggcggggcagttcccagggtggagagttgcagcagcgggggccgcagagtgcccagctctgtggtgggcatggctacccctgggggcctgctgtggcccaggctgatcactggtacaccaggtggcagcctggggggcgaggagcctcctcggtggcccacctcctccacctgcnnnnnnnnnnnnnnnnnnnnnnnnnnnnnnnnnnnnnnnnnnnnnnnnnnnnnncacaccatctctgccttctcagtcatggtggggcccacctctgcctgtgcctgaggcgggcacatggaccccgacgtgggggtactcaccccagcactgttcttgcagcctggtgagtgccctcctcgtgccgaattcgccacccaggcctt

SEQ ID NO: 364609 - DNA, 357 bp, Homo Sapiens
  misc_feature (82)..(90): n is a, c, g, or t
ttccattttccgtcgcgggcatcttggaatcatgactcccacaatgccttgggcacttggtcgacagtggggccgcctctgnnnnnnnnntgtgagaggttggtactaagaagtgcctttcctgacgtctctgctgcttggaaccgcttctagagcagtctctgcttttgccttgcttgctgccagctagactgtgacgacagcacatccaccctccacctctagcccagacacccccatttctacttataatcaagagaaaagctctaagtatctggcattgccctaggctgctttagtgttaaaagaaaagtttgctgaaaaagtaagatatcttctgccaggaaatcaaggagg

SEQ ID NO: 364610 - DNA, 1577 bp, Homo Sapiens
  misc_feature (128)..(128): n is a, c, g, or t
  misc_feature (131)..(132): n is a, c, g, or t
  misc_feature (152)..(153): n is a, c, g, or t
  misc_feature (169)..(459): n is a, c, g, or t
  misc_feature (461)..(474): n is a, c, g, or t
  misc_feature (889)..(959): n is a, c, g, or t
ccttagttatgagcccgggttttccttggaaaccaggttaggaccagtttcccttaccttacggggccccgggcgccaaaaggaatggtttagaaagtttttcgaggggcgaaggcggccgacaaggnttnnttttggttgggtggggtggnnttttaagttttttggnnnnnnnnnnnnnnnnnnnnnnnnnnnnnnnnnnnnnnnnnnnnnnnnnnnnnnnnnnnnnnnnnnnnnnnnnnnnnnnnnnnnnnnnnnnnnnnnnnnnnnnnnnnnnnnnnnnnnnnnnnnnnnnnnnnnnnnnnnnnnnnnnnnnnnnnnnnnnnnnnnnnnnnnnnnnnnnnnnnnnnnnnnnnnnnnnnnnnnnnnnnnnnnnnnnnnnnnnnnnnnnnnnnnnnnnnnnnnnnnnnnnnnnnnnnnnnnnnnnnnnnnnnnnnnnnnnnnnnnnnnnnnnnnnnngnnnnnnnnnnnnnncttattggaaaagtgaaatatgcttattacagaaacctcagaaaatataaagtagaaaaataccaaaatttctttcataattctctctacccaaaggcatcggtcagtccctctccagaccagaagcagttagttctgacaccaacaagtggtgataagaggttgatagcctagcaagggggaagaagccaccaccaaaccaaacacaaaaaatgacactgcacagcagtctggggacatgtccttgaaggacacagtccccaaagatactggcaggtgaggtagtgtccctaagatcaacaggcatcatcatgaatcctatttcatgaatgccacaaagaatacattttagagaagattctaagagaaaaagctaaggtgatttttctttttcagtcgttttaggttctcagannnnnnnnnnnnnnnnnnnnnnnnnnnnnnnnnnnnnnnnnnnnnnnnnnnnnnnnnnnnnnnnnnnnnnnagggctctaaacgatcctcccaccgtcgagccacctgagatagctgagactacaggcgtttgccaccgacacccggctaattattgattttatgtaaaaatgggatctcacatatgttgccagggcttgtctcaaaactccatgggttcagacgatctacttgctgttggcctcccgataggctttgggcaggcccgtttaccccgtgagccactcacacctgcgtggtaaggagtgttgtacaatggaattgcatgggaatctagccttggctagttcgcgaattcacgcttttggggctattggcaaccagccaaattccggacgtctcaagggctcttacacacactgcaactactttcacaggcgcaatgcgctgtatccaaagatccttttaacactttgctaatttgccagatatctatgatgaggatcaaaagaaacaaagtattcacaataaggcgtgcattgtagaaaacactgagggcacttttggaaacccaaagagcctggggaaattggaccccagagggttgtaaaatcacagggaatgacacacatttactagtgcacatgagacacacatttccccaagatccccctatgtaaaaaccccat

SEQ ID NO: 364611 - DNA, 647 bp, Homo Sapiens
ggaacaggggaggcggagtagcgccacgttagccgctttccctgagagattgtgaagcacgttgcgcacggggccctttctggtctggcttagcccaaggaggaaggggaaaaggcagaaatcacaactcataggccagcgtcttgagcgacacttcctcagcgggaagaaccggcaaaaaaggccttccaagatggcgggccctgacggggccgccccccttgagcctggcgcagtggctgcgcccatgggcccgaaaagcagccgcgggagcccaggccgcgcggggaaagccgcagaaacgtcctgaagccctggccggcagcccctgaacaaacgaggcctccacaggcgtacactattgtttctaatgtcggaaaagggtgccgcggtggaaacgacacaagggcaggagggggggtttctgtggctttaaccgaaagaaacttgcgaaacgcaaacaaagcattatgtaaatggacgccattctttttaggaacacgtttctagcacgccccacaaacagcagagccgcgattcggcaggcggccgtgagtgggtttcggtctttctgcccaccggccgccgccggggagcaggagctggggtgggggatccatgcagggcgcccggacgccggggacgaa

SEQ ID NO: 364612 - DNA, 855 bp, Homo Sapiens
  misc_feature (810)..(810): n is a, c, g, or t
acgtcgcaatccgttgatctgatggggccgttgggcggccggtagctgttgctgttgggggaccccctcattcctgccgctgccgtccctgctgcctcatggcggccatcggagttcacctgggctgcacctcagcctgtgtggccgtctataaggatggccgggctggtgtggttgcaaatgatgccggtgaccgagttactccagctgttgttgcttactcagaaaatgaagagattgttggattggcagcaaaacaaagtagaataagaaatatttcaaatacagtaatgaaagtaaagcagatcctgggcagaagctccagtgatccacaagctcagaaatacatcgcggaaagtaaatgtttagtcattgaaaaaaatgggaaattacgatatgaaatagatactggagaagaaacaaaatttgttaacccagaagatgttgccagactgatatttagtaaaatgaaagaaacggcacattctgtattgggctcagatgcaaatgatgtagttattactgtcccgtttgattttggagaaaagcaaaaaaatgctcttggagaagcagctagagctgctggatttaatgttttgcgattaattcacgaaccgtctgcagctcttcttgcttatggaattggacaagactcccctactggaaaaagcaatattttggtgtttaagcttggaggaacatccttatctctcagcgtcatggaagttaacagtggaatatatcggggttctttcaacaaacactgatgataacatcggtggtgcacatttcacagaaccttagcacagnatctagcttcgtgagttcaaagatcctttcaacatggatgtgagt

SEQ ID NO: 364613 - DNA, 1074 bp, Homo Sapiens
ggggctggcgggaacgtgaagctccgcggtgcctgatggggccgttgggcggccggtagctgttgctgttgggggaccccctcattcctgccgctgccgtccctgctgcctcatggcggccatcggagttcacctgggctgcacctcagcctgtgtggccgtctataaggatggccgggctggtgtggttgcaaatgatgccggtgaccgagttactccagctgttgttgcttactcagaaaatgaagagattgttggattggcagcaaaacaaagtagaataagaaatatttcaaatacagtaatgaaagtaaagcagatcctgggcagaagccagaaatgcggtccttggacctggcttctcagcaattatccctgagagggaagatcctggagatatcctgagagcacacagagcttccccacaccttcagacttgcaccttgctgtccagaagctgcctagccctcctttccaacccacaatggccagtgccaatagcagtgcgggcatccggtggtccagacaggagacacgaactcttctctccatactaggcgaggcagagtatattcagcgcctccagactgtgcatcacaatgcagatgtctatcaggctgtgtctaagcgaatgcaccagggagggcttccgccgcaccgaacgtcagtgccgctccaagtttaaagttctgaaggcattatatttaaaggcctatgtttgcccatgccacaagtatggggtgagccaccacactgtccattttatgatacgttggatcagcttctccgaaatcagatagtgactgacccagacaacttaatggaggaatgctgcttgggcaaagcactgtgaatcagaacttagtggcctctgacgccccaggggaagaggggaaacggcatttctaaatcaaaaaggactcaggcagctggatcatcagccctatctttggaaaacaggttaagggcatccgaatgagggattggtcagcttaagaattccatgggaccgggataaccaagaaaaccacggggaccttgtgagggactccctggggaatgaaattcccttcc

SEQ ID NO: 364614 - DNA, 476 bp, Homo Sapiens
  misc_feature (112)..(112): n is a, c, g, or t
  misc_feature (252)..(252): n is a, c, g, or t
ctcaaactccaatctccctcttcgaaaacctggttttgtttctggtggggaataggccccttgacccagtgaagcccccctcccaaggtgggcaaggcgaaagaaggcggtncagtggccaggactatcgcagccgagttggcaaaaaacaggcgattggcacgagaactctcaaagcgggaggaagaaaaactggacaggctgattgctattggtgaggaggccagtgctcagcaagatactgccaatgantccgcagggatgctgtcatcgcagtcagacgtttggcaacagcagtggaagaggcaactggtgcttttcagctaggccttgaaaaattgcttcagaggttgatttcgaataccaaaagctaggaaccaattacaaaaggctctgcttcctaaactggtagaagtctagttcccaaacctgccttctgaatccctggctccttttctgtgtcctcagaaaaaaaa

SEQ ID NO: 364615 - DNA, 1250 bp, Homo Sapiens
tctttcctcttcactgtgcattataccatctaaaaataaaagctgtcaaatctatgaaatttataaattctcatcacatctctataaaatactgccactcattagtgtgactctctcctgtacagaaacaccaagggacccacgacaggcctgccccgcatcgcagggcatgctgcgagccatggacagccgagaaatacaaaagtaaatgcacttgttcaacgtgcccgcgccgtcctcacagcaccatcgcgcagcacatggccagctgcgtcaccgcgcaggccccttcacatgcaagggcgcaacccacgccccggagggtgaacagtctgggggttcaacagtgccggggtaaaggtgaagagctccagggccaagccccagggcgctcaggaaggggctcaggccgcggggaggccctccgaggaatgtggtggcgacgggcctgcctttggtacgggagcagcgcgtcgggggaagccggccgggcggcgtttccgagaacggggttcggcgttgtcagcgtctagtcagcaccaagcgggtggaggcaggcgcgggcctggggacgagatagcaccggggcaggctgtggcgaaatccgactgcgggcccgccctgcagacacgtgtctttatatagagctctcatatatagatatttatatttctcaataagttgccttttaccacttagatggaataaaataagtcagaattgtttatactttttaaaaaatgataaatactttatctaaaactatcgacagtacaaactggaccagtcccagcctcctgcggcgcgtgccgccgattcacagtggagctcccgtccgtccttgcctctgccgtccaggggtgggagcccggcaggccggcgggcaccatgccgcgggcgcgagttggtccacaccgtccttgcataggtctcgcggttgaggtagaaatcctagttaccttacacaatacgcactgctagctaagcaaggtctttatcgcggcttaacccccgaaaggtgcgcggcatagggaggcggcatgccgagggacacccacaccgtggacggccccgtggcgctggcctgtgggatcccgggcgcggcctgtgccagggccagccggggcaggggctggtggtgcaccgtgaaggatgggcgggcgcccttgtgcgggagggaggtgagcttgatagacaaagaggcgttagcaggcggcagagaggcagcagaggtggggggcaagaaagct

SEQ ID NO: 364616 - DNA, 497 bp, Homo Sapiens
  misc_feature (415)..(415): n is a, c, g, or t
  misc_feature (427)..(427): n is a, c, g, or t
agactaactttactgtgaaatcctaccacattccatgtctgaatttttggattcggggtggattttcgttgtccgtggaagaacacatggatctctctggctttctcacccaagttggccacttacgctaatcctggaagtatgatcacttttgaacctgccccttaaccttgacgaggatacaaaagtgaaagcatcatcccccaaaggatcactgcacagtcctactacagtatttttaagtagccctctaaatacttaattttaagcaaaatcccttggccgcacttttaaggtttttttatatgtgtatagttaccaacctaaaaataaaaaatccgaacagcatacttgaagaatgtaatactcaaactctcagtgcttccttatggtttctaataggattttttattantgttattattantattgggtttttttggacagggttgggagggtcttttatttttcctttgaaataaagaagtgatgttttt

SEQ ID NO: 364617 - DNA, 529 bp, Homo Sapiens
cagcatttacagacgctcttgaagccgagcgcccacacagtgtgaatttgaatgaagctgcgttggcacaaacccctgttaagagtaaactaacgaaaggcttaaacaattgttgtcttaaatatatctttttagctaataatcaccttcttgccactgttttggataaatcacgctgttggctttcttcataaaagaatttggcttgtcaattctgacttctttttaaaaggatggagaagtgacaaagtcggagggtgggggttggggggagaacaaagttggtttatgtgaaagaaagcttggaccggaaaggtgtgtgggtggtagaggtggggaggcgaatgcagagggcctttggaggggaaaagaatgggggtggtggggggcgggcaggattatgaactcctttcctggcaggttattttatttgagtcttagatattattaattgactttcatgaatatttgtacagctcatttgtatcttaagcacattttgaaaataaacaacaacataattccatga

SEQ ID NO: 364618 - DNA, 284 bp, Homo Sapiens
gcggccgccaaccccgcgaccaccctgagagccagcactgcagccatgccgcccgcccgccggggcgcggccctcgctgatcccgcgcaggaccgcgcggcgctcccgggagccgctttgcctgcacttccggactctattgtcgcagggccagagctggatgcggggccggcgccggatgcggggctggagccagacactgggcctagggtgctgcgcccgtcagccgccgcccagcacctgcccctctctggccgcgcaagtgactgggctcgttttgcata

SEQ ID NO: 364619 - DNA, 498 bp, Homo Sapiens
actcactccaaaagtcctgctggagctatgataattatctgcaaggccaggcaggggctccgaaggagtgggctccaggagcagggatgagaaaaacaagttctccttatcagtttccctgtttgaaattctctccccataacattattctttgttctgctctcacaactatttttgtaactatttctgcaagtctgtaaagattttgtaagttcttgtttttctttctgtagcatggcaaggtcacaagacatgtttaagtaaggtaggctcatgttgcaaatcctgttgtaaaacctgtcacggtatgattaactgcctttgttttgcttctgtaagactgctttctcacctcgcaggttttgcgccaaaaacccgacttgcccctgcctgatgcatgtataaaagtcaagccctgtctttgttccgggctcagcctttggatgttaatccgctgggccagtggccacctaaataaaaccttcctgttgcacccag

SEQ ID NO: 364620 - DNA, 425 bp, Homo Sapiens
  misc_feature (26)..(26): n is a, c, g, or t
  misc_feature (57)..(57): n is a, c, g, or t
ggagcggggatgaagaaaaaacaagntccccctaaacagttccccctgtttgaaaantctctcccccataacattatcccttgttctgctctcacaactaattttgtaactatttcctgcaagtctgtaaagattttgtaagttcttgtttttctttctgtagcatggcaaggtcacaagacatgtttaagtaaggtaggctcatgttgcaaatcctgttgtaaaacctgtcacggtatgattaactgcctttgttctgcttctgtaagactgctttctcacctcgcaggttttgcgccaaaaacccgacttgcccctgcctgatgcatgtataaaagtcaagccctgtctttgttccgggctcagcctttggatgttaatccgctggccagtggccacctaaataaaaccttcctgttgcaccc

SEQ ID NO: 364621 - DNA, 537 bp, Homo Sapiens
  misc_feature (65)..(203): n is a, c, g, or t
tgtgttcattcttctttaaatatttggtagaatttaccagtcatctagtcctgggatttccttcnnnnnnnnnnnnnnnnnnnnnnnnnnnnnnnnnnnnnnnnnnnnnnnnnnnnnnnnnnnnnnnnnnnnnnnnnnnnnnnnnnnnnnnnnnnnnnnnnnnnnnnnnnnnnnnnnnnnnnnnnnnnnnnnnnnnnnnnnnncaacacttcttagtaagaagtgggtatacaaactcatctctgctgtataagataaatactaaaataaagcttgacaacagtgtaacagaagcctgaagaaaggaaggcttagttgtgtttgaagttggggagatgaaatagattcacaggagaggtgattgaaactcattgggtgccatagaatgagtaaaagttggttaggtgaagatgtaggaatggataagcatgtagggcattccatgtagggaaatgatgtgagtaaaggcagagaggaataaaaatttctagcatgttctgaggccatgaggtgggaagaacataaaagagtttctag

SEQ ID NO: 364622 - DNA, 1087 bp, Homo Sapiens
  misc_feature (129)..(189): n is a, c, g, or t
cgcggggagtcgaggctttgcgcctgtgcttcggaccgtagcgccaggcctgagcctttgaagcaggaggaggggaggagagagtggggctcctctatcgggaccccctccccatgtggatctgcccannnnnnnnnnnnnnnnnnnnnnnnnnnnnnnnnnnnnnnnnnnnnnnnnnnnnnnnnnnnnaccgagaagatacccgccctgcgccccgctctgctgtgggcgctgctggcgctctggctgtgctgcgcgaaccccgcgcatgcattgcagtgtcgagatggctatgaaccctgtgtaaatgaaggaatgtgtgttacctaccacaatggcacaggatactgcaaatgtccagaaggcttcttgggggaatattgtcaacatcgagacccctgtgagaagaaccgctgccagaatggtgggacttgtgtggcccaggccatgctggggaaagccacgtgccgatgtgcctcagggtttacaggagaggactgccagtactcgacatctcatccatgctttgtgtctcgaccttgcctgaatggcggcacatgccatatgctcagccgggatacctatgagtgcacctgtcaggtcgggtttacaggtaaggagtgccaatggaccgatgcctgcctgtctcatccctgtgcaaatggaagtacctgtaccactgtggccaaccagttctcctgcaaatgcctcacaggcttcacagggcagaagtgtgagactgatgtcaatgagtgtgacattccaggacactgccagcatggtggcatctgcctcaacctgcctggttcctaccagtgccagtgccttcagggcttcacaggccagtactgtgacagcctgtatgtgccctgtgcaccctcgccttgtgtcaatggaggcacctgtcggcagactggtgacttcacttttgagtgcaactgccttccagaaacagtgagaagaggaacagagctctgggaaagagacagggaagtctggaatggaaaagaacacgatgagaattagacactggaaaatatgtatgtgtggttaataaagtgctttaaactgaattgacattaacagt

SEQ ID NO: 364623 - DNA, 482 bp, Homo Sapiens
cacagcagagtccactgtaaggaccgtcccttcaagtgtgacttctgcagcttcgacacgaagcggcccagcagcctggccaagcacgtcgacaaggtgcacagggacgaggccaagacggagaaccgggcccctctgggcaaggaagggctcagagagggcagctcccagcacgtggccaagatcgtgacgcagagggccttccgctgtgagacctgcggcgcctccttcgtcagggatgactctctgagatgccacaagaagcagcacagtgatcagagtgagaacaagaactcagacttggtcaccttcccaccggaaagcggtgcctcgggacagctcagcaccctggtctccgtggggcagctcgaggctcccctagagcccagccaagacctctagctcagccgaagagggtggtcagctgtcggaacttctgaccagtgctgttgcccagccctccagaggtgaggccactgaga

SEQ ID NO: 364624 - DNA, 373 bp, Homo Sapiens
gccaggatgcccaggaaccgagtttgaaagacattgtgctgctgatcccacctcctgactttacagctgctgaattgcagaagacaaattggtagctaacaggaggctccatcctggatcctgcccctgtccgtgagattcagccttgattaactgtgttcccatgctggtcgtgagcagggcaccatcctaggtccttctttatactcattttccttctccagccaaaatgggttgaaccgaggaacaaggacataatctgtaaagagcaagtgcaagtctctgctctgccattaccagcatcaggctaatcaagcccttggaaactcaatttcttctcctgtaaaatgtgaataactgttacagacctgga

SEQ ID NO: 364625 - DNA, 555 bp, Homo Sapiens
attgggaaggagctggagtctgattttgactcctccaggacagatgacaaccatcctcggggttatcaaaagttgtcactgcagagtgaaagcccaagccacaggtgggagaaggtattgcagcgtgtctaactggtaaagtgctcctatctggaatacacaaacaactccagcaaataaatcagtaaatcacaaaaggacagtcagttcaatagaatagtgagaggaagagattgacagggcatttcacaacagatgacaatgaacaggaaaagtgctcagcctcacctgtcatcagggacatgcctggaaacagcaaggagatcccactatacattctaggagaacagctaaaacctaaaaaaacaactgatcatatcagtgttaatgaatatgtggaactgttggaaccctcatcctctgctggtgggagtataaagaggcccacatactttggaaaacagtgtggcattatctattaaaggcaaatgtatgcatatcttactacaaagcaattccactcctaggtctatgtgtgcgtatgtgtaagaaaaa

SEQ ID NO: 364626 - DNA, 362 bp, Homo Sapiens
agtcgactttagctcggacccactttcagagtaggaacactaaaaatatcaactatgaggtttataaacaagtggtgggaaagagaactttttacatttgctattgttatgacaggcacaatatgaaatacaattttagattagcagtgtataaaaatactttttaaacaatagttttgataggtacagtagcatttaaacaaacagctgtgtggttattccttttgaggacctactaaaacaattcgacttactgcccccagctacacctgaaagtgcgaacctggaaagcaagtctcttacccaggtacacatcacacacacccacatactgaaaccacctccatctatgatgcatactg

SEQ ID NO: 364627 - DNA, 1476 bp, Homo Sapiens
agcgggaagtcgcagcccgctcaggcccgcgccttcccgctccacgtcttcctctctcacacacctactccgccctccgccccagcccgcgcgctagctccttctctcgcccggggttcctgccggtagctctccgggtcttggcgcggcgggggcgccccgggggtgccctcgccctcccgttgcgggcgggcgggcggtatgtggcgcctggtgcccccgaagctgggccgcctgtcccgctcgctgaagctggcggcgctgggcagcctgttggtgctgatggtgctgcactcgccgtcgctgctcgcctcttggcagcgcaacgaactgaccgaccggcgcttcctgcagctcaataagtgcccggcgtgcttcggcacgagctggtgccgccgcttcctcaacgggcaggtggtattcgaggcgtggggccgcttgcgcctgctggacttcctcaacgtgaagaacgtgtacttcgcgcagtacggcgagccccgcgagggcggccgccgaccgagtggtgctcaagcgcctcggctcgcagcgcgagctggcgcagctcgaccagagcatctgcaagcgggccaccggccggccccgatgcgacctgctgcaggccatgccccggaccgagttcgagcgcctcaaaggcgacgtgcgtctgctcacgcccgaagcggtgaagggctgaacggacctggtgcaatgcccctcgcagcgccttctcgaccgcctggtgcgccgctacgcggagaccaaggactcgggcagcttcctgcttcgcaacctcaaggactcggagcgcatgcagctgctgctgaccctggccttcaaccccgagccgctggtgctacagagttttccgtctgatgaaggttggccatttgcaaagtatcttggagcttgtggaagaatggtggctgtaaattatgttggagaagaactgtggagttacttttaatgcgccatgggaaaaaacgagttgacctcgcttggccattaatggaaatagccgaacagttacaaacccatgaccttggaattttgcactcttactcccgggacgtttagcttttgacacatcctggcgctggttcccagagcatgggacaggcgcactcatcctgtggaatgctgcaaacagttgttggtggctgtccaccgcatttttttacacaacatataccgtcgcgaacaggggggtctcgtgtgtataacacccgctttgttgaacagtcggtaacagcggcggcgcgccttacattttcttcagccacacacactctgtggggcgcacaccagttgtggtgccccacatcattcagcgtgtgttggaacaccttttctcgaaagagccaccgacgggctagcccaggcgggagatcaccttgttgagcacagcaatgtcttactagtacagctgcccccgaataggatacgatcacccacgaatcaagtgtcacgctgagctag

SEQ ID NO: 364628 - DNA, 621 bp, Homo Sapiens
cttcagcagtgcgggggtccttaaatgttgattcaagtcgaataaacttttctacgtctttcaacctcttaggagtcccatctatggatggggaatgggatctcttaggtgtaacagtcttagttatatttgacattccattcagatgcggttgtccctgggcagggttgtgaggtgttgtgattctaggaatgacatttcgtcctactacggtaggaatggtacacacagtggggggtgatacagtttttactgtagagtcaacttttgcgccaatcactggaatggaaagtccttgggctggtggtacactcagtggcttctccacaattacagcagcaggctcagcactattcctttctgtttctcctacagaagggctatcagacttggacgctggagaattaaaaggtgttccattatcagtgtctctggagctatccagacaactgctatccagagacaatcttttggattgaagtccgcccgagcttcgattgacatcagagagactttgctttttcttcttttgaagaatttctgcaggaaggtagtggtgaagttgttttttctttacatgagttgcttcaattttcattccctcctttagcatatttatat

SEQ ID NO: 364629 - DNA, 2068 bp, Homo Sapiens
agttgcaaagtatgacacatatcttgaatggctttatttttattgtgtaaaactgttgaacacatgactgtgatgcacaaattctttacgtgtaaggagtctatgcattttacagtaacttattttatgatcgggtgatgagacagttatactttcaactgccattatttttattaagtgctttcattttctttacagttattataaaattgtatttattttatacagatgggttttcattttcctgatgctgtaatgtttacttcagcttgttgacctttctttgtgttatctgcatgttgtaacgtgtgataagaatgaatgtaaaggctgtggcaactgtaattaatttttgtaaagggctgatcacacgtggatctggtttatgaatgcatttgggatgattttggtaaccagatcaccttttcagaaatttagatgtgaacaccaaaagaagcattttctcaacaaaaattaatagctggttctattttttttaaacctagaaaaaataaagttgatttttttcaattaaagtgcttttaattcttagcagtggggatggggcatgtgtgttttaccagagctatttgggcattaatatctgcaggcaagtacttaaagcacactgtggcagttggatgctgaaggcaaactgaaaaaccaaatgaaaaaacatcagacttccttctttggtttaaaaatatttccccctttctccccattctcccaatccagtggtgtgctggtaaatgtttagcagttcactcttctgggagaaaattatgtattcaactatacatgtttgttataaattttgctgatagcaagaacatataacacaattaacaaataataagatacaaatactttattgtaaatcccatatagccagttgattctcacagtatacttagttgctcaggaaagaactaaaatgcttttttaaaaggatacttaattgctttttgctcaactcctacagtcaacctatgattgattgtctttcaactgtgatttgaaaaatggcagactgtccaaatctaactcatttcccaataaatttattatcattcaatctgatacgtgatctactgttaaaactgtttcttaccatggtacatattagaactcattaagccgaaaccacttttagctttaacattaattgtaaatctatatgattcaagttttcataaccaatgcttaacaactgcaggcaaaattctaaaatgtgaccactgggtcttgggaatcagtaggggctgtatccagcacaccactgccccatcctttttttcttaactattagtgttgaataaacttctcatagttaatctacttgctgaactcaggaaattcctatcactgaccctggccagggctttaaagggtaggaaaagcattaatgtcagtcctacacagcgaacttttgatttagaagaatgtgacagaaagaaaacatttactgaaatacatgggaagcttgcatatttctaaagttgtctttatacttttcaattctcaaagctaagtaaactgtggtataggcatctctaagatgttagcatttaaaacatcaattgttttattgatgtttaaacaattgtttaaatcccactgaaaaatttaaatattaaaatatcttgcacagtctaccaaatgagttaaatcgttacagtcgtgtctacctcttatttttcctatctgtatttaggctgctgttttggtgagattcctaatttctttttccccctggaactactttctgtggaagacaaggaacagactggggacagaggcctgaaaacaaattggaagcactcagagatctattgctgaccagccctattcctcatgagttggcggggggaaagccattgtttttaatttccacttaatatgaaaatgcttgtttttaaaatgttttttcctgctgaacaaatgtatttttaaaaggaaaaaaaattctcttttggctctaagaagtcagctgtatgagcaggcgtgaccatatcataacatgctgatatgatagaaatcaataaatttttacctctcaggaaaa

SEQ ID NO: 364630 - DNA, 323 bp, Homo Sapiens
cggctggggtttgcatccctggttctgcccctccttagctggctgaacatggcacaagccaattaccctctctgagccttactctccttcagtggcaaatggatcggtcaacaggccccattgccctggggttgttactgctgagattaagggaagctcgtccatagaagcacttagcccttgtgcctggcacatagtgtatggtggataaatgggacttaggactaaaactcatgccttggtgtgtttttgcagtgatgttttgttctggggtgcatcacaagagacaaggttcttggctgggcatgatggctcaagccaat

SEQ ID NO: 364631 - DNA, 454 bp, Homo Sapiens
actttatgttcaattctttgccttcagtcgttgcttgaactcttgcttgaatcaagctctcatacccaacattccactgatcctttctttttcatttaccagtgatggatccatgtgaaattcaatgtttaatttcctgtcatctttccattcctatcagtagcatgtggcacagttgctcactttctcatctattttcttggcttttaggacatcccgttaagcttaacacatatatttgttgtaattttcttgttgcctccctaatcacattatgctttcctcctcttgtgtctccagaactttctgttctctgaacgtgggcttagtcctccagccacttttttctctgtccgcactcattgcctttccttatcaactcagctcatggctttcaaccccacctgcacagcttcatgtcaccttgggaggccaaggtgggcagatcatgagg

SEQ ID NO: 364632 - DNA, 255 bp, Homo Sapiens
caggtgttgctcagctatggtgtgcctaaacaagagaacaaagaaggtagcacctttcctcccgttgagcaacatcccatccagacaggtgccccaaagcccaggtgaccgtagcacagctaatgaagaactcagcccccaaagtgtggtcacgctcctctaagcatgctgcctccctctgatccctgagcctctggcagtagtaactggtccctccctatgctagccagaaataaacacctgagttgccttaga

SEQ ID NO: 364633 - DNA, 397 bp, Homo Sapiens
  misc_feature (194)..(209): n is a, c, g, or t
  misc_feature (221)..(266): n is a, c, g, or t
  misc_feature (270)..(270): n is a, c, g, or t
  misc_feature (272)..(272): n is a, c, g, or t
  misc_feature (371)..(371): n is a, c, g, or t
atgagccactgtgcctggccatttgagcattttttgaaaaaacaatttttgtaaacttgtattttgtcattttccttgaacattccaactttccaagttccctcccactgaaggctgctggtttggcttgttagcccctctgtatgaattgttcttttgtcacagcattaagtctgtgagggaaactagacaannnnnnnnnnnnnnnnaaacaaagtctnnnnnnnnnnnnnnnnnnnnnnnnnnnnnnnnnnnnnnnnnnnnnnaaananaaaaaaacaaccagaggggcgtccccctttttatttcccttgcagagataatgaaacttggccagtaacctttggtaaaaccattataactcacaattnccccttttcctattataaagtttagg

SEQ ID NO: 364634 - DNA, 292 bp, Homo Sapiens
ccctcagggcactggccggtatctgcacccagctttggggctgttggccatgctcctgtctaaccgcccctccccaaatccatccctgttttttaaggtgggaaaaaagggaaatgcaggccaggcaccctcctaggctgggcggcagggttcctgccatggtacagctctgtgcacagccgcccttccacccccggtcagtttgagcccgaggcaccttttgggctgggccaaccacttccacaccaagccagtgtttagtttatacttgaattttggtttttaccttttt

SEQ ID NO: 364635 - DNA, 529 bp, Homo Sapiens
agaggtagggtctcactctgttacccaggccaaagtacagtgatgtgatcatagctcactgcagccttgaactcctagtctcttgagtagctgggacgacagatgtgtgcccccatgcctggctaagacataaggatatattttaagaagtcttaaaataggggaaaagcaaaatataaagtcattccacagaagaggcaaaagatgtattacacaacttctaaaggttaattttacttcaaagaagagagtactgtagttgaaatacttgactgaaaacagaaaggggcctgggaagtcctcctgtccagtattatccaagtatctagaggattagcaaggaaagggaggagataagaattttcaggactccactgttttccccattttattcaaataagaatcattcttatcaattgtatacaaagggcttcctgtaagattttctttgactaacaggcctcacaaataaatgatatttatttaattttttattttactgataagaaaactgaggacccaatgtgac

SEQ ID NO: 364636 - DNA, 1576 bp, Homo Sapiens
  misc_feature (751)..(768): n is a, c, g, or t
  misc_feature (1236)..(1246): n is a, c, g, or t
  misc_feature (1315)..(1315): n is a, c, g, or t
  misc_feature (1513)..(1513): n is a, c, g, or t
cagggtacatgaacccctaccaggcttctaggcttcccctgcatggcagccagcctctaagttggcccccaaccatccctgccttcttctattcacacccttgtgtggttccttcccacattgaataggcctgacttgtgtaaccactacactattgaagaaatgagagtttgacttctgagggtaagtcataaaatacatcgtggcttctgtcttgttttctttgatcgcttactttgggggaagccagcttccaggtcatgaaaatactcaagcagccttatggagtgctccacatgacaagggatggaggcctcccaccaatagccatgggagtgtgcaatcttgaaagctggtccttcaattccagccaagcattcacatgaccgcaatcctagctgatctcgcttgtgacctctatgggagaccctaagccagaaccactcagagaagctgctctggaacgtcagacacacatgaactgtgagatagtaaacgtttattgtttaaagctacttggtttggggataatttgcgtttcagcagtagacaatatatttattttgtccaggggagtggaaaggcgattacagagtttgttgagccccatagagtcctagtctttgcttaaagaaatataccagttctttctaatacagaatccattaagttcgttggttgcaaacaatagaaaccaactctgcctcacttatgtttattggaggccataagagagccacagcatctaccnnnnnnnnnnnnnnnnnncaggttttggaaaagacaggaactagctacaggagctaatggccaatcttgtctgagttctttgatggcgacacatgaactacagccgttttgttgttgttaatttctccgtgttttcccctcagttttggatgactctgctcaaggttcagattctgaggagcaagtatctgttgggctatctgaggtcctgctaccattccttggccagtaataggtagtttcacagggattatatgcaatggaggaaaaggtgttctcaaggaaaactagggagctttctccagaagatgatgtaatggcagaaacaacaggtggttgaccacagaaggggacaataataatacttgtaatttattgtgcgcttatatgagcctcaccctctcccaggtgtcagataatgctcgtaaatgccttagtccatcatctcagtaaattttttttataacactatgagagaagcagtannnnnnnnnnnctgttacagatatggaaaccgaggttctgaaaagttaactaaaacttccgaggttatagtacgaggcanaaccaagatttaaactcagatctgtgccgatccagagtccaagcttaactctgatctactgagtgttgtcagagcatctgtttctaagacattaagaatggttaaaaggagcttcttggctcatggtcaagtgagtgttttttacaaagtgagtggtcaaaatactaaagtcgattctgggtatatctaccacatggnatggaacctctaaggacttcatgcctaaaatgaaaatggtcagttcacaaaaaagggacaaaa

SEQ ID NO: 364637 - DNA, 436 bp, Homo Sapiens
  misc_feature (56)..(81): n is a, c, g, or t
gggatcacattcactgcatttccagcctgggcgaccggagcaggacgccttccccnnnnnnnnnnnnnnnnnnnnnnnnnntgtgctatacaatttagtttcctaatatcaattttaaaaagttttcgtgtaaataattaggaaaactaagcagccccagagataagacctcctggcatcattgtcccttcttatggagtgataatgtaaccttccttgaagtgtatcactccatcaccagtcaaactgccgcagcctatgcactggacttgaatggaaaatgtggtggttctgggaaagcttctctgtatttccttgtgtgtgtgaaatgttaatgtctctacttgggaacgctgaccccattcatttggagttgaggtttccaggtggctattctcatgctttgtgtccaaataaactctataattaataatgt

SEQ ID NO: 364638 - DNA, 518 bp, Homo Sapiens
tgctccactgccttcctctagtgcagcctggaagacatggcagcgggtagctcctggggctgagccagaagcatcactgcagtgaaagtctctgcttacctgtctggctcagcttgggcaagggctgggccatatgtgctcagggacgtgcttctcttgtaaggcaggaggatagaagaggaccaagaagggagggggctgccctgtggtgcacacaggcctgccatggggcgtgggagcccatcccgctgcctgactggagctggccgctgtggtggactcaggaaccacttttaatactgcaactgctcccttttgcccagtcagggaaagctgactgtaagtcccacctcccactccgtccacccttctagtggtttctctgagaggtttctctgcttcggctgtgcttgaagtggcatgcctcctctgctgcagggctcccccacccccacacggcctctaaagatgtttatttccttatagactgattaaagtcacccattctttttcctcaa

SEQ ID NO: 364639 - DNA, 353 bp, Homo Sapiens
aaggcagacagatacgaaaatacaacgaagcgtgcatgaccgaaaccagaagagattaaagtaaaacctcatttctcctgaggaaatcgtgtgagaagggacttagggactgccggaacacagcgaagcagaggcagaaggcagacaaaaggggctgggttggtccccgcctgtgtgaacgaaaaaatatgtcagattggaaaattgcggtaaaaaccaggcagagcacgtacgttgcccccacaggaagtgtccgccatgctgcctgtgcccggaagtaggtaggaacacacagtcagagggacccaaaagcaggggggaaggaaaaagagatgcacacttcccccagagaa

SEQ ID NO: 364640 - DNA, 637 bp, Homo Sapiens
  misc_feature (117)..(117): n is a, c, g, or t
  misc_feature (206)..(206): n is a, c, g, or t
ggccagccagctgtccggccggccggcagccggccgggcgcggttctcaccggactgacacaagctcgaggtcctgtgaccgggccgcccgtggcccgcccacggcaccgacggccngggccggggcccgcacactcttggggttttttacctcctgatccacgcgaaggcgcccgggctgggcagggggccgtgcctctccgccntgcgcccctcacctggatcccctgcccacctggtccgacgctttgtccccacctctcccccatgggcaccatctctgccattctttcccccacgggccaggccgggccgggtccctcatctgggctctgcgtcccccccttccccaccccgcggggctgggcttcgtggggatcaagcttcgtggctttttatgaagaatcccgaaccctgcctaggagcccgccccaccctcccaggggctccatcctcagccctctgcccactgggcccagggaccacagtggctggaccaacccaggaccagggcgcctgggcctctcccctttcccagcggctggggaggggagatgggggcttcccctcaccacacctgtggctgttcccacatccccttgaatatcccaggaaaaataaaacggcagaactgcaa

SEQ ID NO: 364641 - DNA, 490 bp, Homo Sapiens
  misc_feature (20)..(20): n is a, c, g, or t
  misc_feature (26)..(26): n is a, c, g, or t
ccacccgagggggcttgacntgtccngagaggtccccgcacacccgctctggccgcacgccgtactgcgggcgtggaggcgcaagcccggcggcccggcctccacctgtcccccaagtgcaccctggtccgcgcccagagctctctggagggtggggtatgcgggagaggggtggaggccaaacgcaagggccctcctggagtccccagccctacttcggagccaggggagggggcaccaagtgagagaaattgggcacccccgcctccgctcctgctttcgcacccggcacgcccatctcgtccccgcgcgtctgcaccggccaggcgtcccgcttgcccacccgccgccgcgccccgcgccccctaccccagggcctctgcattcggccccacccctgagggccggccgggaacgcccctggaccggaataatttccagggggcaagagctttcgaaccaagtaaaatagaacttgaatgtaaaaaaa

SEQ ID NO: 364642 - DNA, 430 bp, Homo Sapiens
taaaaagtctcaggtgaccaaaggctcctgaagctagaaccaggtttggataaagattgaagagccacaggccactcttccctctgagccattgggcctagtggtgtcatgtattgtaattgctcgcagggagagcagtctttttggtgtaatagtgggatgtctgcttagttggcaggggttcagtccaaatggaagaatattgggaaataaacctccactatcctttatagccagggacttttttcctatttattcataaaataaattatagttaattatacccataacacctttatttaaatccagtgttctccgcagccttttgtctatttatatgtgtaccaagtgttaaacataattattattgggcatttgaactttgtttttctttaaagaaatgctgctattaaacatatttgtaaatgga

SEQ ID NO: 364643 - DNA, 263 bp, Homo Sapiens
aacggactgcttttagttaaattgaagaaagtcagctcttgtcaaaaggtctaaactttcccgcctcaatcctaaaagcatgtcaacaatccacatcagatgccataaatatgaactgcaggataaaatggtacaatcttagtgaatgggaattggaatcaaaagagtttgctgtccttcttagaatgttctaaaatgtcaaggcagttgcttgtgtttaactgtgaacaaataaaaatttattgttttgacactaaaaaaaa

SEQ ID NO: 364644 - DNA, 374 bp, Homo Sapiens
  misc_feature (33)..(33): n is a, c, g, or t
  misc_feature (39)..(40): n is a, c, g, or t
  misc_feature (297)..(305): n is a, c, g, or t
cttatagccaatggaaaatggaaagcaaaaacnccttannaatgtcctccagcttcttgggaaaatgtgtaattcccaaggaaaacatgttttgttttgtttcagagatctcaaagacatagacccgccctacctgcttacatggaaggacaggtgggtggctgccacagaggtgtgtatgtgacaagtagggagcttcagggaggaggaggccttgactctgcagtgagacagtgagggttcacagccaaactgggggcagtggagtaaacaaaaatccttacaaagcatcacagnnnnnnnnntagaacaaataaaacatcactggttcagaacaactaaggctttagtataattttaaaaaattaaaagta

SEQ ID NO: 364645 - DNA, 404 bp, Homo Sapiens
  misc_feature (161)..(217): n is a, c, g, or t
aaacatgtaaaaacacaaaagcctgaactttctgagaaggcggaatagaggtgctactggacacagatcgcaggggaaataactcaggaggcaggacactgggctggcccagctcccgatggaccccatcagaagagcagtgcttacccggagggtgcatnnnnnnnnnnnnnnnnnnnnnnnnnnnnnnnnnnnnnnnnnnnnnnnnnnnnnnnnnatgggatgctctcacctcaaggcttctggtgctgtactcagagccaagtaactttcagttcttccagataaatgcatagccacactttttctgtcattgcaattgcatttttaaattgtatcatctgtttcaatactaaatctggtaatttaaaagatccttcaaaatcaaatgatgaccagtttat

SEQ ID NO: 364646 - DNA, 442 bp, Homo Sapiens
gcggccgcctcccgccccctccccgccccgcaggaagcgactgccccgaagcagccgcctcggctcccagcccggcttcgggcgccgctgccctcgggccggaaactaaatgccaagtgtcctcggctgcggtggggcttctttgtgcaggatggtgacgggacagaactcgcctgtctctctgagggggacggggggtgctgtcaggaggcgccactggaccaccgggtgaagtagaacgccccggatgcggccggcgggcgaaagaaacctccaggtgctggggccggcttctcggagtccctcctgggtctctggctcagagcctctccccctccccgtctgcaagcaaagacctggggcgcgcacccagaaatgttcttcctctttgggtcgggtcctcttaaaatctccgttctctggtcaccagcaggtcggttgc

SEQ ID NO: 364647 - DNA, 310 bp, Homo Sapiens
cggagaaatattgtaaatatatatttttttgttgctgatttagagtcaatctccaatgttgtgctaaaaagtttaaattaaatgtaagcattaaggggataagtcttatgctatctcagttgacacattgaggttattttgggccagagaaggaggaagctagttggactttgttttgttttccaaaagttctccactattggttttagagagagcaaggacatctttcctctgacacgtgggaatgggtgatatttgtgtaataaaatttttaaaagacaaaaaaagaaatagcctccaatgggaaata

SEQ ID NO: 364648 - DNA, 1428 bp, Homo Sapiens
  misc_feature (279)..(279): n is a, c, g, or t
  misc_feature (1112)..(1120): n is a, c, g, or t
  misc_feature (1330)..(1352): n is a, c, g, or t
cgggatcgcccccgccgccgctcccgctgctgctcctgctcctggccgggctgctgggcggcgcgggcgcgcagtactccagcgaccggtgcagctggaaggggagcgggctgacgaacgaggcacacaggaaggaggtggagcaggtgtatctgcgctgtgcggcgggtgccgtggaatggatgtacccaacaggtgctctcatcattaacctgcggcccaacaccatctcgactgcccggcaactgaccgtgtgcatcaggtccttcacggactccntcgggggccaatatttatttggaaaaaactggagaactgagactgctggtaccggacggggacggcaggcccggccgggtgcagtgttttggcctggagcagggcggcctgttcgtggaggccacgccgcagcaggatatcggccggaggaccacaggcttccagtacgagctggttaggaggcacagggcgtcggacctgcacgagctgtctgcgccgtgccgtccctgcagtgacaccgaggtgctcctagccgtctgcaccagcgacttcgccgttcgaggctccatccagcaagttacccacgagcctgagcggcaggactcagccatccacctgcgcgtgagcagactctatcggcagaaaagcagggtcttcgagccggtgcccgagggtgacggccactggcaggggcgcgtcaggacgctgctggagtgtggcgtgcggccggggcatggcgacttcctcttcactggccacatgcacttcggggaggcgcggctcggctgtgccccacgcttcaaggacttccagaggatgtacagggatgcccaggagagggggctgaacccttgtgaggttggcacggactgactccgtgggccgctgcccttcctctcctgatgagtcacaggctgcggtgggcgctgcaggtcctggtggggccgtgcggtgagggccgcgcgctgggaaggccgcatgccctgggcccaggcctgaccctggtacccgaagctgtggacgttctcgaccacactcaaccccatgagcttccagccaaggatgccctggccgatgggaaatgctgtaaaatgcaaactaagttattatannnnnnnnnggtaaaaaagaaatgtccataggaaacaaattcccgtgtcttaaaacgccttggtgtgccgtctgatactgttctctaaagacgttaggagtcacggcatctggcctgcggttgggtgaagcactggccgttgggcacagtggatgtgtgaaaaggtgccattcagagttgttattctcatgacggaagttttggagccaaataatacgnnnnnnnnnnnnnnnnnnnnnnnaaaggatgagctttggtccttttcaggccgccggttgtttccgttcccgagaataaagacgaggatccgaccagcc

SEQ ID NO: 364649 - DNA, 1055 bp, Homo Sapiens
  misc_feature (597)..(605): n is a, c, g, or t
  misc_feature (815)..(837): n is a, c, g, or t
  misc_feature (955)..(955): n is a, c, g, or t
ttttcccattccccagggccaagggtttaaccccccccggaggcccttgaagggcgggcaggggaatttcaagccaattcccaccgtgggggggttgagccaggacttcttttgggcagaaaaaagcaggggtttttcaagcccggtggcccgaagggggaaggcccactgccagggggcgcgtccaggaacgctgctgaagtgtggcgtgccccccggggcatggcgacttcctctttcactggccacatgcacttcggggaggcgcggctcggctgtgccccacgcttcaaggacttccagaggatgtacagggatgcccaggagagggggctgaacccttgtgaggttggcacggactgactccgtgggccgctgcccttcctctcctgatgagtcacaggctgcggtgggcgctgcggtcctggtggggccgtgcggtgagggccgcgcgctgggagccgcatgccctgggcccaggcctgaccctggtaccgaagctgtggacgttctcgccacactcaaccccatgagcttccagccaaggatgccctggccgattggaaatgctgtaaaatgcaaactaagttattatannnnnnnnnggtaaaaaagaaatgtccataggaaacaaattcccgtgtcttaaaacgccttggtgtgccgtctgatactgttctctaaagacgttaggagtcacggcatctggcctgcggttgggtgaagcactggccgttgggcacagtggatgtgtgaaaaggtgccattcagagttgttattctcatgacggaagttttggagccaaataatacgnnnnnnnnnnnnnnnnnnnnnnnaaaggatgagctttggtccttttcaggccgccggttgtttccgttcccgagaataaagacgaggatccgaccagccagaagccggagtctgtctttcgccaggtccggtgcccacgcnccgtgttcagggcctcgctggacgtaccccaggcgccacctgcctcggcagacacgcttgtcccccggcgacttccctcagccctctgctgcatttccac

SEQ ID NO: 364650 - DNA, 464 bp, Homo Sapiens
  misc_feature (353)..(353): n is a, c, g, or t
  misc_feature (377)..(377): n is a, c, g, or t
  misc_feature (386)..(386): n is a, c, g, or t
  misc_feature (394)..(394): n is a, c, g, or t
tttttaccagtatagaaatttatttgaattcaaaataatatggctatatttataataatataataattatctaaagcaaatatcatcattggctctgaaatgcgtctaaagatgtcattcttaagtcaaaaaatacgtagtaagaatgtacaagaaagaaaaaaatataaaaacaagtctgctgagtgtcgggagttggtgagggatatcctaccatattgtgacggagtccaaatagaaaacatgcagcaacagttctcctgctttatcagctccctggaaaataaaccagtaaccctggtagtgcagtaaccatttgggttaacagggacaaacttcctggatgggccacnggataggtaattcactggcatttncccttctcntaacttcntcctctttcacacccaattcccttttcctttccctttaaggatggggggttccaccccgggtgggcaaaa

SEQ ID NO: 364651 - DNA, 390 bp, Homo Sapiens
gccctgccccccactcttctcttaataccggggacgttttgacggctctcccgacatgggacgtacgtccccagaggcgtgtgacccagagccgtgatgcccacacagccctgtgctgcccaatttgccccgccccacctgccccaccttgatgctgtctcagcagctcgtcaggatccagaacctggctggaaagctgccaggctccactgggcctggaggtgcaatcctacggccttggaagggtcttagtctgaccaagctgcagagccaggcaggtctgctgggttctgagctcagacaactgatggcctcggacgccttgagggaagctgggccaggcccagaagactcccaccccaccctgtggcccccctggaggaagaagcc

SEQ ID NO: 364652 - DNA, 1020 bp, Homo Sapiens
ggggtggccgcccgggtgggggaacagagcaagctcgagtgggggatattaactggagaccgttgtgtgtggtgggtcctgaataatgaagggaacttcaggaagccagagagtgggattcttcacggattgatgaaaacagaggctaaccacttgatagggatatagggcattgccttttatggaatgatttagtggaaggaccatcggaaaagacccgggccacagctgaggctcagcacatcatctgacaagatggaaaagaaaaacgagtgcttctcagtgccgatggacctcatagaaatgtacttaaaataaaaccacctatgtgcttcactgaagaagatgcaaagttcatggtggaccaacttgataggattctaacagttttagaagaagctatgggaaccaaaaccgaaagtgtgacctctgagaatactccatgcaaaacaaagatgctgaaagaagcccacatagaactgcttagggacagcaccactgactccaaagaaaatcccagcagaaagagaaatggaatgtgcacggatacacattcactgctcagtaagaggctcaagacatgactgatttgcattttaaagcaagatgcgatgtccagagttacagagaatgagtagatgtgtctcatcggttaatagctctattatacctctaaaggtggaattgtcagtttagattcataaatgaaaaggtaaatgagtaatcagaataaaccaagtgataatcaaaccatgtcaagattattagttcagactctagcctgttaattttcttagttgatttctgaagctacctgatttattctattaaattgtaagcttgcaaactcaaaataaattggcagatttacctctcatgttttaatgtgtcaaattagagagcaaagtataacaggtgccttcacttttgagacttagtgccttaaaatatgtattctataatgatttcatatataaaagtatatttattgactgtaataaaataaaatatgatgtaaac

SEQ ID NO: 364653 - DNA, 1136 bp, Homo Sapiens
  misc_feature (634)..(682): n is a, c, g, or t
  misc_feature (1075)..(1075): n is a, c, g, or t
  misc_feature (1090)..(1090): n is a, c, g, or t
  misc_feature (1099)..(1099): n is a, c, g, or t
  misc_feature (1110)..(1110): n is a, c, g, or t
ggactctccgaatcagggctgggcctctgtgccaggccatcccgtctttggagtgtatcctatttgaggtcaagaaatagcctgctgtccttcccaccttccctgagcagcacctacagaacagcaaccgtgatggtgtgtgaaagcaacagtcagagactgctatacatttctgtgggtgggggtagggaatactggctctgtggccctcctcagagctgggaggccaagggttcactgggcttgaatcctctctaagcacctaccccattatggcctaaacctcctcagtggaccacgggaaatcatgttggaccaagggtttccatgttcaaacagtcaacaaggccctcccctaggttgagatatttttgatactgaaggcccaggccccccagtatggcttgctgccagcaagcagcaaggattctctcgtgggtaacgctgtagccaggcaggaccagcctcttctgggagacccctctccccacgtagggtttgtgtagtgctcccacatcctgcttattgcctgccacccctgcttctcgcctggacctcttggtattccgtgtacaccatccttgctgtttcttgcctctgtgccttcaacctgctgctcctggcctgggatacnnnnnnnnnnnnnnnnnnnnnnnnnnnnnnnnnnnnnnnnnnnnnnnnnaacctacaactagctctcagttcaggcactgtctaaagccccaggctgggttaggtggtctaggataccaactccccctcaacattttaccttaatccaacagtacagtaattagccgaaacttgcctggtttttcctactagactgtaagccctctagggacagggacagtgtcttattcatctctgtgttcttagtgcagagcctggcccgctgttggtgtttaataaagtgtgttgatctgaaatgccccagaccaaccaagattcccagacttggcttcttcccacactgggctggagtcctcccggagctcagggggaggtgagggccccagaaggtgcacttgccatcaggcttctccctgggtcccgggaggactgcagccagggnccgaggcaccttttntgggaggtnggtaagagggntgaggcagcttcacaacttttttgcc

SEQ ID NO: 364654 - DNA, 574 bp, Homo Sapiens
aaggtttaggcatgttcattcacttactccttagaagcagttcgcattctttgtgttgcctgtgaaatcggatggtgatatagggcttaaattttgaaatatgggacatttggagaacttaaggcaaatcaaaatggcataacatgatggaggaagcatgaagaccttgtgactggtagaaacaacaagaggatgtaggaaaagactatgtattgggaaagggggtagaaactatgccaaaattccatttgcccacttcagatgtctgcttgggacgaagtctgtgcctgggaaaagggatgaaaactttaacttcccttccccccacactttcatcccaagagcctagaattagagctgatttaatggtactaactagtactgttaaactaactagtactgttaatagacctttatgacagcatcctcagagttaactatttatataattgttctctggagcaaagcattcagagttcccagaagctacagtgaatttcacaccacttataaaccaagggactacctgcaaagtgtttctgttattttaaaatctaaagtctaattgaatttg

SEQ ID NO: 364655 - DNA, 525 bp, Homo Sapiens
attccacccctaggtgtataccctacagaaatgtgtacatgtgttcatccagagacatgctctaaatcttcacaaaaacactctccataataaccctgaacaggaaagcacccccaatgcccatgttggctggataagcacattagggtatattcacacgatggaatcccagactgcaatgggaatgagctgcaactccacccccaacttggagtgtattcaccaaccctagtgttgaacgagataaggcaaaaatgcaccataggattccatttatataaagtttaaaacccagcaaaattcatccatgcggttgcaagtagagatcagtcctaagaagacagtaaccagaagggggcatgaggtggtgcttctggggtgttctgtttcttgatctggttgccggttacctgggtgctttccgtttgtgaacattcttggagctgtacacttttgatctgggcacttttctgtgtgtatgttatacttcaataaaaagttgggctttgtgactaccaaaaaaaa

SEQ ID NO: 364656 - DNA, 142 bp, Homo Sapiens
gcggccgccgcggcccctaagccttcgccgcccgcaccgccgccgggcgagccggccggagaagagccggcgctgacggccgggggcgccggcaggacgactccggagactggggccaaggccgccggcggtggcggcgaca

SEQ ID NO: 364657 - DNA, 862 bp, Homo Sapiens
gtagggatgtcccggtctcttttaaagctccccggcttccaaagggttgccacgtccctaaaccctgtctccagctcgcatacacacacgcacagacacgcacgttttctgttcctgcgtgacacccgccctcgccgctcggccccgccggtccccgcgcggtgccctcctcccgccacacgggcacgcacgcgcgcgcagggccaagcccgaggcagctcgcccgcagctcgcactcgcaggcgacctgctccagtctccaaagccgatggcatctccgggctctggcttttggtctttcgggtcggaagatggctctggggattccgagaatcccggcacagcgcgagcctggtgccaagtggctcagaagttcacgggcggcatcggaaacaaactgtgcgccctgctctacggagacgccgagaagccggcggagagcggcgggagccaacccccgcgggccgccgcccggaaggccgcctgcgcctgcgaccagaagccctgcagctgctccaaagtggatgtcaactacgcgtttctccatgcaacagacctgctgccggcgtgtgatggagaaaggcccactttggcgtttctgcaagatgttatgaacattttacttcagtatgtggtgaaaagtttcgatagatcaaccaaagtgattgatttccattatcctaatgagcttctccaagaatataattgggaattggcagaccaaccacaaaatttggaggaaattttgatgcattgccaaacaactctaaaatatgcaattaaaacaggtattgtctcatcgaaaataataaagctcttttttcgtttacaaaaaacacaaaaaactctccagcgctggatc

SEQ ID NO: 364658 - DNA, 756 bp, Homo Sapiens
ctttccctcaaatgctctggggctctccgcgctttcctgagtccgggctccgaggacccttaggtagtcccggtctcttttaaggctccccggcttccaaagggttgccacgtccctaaaccctgtctccagctcgcatacacacacgcacagacacgcacgttttctgttcctgcgtgacacccgccctcgccgctcggccccgccggtccccgcgcggtgccctcctcccgccacacgggcacgcacgcgcgcgcagggccaagcccgaggcagctcgcccgcagctcgcactcgcaggcgacctgctccagtctccaaagccgatggcatctccgggctctggcttttggtctttcgggtcggaagatggctctggggattccgagaatcccggcacaggtaggacaagagaacgggggcctgcggcgggcgagttttgcggtggtctggggtttgcggaactacggagaagacgaaggaggtttttccacctgcaacaggaaacttcttcgggcgcttctccctgcttttgggctaagtccttgacggcccaagagctcaagacctctacagcctcttgtaccctgggaagacgcccaaatagtctcaggcccgttccacagaaggttggaaaagcccccccaaagaccgcgggggtctccggggacattggaattccgtggtccctggggcgctgctaagaaccgggcggtctggaccctgggggtgggaacggaaggaccctggaagaat

SEQ ID NO: 364659 - DNA, 433 bp, Homo Sapiens
  misc_feature (71)..(117): n is a, c, g, or t
  misc_feature (140)..(140): n is a, c, g, or t
  misc_feature (176)..(176): n is a, c, g, or t
  misc_feature (248)..(304): n is a, c, g, or t
caagtgtcacgccctgtaaacctcggccactttgggaaaactaaggtgggaagccatcacttgaaaacccnnnnnnnnnnnnnnnnnnnnnnnnnnnnnnnnnnnnnnnnnnnnnnnagaaacatttttaaaaaattagnctgggtgtggtgatgcatgccctgtggtcccagttncttgggaggctgacgtgggtggctcacttgagcacaggagtttgaggctgcagtgacctatgaccacatcannnnnnnnnnnnnnnnnnnnnnnnnnnnnnnnnnnnnnnnnnnnnnnnnnnnnnnnntcactgaaaaaatgagtgttcggtgaaacaagtgggattttctgggccagcaagtcttccaaactgtatatgatgcatcctgtctccatgtgtaatatattttaatgataaatgtatttttaacagtga

SEQ ID NO: 364660 - DNA, 429 bp, Homo Sapiens
cacctgagcagagaaatggtgtgcccccaagtgagtagtgagaaagcagtgaggaaggtgtgaagcctaggtgtctgttcccattttagaaaatactgttcctacatcagaaataccacattaagacgtatagagccaggtcactgggatgcttgaacccaaatagctgggattctggacagagtcagcagagtacagaaggctctgaagtgggagacggagctggggtgcatccctcccagtgaggaggggtcatgaggggcgtctgggaagagggacatttgaactaggattagctgagttgccatgatgctaagataatgggagagtgttctttgtggtcaccagtgtccacatggcatcccttccctgagattttcatcactccctgtggtcttcagtcagtaaagctcttagaacacttgtaaa

SEQ ID NO: 364661 - DNA, 702 bp, Homo Sapiens
gcttgggcgcgccacagtcccgcccctcgggcgccagtctcggtcgcgggcattgagcggctggagtctggcgactgccccacgcccagccgtgggtcgctagacggcgggcgcacccgtcgttctggacacgcttagtcggcccagcgagagggcgaaggagccgcgggcgcgtccccgccaaccctgctcgcccgcgccgaggcgggccacgtgacagcccggggccccgcgcaccgccgcgccgccttacttggtgtactcgcgcagccccttggcgaaccacacgacgctgcggtacagggacatgccgggagcgccccacgcctagccccaccgcgctcccggcgcggcctccgccctggtcccgccccccgggagtcgcccgccctgacatcatcccggttatgtaagagccgcggcttccggttccttgctccaccggtaaggcaaggggtctcggggccggccggtcgactccgccccagcctcagagggtggagtgagggcggaccggccctggtgggggccgcagtcgaggtccgcagtctcctcggggtcgaaatcgggcatcagcgccgtttagagaacaccgtcctgctgggcatggccgggatgcgaagatggccctgcaacgcacctcctagaatttggttacctagaaaaccatgtggaataaaacgacgaggcattaggaattta

SEQ ID NO: 364662 - DNA, 392 bp, Homo Sapiens
tccctggtggcaggctctccatggatgtagcatatcgaagataatttttatactgcatttttatggattattttgtaatgtgtgattccgtctgctgaggaggtgggaggggctccagggaaagccacccaccttcagtgaggttgctccccagctgagcgcaccgggcatgggatgtggaggctggcgacacaccctgtgcctctccaaggctgggcgcgtggggcgtccagagtctctctgggtctcagatgtccatctgccacctattgttaaggctctagccagaagggagggtgagggtagaagaaagttattcccgaagaaaaaaagaatgaaaagtcattgtactgaactgtttttatatttttaaaagttactatttaaaggtt

SEQ ID NO: 364663 - DNA, 442 bp, Homo Sapiens
ccgccaccaaaaaaaaccagttaataaattaacttattatccaaatttaaatgtttccttgcgtccaattttatacctgttcccacaggtctccacacacgtgaccaaatggtaaccgaaagcacccaaaacaccagcagtgcttccgaacttcttttgagttcctgatttgattaagcaccaggaactgtctctccccagacaaacaggcagtcataagtatatgtgcgtgtgcttgtgtgcgcctctgcatacatgtgagacatctgggttcgaaggtcgcctggaagcccaggcacaggtgccctggagattgtgaacccaggttaaagatctgcctgcgagctccccacaacactgtccctggagaccacccatgtggcagacactcaaaatctgttgtatttgctaaataaattaatatggacaagttacccaacaa

SEQ ID NO: 364664 - DNA, 412 bp, Homo Sapiens
gtattgatttttattttagttacctccctctagttttatgtgaaattagtagaatcagggaggacgggacttatgctgtggtaggcaacagaaaaaaacttctattgattttaatttaatatgaatactttaaagatcaacataccgattgaaatacaaatgttaatatgtgagaacctaggaagtattttaaatatttatgaaaatattttgttttaaaatgaactatgaatattggcacagttaatttcctcactgaggactgtgaacattcttatattatttcatggatattgaagaacattgttatgcaatgctttgtgtaaagttattgtgaagattttattgtctttatttttaccaaagatttcccatagtttgagcattcaaagcaataaaatataaaaatgaa

SEQ ID NO: 364665 - DNA, 764 bp, Homo Sapiens
  misc_feature (547)..(596): n is a, c, g, or t
  misc_feature (639)..(697): n is a, c, g, or t
ttatgttgcagacaccattctaaacactttattatgttaagtcccataatccttatgacaaccccatgaaggggataccatcatcatctccattgtacagatgacaaaacaaaggcacagaatatttaaatagcttgctcaaggtcacacagctgcaggggcagagcaaggattcaaagtctggttccagagtccatgctcttaaacgctcagctagaacaccttgggttgcgctcgacgaggaaatgcaactttggggtcaatcgtcttggaatctaactcatggtggggctgacctaatactttatctacacttgctgggtctgcgaacgtgacgaaaccgaagcctctggagcgtttcgtagtgggatctctcatgaccatacattctctaatttctccaaatttgctaaaatagtctctaaggctatctggtgaggtctgccagctcagtccaccgataaacattttaccggggtcgtgctgggagtcgttggcgctgcccagaggtgccattggctcccatattgccatccatatctgagcnnnnnnnnnnnnnnnnnnnnnnnnnnnnnnnnnnnnnnnnnnnnnnnnnngcgatcggagcaggagcggcggccggctccgagccccgagatnnnnnnnnnnnnnnnnnnnnnnnnnnnnnnnnnnnnnnnnnnnnnnnnnnnnnnnnnnngcgagcggcggagcacggggcagcggcgagagccgttcacacgtgggctcggcttagctcagccccg

SEQ ID NO: 364666 - DNA, 498 bp, Homo Sapiens
  misc_feature (391)..(391): n is a, c, g, or t
ttaatataaaaagatcaatgaaaaatttatttataaatttttcacgctgggctacaggtcaatatcgtacactcaggaatgtgctgcacaaactttatccagttagcagtgatcaccccgtgacccacacacagcttcgatataagcctagaaagtcttaacattaattaacataattaaaaaggtatttgcatctagaaaaaatatacagaagaactccttgtggagtaatctgtgcctccatttcaatgtctgcttgtttcactgacattatcaatatattcttctcacacaaagttttataaaaagcgacggagggctgcccgaatacgaccagccacgcacaaagggcctccacccacctggtgtcctcaagtgctccccatttctngcacgaagggtcagcagcacttccatgaaggggaaacctcatttaaatttgaataattcagcctcccttttatttctcaggatcaaaacaacaaggggtgtggggct

SEQ ID NO: 364667 - DNA, 474 bp, Homo Sapiens
  misc_feature (32)..(32): n is a, c, g, or t
aaaagggagcctaaatatccaaattcaaaggngttccccccctccaggaaatgcctgctgacccctccgtgccagaaaggggaaccacttgaggaacacaggtgggtggaggccccttggtgcgtggctggtcgtattcgggcagcccccccgtcgcctttttataaaactttgtgtgagaagaatatattgataatgtcagtgaaacaagcagacattgaaatggaggcacagattactccacaaggagttcctcctgtatattttttcctagatgcaaatacctttttaattatgttaattaatgttaagactttctaggcttatatcgaagctgtgtgtgggtcacggggtgatcactgctaactggataaagtttgtgcagcacattcctgagtgtacgatattgacctgtagcccagcgtgaaaaatttataaataaatttttcattgatctttttatattaaaaaaaa

SEQ ID NO: 364668 - DNA, 984 bp, Homo Sapiens
cggccgagcacatgggcccgcgggccgggcgggctcggggcggccgggacgaggaggggcgacgacgagctgcgagcaaagatgtgccccgggacccccggcaccttccagtggatttccttgcggaaaggatgttggcggtccctgtgacctgtggagacacggccagatctgccctccagcctgatcttttggccagaaggagattaaaaagatgcccctcaagatggctgtgcctgtcagctgcatggagcttcgttcaagtattttctgagcctgatggatttacagtgatcttcagtggtctggggaataacgctggtggaaccatgcactggaatgacacacgcccggcacatttcaggatactaaaagtggttttaagggaggctgtggctgaatgcctcatggattcttacagcttggatgtccatgggggacgaaggactgcagctggctgagagggttgagatctctgtttacttagatctctgccaacttcctttgaggtctccctatggaatgtaagaccccgactcttcctggtgaagcatctgatgcacgtaccatacggcgctcagctgggcttgagctgaccatactccctggagccttctcccgaggtgcgcgggtgaccttggcacatacagccatcatgatggtactttaagtggaggctgaatcatctcccctttgagctgcttggcacgtggctcccttggtgttccccttttactgccaggacactgagatttggagagaatcctgttacacctgggatttaggcactttcaatctgaaaaaatacatatcctttcagcactctggacggacttgagaactgtccttacgtgacctaaagctggagtattttgagattggagaattaagagtgtgggcaccctggcttcaagctcacgagaaaccaggtcgggatttaaacaatgttgggttaaagcaaagtttcataaagacagaatcaag

SEQ ID NO: 364669 - DNA, 1766 bp, Homo Sapiens
  misc_feature (162)..(222): n is a, c, g, or t
gcctgggtggcgaattcggcacgaggaccaccctcccgtgcagccgagcccagccgctctccggccgccgtccccggcggccccatgccccgatgccccgcgggggccatggacgaggggcccgtggacctgcgcacccggcccaaggccgccggactcccnnnnnnnnnnnnnnnnnnnnnnnnnnnnnnnnnnnnnnnnnnnnnnnnnnnnnnnnnnnnnccccgcggcgctgcgggccttgtcgtccccctggaccctctgcgcggcggctgcgacctgccggcggtccccgggcccccccacggcctggcccggccggaggcgctttactaccccggagccttactgcctttgtaccccactcgggccatgggctccccgtttcctctggtgaacctgcctacacccctataccccatgatgtgccccatggaacaccccctttctgctgacatcgccatggccacccgtgcagatgaggacggagacacgcctctccatattgctgtggtgcagggtaacctgccagctgtgcaccggctggtcaacctcttccagcaggggggccgggagctcgacatctacaacaacctacggcagacaccgctccacctggctgtgatcaccacattaccgtctgtggtccggctcctggtgacagctggtgccagccccatggcgctggaccgccatggccagacggccgctcacctggcgtgcgagcaccgcagcccgacctgcctgcgagccctgctggacagcgcagctccgggcacgttggacctggaggcccgcaattatgacgggctcaccgccctgcacgtggcagtgaacaccgagtgccaagaaaccgtgcagctcttgctagagcgcggtgccgacatcgacgcagtggacattaagagcggccgctccccgctcatccacgccgtggaaaacaacagccttagcatggtgcagctgctgctgcagcacggcgccaacgtgaacgcgcaaatgtactccggcagctccgccctgcactcagcgtccggccgcgggctcctcccgctggtgcgcacgctggtccgcagcggcgctgacagcagcctcaagaactgccacaacgacacgccgctcatggtggcgcgcagccgcagggtcatcgacatcctgagggggaaggccacccggcctgcttccacctcccagccagacccctcccctgaccggagcgccaacacctcccccgagagcagcacccgcctcagctccaatggtctcctctccgcatcaccatcctcctcaccctcccagtctccccccagggcacccccctggattccccatgccgccaccaagaattcggtcggcgtgccccgagtgcgaccgggctcgcggccccacgacggcgcgcggggagccgccatgtccgtgccgggacactccccccaccacatttttctaccccttatgaggggataacgaagcccccgtttgcctacctactgctgtcccgaccatacctaattcccttcaaccccctaaccacgtattctccctagcggcatagtgtggatgcgggagcccacggacacgcgtggtcggtccaggattccagcgtactccgactttcgcggtgcccgccgtagcacgtgcaggtgcggaggggttgacagcccgcacacatagaggaggtagcggccaacaccgtggcctagccgcgttccttttccctacatcttcgcctacacactacctacactcctttttatacacatatt

SEQ ID NO: 364670 - DNA, 512 bp, Homo Sapiens
tgagccagagtcaaaagaactcttcttgtaaatcactttttaaattttctctcactgatgccctttggaaattattggaaatttctggactatcctctttggaaagagaaccatgaaaacaatgcctcaccagcagaagaacagaatatcaggatgccttaaatttatagtagtagactgtaaaagattcattttggggtgatatctgtatatataacttgtttttttaaaagatgcccgtttaaaagcatgattgggaaaatgtatgttttttaagagtagattgattcaccctacccacaggacattcaccaagccactgataccattttatatttcatcaattgcatgagtatttgctaatgttgattgaacctccctttccccataatgtgggcagatttggctcagctccttcatgagatcaggtcagtggtattgtttctgtcaagagtgttttttctgtcatttctactttttgtataaaggaaataaaacaatgttaacagcca

SEQ ID NO: 364671 - DNA, 1571 bp, Homo Sapiens
tcctcatcagccgacagctgcacggtccccgcctctcatccatttggtctgtttgcaagttactagatcatacaaaaataaccgctacaaattctctgtatctggcatataaaaactgagcaaaaagtatctcttaaagcaaaacatctcagaaaaaatacaacacaggtttaacttctgcagtactttgttcatataaaacactagtaaaataggcttcttaaaaattaaatagtgaaataccaaccaaattatatacattgttacagtacaagtgaatgaggcaaaatatccagttcttagtttcccaggtgggtgggggtggccttcagtgcgtggcacggagggggtgacaggaaggccacgttccaatgtcacagtcagcgcagaaagaggcttgcagcgggacaaacagatggaaagaactgagtcacacagggaagaccaggggctcctttgaggaagagtgaggtcatgtttttattgcttgctaatccgaggttttccctggcccgaatgcccctctaggtagcctggatcccaaatgctgcagcccacgtagcgctaatccatgtcaccaagcagccacggggaagccacagctgctccagagaagacagaactaggcttcagagccctcaatatctgagctggaccgatcctggtctttcaggtccatcagggtcccacatggtccaactgacacacacgtttccccgctgacggccacgttcacctgagagcctgagggcgggcagtgttgggctcatggcactgggatggtatcactgtggcctggggggtggcactcagacccagccaacccccctcagcgaccacagtgcctcgcccgcttctctgccgccaccagggctgagggtctacgtgcggcgccgcttggcagcactgggactggaagggttgctgtttgcggtcaggactttgtcggtgacccggctgcgcttccgcttgtctgcgccttctttgcaccccaagtctgaggagttcttctctttgtctttgctggatttttctgatgctttccccaaactccctgaagatgaaaaaacatcgtcagccccattgtgggggtccacgtcttccttcatctcctctttcatctcctcttctatcatcacttttccttctcggacctcctgaatgatctcttctggaaggacgaagttcctctctggattcgggaatggaagaatctcagactcatgcagcgcctgcatgtcgtacatggtgctcagatggtcccagatgaccttggatgggacctgccgcccgatgttctggctgaacttgtcccgaatacaaatcatgtggaagtgtcggttcacaccgacgggcttgtggcccagcatggcgtggaagaggcacacctccacctcggggctccacaccactgtctcctccgccgggctggtggccgcctcccccgggcccttgtcgcctgcggcgcccccgccgcccacctcggcctctcccatggccgcggcccggccgagcaaggagcccccggcgggagcaggcgcggccacgagctccgcgcaggcgcacccgct

SEQ ID NO: 364672 - DNA, 981 bp, Homo Sapiens
gctcccgccgggggctccttgctcggccgggccgcggcatgggagaggccgaggtgggcggcgggggcgccgcaggcgacaagggcccgggggaggcggccaccagcccggcggaggagacagtggtgtggagccccgaggtggaggtgtgcctcttccacgccatgctgggccacaagcccgtcggtgtgaaccgacacttccacatgatttgtattcgggacaagttcagccagaacatcgggcggcaggtcccatccaaggtcatctgggaccatctgagcaccatgtacgacatgcaggcgctgcatgagtctgagattcttccattcccgaatccagagaggaacttcgtccttccagaagagatcattcaggaggtccgagaaggtgaggctcgggaaaggttgggcttgggattcagaaaaggccagaccctggccaagggcagggaggtgagggtgaggaccccgggcctccagggaggtgtgagggtccagcgcagaccccgtcctacctgtgcttgggtggtcttggaacctccgggattggagaggactttgtttgagagcagtggctggacggaagctgaggcctgtgtgggcagcaaagcgtcggagcagtccctggcctgaccatcccccagcgtcggccaccaccgtgggtttcggtgagcgtcagctgtctcctccacaggacaaagtgatgatagaagaggaagatgaaaggaggagcatgaaggaagacgtggaccccgacaatggggcttgacgatgttttttcatcttcagggagtttggggaaagcatctgacaaaatccagcaaagacaaagagaagaactcccttcagactggggggtgcaaaggaagggcgcagacaaggcgggaagcgcgcgccggggtcaccgacaaaagtcctggaccggaaacaggaaccttccaggtcccgtgctggcaagctgggccggacgtagaaccta

SEQ ID NO: 364673 - DNA, 795 bp, Homo Sapiens
ctccttgctcggccgggccgcggcatgggagaggccgagtgtgggcggcgggggcgccgcaggcgacaagggcccgggggaggcggccaccagcccggcggtaggagacagtggtgtggagccccgaggtggaggtgtgcctcttccactgccatgctgggccacaagcccgtcggtgtgaaccgactacttccacatgatttgtattcgggacaagttcagccagaacatcgggcggcaggtcccatccaaggtcgatctgggacctatctgagcactcatgtacgacatgctaggcgctgcatgagtctgagattcttccattcccgaatccatgagaggaacttcgtccttccagaagagatcattcaggaggtccgagaagtggctggagcggaagctgaggccgtgtgtgggcagcaagcgtcggagcagtccctggccatgaccatcccccagcgtcggccaccaccgtgggttttcggtgagcgtcagctgtctcctccacaggaaaagtgatgatagaagaggagatgaaagaggagatgaaggaagacgtggacccctcacaatggggctgacgatgtatattcatcttcagggagtatggggaaagcatcagaagaaatccagcaaagacaaagagaagaactcctcagacttggggtgcaaagaaggcgcagacaagcggaagcgcagccgggtcaccgacaaagtcctgaccgcaaacagcaacccttccagtcccagtgctggcaagcggcgccgcacgtagaccctcagccctggtggcaa

SEQ ID NO: 364674 - DNA, 1126 bp, Homo Sapiens
cgcggggagggcggcggtggctgcagcggctggagcggggtagagaccgccgggtctcggcccgcaccaggagcggaacaagtctgggatctgccgatatgggggatatgaagacccctgattttgatgacctccttgctgcctttgacatccctgacattgatgcgaatgaagccatccattctgggccagaagaaaatgaggggcctggaggcccagggaagccagaaccaggtgtaggaagtgaatctgaagacacagcagcagcctctgctggggatggccctggagttccagcccaggcctctgaccatggcctgccaccgccagacatttctgtagtcagtgtcattgtcaagaacactgtgtgtcccgagcagtctgaggccctggctggaggctcagcaggagacggggcccaggctgctggggtaactaaagaagggcctgtggggcctcatcgaatgcagaatggttttgggagccctgaaccttccctcccaggaactccccactctcctgctcctcccagtgggggcacctggaaagaaaaaggcatggaaggcaaaactcccttggacctgtttgctcattttggccctgagccaggggaccactcagatccgctgcctccctctgcaccctctcccactcgggagggggctctgaccccgcctcctttcccctcttcctttgagctggcccaggagaatggcccaggcatgcagccacctgtttcttccccaccattgggggccttgaagcaggagagctgcagcccccatcatccccaggtcctagcccaacaaggctcaggctccagccctaaggccacggacatccctgccagtgcctcgcctcccccagttgctgaggtgcccttcttcaagcagtctccagggcaccagagccctcttgcctcccccaaagtgcccgtctgtcagcccttgaaggaagaagatgatgatgaggggccagtggacaagtcttccccaggaagtccccagagtccctctagtggggccgaggctgcagatgaggacagcaatgactcccctgcctccagctcctctaggcctcttaaggtgcggatcagaccattaaaactgtttgtggtcgaatctcc

SEQ ID NO: 364675 - DNA, 552 bp, Homo Sapiens
  misc_feature (485)..(494): n is a, c, g, or t
cgtctggggggcccctccagccagtactccaggtctccctgtctctcccccgctgccattttgatagtataatctatttttaaatggggcttttcaataggggagagggagtcatctcttcctatatttggtggggtgggtgggaaggaagggatttggggggaaatcttcctgccgcctcccccactccaagtgtttatttttgataccaaacatgaattttcagttccctccctcccagccccccaatttcctgcgggcgggtacaaaggaccctttcaatgtccctggagttgggagggaggaatgggggacataaagcctgtcctgtctctattctaggcaagagagagtgggttcaaaagactcctgggctcacctgttagcgctggcccagcccaggccttgggacctgggggttggtgatttgggggacagtgctacactcgtctccactgtttgttttacttccccaaaatggaccnnnnnnnnnnctaaagagtcccagagaatggggaattgttcctgtaaatatatatttttcaaagtgaa

SEQ ID NO: 364676 - DNA, 474 bp, Homo Sapiens
gcatgcatttggcattggtccagccctttgaaaccccttagagagaagcatatatggccacaaagcacagaggcttaggtttgccacatgcagacagggctttctgggccccttaccctaatcccccacccgactcttgctctgagttagagctgagttacgtacccagtatcacactcacagttagaaaagaccgaatcacaatttagaatcacttttcctctgtccccttctccccagctaagaatgtgtggcacctccatcagttatacttagaaggagcagaaatagttattttcgtatcttctatccctcaaagcatcagacatgggaaaattggtttataccaagaaagcttcctctgtggaaatctgtctcagcctactttattcctgcattgggaagccatatcgcagagctaaatgcaatagaatgaaccagaactagtggattccagggctgggggaaaaaaaa

SEQ ID NO: 364677 - DNA, 362 bp, Homo Sapiens
  misc_feature (164)..(172): n is a, c, g, or t
aaagatgctcgtgggtgcgggaggatggcagacgtggcagtggcgggtgggctgggcccccaaacccaccaccaaaaaaggaggaggctgtaaaaactgctctgccctcaaggaggttgatacaaaccaataaattctgcactttgctatcttggtgagataannnnnnnnnaagtttatggctactctatgtattttacctgctgagtttttttgtgggtggtgtttggatttaaatgtatctttagaccatcctaaatatgaatcatctgatttttcataaaggcctcaaaacaataggcaactcgacacagaacagaggtttcacacctcccctatagagattagtaagatattaaaat

SEQ ID NO: 364678 - DNA, 464 bp, Homo Sapiens
agataaacataacataaggggaaagaaacgaattgcaaaaagttggtaccctgtttgagacaagtccactcatcaatgtcaaattgccatagaaggttctaatcatactttgaataatactttgactagaccagcagcattgccatcatctgggaacttgttaggaatgcgaaattccaagccctacaccaattctgctgaatgagaatcctgaattttaacaagatcccctaggtgttttgtgtgcatgttaaagtttgagaagcactgggctagagttttgtgtaggggattcttttgcccctcaaattgaggaatcatcttctagtgtgtccagtcttcaaagaccttaaaacaaattgtgtctttgttttgtgatccagatggaatctgcagagatgcagtcctctcaaagtgttaaagctgtttattgaaagtaataaatgctgatttgcctggtaccc

SEQ ID NO: 364679 - DNA, 496 bp, Homo Sapiens
gagagactcctgcagccatagcaaactccagtggccagccctaccagccacttcgggaggtattgccagggaacagacgaggaggacagggctaataggccacaaggcccaaaagtcccaatgacccccatgaacccaagggcggcatgacagtatgggtcgttaacagaaacagctccgtggtattcatctggttcccaggtatcagagtgctccatctcaggcacccaggaaacaccattgaaagaggccagactcactctgcagggaccaatggaactggagtcagcatggagcccagccctcccacgccttcattcaaaaaggggctcccccagcgcaaacccaggacctctcagactgaagccgtgaactcttgagagaaaatccagttggcctctctcctctatccacacaattcaacttgataactggactttaggaaacttacagttagatgtaataacaaaaagaagtttatgcgtatcaaaaaaaa

SEQ ID NO: 364680 - DNA, 433 bp, Homo Sapiens
  misc_feature (36)..(36): n is a, c, g, or t
  misc_feature (50)..(50): n is a, c, g, or t
gggaacttcaaaaactaccatccttaaaagttgagnctttgaaagctggncaagggttttcagctgagctgaggttggaagtccctgaccttcagctgtggccgcctacggagcagcagggagagcaaacccatggagaaccccgcggcccccaaagcatggacggagctgccagccttctcccctgcccttcttcctctactcccgacctgccagccttctcccctgcccttctgcctctactcccgacctgccaaccttagcctaaaatcagagctgctagaatcacacacactgtcgtagctggttttgtattgtaaatgagtcattctgttattttggaaacttatgtctcatgccaggatctgcagatagttctttttcaaaatattgtttagacaaaataaatttctttaaatataatatctctaaa

SEQ ID NO: 364681 - DNA, 684 bp, Homo Sapiens
  misc_feature (168)..(168): n is a, c, g, or t
ttccttccgggcttgggggaaccttcgtaaaaatcatagttagggttaagtccaagcagtgaggcctgacctgggctctgctctccttgttgagacactaacaggcagttgggaggaaaatctgcatttgactccaccctctttggggccaaaggaagaagcaggtgnacccgagggggggcaaggcccagaggagggcgactcgtgcacagggacccccacccttggaccccgctgtccttttctagttgtttacttggtggtggcagccagtctgaccttgtctgtggtctgactgttcctaagtgtgtaactttcagtattatctgtgacagatggttctgtggtgaaaaaggtttattatattccttatggctgccttgtacaaaatccgttagaaacgctaatgtaagatatcagatttctaacaagacaaaaacagcattatggagttaaaagatttttacaactgggtcttgattttgatgtgagctggtttttagctctcaaatgttgtcacttaaataaaaaccttctttgcctttacaatgtgttttggtctgaactaagttgagaaacctttccctttctacatgttctcccttgggtgggattgggggcagactggctcggagcagaggtggatgagggccagaccccaaaccacaaattacaaatctatag

SEQ ID NO: 364682 - DNA, 316 bp, Homo Sapiens
  misc_feature (99)..(113): n is a, c, g, or t
  misc_feature (185)..(199): n is a, c, g, or t
  misc_feature (236)..(245): n is a, c, g, or t
acaaacccgtgcgtctcggctgcccccttgtgcaccgcgccgcggaagggggctccgagggggcgcagcctcaaaccctgcctttcctttacttttacnnnnnnnnnnnnnnnctttggaagagagaagaacagagtgttcgattctgccctatttatgtttctactcgggaacaaacgttggtnnnnnnnnnnnnnnntttcttgtgttggttttttaaagaaatgggaagaagnnnnnnnnnnttctccgcccctttcctcgatctcgctcccccttcggttctttcgaccgtcccccctccctttttcttctg

SEQ ID NO: 364683 - DNA, 459 bp, Homo Sapiens
ccggcctgccctgactcctggcgcccgctcctccaagctctcccagcctgtttcctccttttcctggtgtcctggggttgagcttgtgagaatggcttcagtaatttgaagcgcggattggatgtcagcttattccgctgaggtgttcgctccggacgtcctgaggtttcagaagtagtaagccgactgttaagagccctactcagcacccgccagcgcgtacccctcacggtgctgggggccgctagtcagggagcgaaatccatgcaggccagacagaaggaaggacatttacagcaacagaaacgtgcatgccccagaactaccaaagacttgagctggcggggatgacggaggcattgtgttgatcaatgggtgtggtcgcttgtttgaaatgtgacttcccaggtcaaagactgtcaatgtagtgcttattaaaatttctatttgagcttaaaa

SEQ ID NO: 364684 - DNA, 470 bp, Homo Sapiens
  misc_feature (195)..(212): n is a, c, g, or t
caacataagctgcttagcccagcgcccagtacctcacgcagacataagtgctcagtaaatgttgtctgtggtggggatggttgtcaccaacatctgaagtgcacttctaggtcatcaggtgacatgattggcgccaacacatggtactcttgatttagcacatctcagctgaggcacctcattgatatttgtttnnnnnnnnnnnnnnnnnnccttggtgattctgctgtgaagtcctggccagaaacctccagaccgctgatcaacacgcaacagaaccatcaccgttcacctctttgacatggtgccaggataccctggatctctagcttttgctatagttgctctaattagggaataatcttgtctttaatattcctttgctacattttttaacatttcttatctaaatggttttatgaatcagttttacagagaaaaaaaaccagtatttaaaatattcttccagg

SEQ ID NO: 364685 - DNA, 501 bp, Homo Sapiens
  misc_feature (481)..(481): n is a, c, g, or t
tgcggccgccgggccgccagctttcccctgcgccaggtactcctgcagctggcggtggaggtccgccatcttggacaaggcggtggcagaaaggaaaagctgcggctcacttccggccctccgctgaagcggctcggtcttcgggcggcaattggtcggcgacggcgaaaggggcagggcctgcggcgctcgcggaagtgccgcggtgcctgctctgcggacttttgtggtgtccccaagtaccgtggtcgcaggtgctgcctgtccgcttgcagtcgccctcccagcgcctgaccctcttccttgttcggagtaggcgcccttgcggtctggctaagtcctgccagcattaatagttggaaggcaggggtgggtgtggttctaaaggggcacaagaagtgacccttttgctgacggaaatgtcttatggcctcactgcgtctaccgtggcggtgatattgtgctagtttgcaacatggangaatgggtaaaggtacacag

SEQ ID NO: 364686 - DNA, 500 bp, Homo Sapiens
  misc_feature (408)..(443): n is a, c, g, or t
aagtgttgatcaaccattcgacctataagaagccttaatttgcacagtgtgtgacttacagaaactgcatgaaaaatcatgggccagagcctcggccctagcattgcacttggcctcatgctggagggaggctgggcgggtacagcgcggaggaggagggaggccaggcgggcatggcgtggaggaggagggaggccgggcggtcacagcatggaggaggagggaggcgctgctggtgttcttattctggcggcagcgcctttcctgccatgtttagtgaatgacttttctcgcattgtagaattgtatatagactctggtgttctattgctgagaagcaaaccgccctgcagcatccctcagcctgtaccggtttggctggcttgtttgatttcaacatgagtgtannnnnnnnnnnnnnnnnnnnnnnnnnnnnnnnnnnnaatcaactttcctcgcaatataaagtattcagcaatttcaataaaagataaattatt

SEQ ID NO: 364687 - DNA, 491 bp, Homo Sapiens
caattggttgagtttgtctaaagacctgagatcacaagaaagggaatattcaggttaagataaaagattgtggagaccaagattcttttgaagtcttatagtggctgcccttagagacaatagatgacaaatgtttcctattcagacctttaaaaggtgctagactcttaattaacctcttcaggattgggagggcctggaagaaaaagatctagctatgttaataggattctttacagatgcaaattttcccccacaaaggacagctttgcagggccatttcaaaacatggcaaagaaacatgttttggggtaaaatattttgattttcttccttgtctcgtaatgttatgccagagtcaggttggaaagtaagtcacgatatatagggttaaataaaacccatctgatgagaatttatggtttgtagggcatgactacccagaccccttagaaaggaatttgggcaagataaaaaaaatcatagcttag

SEQ ID NO: 364688 - DNA, 317 bp, Homo Sapiens
atcttgcccaaattcctatctaaggggtctggagagtcatgccctacaaatcataaattctcatcagataggtttcatttaaccctatatattgtgacttactttccagcctgactctggctggcataacgttatgagacaaggaagaaaataaaaatattttaccccaaaacatgtttctttgccatattttgaaaaggccctgcacaaagctgttttttgtggggggaaaatttgcatctgtaaagaatgtctattatcgtagctagatctttttcttcctgaccctcccaatcctaaagagatgaactaagatc

SEQ ID NO: 364689 - DNA, 1403 bp, Homo Sapiens
ggggatacagttccggtgggagaacgcggctgcgaggttttcggctttggctcctgatatgcagcgacagaattttcggcccccaactcctccttaccctggtccgggtggaggaggttggggtagcggaagcagcttccggggaaccccgggcgggggcggaccacggccgccctcccctcgagacgggtacgggagtccgcaccacacgccgccgtacgggccccggtctaggccgtacgggagcagtcactctccgcgacacggcggcagcttcccggggggccggttcgggtctccgtcccctggcggctaccctggctcctactccaggtcccccgcggggtcccagcagcaattcggctactccccagggcagcagcagaaccaaccccagggttctccaaggacatctacaccatttggatcagggcgtgttagagaaaaaagaatgtctaatgagttggaaaattatttcaagccttcaatgcttgaagatccttgggctggcctagaaccagtatctgtagtggatataagccaacaatacagcaatactcaaacattcacaggcaaaaaaggaagatacttttgttaacatttctgaaattcaactggaagcttcatgtgtcaggaacatcttggacaaaactttaagttgtgttgatataaatttacccaaagatgatgactttgattggataattagtaaggtctttttgttatttttcatcgtatcaggtattgttgatattagagaaaaaagtaggataacttgcaacatttagctctggaagtacctaccacattttagagatttaccgtttccatatatttaacattcctggttacataatggacatttgtcttttaatgttttttcaatgttttaaaataaaacattttgtcttctaaaaaccggcccgcgccacctgtgattagccccttgccggcccggccccggccccctccaaaaaccttttcttagacaccttctgttgtgggggccgccgggtgccccccaagggttaacgtggaaaccccggggcccaataaccgcgccctttccctaaaggagaaatcccctgcgcccctggacattaggggcgcttgggacatttctttccaccaataacaaataaaccggccccgcgggggggcacccccgaaccccgctgtttttgaaacccatatttcacacaaagggcaagcttctggcgaggcgccctatacctggggactccgagtccacccggggaaatcgccagccgcgaggcttctgataataccaacattgacagcccccggggcgggtggcgcgagtccttttaccaggcacgcggggtgggaaacccctcttcacacacgcgttcctttgcgccccacgccggcgaagccccacc

SEQ ID NO: 364690 - DNA, 630 bp, Homo Sapiens
gctgtgtcccgccggaggaaggccgagtatccccgccggcggaggagcagccccagcgccaggcctcccgacgtccccgggcagcagcccaggccgcgaagtccccgtctccagttcagggcaagaagagtccgcgactcctatgcatagaaaaagtaacaactgataaagatcccaaggaagaaaaagaggaagaagacgattctgccctccctcaggaagtttccattgctgcatctagacctagccggggctggcgtagtagtaggacatctgtttctcgccatcgtgatacagagaacacccgaagctctcggtccaagaccggttcattgcagctcatttgcaagtcagaaccaaatacagaccaacttgattatgatgttggagaagagcatcagtctccaggtggcattagtagtgaagaagaaaaagaggaagaagaagaagatgttaatcagtgaagaagagataccattcaaagatgatccaagagatgagacctacaaaccccacttagaaagggaaaccccaaagccacggagaaaatccgggaagggtaaagaagagaaggagaagaaggaaatttaagttgaagtagaagtggaggttgaaagagaggggaatgaa

SEQ ID NO: 364691 - DNA, 994 bp, Homo Sapiens
ctgaggacagaggtcttcaggctgtgggtctcaacaggaactgagatccccaagggagacagagttgcaggtcacctcccctacctgcttctcagcaggacctaggaggcctggcccagctcctggtggaccccaagcagccagagcctactgctgccatctgaagacctcatctgagcccactttccaccaagcgcccacccaggctgaggtctcctgggaattctcacccgctctcctgctgctaaggaaatgacgtcaatggctaccccagagaaatgccccacatcccaggacaccagccatcaggaaggcagctcttcctcacccagaaagaggcaattatttcctctcagcagcctggccccagggagcccccttccctctctggggctctgcctcttccttttgttgccctgccatggagccccaggccggggcagcccctctctgcccagggaaggcaccgccctcaaagacaaggcttggccgggcagtgaccttccctgagcggaggggtggcttgagcaggacacttcttgcccttactcaaaaacgaaatcgccagtttccagaggcgtcgggggaacggctgacgaagacacaatcgttatgttctcaattgttttcctcctcttactttctctcctgcctcgtttggacaggccagtggcattcgcccttgaggtccctcgcagccccggccccccgggcccgcccacacctctggcttcctctgtgcatcctgtgaagtctgtttctgatgcgttggcgtggggggtgggctgggtggggtgggaatgagggcccggccctcatgattccatttcccaattcctttctggtctccatcctctctgtagatatgtagatctctttgaaacgaagcaagcacccatccctcccagctcactcggctccaccgtggggacctgctgggggagccgctggctccctgaggaaagtgaaagccaataaaacatctcccacactc

SEQ ID NO: 364692 - DNA, 459 bp, Homo Sapiens
accttggcctatgaactttgccttatcaatcatgaatctagatgaatgctatctagttcttggttcagttttacctatttttatttttggttccactgcttgcttggagcatagctgggatttgtagccccattttcctaggctttattgcaatccccactgtggtattttatagaagctattacaacctgataggctagcttcatggtattgatgatacatggcttaaccatactaaaagctgctttccctctctaaattgtaaaaaggtgatgaagtttcacttgatggagacatactatatatgtgtgtttatcatggaactagtgcattaggccataagctgtttttctggtctatgttttttgtatttaaaactttactgaagacaatggactccttcgggttttctttctttcaaccctgaattgtccttgtttgaatttttaagtactgtaa

SEQ ID NO: 364693 - DNA, 1075 bp, Homo Sapiens
gggggagcgggccaaggggcggctccggcgggcggactcggagcgggcggcggagtgacccggacagctgtcctctctgacaccaccccggcctgcctctttgttgccatgagagctgcctacctcttcctgctattcctgcctgcaggcttgctggctcagggccagtatgacctggacccgctgccgccgttccctgaccacgtccagtacacccactatagcgaccagatcgacaacccagactactatgattatcaagaggtgactcctcggccctccgaggaacagttccagttccagtcccagcagcaagtccaacaggaagtcatcccagccccaaccccagaaccaggaaatgcagagctggagcccacagagcctgggcctcttgactgccgtgaggaacagtacccgtgcacccgcctctactccatacacaggccttgcaaacagtgtctcaacgaggtctgcttctacagcctccgccgtgtgtacgtcattaacaaggagatctgtgttcgtacagtgtgtgcccatgaggagctcctccgagctgacctctgtcgggacaagttctccaaatgtggcgtgatggccagcagcggccttgtgccaatccgtggcggcctcctgtgccaggagctgtgggagctgctagggtggtgctggcatcctgagtcctggccctcctgggatctggggccctcgggccctgcctgacctggtgcttttttccccatccccatgttccttttattctgtaaaaagttagtggactgcagccctgggggttgcaggctgcggtgcctcaggcccctccttcagcctgtggccacctctggggcacgatgggggctccccactgcccagtctgcccctcgggttgggggagtatcccaggcctctctgtgggacctgggcccctgacgggccttctcagcccgttttgaggacagacagtcccccgaggtaggctacatccccccaccccagctggtctgcttggatttcctacagcccccgtgggcatggaccacctttattttatacaaaattaaaaacaagtttttac

SEQ ID NO: 364694 - DNA, 637 bp, Homo Sapiens
ccaccatcaccctcggctcttcctgtgaatgctgctacgttgtttgtcttctctatttttttcctcgttgtgagaaaagacatttaaccgttgaaatgtgaaggtggaatcagagaggggccccgcgggggtctgcgaggcctcagtgtggctgtgcgtggcccgtgtcctggaagccacccggaactggacgcagggccaggtgctgtgggaaggatggaggcccccacggccttgacctcagaacactacgccctgaaagcgcccctcactgcccgtgggcacagtgaggagaccccacacctttccccaccagagctgcagcctgttccttccccagaggcctggggcaccactgacccggtggaccctgatggagctaagctgtcccaggcaggggtctccgctctgggctttccctgccacctcacaccccagcaccccctaaaccttggccttcaatgtttacttttctcacttcggatgccaagccacgcgggagcctctcgcgaggccccagtgccaggtgacggggcgctgaagaaccgcggcgcagccaactctccttctgcccttgccttcgccctgggtgcgacagggctcccaaagcgcaggcgggttcccccagatcccgcct

SEQ ID NO: 364695 - DNA, 595 bp, Homo Sapiens
atgatatagccaggatcttgggtgtctaggagaacagcaagcaaaacaaagtgaaaacgaattggattaacttttgcaaacccggggagatttcttagcaaatgagtctaacaaatatgacatctgtctttggcacttttgttgatgtttatttcagaatgttgtgtgattcatttcaagcaacaacatggttgtattttgttgtgttaaaagtacttttcttgatttttgaatgtatttgtttcagcagaagtcattttattggatttttctaacccgtgttaacaccattgaatgtgtatttcttaagaaaataccaccctcttgtgcccttaaaagcattactttaactggtagggaacgccagaaacttttcagtccagctattcattagatagtaattgaagatatgtataaatattacaaagaataaaaatatattactgtctctttagtatggttttcagtgcaattaaaccgagagatgtcttgtttttttaaaaagaatagtatttaataggtttctgacttttgtggatcattttgcacatagctttatcaacttttaaacattaataaactgatttttttaaag

SEQ ID NO: 364696 - DNA, 623 bp, Homo Sapiens
  misc_feature (126)..(141): n is a, c, g, or t
ctatgatgagcgcccctaaaatgctggtaagcttctttccaacaaaattgcggtcaaagtaggatgctggggaatgctgattttagcaaaagcttgtagaaaagagtggcctggcacatgagcttnnnnnnnnnnnnnnnngctggctcttgaattttggcacagtgcaacctgttccataccagacaaatgaaccaggcttaatctggtaccaattctttttctctcttactcctccagaagtgaagggactgcagatcttgttgttttggggacactttcatggaactgtatgtaggtttttttgaatggtgagaaatctgaataattggtaaggggaagggaatccctcatttcagcttttcttgatgttgttactaataactatgaaaaaacttctgagagaacaatgtgaactgaagatgactcagcagttaagacaatgctaagttctgaaaccacaggtaaatgaagggctaattaatgtgtggtatacttggacaaaatgaagtactcatttgcactggattactgtgtaatgataacgaacactgttcaagaacgatttatatttccataagatttgtactaaattttataaaagtaaaacaactttttataaa

SEQ ID NO: 364697 - DNA, 400 bp, Homo Sapiens
aaggattccacatgagtgagatcgtatttgtctttctgtgtctggcttatttcatgtaacatgatgtcctccatgttcatctatgttgtcacaaagtgcaggatttcattcagttttatgtattccactgtgttacataccacattttctttatccattcatccgctgttggatacttaagctgattccacatcttggccattgtaaatagtcatgcagtaagcgtgggagtgcagatatttcttcaacataatgattttatttcctttggatatggatccagtactgagattgctggatcatgtggtagttctatttttaattttttgaagaacctccatacagttttctatagtggctgtactagtttacaatcccaccaacaatgtgtaagtgttcc

SEQ ID NO: 364698 - DNA, 415 bp, Homo Sapiens
  misc_feature (347)..(347): n is a, c, g, or t
actgctggggctgcaatctgccagtgtgacccctggtggctctgcaggcagcagggtgaggagagtgaccctcatatgaagccacgaccccaatgcaagaggctatcctgaatctgggagtcacggttgttcagaatcagtccctgagatgtggcaccgtggcgtttgacattatcaccaccatcgatgtcattctatggtaacgtatgtgtgccattgtgtgcctgggacacaaacaggcactttcgatacccctcctgcttggacccttcccctgccatcccctcctcccactggccgccctgttgctctcagcttccctgtaaagaggcctttttcacaatgangtcggatcacagcatgctttgctcaaaaccctgcctggctcccaggtccctcagagggaaggcccaag

SEQ ID NO: 364699 - DNA, 1117 bp, Homo Sapiens
  misc_feature (996)..(1036): n is a, c, g, or t
aggtagcgaggcctgggtggcgaattcggcacgaggcggtctgggaggagagcaaagggcaagaaagagtgactcgaagaggaagggctgcgagggctccaagggcagcactgagaagaaagagaaagtgaaggcggggcctgactcagtcctggggcagctggcaggcctgtccacctcattccccatcgatggcaccttcttcaacagctggctggcacagtcggtgcagatcacagcagagaacatggccatgagcgagtggccactgaacaatgggcaccgcgaggaccctgctccagggctgctgtcagaggaactgctgcaggacgaggagacactgctcagcttcatgcgggacccctcgctgcgacctggtgaccctgctaggaaggcccgagaacgcacccgcctgcctgccaagaagaaaccaccaccaccaccaccgcaggacgggcctggttcacggacgactccagacaaagcccccaagaagacctggggccaggatgcaggcagtggcaaggggggtcaagggccaccaaccaggaagccaccacgtcggacatcttctcacttgccgtccagccctgcagccggggactgtcccatcctagccacccctgaaagccccccgccactggcccctgagaccccggacgaggcagcctcagtagctgctgactcagatgtccaagtgcctggccctgcagcaagccctaagcctttgggccggctccggccaccccgcgagagcaaggtaacccggagattgccgggtgcccagcctgatgctgggatgggaccaccttcagctgtggctgagaaggccaagggcagcctgcatttttgacactgagactgatggctacttctctgatggggagatgagcgactccaatgtaaaggcccaggacgtgggggtgcaacgggggccccccggaaggcaagggcaaaggaggtggttccgcatgggcgtactggccctcctaattnnnnnnnnnnnnnnnnnnnnnnnnnnnnnnnnnnnnnnnnnacaaggccttaacccagttaaaactgccctttcccagtttttggctgaaggggcccaaaaccttcaggaggtgccaactcc

SEQ ID NO: 364700 - DNA, 471 bp, Homo Sapiens
ctgctgtgatctgcaccgactgtgccagccagctgttgaagaaggtgccatcgatggggaatgaggtggacaggcctgctgaggggagagaggaggcaagtgagacgccagcagacgtgtgtcccaccctttcaggaagcccactgacgctcccagcacaccaccaggcatcgtcttctctctgtccccctgtgccagacccaggtgagctatcttgttttgtccatccctcctgccaacaccaccaaagagtagggactacttatacgcttctctccagaaggacgtgctgccctcaagatgggcttcataatttgtgggctagagtgtaaaatgaaaatataggctccttgttcaaatattatgtaagaagtttcaagtgtggagtgttagtagctctcttagtttgtctagcaggttttttgaatttataccaggaagcctgccatccgaaagaaaattcaagagcgc

SEQ ID NO: 364701 - DNA, 515 bp, Homo Sapiens
ccatggggtatgataactaaatgaacatctctggaagttcctccgtctgatatgtgtattctgacataacagaatttcccaagacttctttgaggaaggctgtccacgcttcaggcaaagtttacccattattattatgattttgaatattccttgttcattacagtccagaaaatctgcagaagttctccatgttcagtggttgaccagaatctgattgttgcgctcaattaaagtgctttattatttagctaaaacaacttatatggaagttaattatttcaggaaatacataataagaccaaaaaaatcactggataatatgtagatatattttagttccattactattaatagcaattagataactctccctccccccattgaggtgagaatgggctcctagatacttggtggtcaatagaactgatttgattaactttcatttaactgtggttattgttacatctactgattttttcaaataaaaatttctagaaggctcagatttgact

SEQ ID NO: 364702 - DNA, 413 bp, Homo Sapiens
caccaccccgtgggcctcaatgaactcggagcagcagcgcagcacctggggcacatcctggcctgagttgctgaggtgctcgccaagatcgcagccaaacaccctctgtcgcaggattccccgctgccgcagccgctgccgagaagggcgggagcgcatgaaggtgcggagcaggccggccagcttcccacgaggccgtggcacagctgaggtcagagacgagataccctggggagccgggatgccacatggggggccatcggcatccgccttcaggcccggacctggccgctctgtgaagagttccacacactcactggggaagaacccgacctggaagcctcgcttgccccgccaccagctccgatcctctgtgggtggcatgtcgatcaccgagacaatgtctcccacct

SEQ ID NO: 364703 - DNA, 298 bp, Homo Sapiens
  misc_feature (278)..(278): n is a, c, g, or t
gctagttgcaaaatgaacatatttattataaaaaagttgaaacatatttgttttttgaggcaggctctcgctctgtcacccaggctgaagtgcagcgggcgggatcatgctattgcagcctcatctcctgggctcaagcaatcctccaacctctcaacctcccaagtcgctgggacctgacctcaggtgcatgccaccatgcccagctaattctttttacttttagtagagacaacttctcaccatgttgcccctagactggtatgaactcctggggntcaagcagttctcccaccct

SEQ ID NO: 364704 - DNA, 1288 bp, Homo Sapiens
  misc_feature (145)..(161): n is a, c, g, or t
cggtccggaattcccgggatctcggcttctgcacgcccctctttctccattagcgccccccctacattgctatttccctccctccccccttttcgtttccggcgctcccgccttctctccgcagagctcttctctgagcctgttnnnnnnnnnnnnnnnnncgtggaggaactggggttcgcgggagcacgagctgcagcaccacttccggaaagttcaggagccctggaaaggagaaggaataagacggcaggaggaagagagagagagggtagaatggaagaatctcacttcaattctaacccgtacttctggccttctatccccacagtctcaggtcagatcgagaacacaatgttcatcaacaagatgaaggatcagctgttgccagagaagggctgtggtctggccccacctcactaccccaccttgctgacagtgcctgcctcagtgtccctgccctcaggcatcagtatggacacagagtccaagtcagaccagctgaccccacacagccaagcgtccgttacccagaatatcacggtggtccctgtgccgtctacaggactgatgactgctggagtctcctgttctcagaggtggagaagagaagggagtcaatcaaggggtccgggtttggtaatcacgtccccctcaggctctcttgtgaccacagcatcatcagctcagaccttccccatttcggctcccatgattgtctcagctcttccccctggctcacaagccctgcaggttgtccctgacctctccaagaaggtagcatcgaccctaaccgaggaaggaggcggaggtggtggttggaaggtggccagtgtggcctcctaagccaccccgggggccggaaagaagaagcggatgctggaatcagggctgcccgagatgaatgacccttatgtcctctcccctgaggatgatgatgaccatcagaaagacggcaagacctacaggtgccggatgtgctcactgacattctactccaagtcggagatgcagatccactccaagtcacacaccgagaccaagccccacaagtgcccacattgctccaagaccttcgccaacagctcctacctggcccagcacatccgtatacactcaggggctaagccctacagttgtaacttctgtgagaaatccttccgccagctctcccaccttcagcagcacacccgaatccacactggtgatagaccatacaaatgtgcacacccaggctgtgagaaagccttcacacttttagtaagcctctacctgcacgacaacccat

SEQ ID NO: 364705 - DNA, 803 bp, Homo Sapiens
  misc_feature (12)..(12): n is a, c, g, or t
  misc_feature (128)..(144): n is a, c, g, or t
gtgtgttaatantgacgtacgccggccgcgcccctccgtccgaagggcggctggtaccggtccggaattcccgggatgtttccggcgctcccgccttctctccgcagagctcttctctgagcctgttnnnnnnnnnnnnnnnnncgtggaggaactggggttcgcgggagcacgagctgcagcaccacttccggaaaggtcaggagccctggaaaggagaaggaataagacggcaggaggaagagagagagagggtagaatggaagaatctcacttcaattctaacccatacttctggccttctatccccacagtctcaggtcagatcgagaacacaatgttcatcaacaagatgaaggatcagctgttgccagagaagggctgtggtctggccccacctcactaccccaccttgctgacagtgcctgcctcagtgtccctgccctcaggcatcagtatggacacagagtccaagtcagaccagctgaccccacacagccaagcgtccgttacccagaatatcacggtggtccctgtgccgtctacaggactgatgactgctggtccgggtttggtaatcacatccccctcaggctctctgtgtgaccacagcatcatcagtctcagacctttcccccatttcggctcccatgatttgtctcagctcttccccctggctcacaagccctgcaggttgtccctgacctctccaagaaggtagcatcgacctaaccgaggaaggaggcgaaggtggtggtgaaggtggcagtgtggctcctaagccaccccggggccggaagaga

SEQ ID NO: 364706 - DNA, 292 bp, Homo Sapiens
tccggtgagtattttatatttagtctacacttccatacttggcttttttctgcttttatattgatctgctttcatagcagtgtgtagagtgccacttatgttttctttcttgtgtacagtattttattgtatggatttaccatcccctgtgtatttaagttgttccattctttggccattataacttttttctgcaaatattctggtgacttatctttggccattataaactgttgataatagatcatcttgtatatacttctgcaattataagatgttttttgatgaaaaa

SEQ ID NO: 364707 - DNA, 500 bp, Homo Sapiens
  misc_feature (381)..(454): n is a, c, g, or t
atatagttaatttgaaccttggaaatgagaagatgaagggaaaaagatttatatttctttttccatttcccttttcttcacttgctgcatcaactatccttactgccaactttctgagttgagctaaacatcaggggctagtctccttctttgccctttgattctgacactgtcaagtattgtaacacacaccctttctttagttagctaaggcaaaactgtgcaatacacaaggtgtgccatgctgtatttcctgcctggatccctccccacgtggcctgtattgcttggcattgctgtccccttctagcaataggaaggttggaactccagctgtggaactgaccaatattacatgactttggatctaatctgcagaannnnnnnnnnnnnnnnnnnnnnnnnnnnnnnnnnnnnnnnnnnnnnnnnnnnnnnnnnnnnnnnnnnnnnnnnnaattattgttatctaatgcccacctaacttatcatcatttaataaa

SEQ ID NO: 364708 - DNA, 429 bp, Homo Sapiens
ttcacactgggggattaggggagtgagaaaagatttgggccatgcatgcaaagtcaaagtttaaaaattttatccctttcaaatagatgatataatatacctatacatgatataatatttgtatatatgaaatctctctatatttgtttaatttgagccattcaatctaaaccaatgtacaggtgtacaatgaaaaatttaaatgcttagttatttttcccaacacagtgtaaagtcaccctcctctgagagtgggatgtgcagagttttgatgttgcagctttgctcacttcctggcaagggcaggtcatgcctcaatttgtaatgggagtctggggtaagggtgggggttgaaagttgttatctttaaatacatgtacaaatcgttgtcaaaagtaacgttattaaaatagatttattatccctgag

SEQ ID NO: 364709 - DNA, 458 bp, Homo Sapiens
  misc_feature (23)..(23): n is a, c, g, or t
cagttctgcctgaaacgcagaanttaatagtctgctctggggagacagtggggaagccgtgagcgaccgggccttttccagaggccactatttaccttgaagtttcctgttgaccctctgctgacccacccgcttaaatagattagaacttaaacatcgcaattctgatacatttatttctttgaagttctgcagcataaggaatcctaacgcgaatccgtgaacagtctattccgacggcgcagagaaatctcacgcggggatccccacgatgtgccggcgcttaacgcagacgcccgaacccaggggaaggctgcgactccgcgatgagtgacatgcgggcttgagacgttctaaaggaacgtggaccgagttagggaacgtaactgaagctcattttgtcttagttatggactatgagtccttaataaatgtatgtcattatgtttaaagaatga

SEQ ID NO: 364710 - DNA, 1224 bp, Homo Sapiens
gggggggcctggcgtgtattcgaaaggaaggcgccggctgcgggaagatggcggctcagccgctgcggcatcgctcacgttgtgcaacgccgccccggggggacttttgtggtggcactgagagggcgattgaccaagcttcttttacgacctccatggagtgggatacgcaggtggtgaaggggtcctcgccgctcggccccgcagggctgggggctgaggagccagccgccggcccgcagctgccgtcttggctgcagcctgagaggtgcgctgtgttccagtgcgcacagtgtcacgcagtgctcgccgactcggtgcacctcgcctgggacctgtcgcggtccctcggggccgtggtcttctccagagttacaaataacgtcgttttggaagcgcccttcctagttggcattgaaggttcactcaaaggcagtacttacaaccttttattctgtggttcttgtgggattcccgttggtttccatctgtattctacccatgtctgccctggctgccttgagaggtcacttctgcctttccagtgacaaaatggtgtgctatctcttaaaaacaaaagccatagtaaatgcatcagagatggatattcaaaatgttcctctatcagaaaagattgcagagctgaaagaaaagatagtgctaacgcacaatcgcttaaaatcactaatgaagattctgagtgaagttgactccctgaccagtccaagccagaaaactggatccctgtaccaaagcttgagtgtcaggttcaggctttattgctgtcttcaacaacaggtgctgcttagtcatttcttgaaaaagattggcttcaagaatggaggggaaatgcagtttctatttacctttaggctgattttccaaattatttgtgaagctgtttttagaagatgagagactaaggattcttctcttttatagctatttgccttaagaacttactttagattcttattgaattcataatacttatctctgaaaatgtctttgactgtaaatttaggaattaagatgcagagtcccatgtgtcctctgatctaaagctgcatggttggtctgaaaatagagttgggcttaatgttgacttctattactcctgcatggagcagttgttatgaatactaatacatcactttttaacttctgtaaaatacagatcataatattctataggtaatgtttaataaattgcctgaataatat

SEQ ID NO: 364711 - DNA, 411 bp, Homo Sapiens
tgcagcctctctctgatgagctgcaggctggggactgactcctcggcaggtctgcagtgggaacctgtggagacaaaagtgactccatcttggatgccactcccctgtgttgacttccgattcgccccagtcttgtgaatgccttctgatttctactttatttactgcccctagtgtaagaacatgtcaaccttgatgttactccacaaatcgtaggctgtgactcacgtagcgttcttgcctgttctggagggctgcctttggttgtcttgctggagcacgaataccctttccctatggtatctaagccttgcatctggggtgtgagaatgcagagctccacctgtcttgtggccacccaagatcccacttcggtctgtaaattccctcaataaatcacccaatattgac

SEQ ID NO: 364712 - DNA, 974 bp, Homo Sapiens
gcctgggtggcgaattcggcacgagggctcctcggggataccatcccccgacctcaccttccacctaccgcagcctgctagcctttccgggagaaaaggcatccttacctctggttgaaggtctcggggcctccccctctgcatccggaccctctccccatcccagcctcccatgccaaggcccgccttgtcagtcacttccttttgtcatcggcttggcaaacgggagagaaaacagagcttcatgggaaacagcggcaacagttggtcccatacacctttccccaagttggagctaggcctggggccccagcccatggcgccccgggagctccctacctgctccatctgcctggagaggttgcgcgaccccatctcgctggactgtggccacgacttctgcatacggtgcttcagcacacaccgtctcccgggctgtgagccgccctgctgtcctgagtgccggaagatatgcaagcagaagaggggcctccggagcctgggcgagaagatgaagctcctgccgcagcggccgctgccccctgcactgcaggagacgtgtcctgtgagggcggagccgctgctgctggttcgcatcaatgcctctgggggcctcatccttaggatgggggccatcaaccgctgcctgaagcaccctctggccagggacaccccagtctgcctcctcgctgtcctgggggagcagcactcagggaagtccttcctcctcaaccatttgcttcagggcttgccgggcctggagtctggtgagggcggccggccaagaggaggagaggcatccctgcagggctgcaagtggggcgccaatggcctcgccaggggcatatggatgtggagccaccccttcttgctgggggaaagaaagaaaaaagggggcggtgttccctggtggacacagggggatgccatgaagccctgaactgaacagggaaaacagggatcaagctctgtgc

SEQ ID NO: 364713 - DNA, 1250 bp, Homo Sapiens
cgggcggtgggggcgccagcagcgcggaaggcgggcacgcgggccatggctccctgggcggaggccgagcactcggcgctgaacccgctgcgcgcggtgtggctcacgctgaccgccgccttcctgctgaccctactgctgcagctcctgccgcccggcctgctcccgggctgcgcgatcttccaggacctgatccgctatgggaaaaccaagtgtggggagccgtcgcgccccgccgcctgccgagcctttgatgtccccaagagatatttttcccacttttatatcatctcagtgctgtggaatggcttcctgctttggtgccttactcaatctctgttcctgggagcaccttttccaagctggcttcatggtttgctcagaattctcggggcggcacagttccagggaggggacatggcactgtaaccacagcatcccatttagagactagtatgaatatgtggctgcacagctaacgaagactcagcagagctgacgatctacgtttccagggccgtcaccaatgggttccacaacttaacgtcgtggctagtactgatttggacttgtctattatgtccttgttggcctaactgtgctgagccaagtgccaatggatggcaggaatgcctacataacagggaaaaatctattgatgcaagcacggtggttccatattcttgggatgatgatgttcatctggtcatctgcccatcagtataagtgccatgttattctcggcaatctcaggaaaactaaagcaggagtggtcattccactgtaaccacaggatcccatttggagactggtttgaatatgtttcttccccttaactacttagcagagctgatgatctaacgtttccatggccgtcacctttgggttccacaacttaacttggtggctagtggtgacaaatgtcttctttaatcaggccctgtctgcctttctcagccaccaattctacaaaagcaaatttgtctcttacccgaagcataggaaagctttcctaccatttttgttttaagttaacctcagtcatgaagaatgcaaaccaggtgatggtttcaatgcctaaggacagtgaagtctggagcccaaagtacagtttcagcaaagctgtttgaaactctccattccatttctataccccacaagttttcactgaatgagcatggcagtgccactcaagaaaatgaatctccaaagtatcttcaaagaataaatactaatggcagatctgcgaa

SEQ ID NO: 364714 - DNA, 493 bp, Homo Sapiens
ggtcaatcaactgtaaaccacggggaccccattggaaaactggtttgaaatatgtttccttccccctaaaactactttagccagaagctggatggatcctacgtttcccatggccgtcacctttgggttcccacaacttaacttggtggcctagtggtgacaaatgtccttctttaatcaggccctgtctgcctttctcagcccaccaattctacaaaagcaaatttgtctcttacccgaagcataggaaagctttcctaccatttttgttttaagttaacctcagtcatgaagaatgcaaaccaggtgatggtttcaatgcctaaggacagtgaagtctggagcccaaagtacagtttcagcaaagctgtttgaaactctccattccatttctataccccacaagttttcactgaatgagcatgcagtgccactcaagaaaatgaatctccaaagtatcttcaaagaataaatactaatggcagaaaaaaaa

SEQ ID NO: 364715 - DNA, 517 bp, Homo Sapiens
gggagtacgggatggtaagagctgggttccgacagcagctcagcttaaccctctgtcctgctaacgagggaaagtgcggcggctccgcgcccagcacgcccggtaggccggagagagcggcgaggccttcggtgagcgaagagttaaccgcggcggagcgacagatcgcggagctgcacgctgccgcctgcgcggctggccagctaaactatgtggatccagctactggctatgtggtgctcacacagattgcccacttgcaaagaggtgaatgttgtggctctgcgtgcagacattgtccatatggtcaagtcaatgttaaagatccatctaaaaagaagcaattcaattcatatttttatgtttgacaagaatttcatctctgttccctaactgtgcttgtattttttaaaaaataaagccccaattcagaattgctggattattagtacttgaacactagtttaatcctaaatacatatattaaaagaacatcaataaaatgaaaaagctaagc

SEQ ID NO: 364716 - DNA, 508 bp, Homo Sapiens
  misc_feature (11)..(11): n is a, c, g, or t
  misc_feature (264)..(264): n is a, c, g, or t
aaggaaactgnaccctggtgctggaaccctggcctgagtttccgtgggcaactgacggggacctgtgctgctgctgctgaactgtgggtgggcgggcggcgccctgggaagtggctcttgctcaggaattgataggaaccctaaaaactaggataccccctcctcggcccatgaggcacgcacagtgacttatttaagacttcccccttaatttatctgcccccaggatgcgtcagtctgttcagtggtcagcaggccccccancccccgccgactgccctcgccatcgtggtcagacccccctcccaacacaacacgctgctggtctgtgtcagcctttgtaacgtgggagctctgccgtgtcttccgggtgaactgtatttggattgcgcgcattgtcacggtccgcccctgggctgcaggcgccccttcctctgggcacccctgcattctgcatccccacctctagacgctgtaataaacagactgttttcactcggaaaaaaaa

SEQ ID NO: 364717 - DNA, 958 bp, Homo Sapiens
  misc_feature (713)..(713): n is a, c, g, or t
cgaacgaccccttctgtgccgtccaatgtcctgcaagcggcggcctgtaatgcacggattttgtgcctaaggaaatgcccttggtaaatccagggtttcccttgcaaaggcacagccaagcgcgcgctttcaatggaaacttttgatttggacccaatggaaatgccttggtcaagtcgcgtcccacggggccttcttggggaacgcagcattctagggacgtcaatgctccggcgcaagggtaaccacgcgaagtcctgtgaaacaacaacgcatcccagtactgctgtccttgtccttcccctgtcccactaggctctgcggctacggcggcttacgatgacactgcttggtccccaggaaggtcaccttgccttcgccctggatgtcccctcgttcaagtggccacgcaggaccttggccagggccacacagcatcgccaaggttatgtagcgcggtctccagccatctcctgcctgcgtccttggctctgctgacctttcagcaggcctgagcagcagactcatgctagggccatcccgggatgctgcaccttctggctggctccctaccagcgcctttccctgtacctggcagcttctctcttggccccacagtcacagcactccacttggtcacaaagacttcagagcaataagaggcgtcctgagccttcagcacctcccaggcctgggatatcgggttcagaggntttgcagagcagcatgagggtggctccacccatgaggctggtgacactgacgctggcttggctaagttggctcaagccgggtctggcctgacagggtgcagtcacaccaggagcgcatggcagatgcagcctcagtgatgcctctcttgccgggtaggggctgggagtccccgtgcaccctgtctctggcccatgaggggctgcagcactgtgggcgccagagcacagattaaactctcaaaccc

SEQ ID NO: 364718 - DNA, 1206 bp, Homo Sapiens
  misc_feature (109)..(145): n is a, c, g, or t
  misc_feature (974)..(986): n is a, c, g, or t
attaatcaacactttttaatgtagtacatatatatcttacagttatttaagtcaaatatgtaaaggtttacaactgatttacagatgaagcaatcacagattgcagtannnnnnnnnnnnnnnnnnnnnnnnnnnnnnnnnnnnncacacacgccaatcaaggggaaaactgcatcctggcaattttacagtctgaagttttgttggtatatctaccatttcacatccttttcatcttgcttttctgtacaaaagatattttttgccttcttcattcctgatgagatttttctgcgataactttacattcgtacattgccagttgtcgaccaatgtttcccattgttatgcctccagcaaaaaatatacatggtaaccaagaacgaacatagaggaaatctggagatgtatattggtaaacaccattatatactaacaggtgagtgaccacagttgccaagaaggcaattcctactccaggccaaaccacttctagatctatccaaagtccaccacagtcccatggatagggcaaccagtgtgagagacaactgtatgttgttatcgaaatccactttagcactggcatgatttatacccaccaagactgctacacaccgcattacactggaccactctcttttaaatttatgtggttctcctagatgtctgtcaatgcaggggtataataaccccatcacagctgaagccgtgccacagcatgggggtacccaccatgcagaagaaaagatgcttgcaatcacatcaggtggaaagagcgtcacatttctctgaatctgaagtaaatttaacactaatgcacagaaatactcccataaaaaatagcactactcctcgaatcatcaagttcacactctggctagtgacagatgaaatatatgggccacactttttgggcccaggtgactctgtctctccttctgccatggtttcataggttcagaaagccgttnnnnnnnnnnnnntggaaaggcttcccagctgaaaagctcaactgtctgtgaatcaaagactgacgcttcaacggtaccacatcttgtcctaaagtaggacctaccagaaatcccccgcctccgccatcttctgggaccagcccccgtaccccctaccgcctcttcctcctccactcccacaactccgcccgagctccactgcgcctgtgcggccaaacgaggccgcgcgcag

SEQ ID NO: 364719 - DNA, 1065 bp, Homo Sapiens
  misc_feature (48)..(96): n is a, c, g, or t
  misc_feature (1036)..(1036): n is a, c, g, or t
  misc_feature (1050)..(1050): n is a, c, g, or t
cccgcgcgcgcggcaccttcccgaacggatagtaggtgggtgctactnnnnnnnnnnnnnnnnnnnnnnnnnnnnnnnnnnnnnnnnnnnnnnnnngccagatattgatgcgagcggccccggaattcctgcgatttttgctggagcataacaatgggaacattggtcgacaactggcaatgtacgaatgtaaagttatcgcagaaaaatctcatcaggaatgaagaaggcaaaaaatatcttttgtacagaaaagcaagatgaaaaggatgtgaaatggtagatataccaacaaaacttcagactgtaaaattgccaggatgcagttttccccttgattggcgtgtgtgtatatatggaataaatatatatatacacacacacatattactgcaatctgtgattgcttcatctgtaaatcagttgtaaacctttacatatttgacttaaataactgtaagatatatatgtactacattaaaaagtgttgattaatagatgaaatttttaaattaattttttaaaacatgccacacattgtatcacaatgttaatgtgccaagatattgttcctgtcatgcagagtataagaatgctttgaacaatttgtagacttagtgaaataaaataagaggaaagccaaaaacaaacaaacaaaaagcatatggggagctggtattttctctttagcttactgttgtgcctttttatttttctaatcacagcagtatgagttatgagtgccctaatttgtggttagtttctaatttaatgttgtttcatagagtttggagtgttttgatacagggtgaaaatgaacttctggtttcaaacctgcgttactggagacagcccaaagagtaattttctgttttgacaggttttactgggaagtatatgtgatgagcagaagaggttatcaggcattaaattgttttgggttctaaatttgggaacagtatatataatttaaaagtaagggaacctttagagggattttaattaggaataaaataccatgtttttggggaatacngtgaccccttggcngtgtccccaaaagtg

SEQ ID NO: 364720 - DNA, 584 bp, Homo Sapiens
  misc_feature (531)..(531): n is a, c, g, or t
  misc_feature (556)..(556): n is a, c, g, or t
  misc_feature (567)..(567): n is a, c, g, or t
tttggagatggagcccaagatgagcaaactggcctttggctgctcagagaagttccacatcagatgatgactctggctgtgcattggaggagtacgcctgggtccccccggccctgagaccagagcagatccagctctattttgcttgcttaccagaggaaaaagttccttacgttaacagccccggagagaagcatcggattaaacagcttttgtaccagttaccaccacatgataatgaggtacggtattgccagtctttgagtgaagaggagaaaaaagagttgcaggtgttcagtgctcagcggaagaaagaagcactgggaagaggaacaattaagcttctgtccagagcagtcatgcatgctgtgtgtgagcagtgtggtttgaagataaatggaggtgaagttgcagtgttcgcctcccgtgcgggccctggtgtgtgctggcacccatcctgttttgtctgtttcacgtgtaatgagcagctgtcgacctcatcaattttacaggatgaaattcctgtgcagnccatgcagactgtcaaccacggtgncacatgtacgnatattttgcgatgattc

SEQ ID NO: 364721 - DNA, 286 bp, Homo Sapiens
cctgtttaccgcacaaactgaccacatggcatgtctatcaggatggagggtgtccatgttctcctctgtctttagggaggtgataaggagatgggcggaggggtgtttttttctttgactcccctcctttctaacagaatgttgccaccactgcttgagtgggctgtgtttgttcctctgtcccagcttctgttgtagaaaataacattgttaggggaactcaggctagtgtcagcgtcttggtttggggagaaaaaattaaacctttcggtttttgtttcaaaaa

SEQ ID NO: 364722 - DNA, 373 bp, Homo Sapiens
  misc_feature (29)..(30): n is a, c, g, or t
  misc_feature (37)..(37): n is a, c, g, or t
gcctctctcgggcccccgggggccccggnnactttcntaagaccttcccctatcccttgctcctcgcccggtccctggcagagcctttgcggcctgggcccgccctgcgccggctgcccttggccgacggctggccccggtaggagatcacccggtggcaccagcccagagcgctcgccaggtacggcgagggcacgtggggaccccacctccctccaggcctcttcagagaagacccaacagtgacgcccccctccgcggtgggggcttggaggtgggcggctggactcaatccaccctggggggctcctttccttcttcctatttgtgtgtatatccacaaataaaacgcgcgtggcgtccgtggaccaga

SEQ ID NO: 364723 - DNA, 358 bp, Homo Sapiens
  misc_feature (22)..(22): n is a, c, g, or t
  misc_feature (69)..(69): n is a, c, g, or t
  misc_feature (83)..(83): n is a, c, g, or t
  misc_feature (87)..(87): n is a, c, g, or t
  misc_feature (89)..(89): n is a, c, g, or t
  misc_feature (93)..(181): n is a, c, g, or t
tcattgactctggtcactcttnctgtgcactaacatgtcaaaaccttcaatcctcctccctttaaaaanaaatggcctttaanaaananaaannnnnnnnnnnnnnnnnnnnnnnnnnnnnnnnnnnnnnnnnnnnnnnnnnnnnnnnnnnnnnnnnnnnnnnnnnnnnnnnnnnnnnnnncaacacttctgggacctcacgtggaattggtctctctgaggtagtggagatgctaagtagtgggatttcctcattccacattgtaccccatgaatgaatacaagcatgatttgccaattgaagcaatacaataaagacagaagaaatgtaaaatgcaggaattgtggcttgaccacc

SEQ ID NO: 364724 - DNA, 382 bp, Homo Sapiens
cttggttaccaactaaagtttaatcacaattataaaaatgtggcgtcgggtttgcgctattaacatatgtaccaatccagcccagcaaaagggacccaccccgccatcctggcctggctgagccggggagtgacaccagggtggaagggtgaccctcagggtctggcaggaacagatgaggcagggttccaggcacggagtccccaggactgggggtgcagagcccccccagggggagaacatggccactgccccagagacccctaaactggggaggggtacacgcagggcgtaaggggaagtccccattaacacaaagcgagaggactgtgtagccccccaggacagaatctgtacaggccggcaccccaggtttccacag

SEQ ID NO: 364725 - DNA, 970 bp, Homo Sapiens
ggatcaccgccgtgccttcccagcccctgctcgaccgctccatcccagacttcacggcctttaccaccgtggatgactggctcagcgccatcaaaatggtccagtacagggacagcttcctcactgctggcttcacctccctccagctggtcacccagatgacatcagaagacctcctgagaataggcatcaccttggcaggccatcagaagaagatcctgaacagcattcattctatgagggtccagataagtcagtcaccaacggcaatggcatgagaactcttgtttcttggggaaggagaggagggaaaaggaccagggtcaagggggaccagaggttgaccactgtggaatgtactggagagactggcttctcagctgaggaatgcatttccatcagtgaagaatcaaccggacctgttgctagcaggcaatctccatttctcagtgacagaagcatgtttgagatgccgtgggaaaccaaatatataataataaaaatataaaaaggtgatgttcaacagaagtgaagacaaaacaatatgcatcaggagaacaagagtaaacccagctcccactctcagtgggctgcagttgcccaaccacaggaagaaagggaaggaggtagagggaagaaacagaagcagtgttccattttcttcctcaccaatgacattcttttcttttctcctttcgtactcctccctgagagtcccctcccttctcccacactcgtttccctttggctcatgactcctgtagggaagtttcttcaaacaaaacccagctcctgagtctccagatgttgttctgtcagttgccaaaggactttgctgaccactgcatggggatccaaccaattcaattaatgtcttcatattgaagaagagatgtaccttcaattgaaaacctcgtttttcttttgtttgcattttctgcaaaaaggaaaaagaaacaacaaattgggg

SEQ ID NO: 364726 - DNA, 461 bp, Homo Sapiens
ctctgccctcgatttgcatgaagttgaaaattgttgcgatttattttttcaagagatcatgtttttaaagtgtcttttgcagagttttaagttgttctgtctgaactctgctgtgatcccatgatgtgaccctgatgggctggacttgcccctccggtagccttccttggccctcccagcgaggggcacccttcctctgtgccccagtgggcatcaccgtcgatctcgctggctgaatgaagaagaccgtgttactgcagaacctgccaagtctgtcatcactgtggggtgtagcctgcctcagagggacctgcaatcacctctctgagctcagtggtattttgagaatttaatgtttaactgtacccctttccctcaggaagatttaacatttgcttgggaatgtgattttgctcccaccctaaggaatttttatcaccaaaatgaatgttaatgaattt

SEQ ID NO: 364727 - DNA, 1094 bp, Homo Sapiens
  misc_feature (447)..(568): n is a, c, g, or t
  misc_feature (621)..(629): n is a, c, g, or t
  misc_feature (643)..(736): n is a, c, g, or t
  misc_feature (746)..(754): n is a, c, g, or t
  misc_feature (793)..(834): n is a, c, g, or t
  misc_feature (840)..(897): n is a, c, g, or t
  misc_feature (899)..(959): n is a, c, g, or t
  misc_feature (967)..(975): n is a, c, g, or t
  misc_feature (1027)..(1039): n is a, c, g, or t
ggtcgtgtggctcagcagttaaatccaatatgctaggtagtgtaggcatctgcccctacacacacacacatgcataggtacacgcacgcacagacgctgtcccttctgaagctcagtgtccatcctgagccacccacagatctttctccggccccctagaagccctctcctcactgcagccctggtgctctggggaaggaggggcattgacaggtggtttgactgtacacccaacagccccgcttccccactggtttctctcctggctgccggcggaggtaggctgggaaagcttccccctcacctaggccgggccagccccgccccgggccccagaggtcccctgcatcccccttctttgccttgcctgggttctcaggcagggcccctgctgtgtccgtggtgctgttgtattggtcactaacggaataaagagttaatatctcnnnnnnnnnnnnnnnnnnnnnnnnnnnnnnnnnnnnnnnnnnnnnnnnnnnnnnnnnnnnnnnnnnnnnnnnnnnnnnnnnnnnnnnnnnnnnnnnnnnnnnnnnnnnnnnnnnnnnnnnnngggggggccccttaaaaaattcccccggggggcccaattttgcccccaccccnnnnnnnnnaaaaaagggggccnnnnnnnnnnnnnnnnnnnnnnnnnnnnnnnnnnnnnnnnnnnnnnnnnnnnnnnnnnnnnnnnnnnnnnnnnnnnnnnnnnnnnnnnnnnnnncccttttttnnnnnnnnnaacatttggccaacacccccccccaataattaccccctnnnnnnnnnnnnnnnnnnnnnnnnnnnnnnnnnnnnnnnnnncccccnnnnnnnnnnnnnnnnnnnnnnnnnnnnnnnnnnnnnnnnnnnnnnnnnnnnnnnnnnannnnnnnnnnnnnnnnnnnnnnnnnnnnnnnnnnnnnnnnnnnnnnnnnnnnnnnnnnnnnacagggcnnnnnnnnnggggccccccacaaaacccccaaagtggggtgggtgagggacaataaaccgnnnnnnnnnnnnntttttggaggagggatttccatcctttgattaaaataaaaacaatctacaaattt

SEQ ID NO: 364728 - DNA, 582 bp, Homo Sapiens
  misc_feature (497)..(497): n is a, c, g, or t
  misc_feature (526)..(526): n is a, c, g, or t
tgtctcgctcttcctccgccccccgaccacacccccttaaagggccagcccctctacaggcccctctcccctactccgcccccgggcaggggtaggggagggtctattcggcagggggtggcctagctgtccgtactccccaaacgcaaccttccagtcccaaacccaggcgttctaagcgctcaggacgacgatttgcgctcacgccaggaccctagtcttcattggacccttcctcattctgtcctcattgaggccatctgagaataggggctatctgagaatgcaggggagtggacatcgtgtgcagacagggagtctggtgaggagacgctgcggtccccgatgtccaggtcctccagccctcggccagcgaggagcgaacgggctcctccgcacggaccgacacgtggactgggctcctgggaaaggaagagtggagaaaggcgggcaagagctgttccgggtccctagactctccgagtaagcaggtccangccccagcgaagaagccgggcttggggtnaacggtggacccggcgggccactcgtgcgaatttttggctcaaggcaaatttctat

SEQ ID NO: 364729 - DNA, 334 bp, Homo Sapiens
gcggccgcgctgctccgaggccgcctgctgctccagcagctcccgcagctgctcctcctcccggcgagcggccactcgctccccagccagctcaccccgcagcaaggccacctccacctccatctgcggagagaatgccagggctgggggctcggacgcctaggtccaaggaagaggcccagggcctgaactaccggattcgaagggaggatggactccagggacctgaatttggagggaggaagagcggagggcctaaaatctgatcccacccgaggaaaaagctgggagtccggctttgcgggttccgcttgagttggggccaggcttccca

SEQ ID NO: 364730 - DNA, 1042 bp, Homo Sapiens
gttgtcccccctccacttccgggctgctggggagggggaccgggcggcctctctcctccctcttcccctgccacctgtctcataggcagaagcggccgtgcccagcgcgcagagcggagcgcgccgaagcctgagctcgtgagggggccgaggctgtggggaggtggcagttggacttcggaatctcaaggactccgactcctggcttgttcagagaaggagagccccgactcctggatccctgggagtcccagcggccatggggacgcgaagcagccccgaggaggggaccccgccgccgctggtcccggaatgcgacgtggaggtccagccccagggccatcccgaggagtcccgggaacaggaggcatccgaagtcctggcggaaccttcgagccgcgggggagctgagcagcaggcagaggaagaagaagtgggagaaggcagcagcactgagagcagccgcgacgcgcccgaggctacgcctccgatagctatggcggccacacctcccgcatccacctcttcgcgggaaggggtgcgaggggcggcgcggcgcctgcaaggacagcagctggaggcattgactcgtgtggccctgatggagcagcgagtgaaggagctacagcgccagaggaaggagctgaggatcgagatggaggtggaggtggccttgctgcggggtgagctggctggggagcgagtggccgctcgccgggaggaggagcagctgcgggagctgctggagcagcaggcggcctcggagcagcgcgggcgccagcagcgggaacaggtctgtttggctcaccgggtcttcatcagcagtgtccttcctgggtccatgggatgttggtggtgctcctagccacctgcggcccccggggttgtccccaatccccaaaggaagacatttgggctcccggaaaaaaagggagggggccaaatgcccccccctgggttttccttcctcccctcccgtggggcagaattttctggggctcctcccttttggtcccccgggccgcgtggcgccattccaagc

SEQ ID NO: 364731 - DNA, 769 bp, Homo Sapiens
ccgagaagcccggactggagtatctgagaacatatttcttccctataggagttgagaagaggaggaagaataatgggaggagacaggacctttttcaacttgacaaatagagtcaacttttataacactgttactgggaatacttgacttactaagcttttactgaacactttaattttgggagtacaatttctaaactcacgaaataatcttcatgcaacaagatgttattttatcaaattttggtattacatgctcattctttgacaaattttaattaacagatttctgagagagcagacaccatcttatttctgttgaattgtatttagtaactcaaaaggcatataccaagctgtcagaagcagcttcatttaaaagaaataaaatttctagtcctgcctgaagtttaagctagcccatgactacacaagtgcaactgtatttcccaggtagatgccggtagattgggcccagtaagtttgggccgttgggatgtgaaaggaagagatgcgggcaactttttgggtcatcttcttaaagaaaaagccatttgtcctggatgccctcttttcttttttctctttggctgggaaatgacaagaattaaagcagcagccttggatccagagatggacgccaattgatgaagacagcagaactgactggctagtctgggttccctggagcagagctgtctctccaccctaggttatccacttacttttgtactgttatgtgagagagaaataaacttctatcttctttt

SEQ ID NO: 364732 - DNA, 396 bp, Homo Sapiens
gggcagcatccgagagcccggactggagatttctgagagagcagacaccatcttatttctgttgaattgtatttagtaactcaaaaggcatataccaagctgtcagaagcagcttcatttaaaagaaataaaatttctagtcctgcctgaagtttaagctagcccatgactacacaagtgcaactgtatttcccagaataaaagcagcagccttggatccagagatggacgccaattgatgaagacagcagaactgactggctagtctgggttccctggagcagagctgtctctccaccctaggttatccaccttacttttgtactgttatgtgagagagaaataaacttctatcttctttagaaacgccgccctcctttacataaccccccctgg

SEQ ID NO: 364733 - DNA, 479 bp, Homo Sapiens
ctaacacagaatcctcctcggccggcaagctgcactttttccccgttcctgtgacggtttctggtgaaatcatgaaagtaggtgcagctgactgccccacatcctgcagagattctaaatgggaatcctcacttattcctttttgtgtttgtgcaatttccatgtctttaattggaactggtgttgcctctgtttctgagagtggtggaacatctttggctggagtcacattgttggccagggtcagaaccccatccttagccaggggtgcttctgttttgagggctgggacctgatcctcagtcagggccacctccatttctggaggcagacatacgttcttgatgagaactacttctgtttctggaggtggagtcacatccttgcccagagccatttctgtttctgatagtggagacatgtccttcaacaagcccacttcttttactgtggacggagccacatccttggccggggct

SEQ ID NO: 364734 - DNA, 465 bp, Homo Sapiens
  misc_feature (135)..(151): n is a, c, g, or t
cagtgtctcctctggctgtcctgtttgtttgtttctcatatgggggtggggggtacctgcactgtctgtacctttctgagaagaacagagaccgagacctgcccccttaccaagcgccactgcatggtttgggtnnnnnnnnnnnnnnnnnctagcttctcacagcaggaggcctttgccccacaagcccctccacgcctgcctcagggcctgagaagccaccacttgcatcccccttgtggttagagtcctgattttactgcaaaggtgttcatgttccttgtgaagtgtgggctcttaggaagcctgtgggctcctctgagcagttggcctttgtagctgcaacagcagccacctgcaggttgggtgaagtgccctgacactgctgtagcccccttctaacttctaaccgaagacaagacagacacccatgttcttaaataaataaaagtaagcctaagcaaa

SEQ ID NO: 364735 - DNA, 508 bp, Homo Sapiens
  misc_feature (62)..(62): n is a, c, g, or t
  misc_feature (193)..(193): n is a, c, g, or t
gccattgccctcatcaccacctgctgcaaggtgaagatgcgcaaacgctacagcgtggacanatctctcagccacccctgggttacaggagtaccaaacgtggctggacctccgagagctggaggggaagatgggagagcgatacatcacgcaatgagagtgacgaaagcgcgctgggagcaagtttgcagcnagagaatccgctgcctgggtctgggctgcccacggacagggatctcggtggggcctgtccaccacaggaccacgacatgcaggggctggcggagcgcatcagtgttctctgaggtcctgtgccctcgtccagctgctgccctccacagcggttcttcacaggatcccagcaatgaactgttctagggaaagtggcttcctgcccaaactggatgggacacgtggggagtggggtggggggagctatttccaaggcccctccctgtttccccagcaattaaaacggactcatctcgggccccatggccttgatctc

SEQ ID NO: 364736 - DNA, 1286 bp, Homo Sapiens
  misc_feature (48)..(84): n is a, c, g, or t
  misc_feature (325)..(325): n is a, c, g, or t
gatgatcactcactatagggcgaactggagcttacgcggtggcggcgnnnnnnnnnnnnnnnnnnnnnnnnnnnnnnnnnnnnnatcaggccaaatcggccgagctcgaattcgtcgagagcggggggtgtccccgtggtacggccccaccggccgtaaacaccggggacgcgcgccgacaggcggagagccagcttctgccttaaagatcacccgagagctgagaaacgtgttgccaaaagaaattgcacaaaaatagtcgcactagtgagctctgggtggcggggtgattgtgagcagtttttacgggctaccgtggctcctngtttttcacaaagtattaacaggtgggtttaaaacgtcagggagcacacaaaacactcagagaagccgaacaggcgccccggggctgccgggagggagacggaagctggcgggacagcgcccttcagatggcgcggtacgctgtcgatgagacctcaggtttttaaaaacagtctttaaacttcgaccctacaccataaggactacgtcgggtcaaaattacttctggtcagccgcgggccccaggtcccagggctgagcaagtccggtctgcgacaacacgaggctctcccgtgacggggcctagcccaaggctccccccgcagatctcctgggattcagaactaccaaatcgccggcagacagatctccatcagaggaagcctgtgacggccgccaggataaaataaaaaggacaatggcaagtgatagcaaagacgtagagaagctggaattctcctaaatccttggtaggagttgtacaatggtgcagcttcttctataattcagcatccccgaccaaacgcccttggaaaccacccaagagaaaaacgaccagagagacttgcatgcaaacattcctaacagcattgtccacgccaaccagaacgtccaccaaccgcggatgcatgagcagcagggaaatggccatgaaaagaaactgctgagacatgggcctacatggatgaacctcaaaaacgctaggccaggtgaaagatgccagacaagaaaattccattattccatttatgtgacacttcttaaaaaggtaaatctctagagaggaagcaaattcatgtttgcctgggggtgagagtgggatcaaatgcaaacaggcacgaaggaacttttttgggtgatgaaaaataaaactttggatgtcgaacatattttgaaactagattgcaatgatagttgcataactgtatacatttattaaaatcgtggaacacttaaaaaaa

SEQ ID NO: 364737 - DNA, 539 bp, Homo Sapiens
tctaaggtccctggagggaggctctgctttgggagggggaagggagctaacattgcagagcaccaactgtgaaccaggtacaatggcagagcctttccatacctgtactcacaactagcgggtgaggagtcaaggcaaataggtgtctcatagctccccatatctcggcagtcgaccacctcctcctttgattctctgatgtcactgccagttctcctcctattgctctgacctgtctttctctgtgtcctttgcaaactcattctcaactccttagactcagtcaagtcccccagttacacacttccatggtactatatatcattccttcagagcacttaacacagttatttcctatgtatttgtccagtcatttgaataatgatcctagtttcattggatggaaagttccacaaggtcagtgaccatttctatctgtgttcaccaatgtgttcccagtgcccagaaacaatgcctagcataaagcagctgttttgtaaatacttgttcaatgaatgaataaatgacaaaagaacatc

SEQ ID NO: 364738 - DNA, 977 bp, Homo Sapiens
agcggactctgggagcacagagagctcaggtagcctgcctagatgtgcggctgcgcaccctgtggccgcggccgtcgggaggctgctgggcagcctgcgagggctctcggggcagcccgcgcggccgccgtgcggggtgagcgcgccgcgcagggcggcctcgggaccctcgggcagcgctcccgcagttgcagcagcagcagcacagccaggctcgtatcccgcgctgagtgcacaggcagcccgggagccggccgccttctgggggcctctggcgcgggacactctcgtgtgggacaccccctaccacaccgtctgggactgcgacttcagcactggcaagatcggctggttcctgggaggccagttaaatgtctctgtcaactgcttggaccagcatgttcggaagtcccccgagagcgttgctttgatctgggagcgcgatgagcctggaacggaagtgaggatcacctacagggaactactggagaccacgtgccgcctggccaacacgctgaagaggcatggagtccaccgtggggaccgtgtagccatctacatgcccgtgtccccattggctgtggcagcaatgctggcctgtgccaggatcggagctgtccacacagtcatctatgctggcttcagtgcagagtccttggctgggaggatcaatgatgccaagtgcaaggtggttatcaccttcaaccaaggactccggggtgggcgcgtggtggagctgaagaaaatagtggatgaggctgtgaagcactgccccaccgtgcagcatgtcctggtggctcacaggacagacaacaaggtccacatgggggatctggacgtcccgctggagcaggaaatggccaaggaggaccctgtttgcgccccagagagcatgggcagtgaggacatgctcttcatgctgtacacctcagggagcaccggaatgcccaaggcatcgtccatacccaggcaggcta

SEQ ID NO: 364739 - DNA, 1266 bp, Homo Sapiens
  misc_feature (55)..(87): n is a, c, g, or t
tgatgtatagactcactatagggcgaccttggatttcacgcggtggcggcgcatnnnnnnnnnnnnnnnnnnnnnnnnnnnnnnnnnatcaggccaaatcggccgagctcgaattcgtcgagagcgggcaggcgcagtcccgcgttccctcggcggctgccggcgtagtgagcccgccgccgtggagtgtagcggaaagggctcgccgtcctcctccgtttctcgctgcttcgggacgcgctctctgcggctctgtgagcgcccctgagcgccggcagcggccgcggtgggttcttcaggttatcttatgatgaggcttttgctatggctaatgatcccttggaaggcttccatgaagtaaaccttgcttcacctacttctccggaccttcttggtgtgtatgaatcaggaactcaagagcagactacctcaccaagtgtcatctaccggccacacccttcagctttatcctctgtacctatccaggcaaatgcattagatgtttctgaacttcctacacaacccgtgtattcatcccccagacgtttaaattgtgcggaaatatctagtatcagctttcatgttacagacccagccccttgctctacctctggagtcacagctggattaactaaattaactacaagaaaggacaactataatgcagagagagagtttttacagggtgctactataacagaggcttgcgatggcagtgatgatattttcgggttgagtactgatagtctgtctcgtttacgaagcccatctgttttggaagttagagaaaagggctatgaacgattaaaagaagaactcgcaaaagctcagagggaactgaagttaaaagatgaagaatgtgagaggctttcaaaagtgcgagatcaacttggacaggaattgggaagaactcacagctagtctatttgaggaagctcataaaatggtgagagaagcaaatatcaagcaggcaacagcagaaaaacagctaaaagaaggacaaggaaaaattgatgtacttcaagctgaagtagctgcattgtagacacttgtattgtccagttctccaacatcacctacgcaggagcctttgccaggtggaaagacaccttttaaaaaggggcatacaagaaataaaagcacaagcagtgctatgagtggcagtcatcaggacctcagtgtgatacagccaattgtaaaagactgcaaagaggtaactcatcaaggactgtcccctctgactctgttgatacttgttagttctca

SEQ ID NO: 364740 - DNA, 455 bp, Homo Sapiens
tcgttaactcttgggcagtggtgagcacgagatgactttctgcagcgtttatcactgttgggtggagtcacgtcccttccctccaccaaagtcatcaaccagatagggaagggaaagatgaggcccagaaaacgagttcaaactctaggtcttgtacacgtatgtaagtaaatgtcaataacccaagcctttgtcatagcagtcacttggttgacttaggatctgggtctgttgaattttgtgcttgggaatggagctggagggagtggggcctgtgtacagcagctacctctcccaggtcctctcacttgcctgccccgcgtcctggttgcatggccgcacctgtgtgtgtgcaaaggtctgtgtcccatcctctgcacctcctttccgggggcctggggagccccacgtgttgccaagatcttggtgcaataaaatactccggttttgtgaaa

SEQ ID NO: 364741 - DNA, 483 bp, Homo Sapiens
gcaactgcatattgaaatttgttaaagcactcatctttatggaaattaatcattatcctaaagaagtgtttctctcccatcatccggatttctggttgtggcccagcaattaacaaaaacagcttcaactgttcgaattttatgaaccaatgtaactctggcctcaatcatattcctctggggatttctaaacagcagttaagctacaaaaagcaaacaaaaccacacatattgatggagtctgcattccaccacatatccacccttgagaagtatgtcaaaagactgcagactatagatttttttaaatataggattataaatcagctagtgaaagacctcagagcagttgtaagtagatctgccatctagaactcatattctaaagggaagtgatttctcagaacagtgatgttctggaatatgtattatttattttaacacttttttaataaaatctttattataaaccatgaaaaaaaa

SEQ ID NO: 364742 - DNA, 422 bp, Homo Sapiens
ggtggctccccttccccaaaccttaaaagtggctgggagggtaacaaaagagggcctgcccctttagtctcctgcaacccctgccccctggttcacccagagggagcggatgaaggatggcagcatctcacatgccccatcaccaactttgaggcacctggggtgggggggcggagcccaggcctctggctgctcccctgtgggagccattggaatgtatcccctgacaggcccccttccgcctccacctcaacccaggtcttggatttcaggtccctccacccccattctgagtctctgtccttctccttccacccgctcccagggtttcccaccacagggtctggaagtgtgtgtgacgcccattgagctgttacccgaagtcagattaaaaatcagggagtgttttccctcgtttctgt

SEQ ID NO: 364743 - DNA, 439 bp, Homo Sapiens
aaggagatgttgaggtgggtggccgactcgtagtactcgatcatgtcgaagagggccgaggcaccatcttcatccaggtttgtctgctccaggtccacgaccttgaactgcagcctcttgaagacctcttccagggcctcacaggtcttgtagtcaagcttctcacctttcaggtccagacagtcgaggcggtgcccgaggtctgtgaattcctgcagctgcctgaggagcttagggatctgcctgcagttcagcttctggcaggcctgcttgtaggcgacgatgacctcgtccacggtcacattctgggcatgtctccaggggtctttgggctccactgctccagacacgatatcctcgtcggacgggaatgtgacgcgcttggctgcagccttgatgcgcccatcggcggggggcgacgcggggctgggagacccgg

SEQ ID NO: 364744 - DNA, 1812 bp, Homo Sapiens
  misc_feature (25)..(25): n is a, c, g, or t
  misc_feature (1041)..(1064): n is a, c, g, or t
gggatgagtgtctacaacgtggggntcatgtgcatcatcggggccgctgtctccttcctgacccgggaccagcccaatgtgcagttctgcatcgtggctctggtcatcatcttctgcagcaccatcaccctctgcctggtattcgtgccgaagctcatcaccctgagaacaaacccagatgcagcaacgcagaacaggcgattccagttcactcagaatcagaagaaagaagattctaaaacgtccacctcggtcaccagtgtgaaccaagccagcacatcccgcctggagggcctacagtcagaaaaccatcgcctgcgaatgaagatcacagagctggataaagacttggaagaggtcaccatgcagctgcaggacacaccagaaaagaccacctacattaacacagaaccactaccaagagctcaatgacatcctcaacctgggaaacttcactgagagcacagatggaggaaaggccattttaaaaaatcacctcgatcaaaatccccagctacagtggaacacaacagagccctctcgaacatgcaaagatcctatagaagatataaactctccagaacacatccagcgtcggctgtccctccagctccccatcctccaccacgcctacctcccatccatcggaggcgtggacgccagctgtgtcagcccctgcgtcagccccaccgccagcccccgccacagacatgtgccaccctccttccgagtcatggtctcgggcctgtaagggtggggggcctgggcccggggcctcccccgtgacagaaccacactgggcagaggggtctgctgcagaaacactgtcggctctggctgcggagaagctgggcaccatggctggcctctcaggaccactcggatggcactcaggtggacaggacggggcagggggagacttggcacctgacctcgagccttatttgtgaagtccttatttcttcacaaagaagaggaacggaaatgggacgtcttccttaacatctgcaaacaaggaggcgctgggatatcaaactggcnnnnnnnnnnnnnnnnnnnnnnnnccacaaaaaacctctagaacacgagggagaagagaggccctctaaaaacccccgcgtgggaaagctccccgggaggggccccaagccacccctgggcgaaaagagaggccaggggagccttctcggaaagaaaagggccctccgtggcacaacaacaatcacgcgggcctgggtgacaccccttcagagggctaagccccctgttcctcgcaacctcgggggagaagagaagggtgggaagagggccacacagaaggccccccaactgtgccaaggcccaatgtgaaccccagagccatccgcgggaaaacaggggagagctccggcaggaaccgccaaacagggggacccagcccccgtgggacaccaggacagcggccgcggaggggcgcgaggcgcgcaactggtgccacgcaggccggaaactctaacactggcctcccaaaggggggcaacccggggtgttcaaccccaacggggaacagtgcttggacaacccctcgggggaaaacggccccaacagggttaacacgagaagagagacaccaccatttcccgggggaaccacgcggggagaaatacagagggggccagcgagccacctggcccgagaacacacgcctccgtgcggacaaaatcgacgagaagaagctgggtgacaatgacgacccccaaacaagggttggggacaccaggccgccaggatggttgcaccaaaaagcgagaagtgaccccccgaggtcaaccc

SEQ ID NO: 364745 - DNA, 1379 bp, Homo Sapiens
  misc_feature (222)..(276): n is a, c, g, or t
  misc_feature (288)..(480): n is a, c, g, or t
gctgggtggcgaatcaaaacgaggggcaggaaactttgggttacccaagaatggtgtccactgctgcggaggaactgccttcagagaaggtggggctggaaaagggttagaagcctcctagctgggattgtctttgtttcacctttctttaaattagaattacagaagcccctgcccagtgaacagataacgattggtcttatgctcctccctttcccccannnnnnnnnnnnnnnnnnnnnnnnnnnnnnnnnnnnnnnnnnnnnnnnnnnnnnnagacagagtcannnnnnnnnnnnnnnnnnnnnnnnnnnnnnnnnnnnnnnnnnnnnnnnnnnnnnnnnnnnnnnnnnnnnnnnnnnnnnnnnnnnnnnnnnnnnnnnnnnnnnnnnnnnnnnnnnnnnnnnnnnnnnnnnnnnnnnnnnnnnnnnnnnnnnnnnnnnnnnnnnnnnnnnnnnnnnnnnnnnnnnnnnnnnnnnntgagccaccacgcccagcctcttttgctgtttcattgctgacagtgttcaacaatatgccccatctttatatatcctaagaaacactaatcctaggttattgctagccaaaatatttttgtcctgagtagtgtcactgggccaaaagatagatcaggacgacagcctttagttttcctgaaatcaccaggtcaggcacaaggagaaaaggttcctggatactgactaacttgggtgggtctagccaggagaaagacagtaacatgtgttctgtactttctgggaagatccctgaagccatcacagaggctccccaacttctgagtcgcccatctgttgctgtgggagtgtgaacggatcgctgaaggagagggagctttgctctctctaggtgggcaagtttcctgggctctctgtgttgcctccctctggcttcttcctcccgtgccctctccccgtgtgccccagggggatcagggatcctcaccctcctgaggcccagtggggaagaatgaacatggcttcatccaggttaactgatgctgccatttgcccagcctcttccatcccagccctgtcagtgagcccaggtctggtgcaactgctgcaggatgcctgtagtagggaactctggaagtgtattgggctgaggtgggattttccctccccacagtgcactgagcaatggagggtggtgagggagccatgctgctgaattctggttggcatttccccattatgtaaaatggggtgttgggtagggcagactctgcttgggtttggttgtaagataaacctggaggagaagcacagttgtcccattgaattatttgagcaaaaactactgtaaataacttttttgtcttttgtcaaataaaatttttttttgtttttttaagc

SEQ ID NO: 364746 - DNA, 159 bp, Homo Sapiens
gcggccgcgcgtcccagagagccagccccggccgccgtcgcggggaagtgccgcctggtggggtcacggcgcctgaagcccacgtgcgccgccgagcccgaggtggcctcgagcgcggcggctgacagcacagcccgcctgagctgcctcccgcgctcc

SEQ ID NO: 364747 - DNA, 448 bp, Homo Sapiens
agcgccctcttctcccccaggcttgtaaatagacttccaatcaccaggccagcccccacacaccctcactcattcccagggaagccccaggtaggtggtgaaccccgctgcccacgtctatcagtcctcttgttttatgcaaagatttactgtaaagtagatttctttccctccctcggcccaatcttttattgtaaatattgtctctaaatgtgtaacatattataaagaatttataaggatttttaaagatgttttgctcatttacaaaagtgttgtaacagtgttggacaaagccttccaccccatgtccgcatggctcctttcactgtgtccttgacacacctctctggcaacaactaaaatttcctgcttctgaaaagtcctgtcttaaaagtacagtctatatcttggaaataaatagctttcctcaaggcatgaaaaaaaa

SEQ ID NO: 364748 - DNA, 553 bp, Homo Sapiens
tcgctcactcccaagccaccatttgagagggaggggtgttggtgccctgacagggactgggcagggtgtccaaacttggggcttcccaggcacctgcagtgtgaacactgcttggctggctcaagattagggccgcggagggggctgtgcacataccagttacttaagcagccacgagtgtcccccatgccttggtgcgggtcctggaggcctcttgggggtgggacctttgggcagggtttgcccactgacacgcccgccatggggcactggctgcatggggctccttggaccctgtagacccagcagaccccgcctgtgtcaggccagctgcccgaaggcacttggctgtggtcccaggggacggctctgctggcacactcaggagcctggccgcggggactgcagggagggtgcctggacccgtggggttgcttcattgagataaagcacacttatcacatagcacaaaggacgtgccatggtgctttccccaaaagttgtgttgcttttatcagttttctaacttaataaaaagagttgagaaaaaaaa

SEQ ID NO: 364749 - DNA, 531 bp, Homo Sapiens
cttgagacttgagtctttaataacaaagcatcaatattcactaaagtcaatctcttttgagtttctgtgacttggctagaagctcttgacactaagggattagtgttaattttccctgggggtgttccactagggcattactgtataatgacttgatgttgccacatagacttcaagatatataatattttgaggattttgttgattggcctatgttttattgcatagtgtgaaacgtgtaaagcttggttaacctgtatatagatagcttattgttgactagttatagtgtatttagggttgcctgtaatatttaagcttctttactgatgtgtgtgctggtaggaacatataatttttgtacattatatttactgagatgttgccttttttattttacaaatactttggaattccaatgtgttttttgcttccgtgaggattaatttggaaaggtttttaatgacattccactgatttcagattttgcttgagattgacttcaataaattgtcctgtatgttccaaatt

SEQ ID NO: 364750 - DNA, 476 bp, Homo Sapiens
  misc_feature (31)..(31): n is a, c, g, or t
actcagtgaggtgctcaagtacccacgtccnccgccagctgccagggttccctctcctccctccgtccctccccccatctggggagcccagcggtactgagggggcggaacgaggcggggccaccgagcggttatagctgggcctgcaggggacccacggctcgcctccagcctcctgcgctccggtacctgggcgtcccaactccactgcgcgcccaaacccagccgagccggttcgtggcccgccccgccgggcggccgtcgacgcgagcgccctggcgtggcgcccaggggagcggggggctcccgcgagccggccgcggctggcactgctgctgcttctgctcctgctgccgctgccctccggcgcgtggtacaagcacgtggcgagtccccgctaccacacggtgggccgcgccgctggcctgctcatggggctgcgtcgctcaccctatctgtggcgccgcgcgctgcgc

SEQ ID NO: 364751 - DNA, 264 bp, Homo Sapiens
tgcggccgcgccgctgggccaggcggagagaggcggacggacttcaggggaggcccgggccacgccgcggaaactacccgactccctggaggcggccaggaccgaccctgtcccgacaaaatggagttccccgtgtggcttcagctcgcggcgcgttcccagagctcctcagtgatccggctttcggattgttcgcctttcatctcatttgccgttgtccaaattctaatttaaaactcatgtgttacttgctgtaaggttaac

SEQ ID NO: 364752 - DNA, 459 bp, Homo Sapiens
cttggttaacttagctagcaggctgtcaattttgtgtatcctttcaaagaaccaactttttgtttcacttatcctttgtatcatttttttatctcatttaggtctgctctgatctttgctcttttcttctgctagctttttgtgtggtttgttatttttctagttccttgatgtatggtggtagcttgagatcttcctatctttttaatgtgggcatttaacgctataaactttcctcttagcactgtctttgctgtatcccagaggttttagtatgctgtgtctccattttcatttatttcaaaattgttttcaatttccgccttaattgcatgtttacccaaagttcattcaggagcatgttgtttagtttccatctacttgaatagttttaagagtccctcttggtatttgatttctaattttattccactgtgctccaaaagatacttgatctga

SEQ ID NO: 364753 - DNA, 475 bp, Homo Sapiens
ttagtgatgctcataaccacattctctctgacccctgctgatagaggcttcagtccagggaaggagttaaggtttggagtcaggaaccagcatctcaccacaggtccgcctgttgtttggtatgggctgctggatgtgccactgaatcttctgaaatcttaggttttttagctctaagtgggaaatgatgatgatgttacttgttttgccaacctcataggttggtggtaaatgtcaatggtcacgacgcaacatctgtaagctctaaactgttatactgaacatgaactgaacttaataaagtcagtggggcaagttctgcctttctggtttcccaatcctgctattgtcattgtcattttctcaggacacacagagattgcctaagttgcttgaaggtaagtttgactcacaaagtgaggaggaggtaagatgtgcgacaggaatgaagaaaaagaaatgagtcatactaaaa

SEQ ID NO: 364754 - DNA, 697 bp, Homo Sapiens
atcgcggccatggcggggccgggcgtcccgtgtgcccccgcagcgcgctggaaacgccacatcgtgcggcagctgcggtttcgggacctgtacgcaaaaggcgcttttcctgtgatgctggtgccggcctataaccatctcttagagaaggctgagctgctggacaatgttctcaaagaagctgcagccggagccaaacagtgtcactcccaccacccaccagggcccctgggaggagtcagagcttgactcagaccaagtcccatcactggtcgcactgagggtgaagtggcaggaggaggaggaggggctccggctggtctgtggtgagcttgcttttcaggaagggggcgggcaggggagcagccgactcccttagcgccttcggccccggagggactggaggcctggaggggcctcagcgccgccgtgcccacctgtccgcctccagatggcctaccaggtggtggagaagggcgcggccctgggcacgctggagtcggagctgcagcaagaggcaaagcagggctggcagccctggaggcccgcgtggcgcagctgcgagaggcgcgggcgcagcaggcccagcaggtggaggagtggcgggcgcagaatgcggtgcagcggggcagcctacgagggcgctgcggcgcgcacgtcggggctccgggaggctggccactggcgcaggcctccc

SEQ ID NO: 364755 - DNA, 542 bp, Homo Sapiens
agccattgagcagtcctcagaggttatggactctcaagcgactaatggaatagtgttctgttgtgaagtctagaactaaagcaccttgtattgtctgcttctaaagtgtcctatagtttttaacttaaagtgtaaagagtaacattttatcttatgtcaattaaagttacatttttcatttgttggtgtacatgtgctacctgttttatggggaatgtttaacacgatcctccaagttggttctatgcataaccattcaccaaatactgctgctgtgattccttgaaggaaatattctgtggtctgctatgatgcattgccatcttgctgcttgacaataggtttataaataattagaattacgtgttttaatagtacctttgtatatataacaagatgtaaaattaaagatgaggaatgtgtgtaaatgatcattcactgtttttgttttaaaactggtcagtactatgaagcttctgtggtttgtatgatgttttaactttcactttaaactgcatagaataaattaaattgaaaacaac

SEQ ID NO: 364756 - DNA, 429 bp, Homo Sapiens
  misc_feature (31)..(31): n is a, c, g, or t
  misc_feature (49)..(49): n is a, c, g, or t
aaagagtaacattttaaccctatgtccaatnaaagttaacattttccanttgttggtgtaacatgtgcctaccctgttttaatggggaatgtttaaacacgatccctcccaagttggtccctatgccataacccattcacccaaatactgcctgcctgtgaatccttgaaggaaataatcctgtggtcctgcctatgatgcattgcccatccttgcctgccttgacaataggtttataaataattagaattacgtgttttaatagtacctttgtatatataacaagatgtaaaattaaagatgaggaatgtgtgtaaatgatcattcactgtttttgttttaaaactggtcagtactatgaagcttctgtggtttgtatgatgttttaactttcactttaaactgcatagaataaattaaattgaaaac

SEQ ID NO: 364757 - DNA, 1487 bp, Homo Sapiens
  misc_feature (1237)..(1237): n is a, c, g, or t
  misc_feature (1349)..(1349): n is a, c, g, or t
  misc_feature (1377)..(1377): n is a, c, g, or t
  misc_feature (1397)..(1397): n is a, c, g, or t
  misc_feature (1449)..(1449): n is a, c, g, or t
  misc_feature (1464)..(1464): n is a, c, g, or t
agcggagtcggtggccaactcctggctcagtggggattgtgctcgtcccctccgttcccctccagtcttcctcccgctaccggaacgagcctcgcgcttggcaggctgaggaggagcaaagaaagcaggattaaagagaaggaagacctggctaggtctgggtggcgtctgcagtgccagaaagggaggcggtggcggcggcggctgcgaccacggccgcgcgggacgtgaggcccgagagcaaccgacgggcagcggcggccgctccagcgccccgcaccggggccgttagtcagcagaacgcgagctcttgtggaggagcagggccggcgcgaggcgagactcgggagcgtgagcggggcccctggggcgccgccgtccttcttcgccccggcgccgggggctgtagccctggtccccgctcctctgtcgggccagtctgcaggcggagagagtcggacggcgcccggagcgcggatctcgccttgtggaggacagcgcgtcggctgcggttctctctcgaccccttctgcccggcgcttcggcccgggccgctcaggtgcagagcatgaataatctttcatttagtgagctatgttgcctcttctgctgtccaccttgtccagggaagattgcttcaaaattagcgtttttgccacctgatccaacttacacactgatgtgtgatgaaagcggaagccgttggactttacatctgtctgaacgagcagactggcagtattcttctagagaaaaagatgctattgagtgtttcatgactagaaccagtaaaggcaacagaattgcttgtatgtttgtacgttgttcacccaatgcgaaatacactttactcttctcacatggaaatgctgttgatcttggtcaaatgagcagcttttacataggactaggatcacggattaattgtaatatattctcatatgattattctggatatggtgccagttccgggaaacccacagagaagaacctctatgcagacattgaagctgcttggcttgctcttaggacaagatatggcattcgccctgaaaatgtgattatatatggccaaagtatagggacagtaccgtctgtggatcttgctgctcgatatgagagtgctgctgttattcttcattctcctctgacttcgggaatgcgagttgcctttcctgataccaaggaagacctactgttttgatgcattcccaaacattgacaaaatctctaagantaacctctccagtattaataattcatggggactgaaggatgaagtcattggacttttcacatgggcctcgcattgtttgaacgttggcccaaagacctgtgggagcctctcnggggttgaagggagccagggtcacaatngatgtgggaacttttatggnacagtatcttggaaagggttgaaacagtttgtgtcacagggactgggtaaanttggtaaaatattcnggtaaatttgctactgggggttt

SEQ ID NO: 364758 - DNA, 268 bp, Homo Sapiens
aaggcacactgctcaccaacattaggtagagttcatacatttctttctctcagcaatggacaatggatacattagaatgaggatgattgctgcaatgctaaccagctaataaatagaagtggactgggatgagagtccaggcaattgcctaatgagccccgctatacatatttgcaaaaatgtagaatgatgccattcttttttgttttggcaaatagttatttttcattaaaaatgtaatgttagatacacggtgccgagctcgatt

SEQ ID NO: 364759 - DNA, 506 bp, Homo Sapiens
ttcagggatcctgggtttagggggaggtacccagcagcgcctcacaccctctctctccccccagatcctgctcatctctgattacttctatgccttcctgcggcgggagtactacctcacacatggcctctacttgaccgccaaggatggcacagaggccatgctcgtgctcaagtaggcctggctggcacagggctgcatggacctcagggggctgtggggccagaagctgggccaagccctccagccagagttgccagcaggcgagtgcttgggcagaagaggttcgagtccagggtcacaagtctctggtaccaaaagggacccatggctgactgacagcaaggcctatggggaagaactgggagctccccaacttggacccccaccttgtggctctgcacaccaaggagccccctcccagacaggaaggagaagaggcaggtgagcagggcttgttagattgtggctacttaataaatgttttttgttatgaagtctaaaaa

SEQ ID NO: 364760 - DNA, 403 bp, Homo Sapiens
caccgcgcgacccggggccatcctggcctgggcttccccttgagggcccgcgacgggctgccgcgcagagggacgcgcgcgggcgcactggcgtccttgcccaagggcgggagcgtcagtgctcggcgctgctccgagtcagaggtggcgcgggacgcccctggttctccgacgccttcgaaagaacagcagctcgcgacctgcggggcattgaagtggcagcgtagccgaggggagcgataggcggagtgggccccccggcctcctggagagcctctcctatctgtttgtttgtctgtctctgcgtctttctctctgcgtgtcaacgtaagactcggtctctggatctctctctctttctgtctcccgcccccacaacctctgtatctctgacaggtccgcg

SEQ ID NO: 364761 - DNA, 569 bp, Homo Sapiens
ggcggagagaataaagcagaaagacaggaagaggaggtggagttctacagttagtgtggttttagtttttcctaagaagtggcgtggtttggggctttatatccgggaggagcatatgtacgcaaatcctggggcgtttgcaaacccggatccggggcgtctggccccatgcccggccgggcgtttgagggctactgccacgcagcgtttctggagcctgccggctggtgccctggtggcctttatctctgtccccctttgtcctctttatctcaggctctccaggaggccggggggcccactccgcctatcgctcccctcggctacgctgccacttcaatgccccgcaggtcgcgagctgctgttctttcgaaggcgtcggagaaccaggggcgtcccgcgccacctctgactcggagcagcgccgagcactgacgctcccgcccttgggcaaggacgccagtgcgcccgcgcgcgtccctctgcgcggcagcccgtcgcgggccctcaaggggaagcccaggccaggatggccccgggtcgcgcggttggccgggctcctgttgctg

SEQ ID NO: 364762 - DNA, 384 bp, Homo Sapiens
tgctgtgttcacaatcacctagatgacatatgtatgtgtatacatacttacacatatacccttacatgtacacgatatatctctacccatacactaccatgtacacatgtccatttgtacacagctgtatatgtacacacacaattttgcacacacctgtatatgtatacaatgtatggatccccatatccacattacacacaatgtgtacgcatctacctgtgtacacacacccacctatgaacacaatgtagacacatctgtataaacacacttgagatacatgcctgtgcacataggcaagtatgtgccaagtatttacacacctgaagtagaagcacacacacacccacactatgcctgcacaccaccgcatggccacgt

SEQ ID NO: 364763 - DNA, 152 bp, Homo Sapiens
aagtaaagaaccgcagtcatcgaactggagtcccattgattccctccccctcgcctccccaaatctggcacctgcccaaggtatcctcagaaccatttggggtgtcctttggcattggataatagaaataaaattttacatcattctaccat

SEQ ID NO: 364764 - DNA, 196 bp, Homo Sapiens
aggaataaaagtgattgggttacatatttaaattccccagggggcaaaaatcaactcaaagtggatcaaaaacttaaatcaaagacctgaaatcattaaaatcctacaagaaaacctggtagaaactctttcagacactgacctaggcaaagaatttacgactaagacctcaaaagcaaatgcaacaaaacaaaaa

SEQ ID NO: 364765 - DNA, 336 bp, Homo Sapiens
ggcacgaggtttaccatctcttttaattcctcttgaatatttagccatggtctatatatgctgtctgagaacataaaactatggtaattttagttttcttcttcatctccagcctcggggcaatacagcttcactgatagctgtacccgctgtgcttcccagtttcactccaaatgtggaagagactgcacaacagcccagttatggaagtgggggttttggaatattttaaagtgggaattattaaggggggccagaggcacctattctacttccaaaaggcagtttcttctttatgaagatgaaagtaaccaggccaggcgcagtagctcacac

SEQ ID NO: 364766 - DNA, 582 bp, Homo Sapiens
  misc_feature (519)..(539): n is a, c, g, or t
gaaatcagcttggtatggaggatacatctctgagctctggaatgctcacccagaacacaaatgtaccaattctagaaggtgttgatgtggccatctctcagggaatcaccctaccttccttggagtcttttcacccccttaatatacacattggtaaaggaaaactccacgctactggctcaaagagagggaaaaaaatgacactcaggcctgggccagttacccaagaagacagatgtgatcatcttaccctaaaggagcctttttcaggagagcctagtgaagaagtcaaggaagaaggagggaaacctcaaatgaattctgaaggggagataccttccctgccatcaggcagccaatctgcaaaaccagtaagccagcccaggaaatcaacccagccagatgtttgtgcctctcctcaagaaaagccactcaggactctgtttcaccaacctgaggaagagatagaagatggtggactcttcattccaatggaagaacaagacaaagaataagtgnnnnnnnnnnnnnnnnnnnnncctatgcggccgcaagcgtaatcccttagtgagggaaatccca

SEQ ID NO: 364767 - DNA, 624 bp, Homo Sapiens
ccacccacgggagactcagggccacctgccaccctccctcgctgccttctgcccttgggatggggcgctcctgatgtacgtgggccccggtgtttacaaggaggtgatcatctacaacctctgccagaagcaggtggtggagaagataccactgcccttttttgccatgtccctgagcctgtcccccgggacccacctcctggctgttggctttgctgagtgcatgctgaggctggtagactgtgccatggggactgcccaagactttgccggccacgacaacgcagtgcacctgtgcaggtttacaccgtccgccaggctgctcttcacggccgcccgcaacgagatccttgtgtgggaggtccccggcctctgagatgcagcagggactgtggtggtgggcatcacgcctggtcatgccaggcacctggacacaggcttggcagaggcgccaggttgtcaatggcctcatgctgggacaggccaggattcacgtaaatcgcctggagcaagctgttgtaaatttggcgccctgtgaatactttcatacctgttgcccttttgcctaagaaatctttaatgtttctatcttgtaataaacatgggcatttattgcaaaaaaaa

SEQ ID NO: 364768 - DNA, 433 bp, Homo Sapiens
  misc_feature (32)..(32): n is a, c, g, or t
cctccctggctgttggctttgcctgaaatgcnatgctgaaggctggtaaaactgtgcccatggggactgccccaaaactttgccggcccacgaacaacgcagtgcacctgtgcaggtttaaaccgtccgcccaggctgctcttcacagccgcccgcaacgagatccttgtgtgggaggtccccggcctctgagatgcagcagggactgtggtggtgggcatcaacgcctggtcatgccaggcacctggacacaggcttggcagaggcgccaggttgtcaatggcctcatgctgggacaggccaggattcacgtaaatcgcctggagcaagctgttgtaaatttggcgccctgtgaatactttcatacctgttgcccttttgcctaagaaatctttaatgtttctatcttgtaataaacatgggcatttattgc

SEQ ID NO: 364769 - DNA, 444 bp, Homo Sapiens
agggtttagtcagacactggctgggagtcctgggaatgagcagagaaaacatcagcatagagcacttggacctcccttgtacctgttcagaggaagaaaatcaactaactatataccaacaacctaagtgaggtcttacagccttgctgcagggctagtttcctgcctttctttctatcaattttccagtatactcaagaaaatcgggaaattgtaatggggcagtttatatctcctgagactttttgcctgttgaaatgtgcaggacccttttcctgtgatgagagatagctggttacttgatctaggtttaaaagttatgtaaaagaaaaaaattataataaaagggatactttgcttttaaaatcttgtttccttttaatctaggtaatcatttcaaaataagtatgtaaagaagaaaaataaaagttgtcttcctggaaa

SEQ ID NO: 364770 - DNA, 947 bp, Homo Sapiens
  misc_feature (677)..(677): n is a, c, g, or t
  misc_feature (729)..(729): n is a, c, g, or t
  misc_feature (884)..(884): n is a, c, g, or t
acaaggaagtcctggcgagcctgggagcagaagctgaaggaaattgacgaggagtgccggggcgaggagagcaggcgcgtggacctggagctcagcatcatggaggtgaaggacaacctgaagaaggctgaggcagggcctgtgacgttaggcaccaccgtggacaccacccacctggagaatgtgagcccccgccccaaagctgtcacacctgcctctgccccagactgtaccccagtcaactctgcaaccacactcaagaacaggcctctctcggtcgtggtcacaggcaaaggcactgtactccagaaagccaaggaatgggagaagaaaggagcaagttagaaaacaagcttcatctaaagactctcatgtcaatgtggaccttggtgacaatcctgctttgttaaagcaaaaactatgcgaaagggtgagtctgtttagaagaaaaagcaaagactgaggtactgtgaatggagagcttcagctaagaggaggctctgtcccttttcagagccaaaggaaataatacaacaaaaaggaggcttctttggagacctaagtctattggatgtaaacaagacgttgtatttagggatgttctgtgtttctttcttttttgaagttgtcatcaattgctttactaagatttttaaatagtgaaaaacctcctgttnagactttggtgggaagatgaatcaaggaagcagggccccctgtcttatgggntcacgttgtctttgggtgaggtgagaagaacctaaaactccttgggcccaatccatctctttattcccaattactttagcaatttggggggatttaaaaacccatccctttggccttttcaggttttcttcctcccaaattaatttacccaaggngcccccaaaacttcaaggttccttttccaggtttgggaatttttttaaaacaccaggcccatt

SEQ ID NO: 364771 - DNA, 564 bp, Homo Sapiens
ctttgcatgccaggctagcagcagatacctatagaagcagtaggcatgaaaggagagatctctaaccttaccacacacactcctttggatcctcttcattgcaaagcatgaagactaccacatcattaagggaatctgaattcttgggaacatggctgggaagaggcccatactaaaaggacagagctaggtgggggctttggatggtaaagggttcgggtttgccaaaaaataatctgaagtgttgcatggggccctgaggaccactgaaaaccatttcatgtcttatcactggtagttctctctgcccgttacggcatctgtgggccactttcctagcaacccaaaggatcgttatgaaaatatgtcctgtgtgtgatctggaacacacaactcgattagacaactatactcctctgttaaaggcagcctatgtggtcttacctcaggaatagcattgcccatcaacagccaggccttcttacccagagacagaaagtaattacacaatagtactgcatgttcttcttcatcccctgccaggagatcaagaaattgctgaca

SEQ ID NO: 364772 - DNA, 1024 bp, Homo Sapiens
  misc_feature (547)..(587): n is a, c, g, or t
  misc_feature (719)..(719): n is a, c, g, or t
  misc_feature (826)..(826): n is a, c, g, or t
  misc_feature (951)..(960): n is a, c, g, or t
gggaacgtgacggggaagtggttcgggcggccgcggcttactaccccagggcgaacggacggacgacggaggcgggagccggtagccgagccgggcgacctagagaacgagcgggtcaggctcagcgtcggccactctgtcggtccgctgaatgaagtgcccgcccctctaagcccggagcccggcgctttccccgcaagatggacggtttcgccggcagtctcgatgatagtatttctgctgcaagtacttctgatgttcaagatcgcctgtcagctcttgagtcacgagttcagcaacaagaagatgaaatcactgtgctaaaggcggctttggctgatgttttgaggcgtcttgcaatctctgaagatcatgtggcctcagggaaaaaatcagtctcaagtaaaggccaaccaagccctcgagcagttattcccatgtcctgtataaccaatgggaagggggtgcaaaacgaaaaacccaagtcataccagtggctgtcttcaattggcaaggaaaaagaaacttcctttcattctggctggcnnnnnnnnnnnnnnnnnnnnnnnnnnnnnnnnnnnnnnnnnccctcctatggggccccggaggaagaaaaaaaacaaagggagggaattctccccgtctccttaaatgggatccaaacggtccccaccaaaagtttccgaagagcaagtcaaccctttgtctccccgccgagngccctcccttttccacacaaccctttcttcccaaaattaacccccaggtaccccacaccctccccgggtagcaggcgccgcagattccgcttggcgggtctcaccancactgcgctccgaacgtccctctgggtgttgggggcgcgcctccttgtggcgcccctctttgaggaaaagattttgtttttaaagaacaccctttccgctcttgttggcgggcggcgcgcgcggnnnnnnnnnntgtaggggggacaaatgggcagacacccacgggcgcccacataaaacccggggggttttgtcca

SEQ ID NO: 364773 - DNA, 465 bp, Homo Sapiens
  misc_feature (54)..(54): n is a, c, g, or t
agtgatgaatggacagaaggttgccaatgctcaatgccaggtattaccactgtngcagtcaccttgggtggctgtgtctatgctttaggtggttacagaaaaggggctccagcagaagaggctgagttctatgatcctttaaaagagaaatggattcctattgcaaacatgattaaaggtgtgggaaatgctactgcctgtgtcttacatgatgttatctacgtcattggtggccactgtggctacagaggaagctgcacctatgacaaagttcagagctacaattccgatatcaacgaatggagcctcatcacctccagtccacatccaggatacatgaagaagatggccatctgcaaaccaggaagcaggtcatcatgagacaccagatctaacagcatcttgatcttggacttctcagccttcaaaactgcgagcaataaatttctgttgtttaagacaaaa

SEQ ID NO: 364774 - DNA, 559 bp, Homo Sapiens
  misc_feature (31)..(31): n is a, c, g, or t
tgggaccacacaggtgggcttccttattccntgacaaagcctctgtttccagctcttccgccctctctggatgagggaacagaagtggaggaaacaaaagaagcagcagcacgcacagtcctgtcgctgggtgcggagacagcctggcaaagtcccactcagccatggcctgatgcaggccccaggccctcctttcttgggtgtcaaatgactgtgtcctggacatctgatgcaccacctgccctgcctgttgcaaacgtgatgctcccggatggagtggagaaactaggagactgggacaagcaaaaggctgcaaacaacccagaagcccatcctcagaagactggagaaatgattgaggaatgcatgggcaccgtggccctgtgctccatcacaaacacctctcagaaacaacgtgggatgaaaaagcaagacagttcatacagtatgatgccatttttataaagctcaaaaccaaatatgtgtggaattcatacccaggtgctaaagtcatcaggtagggcagggagtcagtacaacacagtgctcacccgcagag

SEQ ID NO: 364775 - DNA, 1344 bp, Homo Sapiens
  misc_feature (957)..(1135): n is a, c, g, or t
  misc_feature (1248)..(1274): n is a, c, g, or t
ggcctgggtggcgaattcggcacgaggggcccccgcgggtagtggagcccgtttgttccgcccgtgtagagcctggagccagaacctgtgacagatgcggaatgtggccaaggcgacgtcttctccacgcctgctccgactccagggtgagccgtggcctcctctccgccctagcgctagagaaccgtgggtaccgatggatgtggccgagagccctgaacgggatcctcactctccagaggatgaatgagcagccacagggactctcggacgatgacattctgagggacagcgtggtccgatcaggatttgtgactggggcgggggtgagggcttctgatctggaggatgaggaaagtgcagccagggggccgagccaggaggaggaagataatcactccgacgaggaggaccgggcaagtgagcctaaatcccaagaccaggactcagaggtgaatgagctgagccggggcccgaccagctccccctgcgaggaggagggggacgaaggggaggaagaccggacaagcgaccttagggatgaggcctcctcagtcaccagggagctggatgagcatgagctagactacgatgaggaggttcctgaggagccagctcccgccgtccaggaggacgaggctgagaaagcgggggctgaggatgatgaggagaagggcgaaggcactcccagggaggaggggaaggctggtgttcagagtgtgggagaaaaggaatccctggaggctgccaaggagaaaaaagaaagaggacgatgatgggagaaatcgatgatggggaaatagacgatgatgacctggaagaaggtgaagtgaaggaccccagtgacaggaaggtgaggcctcgtcccacctgccggttcttcatgaaagatgttgtgacaccattatccactcttcttccaccaatatccaattccataccattcagaggccaggnnnnnnnnnnnnnnnnnnnnnnnnnnnnnnnnnnnnnnnnnnnnnnnnnnnnnnnnnnnnnnnnnnnnnnnnnnnnnnnnnnnnnnnnnnnnnnnnnnnnnnnnnnnnnnnnnnnnnnnnnnnnnnnnnnnnnnnnnnnnnnnnnnnnnnnnnnnnnnnnnnnnnnnnnnnnnnnnnnnggagcacagaaggccacaggtccacagagacagaaagcagattgtgactcacgccgcaacgtggacgagccttgaagacgtgctgagtgacagaagggagcacggaaggccannnnnnnnnnnnnnnnnnnnnnnnnnngtgactcatgccacaatgtggacgagccttaaagacgtgctgagtgacagaaagggagcacagaaagcca

SEQ ID NO: 364776 - DNA, 853 bp, Homo Sapiens
  misc_feature (614)..(614): n is a, c, g, or t
cctagggaaaaggcccaacccctggaagatctggccagcttccaagagctctctcaaacaccaggccacactgaggaactggcaaatggtgctgctgatagctttacaagcgctccaaagcaaacacctgacagtggaaaacctctaaaaatatccagaagagttcttcgggcccctaaagtagaacccgtgggagacgtggtaagcaccagagaccctgtaaaatcacaaagcaaaagcaacacttccctgcccccactgcccttcaagaggggaggtggcaaagatggaagcgtcacgggaaccaagaggctgcgctgcatgccagcaccagaggaaattgtggaggagctgccagccagcaagaagcagagggttgctcccagggcaagaggcaaatcatccgaacccgtggtcatcatgaagagaagtttgaggacttctgcaaaaagaattgaacctgcggaagagctgaacagcaacgacatgaaaaccaacaaagaggaacacaaattacaagactcggtccctgaaaataagggaatatccctgcgctccagacgccaaaataagactgaggcagaacagcaaataactgagggtctttgtattanccagaaagaatagaaataaaccggaaatgaaaagaaagcccatgaaagacctcccccagaagatgggacattcacgaatcccagattgaggggaaccccggaaaacccccttaccctaggaaaaccaaaggcccctggaaaaacaaaaagggggctttgaaggtcccggctagaaccggaatgggagaggctcccccagccctaaaggggggccaaaaaggaaaaaaccggaagggccc

SEQ ID NO: 364777 - DNA, 447 bp, Homo Sapiens
ccatctgcaattcctaaggttgagctcaatgcatcacatgtagtagatgttcaagaaatgtttgttaaatgggcagttgtaaacagagacagtgccgtgtttatttcgttttccagaaaggcacctgactccttgctttgcacataacaggtgctcaagaaatgttgaagaaaaaagcaaattgctttgaatgcagtgtatcctaaaaccagatttccaggttgccccagtactctgtacaggcctccattttggctgttaacacagtgtatcttttgttacattaaaatgggtccacgtttgcatctcctccgaaattataaactcctgggagtgcagggatgtgtctcatacattcttccttgacttttccacagcataccttagcacagagttggatatgtagtagatgttcaatggagaattactgaattttcttaaaaaaaa

SEQ ID NO: 364778 - DNA, 467 bp, Homo Sapiens
cagacgtcggtgacactcagcattgtccactgccctcccgtcaccaccgccatcatccaccggccccacgcccgcgagcagctgggcttctgcgtggaggacggcatcatctgcagcctcctccgtggtggcatcgcagagcgtgggggcatccgcgtcggccaccgcatcattgagatcaatgggcagagtgtggtggccacgccacacgcccgcatcatcgagatgctcacccaggcctatggcgaggtgcatatcaaaacgatgccagctgccacatatcgcctccttacaggccaggagcagcccgtgtacctgtgaccacctcatcccttgcctgccactgtgccttcgcctccatggccccggagccccatcctgggcctgccctggctggccaggaccccagcggttcttggtcctgtatgatttcctaatataaaaacagtaaaagcttatgtatttgg

SEQ ID NO: 364779 - DNA, 912 bp, Homo Sapiens
taaataaaaatgctgcaaggtttccgcctctgcgttccccttgtgatggctggcaggtggtctggaagcgtcccggatggcggccaagccgcgctggggcaggtgtcctggcagcgaagggcagcccggccgcaggccacgtcactgcacagcggcgtccgggtggctctggtatcgctgcctccaaacctcctggatcttcctgcaccacttgtgtgcgttcccgctggggtccatcagataatacgtcctgttaggcgtgtggacaaagaaagttttaaaattcttggcctctggtcgaagttcttgtgaccaaggaatttcacctttcagaactttgttgacaggatccacataatataaatgtggtccttctgtgagcaacagctgtcgtcgtcttgcaaataaacccttccgcttatccactgggcccatctttagtattaaattattttctacaaactggtgccaagggtttccgccagcctgcttctccaacaacaacctcttctcatcttcggaaaactgtaagtccagttcaaaggagttcgagtccagatcgtgaatgtactgctctatgttgctgcctgacctctggggcaggcccgtgtcggaggctgacagggagtgtgaggaggaggacgaagacacctgcatgcagccaaactggctcaggagattgtcataattgccattagcagtcctcgtcgtcttccgacatagccggcaggtaagcggtgagcttcggaggcgtctgctggtgcaggttctccccacggtgacgggactccaagaacgggtgttgctttaaagaaggtcccgtattcccttccattttgctcaacagcctaacccgttttgtggcatctaaaccaaaagttctccccgaagttctctgccttagggaaaatt

SEQ ID NO: 364780 - DNA, 863 bp, Homo Sapiens
cagagccaggcagcgcaggtatagccaggctggagaaaagaagctgccaccatggttgcactttcactgaagatcagcattgggaatgtggtgaagacgatgcagtttgagccgtctaccatggtgtacgacgcctgccgcatcattcgtgagcggatcccagaggccccagctggtcctcccagcgactttgggctctttctgtcagatgatgaccccaaaaagggtatatggctggaggctgggaaagctttggactactacatgctccgaaatggggacactatggagtacaggaagaaacagagacccctgaagatccgtatgctggatggaactgtgaagacgatcatggtggatgactctaagactgtcactgacatgctcatgaccatctgtgcccgcattggcatcaccaatcatgatgaatattcattggttcgagagctgatggaagagaaaaaggaggaaataacagggaccttaagaaaggacaagacattgctgcgagatgaaaagaagatggagaaactaaagcagaaattgcacacagatgatgagttgaactggctggaccatggtcggacactgagggagcagggtgtagaggagcacgagacgctgctgctgcggaggaagttcttttactcagaccagaatgtggattcccgggaccctgtacagctgaacctcctgtatgtgcaggcacgagatgacatcctgaatggctctcaccctgtctcctttgacaaggcctgtgagtttgctggcttccaatgccagatccgctttgtagcccctctctatcacagaaacagaagaatgctttaaatctgcttatactaacatactgtcaaccctat

SEQ ID NO: 364781 - DNA, 928 bp, Homo Sapiens
ggggcctccctcgctccacgcgcgcccggacgcggcggccaggcttgcgcgcggttcccctcccggtgggcggattcctgggcaagatgaagtgggtgtgggcgctcttgctgttggcggcgctgggcagcggccgcgcggagcgcgactgccgagtgagcagcttccgagtcaaggagaacttcgacaaggctcgcttctctgggacctggtacgccatggccaagaaggaccccgagggcctctttctgcaggacaacatcgtcgcggagttctccgtggacgagaccggccagatgagcgccacagccaagggccgagtccgtcttttgaataactgggacgtgtgcgcagacatggtgggcaccttcacagacaccgaggaccctgccaagttcaagatgaagtactggggcgtagcctcctttctccagaaaggaaatgatgaccactggatcgtcgacacagactacgacacgtatgccgtgcagtactcctgccgcctcctgaacctcgatggcacctgtgctgacagctactccttcgtgttttcccgggaccccaacggcctgcccccagaagcgcagaagattgtaaggcagcggcaggaggagctgtgcctggccaggcagtacaggctgatcgtccacaacggttactgcgatggcagatcagaaagaaaccttttgtagcaatatcaagaatctagtttcatctgagaacttctgattagctctcagtcttcagctctatttatcttaggagtttaatttgccccttctctccccatcttccctcagttcccataaaaccttcattacacataaagatacacgtgggggtcagtgaatctgcttgccttttcctgaaagtttctggggcttaagattccagactctgattcattaaactatatttcgcacgtgga

SEQ ID NO: 364782 - DNA, 438 bp, Homo Sapiens
gagatggactgtggctctgttgcccaggcttcttcctcaaaccttcgccaacttcccttcaattctcttttcttaggaatctctgttgcactttgagtctgcatcataccattttgaatagatttatgttttctaattgtctcgtcagggctcttggcatctctccagcaagactgtaagcagtctttttctgcatcaaaccacacctcgtcactgaggttggcatcatcatcattatcagcagcagacacattatcaaaaggcagtgatggcctgaaccactaaaactacaagcagtctggcatcctaaatatgtgccaaggggatttcagagagaacgtctgactgtgatcacacagaaaaaacataagtcctcaaagactgatttgcttctgcaagcaagagacagaaaatattttcatttcttccacctctccg

SEQ ID NO: 364783 - DNA, 366 bp, Homo Sapiens
tcaccctacttaaccttcactacccccagcagggtgggttgggcaccacagagagattacattccttaaactaagtggtggcaaaactgggattctagctctgatctctccaaatctgaagctgattcttttttcctaaatagtactgtccctcccttccctgaaccccttcactgcccaccccactggaggtgtggcagctgggggtctcagggcttgatttaccaatcaaagacccgaatttaggggtgatctccagtatttcccccaagttctcaggggaactcatttctccctcatgagggcactaaaaaaagcaatagttcttttaatattgcgatcctggggccaggactgcggatcctg

SEQ ID NO: 364784 - DNA, 1695 bp, Homo Sapiens
  misc_feature (1397)..(1459): n is a, c, g, or t
  misc_feature (1478)..(1478): n is a, c, g, or t
  misc_feature (1594)..(1594): n is a, c, g, or t
ctcccccctgggtcggacgctgagcggagccgcgggcgggagggcggacggaccgactgacggtagggacgggaggcgagcaagatggcgcagacgcagggcacccggaggaaagtctgttactactacgacggggatgttggaaattactattatggacaaggccacccaatgaagcctcaccgaatccgcatgactcataatttgctgctcaactatggtctctaccgaaaaatggaaatctatcgccctcacaaagccaatgctgaggagatgaccaagtaccacagcgatgactacattaaattcttgcgctccatccgtccagataacatgtcggagtacagcaagcagatgcagagattcaacgttggtgaggactgtccagtattcgatggcctgtttgagttctgtcagttgtctactggtggttctgtggcaagtgctgtgaaacttaataagcagcagacggacatcgctgtgaattgggctgggggcctgcaccatgcaaagaagtccgaggcatctggcttctgttacgtcaatgatatcgtcttggccatcctggaactgctaaagtatcaccagagggtgctgtacattgacattgatattcaccatggtgacggcgtggaagaggccttctacaccacggaccgggtcatgactgtgtcctttcataagtatggagagtacttcccaggaactggggacctacgggatatcggggctggcaaaggcaagtattatgctgttaactacccgctccgagacgggattgatgacgagtcctatgaggccattttcaagccggtcatgtccaaagtaatggagatgttccagcctagtgcggtggtcttacagtgtggctcagactccctatctggggatcggttaggttgcttcaatctaactatcaaaggacacgccaagtgtgtggaatttgtcaagagctttaacctgcctatgctgatgctgggaggcggtggttacaccattcgtaacgttgcccggtgctggacatatgagacagctgtggccctggatacggagatccctaatgagcttccatacaatgactactttgaatactttggaccagatttcaagctccacatcagtccttccaatatgactaaccagaacacgaattgagtaccctggagaagatcaaacagcgactgtttgagaaccttagaatgctgccgcacgcacctggggtccaaatgcaggcgattcctgaggacgccatccctgaggagagtggcgatgaggacgaagacgaccctgacaagcgcatctcgatctgctcctctgacaaacgaattgcctgtgaggaagagttctccgattctgaagaggagggagaggggggccgcaagaactcttccaacttnnnnnnnnnnnnnnnnnnnnnnnnnnnnnnnnnnnnnnnnnnnnnnnnnnnnnnnnnnnnnnnagtcaccgaagaggagaanaccaaggaggagaagccagaagccaaaggggtcaaggaggaggtcaagttggcctgaatggacctctccagctctggcttcctgctgagtccctcacgttttcttccccaaccccncagattttatattttctatttcccctgggaatttatataaaaaatttattaaataataaatatcccccaggggacagaaaaccaagggcccccgagactca

SEQ ID NO: 364785 - DNA, 2114 bp, Homo Sapiens
  misc_feature (287)..(287): n is a, c, g, or t
  misc_feature (1180)..(1200): n is a, c, g, or t
aaaactacggctaggtacgaggctgggtgtcgtcgtacgttgcccggtgctggacatatgagacagctgtggccctggatacggagatccctaatgagcttccatacaatgactactttgaatactttggaccagatttcaagctccacatcagtccttccaatatgactaaccagaacacgaatgagtacctggagaagatcaaacagcgactgtttgagaaccttagaatgctgccgcacgcacctggggtccaaatgcaggcgattcctgaggacgccatcccntgaggagagtggcgatgaggacgaagacgaccctgacaagcgcatctcgatctgctcctctgacaaacgaattgcctgtgaggaagagttctccgattctgaagaggagggagaggggggccgcaagaactcttccaacttcaaaaaagccaagagagtcaaaacagaggatgaaaaagagaaagacccagaggagaagaaagaagtcaccgaagaggagaaaaccaaggaggagaagccagaagccaaaggggtcaaggaggaggtcaagttggcctgaatggacctctccagctctggcttcctgctgagtccctcacgtttcttccccaacccctcagattttatattttctatttctctgtgtatttatataaaaatttattaaatataaatatccccagggacagaaaccaaggccccgagctcagggcagctgtgctgggtgagctcttccaggagccaccttgccacccattcttcccgttcttaactttgaaccataaagggtgccaggtctgggtgaaagggatacttttatgcaaccataagacaaactcctgaaatgccaagtgcctgcttagtagctttggaaaggtgcccttattgaacattctagaaggggtggctgggtcttcaaggatctcctgtttttttcaggctcctaaagtaacatcagccatttttagattggttctgttttcgtaccttcccactggcctcaagtgagccaagaaacactgcctgccctctgtctgtcttctcctaattctgcaggtggaggttgctagtctagtttcctttttgagatactattttcatttttgtgagcctctttgtaataaaatggtacatttctataataaatagatatatcacgaaaaagcatattnnnnnnnnnnnnnnnnnnnnngcacggcccgccccaacagtaatccctgcaggggggccccaacttaccacctcccccatttttctttgtcagcactgggacccccctccctttgtctcatttcatcccccggcgcccttgcccctccctttttaacacatcccccgacaggggataaccttgcgccatctttacgcacccccaccaaactaataaaaactataccaacatcggggctggtagcacacacagcggacggcaaagatttctctctcgcagcagcttacttgtaccccctaccccacacgaccggcacatgcacacagacgggtaaaacccggcgtcgataaaacacatcttgacacatcaacgatccgcacccccctcacccgaaggcactaccatcctccgcgtcgcatgctcactatactaccatcaccgagcggcaaccccgccctacagactcctcccctggtcacttgtatggaaacacatcaatcttaagctaacaaccatctactacttagctcccgcgaagacagttaggcatacgacgtgattctcaacccatgcgcgtaatatcaacccatcgtgctagtcggctaccaaacgagtcataggtgcgccagcacatacacacgtcgtggtggtactcatctagtaatatgctgtgtataaaagccggctctcgtattgcacgcgctcccgctgaactaactcacaacagaccccttgtcccgatccctcctctaacactctgattatttttctctctacacacgaatgagaaagtcactctcgcaaacacgcgccccgtcgtacatacctcacacgcgtccttaccgatccgcgttggtatatccgctcagattaacacaaccgcttgtggaatatattgttacagtaaaagaaacgcgagttgggttttgtgaacc

SEQ ID NO: 364786 - DNA, 253 bp, Homo Sapiens
ccccattttgtaactgccttattgaaaagtaagtgcccttccattccaggcctcctcatattgtacttgtttcctgccaaatctgggggatcatttgtattttaactttgtaatctatggctctgtactgttgaaaggctctcaattctgtggggtctccttagtatgtatgtgacttttcatgttgcaatatcacacgatgggatggcccgacttttgctcttaataaataatctgaatgagtaagagaaaa

SEQ ID NO: 364787 - DNA, 377 bp, Homo Sapiens; identical to SEQ ID NO: 246300
  misc_feature (150)..(172): n is a, c, g, or t

SEQ ID NO: 364788 - DNA, 277 bp, Homo Sapiens
gggggtgataatgatggcagcaatgactcctcctccttagtgggcaggcctcagacgcctgctgggtcttggggctgaggactcccacagctccggccaggcgggctgcgtatgcccaagaatgtcgtgtacctgcccgtgcaagcctgggtcccgcctgggctggtctcgcaaacagcctggcccctggcccctgggtgggtctgaggctgcgttctcttggaggtttttgagcccaggtatggctttgcacctgtgatttatgtctttaagtgtt

SEQ ID NO: 364789 - DNA, 1227 bp, Homo Sapiens
  misc_feature (1117)..(1178): n is a, c, g, or t
  misc_feature (1194)..(1194): n is a, c, g, or t
ggggaaggtgaagatggctgcctctgcctttgctggtgcagtgagagcagcttcaggaatcctacggcccctgaatattttggcatcttcaacctaccgcaactgtgtcaagaatgcctctcttatttctgcattgtccactggacgttttagtcatattcagacaccagttgtttcctccactcccagacttaccacatctgagagaaacctgacatgtgggcatacctcagtgatccttaatagaatggcccccgtgcttccaagtgtcctgaagctgccagtcagatctctaacatacttcagtgcaagaaaaggcaagagaaagaccgtgaaagctgtcatcgataggtttcttcgacttcattgtggcctttgggtgaggagaaaggctggctataagaaaaaattatggaaaaagacacctgcaaggaagaagcgattgagggaatttgtattctgcaataaaacccagagtaaactcttagataaaatgacgacgtccttctggaagaggcgaaactggtacgttgatgatccttatcagaagtatcatgatcgaacaaacctgaaagtatagatcagaagtttcacttgtttctcagttattggatatgtatctttgtgtacatatctttgcaaaaatggataagtacaaaacttgatgtaaattgtaccaatgaatatgtaaacatacagtgacaacattaaacttagaaaagttttaaaacttaatggatcagactttgccagatttggttagggaaacagaaatttagaatggtgcattatttttaacaaatggtattggcttaactagttgttccagttatgctcttttagttgcaagggaatctcaagtggggacaaacataaaaagactcaaaagctacaagttagctcaagcaatgtgacattatttcaaggatatgtgccagggaattcaggaaccacctcaccaaccccatctcccactcagaaatcacctcccagcctcaggaagagtagaaattgggtggtgctcctcagcaggggaaggtggatgtttaggcttgggctctgcatgcatgtgacttgcttctttttgcattgttaactccattctctctattcaccnnnnnnnnnnnnnnnnnnnnnnnnnnnnnnnnnnnnnnnnnnnnnnnnnnnnnnnnnnnnnnggcaccttttgagggntctttttctacatggatggacccttcaggctcc

SEQ ID NO: 364790 - DNA, 643 bp, Homo Sapiens
  misc_feature (522)..(522): n is a, c, g, or t
  misc_feature (563)..(563): n is a, c, g, or t
  misc_feature (592)..(592): n is a, c, g, or t
  misc_feature (601)..(601): n is a, c, g, or t
  misc_feature (618)..(618): n is a, c, g, or t
  misc_feature (626)..(626): n is a, c, g, or t
ttttagagaaggagattacaccactttaatgcaatgatgctgaagatgtaaaattaggaagagacgttcatgttctctgtacaatacatccatttacagaatcagccagtactgtgtacaacatataaatacatgataaaacattagaggtgcatagagcatacttacagaagccaaaaagttcactttatacatccaagaataaagagttaaaaatataaaaataagaaacacacactgctttgaaatgtaaaatgactttcacatacacaggtgcgtggagatgcccactcccatagggtccaaagtgacagggaggatgtcaagcagaggaattcacctgcaaacatctggacggctgactcacaaggtctacagatggcattttcataggaaagacaaccctattccccaaccccattgtccaagcagagctattcaaggttccaaatgatcctgtggggttaagtggatcacactgagacagaaaagttccaaatttgcttcgcaacagaaccaagntcaacttgctccgtcactgggcaatggctcactgtggaccngaggtcagcaggtgcacagccccctggtnggcaatgcngggagttactttaaccngtgctggnttcttcctggccatcaa

SEQ ID NO: 364791 - DNA, 990 bp, Homo Sapiens
  misc_feature (14)..(14): n is a, c, g, or t
  misc_feature (46)..(47): n is a, c, g, or t
  misc_feature (473)..(482): n is a, c, g, or t
cccaatccaaaagnccaaagagccttgtggggcccagaaccccagnntgcccgagtcaggaactacggaatttgggataaagataaaagcagatatgatgttttctgttttacatcccaatttcaatggccgtttttactatctgatccaccccacacaaactgacctatgatgaagcggtgcaagcttgtctcaatgatggtgctcagattgcaaaagtgggccagatatttgctgcctggaaaattctcggatatgaccgctgtgatgcgggctggttggcggatggcagcgtccgctaccccatctctaggccaagaaggcgctgcagtcctactgaggctgcagtgcgcttcgtgggtttcccagataaaaagcataagctgtatggtgtctactgcttcagagcatacaactgaatgtgcccttagagcgcatcagttttaaagtcattaagaacatgtgaaaggtgnnnnnnnnnnccaatatgaactcatgcaagttaccaaaactgtgataacccttttttacttactgtaaagagtcattttcataaagatcaattcattgatttgttttttgtaaagctatcattcaatatatattataaaattaatataaatttaagggaagctctatgtaaggagacttagagccaaactgtttaagctgtatcatcccaacaaagtatcctttcatgaacggggcatgcaatagcttaagaattgctaggattaaattaaggaaagtaaagctactcagagcagcaggttccacaagcacaaactttacacatttgtacaattttgaaatgcactacaataaacaaattagagcaacacatttgaaatacaggcttctttacataaactgagaggttatacaaaactcagtttcacaagggaacaatctatacctttctaaaagttaatatttcaagtctctaataggcagaatattttactctttaaaatcctgcctttctgacca

SEQ ID NO: 364792 - DNA, 506 bp, Homo Sapiens
cggccgccaagctcaccacggtctgtgcgcacgcggccacctgcgcgggcaacagcgagccgggcgcgtcgccgtcgccccagtcgggctcgcgcttgagcaggcggggagcggcagggcccgggcccaaggggcgcgcggggccgccgggaagaagctccaggggccccgcgccgcccgccttgtgattgctgttgaagaggtcggcgaagagctcgtcgtggcacagctccagggtgggcacggcggccatggagtcgatgtaggcgctgaagtcgatggcgctctcgtcgtcgtacatggcgggggcggcggcgcctggctcgcctagggcccctggctcggccccgcggcccggcttgcccgcccggcccggttcgtagaagggcgcaggctccgcaggccagggcgcgccgcgcgccgggccgtccaggctgaagagcgcggcgctcatggcggcgtcgggccgggctctgcgtccaagcgatcccgggaattccggacgg

SEQ ID NO: 364793 - DNA, 714 bp, Homo Sapiens
  misc_feature (130)..(130): n is a, c, g, or t
  misc_feature (513)..(552): n is a, c, g, or t
ccagtcggtcgtgtagacaaaaccagatatacagcagagacggcccataacttcacagacacttctctcatgtacccagaggacactgtaaattctggacaaagtacgaatacacagagtggtctttcanacacctcccccctactccaccggacctcaaccaggacttcagtggatttcagcttctagtggatgttgcactcaaacgggctgcagagatggagcttcaggcaaaacttacagcttaacccattttcaagcaaaacagttctcagaaatgtcatgattgccggggtgaaggcaagagatgaattgcattattttatatattttttattaatatttgcacatgggattgctaaaacagcttcctgttactgagatgtcttcaatggaatacagtcattccaagaactataaacttaaagctactgtagaaacaaagggttttcttttttaaatgtttcttggtagattattcataatgtgagatggttcccaatatcatgtgannnnnnnnnnnnnnnnnnnnnnnnnnnnnnnnnnnnnnnnagactgtgcaatacttagagaacctatagcatcttctcattcccatgtggaacaggatgcccacatactgtctaattaataaattttccattttttttcaaacaagtatgaatctagttggttgatgccttttttttcatgacataataaagtattttcttt

SEQ ID NO: 364794 - DNA, 699 bp, Homo Sapiens
  misc_feature (581)..(590): n is a, c, g, or t
cctggggcatttggaagggactggacctctttcccctcatcaaaggaaacagcagtctttgcctctttctgttggttgtgcccaagggctacagtagctctgaaataacaagagctctgtaataacagtaataaatagctctgaaataacagtcctaagaactcctaaagtcctgagaacttttcttgtaatgcagctttttctcttcctgagaaacagtgtgttctaatgggattcccaggcagttcctacacctacggtgtgtgttccagcagggaggagttatgggctgggctgccttttcccatgggtcttcattcccaatggaaagttcactctgcttagtttggaattatttttctttcagttgttctggaacctttgctttttattgatttatacaatacaattggtgggagggtggacttgggatgggagtgggaaaagcatgtaagagctccttttgtgatggtccatctacccaaaagagatctgctttagtgaacgatactctttcatttttctaaattagatcaagttgttactgattttagatgacttgtatgcaaatttgaaaaacnnnnnnnnnnaaagctgattgggaactacaaacaatgaatggaatctactgacacagctaattggaaaacagatgtcttcttctgtcctattgatgctggtgtttaaaaaacatcactt

SEQ ID NO: 364795 - DNA, 480 bp, Homo Sapiens
aatttaaaaactgtcacatggctttctatgtgaaatgtgattcttgaaaataacagatacgcaaatatcaaaggattatcaaacgcagacacactcgcctttctcaggtggaaaggcccatttccccgcactgcatcctacctctccccactgccaacctcatcccgtgccagtctacttgtccatcacaagctcaacctgggaggcccattcacctctgctctctgcaatgcaggcctcccacctcctaagactggatcgcccccaggctcgccaggatacatcacagccctcctgcccggaggaaggcaacagagagagacttgacttagaatcagaagcttctctttaacttcaactcagactcatgtcttccaacggttaaaaggggaatgatgacactgattttacaaaattgctctaagaattaaacaaaatgtctgtgaaacagctgtggagccaaccagcctcccagaccct

SEQ ID NO: 364796 - DNA, 295 bp, Homo Sapiens
gggatccctatagagaagaacggaggtacggcctgtggtcatggcgctgttcccagcctttgcggggcttagtgaggctcccgatggcgggagctccaggaaagagttagactggctgagcaacccaagcttttgtgttggatccataacgtccctgagccaacaaactgaagcagctccagcccatgtttctgaagggttaccgctgacaaggagtcatctgaaatcagagtcttcagatgaaagtgacactaacaaaaagctcaaacaaacaagtagaaaaaagaagaaagag

SEQ ID NO: 364797 - DNA, 493 bp, Homo Sapiens
  misc_feature (23)..(23): n is a, c, g, or t
  misc_feature (36)..(36): n is a, c, g, or t
  misc_feature (46)..(46): n is a, c, g, or t
  misc_feature (51)..(51): n is a, c, g, or t
cccccagaggtgtttgcaggggnggagggggattgnttttaaaacnaaatntttccaccacaaaattcttaggatcacctgacctttgtaatgttatttatgttggggagggaggggggctgagaaggggaaatcagcagtgtgcaacatctttataatttgtactttaattacaaatcacaaggaaaccaataagttgaaatcctatataacaggtttatatatatagaatatgtatatttgaagccctctacagactgagtctatgttttactaattctttgttcactgtgttacccatcttggaataagttgtgaatgtcagctccctctctctgaggcctccagacttagctcctcaggagggtaatgagccaaggttgagtgtttccatacaatgcttttacctttgatcccaggagaatcagaaactccaacattttggaatcttcaagggcacatactgagaaaaaaaataaaattgtttatgagc

SEQ ID NO: 364798 - DNA, 629 bp, Homo Sapiens
aatttgctggacatttggaagaaaagatgcctttagaagatgaggtcgtgcccccacaagtgctcagtgagccgaatgaagaagcgggggctgctcagccctccccttagaggtgcctccctggaccggggaagtcagcccagcccagagagatggaggtgccctcgggcggggcccctgggactcctctgatcgatctgccctcctaaaaagcaagctgagggcgctgctcactgcccctcggagcctgcggagatccagctgcttcgggggcaggatggacaggattggagcccagagcggactgggctgtaacagcttccggtaccgaagataacagccagggaggacaagcagggctgggcctagggacagactgcaagaggctcctgtcccctggggtctctgctgcattcgtgtcatcttgttgccatggagttgtgatcatcccatctaagctgcagcttcctgtcaacacttctcacatcttatgctaactgtagataaagtggtttgatggtgacttcctcgcctctcccaccccatgcattaaattttaaggtagaacctcacctgttactgaaagtggtttgaaagtgaataaacttcagcaccatggacagaagaca

SEQ ID NO: 364799 - DNA, 506 bp, Homo Sapiens
agaggcactgctgaaccctggcaccgcgggcactgggagagtcaagctcatgggggtttcccggagaatcctgtgtgatctgagtagaaaccctgctgcttccacccttctagccctcagcttgtcaggagctgacccgttcagcttttccacccaaccagagctctgtcctgtgtgcagagagccacaacacccaaatccacagcctggctgacgggcctgccagcgttgggaaaagccactgataggttcgcatgaagtggaactggaccctgcagaagtttccaaaagctgccctgcgggtgacaggctgtccgggccccacatacctctgtctgtccgagggtgagtagcacaggacagcactcttccatctgtgcacggccgggaactgatgggggtcgacgtctgcacattcaagagcggccaaaacatcctgatcgagttttgatggctcctctctagaaagcacaataaaagaagcaaaaacatctttggtaaaaaca

SEQ ID NO: 364800 - DNA, 1995 bp, Homo Sapiens
gttggcaattaaccagggaggatatccccccaacctgaaaaatgaagtttccccaaaaataaaaccggttaaccttttaattggtataatccatttatgcattcaacaaaagccctccagggataaattttgaaaacagcaacaatgtatagacttgtatcactgctgcactggctcctgaatgaagcaggcggtgaaggctcacgtgctgaggaaacagggaacacctgggcgccgctgctgagctctgtgttgctcctggtatcactcccacgggctgcaagacttcccaagagaaaagctactttcatcttctgatcagtaatttaaatattccgaacaacccaaatcacaatggttgctgcaagtctgaggcgcgctcctggctccctgatccctgccgtccacctccctctgtctgaaccatgagacccacgggcgaaccaacaggcactctgccaaccatcagaggccaccccccaacccaggaaaagacagggcggcaaatagttcatcttggtgagtgcaggttatcaaagggacatcggggctcacgcctccgccaagcccctcctcatccacagcgtctgtcggatgaggtgagtacagggtaagtacagggctgcctgcctgcaactgcctcagcgccctttcctctgctatatttcagacctagaaattgccacctaaaaagtctaccattaccacatggatattttccagaaaattggtaactgagtttgctttcattaacttctaacttcttccaaaatatcagaaatctaagtgttatatagaacatttaaatcttctaaaattctcacaccctcaaagtgaggagtaataatttaatcagaatatattcctttttgacagtttagcaataaacatatgacccttccttctttaaaaatgaagaacaaaccgagagcccagcgccaagcctacagggcggcaagctcagccaggcgcgccatcctgcggagctggctcccgtgcacggggctgtagcgcccaggactgcccaggcctggctttgcggggttgcttccagccacgctgtttctccccggactgtagctgtgagggccactgagatctggcagctgagacttgaaccttcctttcaccgcgggactgggccaactctgtctgtccgagggtgagtagcacaggacagcactcttccatctgtgcacggccgggaactgatgggggtcgacgtctgcacattcaagagcggccaaaacatcctgatcgagttttgatggctcctctccaaaaaggaagagccgcctggccggttccctggtgacctcgagctgatcctcgtgcctggggctgctgggactcaaggacattttagcgatcctggctgacatttcactttctgtcctcctgtggccattcccgagttggtctgcgggagaaggctctaacaagtctctttctactgcattgattcttgaagtcaggatctgatctttagtttttgtactttcatctggtgtcttggaaacgctacgtcctatattttgcaaattcagtttatcaaactcaacagtcaaatccgagacaggtggcagatgggcttcctccccacggggggcctttggtctcttgcccgccagggtcctgctgtgattcagaggatggcagagcccatttctgctgctgtgtggacctcccggctcggcggcttctatgaggtctgcctcctgctccaaggggaaggcgctgcacctcgtatgtccaaaagcaccgactgtgggcgggctgttatttcgagctgcattttgccgatttattatttcttccaagctcatgtcatcttcatctagaaacgccctcacggaaatggaattgctgccagacgtggtggctttatctcggcaggaggcttcccgttctcctgtttcttgttgagcctttttgcctatttcctgctgtgtgagatattcttctagtctttgcaggccttcctgggaagacaga

SEQ ID NO: 364801 - DNA, 541 bp, Homo Sapiens
  misc_feature (255)..(271): n is a, c, g, or t
  misc_feature (277)..(459): n is a, c, g, or t
  misc_feature (464)..(464): n is a, c, g, or t
  misc_feature (525)..(525): n is a, c, g, or t
tcagtttgtcatgttcgtaagtgccagcccagaaccatggaatgtgaagaaacacaaaactcactcctctgcatcagtgaattgattgtgtggtggggatgtaagtctgcatgtgtctgacagttccccaaagtggtgccaagtcaatctaaactagagagaatttctggccaggccaagcagagatttcatggatgaagtctcccaaagactgacttcctaaacattaaacatcactggttttccaaaactggnnnnnnnnnnnnnnnnnaacccnnnnnnnnnnnnnnnnnnnnnnnnnnnnnnnnnnnnnnnnnnnnnnnnnnnnnnnnnnnnnnnnnnnnnnnnnnnnnnnnnnnnnnnnnnnnnnnnnnnnnnnnnnnnnnnnnnnnnnnnnnnnnnnnnnnnnnnnnnnnnnnnnnnnnnnnnnnnnnnnnnnnnnnnnnnnnnnnnnnnnnngtcantcgatctgcccacctgggggcttcgcaggattgctgggggttacaggtattgagccaccangggccagcccactggg

SEQ ID NO: 364802 - DNA, 1042 bp, Homo Sapiens
  misc_feature (828)..(905): n is a, c, g, or t
agcggactgagccgcgccagctgagccaggtggagccctactttcctctcctgctttctgcctgtgactagcgccgtcccctaccgcccgtcgaccccacttccatgtctggcggacacagctccccggaacctccacgcccatggccactagacagagggagtcttccttcacctcctgcttttccacctggaattgcgacgcgggcgacgagggcatgggctgcacctgcgaagatgcttccttgtgcaagaagcgcctgtcgggcgcgggattcggggctggcatctgggacgcgggctgaggtgggaggcgggcctgcatctgaagaatacgctcggaggctggcaggttgctgcccccgcctcgcacgaccctcgcttcccacctgtgaaatgcacagaacagggcttcatttatttaacgaatcgtttctgagctcctgctgtgagccaggcttggagcaagcctgggtactgtggatgggagcaggcccctgaaccaggcggacggggtcttggcgttctcggagctaaacgctgctagaaagacaaacatgatgcacctaactactgtctccgtagattatgaggatgagaggtggaggttctctctcttttaggtatgatccccgttgtgcacctgaaactcaggcgatgactttcagtgaaggaaatgaccttgtctagggccacattaatacctgtttgaaaagccagtaccacactaagtctccactattaagggtgtgatggtgagggtggggtcgtagggagcacaggtatgtgtcagaaagagaaaacatgaggcttgagtgtcctccatttnnnnnnnnnnnnnnnnnnnnnnnnnnnnnnnnnnnnnnnnnnnnnnnnnnnnnnnnnnnnnnnnnnnnnnnnnnnnnntaatgggaatacaccaagaacaagacagacgtgctgccagacatactggaactcacggtttagttgggaaagactgacaggaaataattatccatgagatacataattaaaatttggtgttgtgcaatgagaaaaaa

SEQ ID NO: 364803 - DNA, 451 bp, Homo Sapiens
agtgctgaggctttgcagaactagcaggagccgaaagagaactgtggggccctttgggtcaaaatgggtcatctgccatgggaatagatgttgaagaacacatcaaactttggaaggtgcttcctatggcccatatgaaaccagtgtgagatgctggggtttgcacgggaatcagctgtgagtgcttatcagggggtgatgggtaaacccaggccatgtgacttcccaaagcctcttcttagcttataacagtctgggtcaagttttctttaaaagtaaaccagcaagttttgccatctgcctttgtttgagaagagatgggacactcataaaaattgcttaaaatggaagtgggcagagaaaccgttggcagccagccagggaaattttctttgtaaagggcatgtaagcgagaagcttgttctgggacaaaaaaagggaagagttcatt

SEQ ID NO: 364804 - DNA, 1107 bp, Homo Sapiens
  misc_feature (123)..(136): n is a, c, g, or t
agtgagcaaagatgcgccatgcactccagctctgggctacagagcaagactgtctcgaggggggaaaaaaatcttccttcgcttctgacattagagcaggcagacacatgcgcgcgcgtgtgnnnnnnnnnnnnnncttcctcacatttttatcagaagttctctctggaatctgcactgactgaggcttcttttgagcttcacgccccacttcttcccccgtcgtctttctcctaggcacctgctctttaaaacacaagtcagcacaagggatcagaatccaggtttaactttgctgctggaagtaaacaagtgaggataaaattcttagtgaaattggacagaattttgctctcatatttgccctttttaataggttgacaaaagggagattttgctattgttaaacacctcaccatttttattcttcttgctccctttttcgccgtttgtgcctacactggggttagaaaagatcttactgtcctctgcagccacttaagcgaatccctttacttgctccctttattgacaggtagttatttcctaagctttctaatcttaccatacttccataaatattctatatataagcctctagaatttgcctcatagcttttttttaaaaaatgaaacaaacctcctcccgaaatgggcacttccttatccttttagcttaaaagaacaagcccagccacgcaattgcccctcaaatccttcctgcttccaataaaagctctccctggcatgttccaaaatttagaaacctctggagcctggattagaagcaatgaacaaactcccccacttcctgggggtgggcttcccctcatatttttttcggcgacgggttttcccaatccctccaaatatcacggctcctggggttacaatgacacacgggctacttctcttaaattttaaaaccaaagccccaaatccgggtgggacctattttatttatgagccctcccgccctcaactgctattggccgcagggggaaacaccgcccaccctggaagcggctacaccaagacctctgttgcccgtttcacactctcattcaccagatgtatacctataatcgactcgcccataaacaaaaa

SEQ ID NO: 364805 - DNA, 1167 bp, Homo Sapiens
  misc_feature (85)..(123): n is a, c, g, or t
  misc_feature (505)..(505): n is a, c, g, or t
  misc_feature (652)..(660): n is a, c, g, or t
  misc_feature (769)..(812): n is a, c, g, or t
cttcatccgataatattatcgcttacatttagtgtgctagccggccctcgcgctctttcccttcctggggcgccgaccccgcccnnnnnnnnnnnnnnnnnnnnnnnnnnnnnnnnnnnnnnncggcgccacgcaagagaaggtgccaggggacgcagagcgactagaggcgcgcggtcccggccagcaccgtctctggcgttgtagctgcggccgtggcggaggactacggcgacaaggacgagggccgctctcccagctctctgcgtgccgcgccgctccgctccgctggctgaccatctggagtgcaggctgggaggcgggatggagtgatagggaagatgtttataaattcttctgtgggatcagagggcacgcctattacaaccagaaaactacaagtataacagcgaggatggatgaacaggctctattagggctaaatccaaatgctgattcagactttagacaaagggccctggcctattttgcgcactaacgggtnttccccgatgatcggcccggtgcgagccttagctttgtagcccccgcggcccctcccccgatgcacctcggacgaaaccactgaccgcgccgcccctgtcccctttccgctacgctgcctgggaatcccgccctcacccattgtctnnnnnnnnngtttaacccggaggcgatcgtcgtccgcacgccatccgcgcctaaacacgccccgccccccgcgctccaacacaccagccgggacccgctatcgatatcaatagggcgnnnnnnnnnnnnnnnnnnnnnnnnnnnnnnnnnnnnnnnnnnnntctcacgatgaataaccataaccccccccacccaaaccctcgcctcaaccgccgtgtccccgccacgaatcgcgcccccaattatcgcggcccaggcgctcccggaaaagcccgcgaatccgccgcacgtacttccgccgcgctatcccccccgctcatccccgtatgacacggcgccggctctctacctactcacccccgccgcagactacgaccgccaaaaagccccgcgtccggttcgctctatctatatgccccgccccgcccgccgtgtcctctcccacgctactatcctactcgccgcggtctctcgtaccccgccgctcgcgccgccgtcggccctcccccctaatac

SEQ ID NO: 364806 - DNA, 938 bp, Homo Sapiens
  misc_feature (45)..(92): n is a, c, g, or t
  misc_feature (101)..(210): n is a, c, g, or t
  misc_feature (364)..(364): n is a, c, g, or t
  misc_feature (841)..(885): n is a, c, g, or t
tagtccagctattgggagcctagggtggaggatgcttgaacccannnnnnnnnnnnnnnnnnnnnnnnnnnnnnnnnnnnnnnnnnnnnnnntgctgactnnnnnnnnnnnnnnnnnnnnnnnnnnnnnnnnnnnnnnnnnnnnnnnnnnnnnnnnnnnnnnnnnnnnnnnnnnnnnnnnnnnnnnnnnnnnnnnnnnnnnnnnnnnnnntacagtatgcttcatagaaatatgaaaagaatgagagcaaggttgagatagaaagtaacagggcatccctcctgagtaaaacaatgctgccccctcacgcttttgtttaccctcccgtgggtctccctgcttctgtcgtctgccagaaactggntgagccaagtgcacttgcagacgccatttgttctccctgggagtggggccggtgccagcgccagcatttggacttttggcaaggagccctggagccctggagcgagggaactccggccccacaaaggccagggaatcctccagtttggtgagacggagggcttttgggaagggaggcctatacaaggctccatgaaggaggtggaagcttgcaagacgatgatagtcttgtaatcagtccgatggagatggatgtaaataataatattaataaacaccatcaaatgtgttcagagtgctgttctgtgccaggctttggataaatgttggatatctgttctgtttattttttattgttctatttcctaggcagcagcctaaaccaaaataggttcagagaggctcccaatgttggacagttgttgttgcagcaactctaagtactctacatatgttatcacataagaggcaaggagcnnnnnnnnnnnnnnnnnnnnnnnnnnnnnnnnnnnnnnnnnnnnngtaggcatctctctagaggccacacactcagtgactttaagagcctggatacg

SEQ ID NO: 364807 - DNA, 1229 bp, Homo Sapiens
  misc_feature (593)..(593): n is a, c, g, or t
  misc_feature (704)..(704): n is a, c, g, or t
  misc_feature (893)..(920): n is a, c, g, or t
  misc_feature (1153)..(1170): n is a, c, g, or t
tgtcccccccggtgcaagtgtgcctcacttgccgaagctgcgtcacccggggtgccaccaagcgaattcttcccttgggccctttcctcgtaatcgccacctttttttacgcgccgcccttatcccgagaatttggggggcagtatcctccggtgtggggccccccgggaggcatccccgataaggggacctcttccctaggaccgctgccctgggggtttatatccccctgggctactccctccgtagtgttgaaagcgagaagccgtttggaatgcccgttaaaaggcttttctgggaataaccttcgcttaaaaagggaacccaacagccacttttttagaaggcgcgtcctctttcccaaataatccgcggtggaaaatgtcgggcgctccacggagtggggtgtgcttttccctcgcggttccacggaaccacaaaaagggtttcccccaaccgctcccaaacccttcacggaggtttctctcgaaggaaaataggggaaagagaaattattccaacaggtaagtggttttaaactcgcccaccactgttccccaaaagtggaatttctctgagtgcacccctctttnttgtgcctccacagctaaatttgggcgaacagctctgtttagaaaaaaccgcttgttgttctctggggctttaaagaagaaagcccccttaaataatttgtttgggggtgnacaaccccaatgttctgaggggaccccgaatttaaggtcggtcccccagaaagggatttcccttgagcttccctgccggagtgctcagacacggggacccgggggtatcccctcgaggagagggccaaacccctttgccccccggccaggccgtcctgcacctttgggtcacccctctgcccgaactcnnnnnnnnnnnnnnnnnnnnnnnnnnnnaagaaaagtaaattcatcttgctcacagtcctttctggaagagtttagaaagcaaagaattcaccgactcagcaggaagcagaacgagctgttccttcttttgacacgcacaagctaatcccctagagagtggggatgtgggaaacggagggtaattaattctttggtcactggttcactgctgaatagccttggtcagttttggctctctcctattttagggggaaaaatannnnnnnnnnnnnnnnnnaaaaaataaaatgttcgcacaatgggagaaaattgctttaagtgttacaccttagccaa

SEQ ID NO: 364808 - DNA, 2089 bp, Homo Sapiens
  misc_feature (187)..(211): n is a, c, g, or t
  misc_feature (920)..(937): n is a, c, g, or t
  misc_feature (1171)..(1197): n is a, c, g, or t
  misc_feature (1850)..(1850): n is a, c, g, or t
gggtggcgaattctccacgaggggtgatgtacaagtgcctgtggccaaactgtggcaaagttctgcgctccattgtgggcatcaaacgacacgtcaaagccctccatctgggggacacagtggactctgatcagttcaagcgggaggaggatttctactacacagaggtgcagctgaaagaggaatnnnnnnnnnnnnnnnnnnnnnnnnncgcaggcaccccagtccctgggactcccacctccgagccagctcccacccccagcatgactggcctgcctctgtctgctcttccaccacctctgcacaaagcccagtcctccggcccagaacatcctggcccggagtcctccctgccctcaggggctctcagcaagtcagctcctgggtccttctggcacattccgggcagatcatgcataccagggctctgccatcctttccagatcccagtctcaccacacatctacaccagtgtcagctgggctgctgccccctccgccgcctgctctctctctccggtccggagccggtcgctaagcttcagcgagccccagcagccagcacctgcgatgaaatctcatctgatcgtcacttctccaccccgggcccagagtggtgccaggaaagcccgaggggaggctaagaagtgccgcaaggtgtatggcatcgagcaccgggaccagtggtgcacggcctgccggtggaagaaggcctgccagcgctttctggactgagctgtgctgcaggttctactctgttcctggccctgccggcagccactgacaagaggccagtgtgtcaccagccctcagcagaaaccgaaagagaaagaacggaaacacggagtttgggctctgttggctaaggtgtaacacttaaagcaattttctcccattgtgcgaacattttattttttnnnnnnnnnnnnnnnnnntatttttccccctaaaataggagagagccaaaactgaccaaggctattcagcagtgaaccagtgaccaaagaattaattaccctccgtttcccacatccccactctctaggggattagcttgtgcgtgtcaaaagaaggaacagctcgttctgcttcctgctgagtcggtgaattctttgctttctaaactcttccagaaaggactgtgagcaagatgaatttacttttcttannnnnnnnnnnnnnnnnnnnnnnnnnngagtttctggctgatgggtgactcaaagtgcaggactgcctggccgtggggcaaaggggtttgcccttctcggagggtacctcctgttccctgtctgagcatcctgcatggaagtcaaaggaaatccctttcttggtgacgacttaaatctgggttccctcagacattgggttgcaccccaacaaatattaaatggcttcttcttaaagcccagagaaagaggtttttttaaaagactgtcgccaaatagctgagccaaaaggctgatcagaattcactttttggaatgtggcagttaaacactaccttgatcattctctcctctttcctcgaggaactcctggagggtttgagcgtctggaaactctctgctctgacccgaggaagcaccctcctgacgccgccttcctccggttattgaaaggacgcctcagaaatgctttgttttcttttacgatgtattcagaagcctttactgattaaagttttcttttatttgggtggccgggagagacccagggaggttctggaggttcctttctgtctcctggccccaccagggatttccccatttctgtttgctgcctgaaagcaggatgaggaaggccaaggagagtccttgcacccgtgagcgtcaggatgaggaatgacangaggaaaacctggggtttggggttatgggttgctggccgtttggcccttggtgtttccggagcctccagggaactaggggaacctgggctgcctgaatgccaaaaacaaaagttgacttgggagaaaaccgagccaggtttcgcgagtgtaacaacagtgcacacgacatattggtgaagtaacaaggacgctcacgcccccgcagcgaagaacatacccccctcgtatagaaccagtt

SEQ ID NO: 364809 - DNA, 486 bp, Homo Sapiens
ccgtacccccgccgacgcctcccgcaggcccccggcgtcccaggggccccaggcgcccagccgagcactcggagtcgctgcccgcgcagccgtaaagcagacgacgctggggagctgacggggacgggccggggccgggaacacgcgccgcaggggctcggggccgcacgcggcgcccatcggcagcgtcgatctccgcagtggagcgccagcgacggcaggaccctgcggcctgggccgccagcgtgggcgctgggccgcggcgtggccgtggaggccgaggctcttcccgctccgccgtggggtacttagggggccccgaagggaccgcggaggcgcggcccagcaggctggtctcagactgggagcgcgaggccttgcgggccctgggcgagccgcggcggcccgaagcctcggccatgcgtccacggcggccggcggcccggggacgctcccggggtggtgactgctccacgctgcggccgc

SEQ ID NO: 364810 - DNA, 482 bp, Homo Sapiens
gtaaggaaatgttgaagtcttgagtatttttattcttttaaaaaactatagttagtgtcaactgtgagcactgataaatattattcatgtgtggttttccttctttttaatccagactttttaagaaactgttttggcatagagctttacttaaaatgctgcttcattttacacattgtgaatactgaagattctaaaaaataaagatgcatttaaaatctctgtgctgttccattgtagaaatggtaatgtgcattgctttgccaaagtgtgtaattaaatgtttaatggtttagaactcctagtttcacaacagggcttctcgtcatcacttgcagcgtgtgagcttccaaataagccgccatttctttggaaaacgcacgcacttaggcatggcgatctcctgttccgttaggaaatacggttatgttgacattatggttactgtgcttgtggttttgcaataaacatgtattgaaagc

SEQ ID NO: 364811 - DNA, 462 bp, Homo Sapiens
agatgcggggcagtcacccattcaattaggaaacaccagcaagtgccagaagcttctcattagcaggtcagctttcaaataactggtttatcccaggtgtgtgagacccgataagcagaagggaaagctcttagcgacctatccagctgctctgcactgggctcctgacatcccagaaatcagtacatctgtcttctggggtccaagaggtatttcagtttctctggctttgtttcccgtcatttgtacctggccctgcagaccaccccagtatttccatcataatacccctgtgggcaggtgcatacctcatgacaatatttaatattaatagatttctgtgttgtctccagaatggaaaggggctgtctattccttgagctagttggcttgctaaagactattgacttcattcttcttttcctatctacctaataaaccagtgttcatacaacccaaaaa

SEQ ID NO: 364812 - DNA, 386 bp, Homo Sapiens
ggccaaatgaggtcctagtaggccagaggacttttcaccagtgaagtgcagtgtagttggaacaggtaggtcactgctggccagggaatctcaaccttcttcaggctgcctcaggcagagtggggcccttggggccctggagacctggcagtccccacatggtgtgaatcttttgctagagcaaatccaggccagctgctctgaatgttggtgctgccaaactttcaataacctgggacccttgccagtcaggatgttctccctgggtctgatttgcagtgcaaattgactcttagctgttccaaattctcttggctctcgattacccatcctcaggccccagtactcatcctctagtcccatcccccattctgtaactctctctc

SEQ ID NO: 364813 - DNA, 1111 bp, Homo Sapiens
gctggtacggtcggaagtttgggatatcgtcgaccacgcgtcggtaaaatgttggacttggggattactgagattagtatgtgggtagtaaagaatggagtgggagttagtggggagggatgacaaagcttcagctttggttttttagtattattatttagtcttcataacagctacatttctgtgctcttattggccagataaatgtgttatattaaaccaggtaagtattttaaacagagaacattttatttgcatatatccctacaaatggcccattttatgggtggggggataaaaaagggattccctaactttaaataatcagaatatcctgcaattgaaaggagaaaaaaatccaattttgtcagtattttcttagtctgaaaaaaacagcagtagtaatctggtgaatgttattattaggagtgttctgcctctacagtggcatattccatgacattaatagaaaacccttctttcccacccctccccatcttgacattttcttttttaggatgttggttcctgcaaacaagaactgaccctatcacctctgcctcacagtgggtaaatatatcatacatctcttgaaagggaaaatatccatgtcagtttctttcacagtagaagaatggctgcttttgaatggggaggaaagaagacatttttcttaatatcctttttggtcccatctctaaaaatgtataaatatctgattaggatatagacttcaattactcattccataatttcgcaactgtccttttaggaggatagcccactccaacaacattaactttcccactcattccacaaacacccagtaatcgtgatttcacactactaaccgctggataaaccatttacagtaacgagggttgaactttaggagattaacaacactttagaaccacagtatattaaaaaaacgggatgaaacatcaacgtgaaaatattatcccagaggatagctaacagcataaataggttattctatacgagtgacctatatagtaagaacaagatagagactattatgaaaccctatcccaataaactcactataatcagaaatccacggaatgttaaaaaacacctatagctataa

SEQ ID NO: 364814 - DNA, 770 bp, Homo Sapiens
  misc_feature (693)..(693): n is a, c, g, or t
  misc_feature (731)..(731): n is a, c, g, or t
ccccggcgcagcgcggccgcagcagcctccgccccccgcacggtgtgagcgcccgacgcggccgaggcggccggagtcccgagctagccccggcggccgccgccgcccagaccggacgacaggccacctcgtcggcgtccgcccgagtccccgcctcgccgccaacgccacaaccaccgcgcacggccccctgactccgtccagtattgatcgggagagccggagcgagctcttcggggagcagcgatgcgaccctccgggacggccggggcagcgctcctggcgctgctggctgcgctctgcccggcgagtcgggctctggaggaaaagaaagtttgccaaggcacgagtaacaagctcacgcagttgggcacttttgaagatcattttctcagcctccagaggatgttcaataactgtgaggtggtccttgggaatttggaaattacctatgtgcagaggaattatgatctttccttcttaaagaccatccaggaggtggctggttatgtcctcattgccctcaacacagtggagcgaattcctttggaaaacctgcagatcatcagaagaaatatgtactacgaaaattcctatgccttagcagtcttatctaactatgatgcaaataaaaccggactgaaggagctgcccatgagaaattacaggaaatcctgcatggcgccgtgcggntcagcaacaaccctgccctgtgcaacgtggagagcatncagtggcgggacatagtcagcagtgactttctcagcaac

SEQ ID NO: 364815 - DNA, 467 bp, Homo Sapiens
  misc_feature (339)..(347): n is a, c, g, or t
accatcagactactttatcagaggtgttatttttagatagaggtctttgaactccatcctaggaacattgtacccatgtcctcccagaactgcatcttgcactgggtgtcggaagacagccctgcaagacctgtatgctctgtaccattcagtggtttttaaggttaactaccagaagtcatatctgaggcctcccagaagcactactctaaggaaagtagttaaatgtggacagtgacagcagaaacatttacacattaaaccagtttatagaacatgagaatgttcagagcataaagaagcttgtcagctcaatgacttacgaggcgtgggccattnnnnnnnnnggtctggagtttgggaaggagaaaggaatggagatgtgacctcaaaagagtgatttttactatgtgcatactatacctccacaaacttgactttaaaaaaataaaatattcacagaaaaa

SEQ ID NO: 364816 - DNA, 880 bp, Homo Sapiens
  misc_feature (44)..(96): n is a, c, g, or t
gggcgggatggcccgcgcgcctcggcgctgcctctcggagctcnnnnnnnnnnnnnnnnnnnnnnnnnnnnnnnnnnnnnnnnnnnnnnnnnnnnngcgccgcgcgtgaggggccgcctaaggccgagcggtgcgcggcgagcggccgggcgagcgcagccaacatgtcggataccaaggtaaaagttgccgtccgggtccggcccatgaaccgacgagaactggaactgaacaccaagtgcgtggtggagatggaagggaatcaaacggtcctgcaccctcctccttctaacaccaaacagggagaaaggtatttgcctttgattattgcttttggtccatggatgaatctaacactacaaaatacgctggtcaagaagtggttttcaagtgccttggggaaggaattcttgaaaaagcctttcaggggtataatgcgtgtatttttgcatatggacagacaggttcgggaaaatccttttccatgatgggccatgctgagcagctgggccttattccaaggctctgctgtgctttatttaaaaggatctctttggagcaaaatgagtcacagacctttaaagttgaagtgtcctatatggaaatttataatgagaaagttcgggatcttttagaccccaaagggagtagacagtctcttaaagttcgagaacataaagttttgggaccatatgtagatggtttatctcaactagctgtcactagttttgaggatattgagtcattgatgtctgagggaaataagtctcgaacggtagctgctaccaacatgaacgaagaaagcagccgctcccatgctgtgttcaacatcataatcacacagactatttatgacgtgcagtctgggattccgggaaaa

SEQ ID NO: 364817 - DNA, 132 bp, Homo Sapiens
cctcttttgaaaaatgattttagtctgctcgtgtttaggtaggtaacttctcttgatcccaattttatactttaaatgatcccagatattgcattttaaatgagatgagtatataaaaaataaaaagcaaaa

SEQ ID NO: 364818 - DNA, 1858 bp, Homo Sapiens
  misc_feature (1168)..(1188): n is a, c, g, or t
  misc_feature (1359)..(1375): n is a, c, g, or t
  misc_feature (1397)..(1443): n is a, c, g, or t
  misc_feature (1514)..(1529): n is a, c, g, or t
  misc_feature (1544)..(1660): n is a, c, g, or t
  misc_feature (1691)..(1750): n is a, c, g, or t
  misc_feature (1760)..(1760): n is a, c, g, or t
atcaggccaaatcggccgagctcgaattcgtcgagagcggagtttcttttctgcgcttgtgcgttttctgttcggtttccttcccgctagcggggccacgagggttgctaggcaacagcccgtgggtgacttggtcttagggtcctgtccggcttggggctgatgaaaggagctgtccgcgcccgggctcttccgagaagtggttgctgacagccacaaagtgaaagggagtgaggcggcgtggacgagtaaggagtgacagtgaggattcacatttgggttatttcaagatgagcttcctactgcccaagctgactagcaaaaaggaagtagaccaggcgataaaaagtactgctgagaaggtgttggttctcaggtttgggagagatgaagatcctgtctgtctgcagctagatgatattctttctaagacctcttctgacttaagtaaaatggctgctatatacctggtagatgtggaccaaactgcagtttatacacagtattttgacatcagttatattccatctactgtctttttcttcaatgggcagcatatgaaagtggattatggatctccagatcacactaagtttgtgggaagcttcaaaaccaaacaagacttcatagatttgattgaagtaatctatcgaggagcaatgagggggaagcttattgtccaaagtcctattgatcccaagaatattcccaaatatgaccttctctatcaagacatttagtacattaattgctgtcaaagatgaagaagaaggcacatcttgacacagtacctgaatccagctgtgctgtgtttctggagtcctttggaaacatgtgtcccagaggagaagaggtttgacttgcgtgtagaaaacccggcccctgaggaaaagaccccactggttctctgatgacctgggatgcctaactgtctactccctgcaagcctcagagcagccaagtcattggtgttcattttccccacagtgatttttgtaacttctctttctaatgtttttctttatccctttaatacagaaccctcccaaacattggctagtacaacttgatttcatcatgttcatttgatacacaagtgaactggaaagtcacttcccatagaagcaaaagtacttattttctaccctagctgggtgcatgtgtgtgnnnnnnnnnnnnnnnnnnnnnccccacacccctttgccggttcctcgactcatacatccctcgtgctttcccatctccagtctgtattactgtaggttctcttcaaataattaattgagcagacaagtttgttttattttggagcctttttggctctggcttttaaacattgtcctggttggctcatttaannnnnnnnnnnnnnnnngacaccgagtcactcttgtcannnnnnnnnnnnnnnnnnnnnnnnnnnnnnnnnnnnnnnnnnnnnnncctccgcggtcatgccattcccctgcttcagccccctgactagccgccgataccggcccccctccctatgnnnnnnnnnnnnnnnngcttttcctccaagnnnnnnnnnnnnnnnnnnnnnnnnnnnnnnnnnnnnnnnnnnnnnnnnnnnnnnnnnnnnnnnnnnnnnnnnnnnnnnnnnnnnnnnnnnnnnnnnnnnnnnnnnnnnnnnnnnnnntccgcccctcctgcgtccttatctacctttnnnnnnnnnnnnnnnnnnnnnnnnnnnnnnnnnnnnnnnnnnnnnnnnnnnnnnnnnnnngcctccgcgnggcccgcacgcccgatccgcggctccccctccgttttacggttttctcccgccgcccccgcgccgtccttcgcccgtgttgtcatcttgccggcgcgg

SEQ ID NO: 364819 - DNA, 420 bp, Homo Sapiens
agcagagctgaggataaagaggaatatcctgcacacttcttccttctgtgtcagggaacatttgcttgtctacagctcgagtatttgtaaacactcagtagcacccaaaccctgagccctagcagtttccttttgcttgtttactagcaagagtagcatgtcggaggacgatgagacattgaatcaaactcttagacaagctggtgaaagttttaacgactgctggaggcaacatgcttccacactgacagaaatcatctttcaaaaatcctgcacatatctcaggcttatgaaacaaactaattcctaatagttggaaatgaattaaaagcttgcggtgagataaaagatagattttggctggatgtgatgactcatgcccgtgatccctacactctaggagggcacagcaggaggatc

SEQ ID NO: 364820 - DNA, 835 bp, Homo Sapiens
  misc_feature (64)..(64): n is a, c, g, or t
  misc_feature (69)..(69): n is a, c, g, or t
  misc_feature (169)..(244): n is a, c, g, or t
  misc_feature (503)..(632): n is a, c, g, or t
ctgtacccctccatccttccatccctgcaccctccatccctgtacccctccatccctccatccntgcancctcatatcctgggactcacactccttccatccctgcaccctccatccctctatccatgcacccctccatccctgtacccttccatctgcctccttcatnnnnnnnnnnnnnnnnnnnnnnnnnnnnnnnnnnnnnnnnnnnnnnnnnnnnnnnnnnnnnnnnnnnnnnnnnnnngtcgacgacaccaagaaacacttggatgttaaggattcaccgaacactgttcaggctccaggtgctgggagcagcagtgaacaaagccaacagacactgccaccctcaaggagttcacgttcatgggcgagggaacagatgagaaacccggcaatgaaagtaagtagcataattgacttgaaaagtgccggggagaaagagaagatggatggagaatgacacctggccccttctctatttctttatttgtttcactctnnnnnnnnnnnnnnnnnnnnnnnnnnnnnnnnnnnnnnnnnnnnnnnnnnnnnnnnnnnnnnnnnnnnnnnnnnnnnnnnnnnnnnnnnnnnnnnnnnnnnnnnnnnnnnnnnnnnnnnnnnnnnnnnnnatgagttttgatgaatgtgtcctgcttcttcccaggctccaccatctcttcccctaaaggcaaccaccattctgatttctctcaccaaagactggaaaaatatcccaatacctggatgtatgcctcacgtgtcccgctggccccagcacccaggtatagttagttactgctgtgcctgggcgacaagagtgaacctccatcac

SEQ ID NO: 364821 - DNA, 511 bp, Homo Sapiens
aagccgcctggtaccggtccggagttccgggatatcgtcgacccacgcgtcgctgaccagggctgggcagggccaccctgggctggtgaggctgccctgcagggcttctcactatgtagcaccagtcaccagcccaggtcacagaagaagcccctccgagcacccactggagaggggaagctgaagcccagggagacgggctccatggtggtcccacatggagctgttttgcaaaccctggaaaaggcggctctccctgtcccaacactcttcagagacaggaagacagagttaatcttgaatgaatgttatttctacttagtcctaagcaagaataagctgccctcttggtgatcatactttatacggagtgctatcgtttatgaaatgctttcagtatgctttttaaattatgcaggcaaaataaccacacttcagaaaatgtggacttctgaaaaataaaatccccataattcttaataaaactgccttttgcactttgatacattac

SEQ ID NO: 364822 - DNA, 908 bp, Homo Sapiens
gcgggattgcggaagccctccacagttcataaccgttggctggttatgaaccgttcataacgggcgttaataaccataccctgttagactaagcatggtccacccgcgaatcctctacagagatggccaagcgctggggtcgtggctgcgtcctctaggccagccttgtgcaaaggaccttctcaccacagatcagccagaccatcttcctccttccaagtcatcaaagagttccaagctggtcacctgtcccttgatgttcccaggaaaccaggaaagaggacccctgcattttatcttcccatccagagtggcaggatctctgcctgggaaacaggcttcattcagcacagctgtggtagcattaacaaagcaaagtgggcacatgtagaagttgaagctaaaacattcaagaactccagtctgtttctgtggatgttaagggggtgaagataaaacaatggaggtgatgaggaggaataacttgaagacagtttaaagccacagtgatacaaagaatgaagagaaggaaggtgctggattttactaagaaaacagactgagttcaggagtctcaccagtagaactttatagtattgcgtttcgattacatgtgtgtgaattttaaaaactgattaccctccagtaaaaatgtggaaccaatttgcatttggattaaaacattaggtttggggacaaaagtggaccccatgctgcctgagatgaagcagagagagcaggatggcagaggaatcaccagctcaagaaacccaaggacttggacagtcttccagcagaagaggccagggtctctcagtgtactactccaaacaggcctctcctagaagatgtagtcggggaaggtccaaaacccaccagacaggcacatccagtggggaaaagacttc

SEQ ID NO: 364823 - DNA, 447 bp, Homo Sapiens
ttcccgtctatgttaaaagctttataaatttttaaagaacacagaccccgtgacgcatgttgctgtcaaatcaggaaattgcttcaggaaggccttgttctgctgttcggcggctgtgtgtcactgacttggtttatttaatagttcttctctttaattacatctgtgtataattgccttgtacgttccagggagtgtgtttattgttcggattcctgatgactcatcggtgtttttggcatgctcacaggtcaggccttagttatgggaaaggcccagtggatggggaagcttccaagggaccgtgatgcccctgtggtactagctactcaggaggctggggtggggagatctcttgagcctgggaggccaaggcaatggtgacctgtggttggaccactgcaccttagtctggggaactgagtgagatcctgtctcgaagaaaaa

SEQ ID NO: 364824 - DNA, 512 bp, Homo Sapiens
  misc_feature (352)..(405): n is a, c, g, or t
  misc_feature (458)..(458): n is a, c, g, or t
gcgggggcaaaggccgcggggccccggtcgcggcgcgccccggcccccaagccgtacgtgtgtctggagtgcgggaagggcttcgggcacggggccgggctcctggcgcaccagcgggcccagcacggggacgggctcggggcggcggggggcgaggagccggcccacatctgcgtggagtgcggggagggcttcgtgcagggcgccgcgctccggagacacaagaagatccacgcggtgggcgcgccctcggtctgcagcagctgcggacagagctactaccgcgcgggcggggaggaggaggacgacgacgacgaggccgcgggcgggcggtgccccgagtgccgcgctnnnnnnnnnnnnnnnnnnnnnnnnnnnnnnnnnnnnnnnnnnnnnnnnnnnnnnttggcgggagcgacgacgtgcaagaccaagagacccagggagaagcggacggngtgcgatggaccccgcggcatccccggctccccgccctcctctgtccctgcgcc

SEQ ID NO: 364825 - DNA, 466 bp, Homo Sapiens
  misc_feature (410)..(410): n is a, c, g, or t
cacgctgcaggtggtggcttgccctgttgcctggccctcagctcaggcccttggagtgcctctctgccctgtcttgctgcccccggctgctcctcttaccctccctccctctctgcccgcttccggcccaagtttctcgagctacctcagtgcctgtgaccgcctgttacgtcagggatatgaggaaggcctggtggatgaggccatggagatgttccagttctccgagagccaggcaggggagttcctgcgcctctgggagcagttcagtgacatgggcttccagcaggaccggatcaaggaggtgctgctggtccatggcaaccgccgagagcaagccctggaggagctggtggcctgtgcccagtgaccacggaggcactccgacgatgcctgggcatctaggcccnaatgccagacctggcaacccatcctaactgtattattaaaaccaagtaagagtaaa

SEQ ID NO: 364826 - DNA, 499 bp, Homo Sapiens
  misc_feature (85)..(96): n is a, c, g, or t
aaagaaaaatgaatgtcgaaatgattcattcagtgtttgaaagatatggctctgttgaaacaatgagtttcatactttgtttgtnnnnnnnnnnnngcagagaagggttgaaagttacatgtttttttgtatatagaaatttgtcatgtctaaatgatcagatttgtatggttatggcctggaagaattactacgtaaaaggctcttaaactatacctatgcttattgttatttttgttacatatagccctcgtctgagggaggggaactcggtattctgcgatttgagaatactgttcattcctatgctgaaagtacttctctgagctcccttcttagtctaaactcttaagccattgcaacttctttttcttcagagatgatgtttgacattttcagcacttcctgttcctataaacccaaagaatataatcttgaacacgaagtgtttgtaacaagggatccaggctaccaatcaaacaggactcaaaatggggac

SEQ ID NO: 364827 - DNA, 2186 bp, Homo Sapiens
agcgggaggggggcgagcggcgcggcagagtgcggcgccccgcagctcctgaggttttggttatgaacaggattcggattcacgtcttgccaaccaatcgggggaggatcactccagtgcccaggtctcaggaacctctgtcttgtgcattcactcatcgtccatgctctcaccctcgtctggaggggcaggagttttgcattaagcatatccttgaagacaagaatgcacccttcaagcagtgtagttatatatcgacgaagaatggaaaaagatgtcccaatgctgccccaaagccagagaagaaagatggggtgtccttctgtgctgaacatgtccgtaggaatgccctggcacttcatgctcaaatgaagaagaccaacccagggcctgtgggtgaaacactcctgtgccagctgagctcatatgctaagacagagctggggtctcagactccagaaagtagtcgcagtgaagccagccgaatactagacatgctggtgtctacacggcagaagaagtggccctgattatgcgtgaaaagctaattcgtttgcagtcgttgtatattgatcagtttaaacgacttcagcatctgctcaaggagaagaagcgccgatacttacataatcgcaaagtggaacatgaagctctaggcagtagtctcctgactggcccagagggacttttggccaaagaacgagagaacttaaagcgattaaaatgtctgcgacgataccgccagcgctatggagtggaagccttactgcataggcagttgaaggaacggagaatgctggccacagatggtgctgcccaacaggcccataccactcgttccagtcagaagtgcttggcctttgtggatgatgttcgttgttccaatcagtctcttccaatgaccagacactgccttacccatatttgtcaggatacgaatcaggttctcttcaagtgctgccagggatctgaagaggtaccctgcaacaaacctgttcctgtaagcctctctgaggatccctgctgcccactgcatttccagttgcctcctcagatgtataagcccgagcaggtactgtctgtgccagacgatctggaagccggccccatggatctgtacttgagtgctgctgagcttcagcccactgagagtttacctctggagttcagtgatgacttggatgttgtgggtgatggtatgcagtgtcctccttcacctttgctttttgatccttcactaacccttgaagatcatttagtcaaagaaattgctgaagacacagtggatattttgggccagatgcagatggctggagatgggtgcagatcccagggatctcgaaattctgagaaagcctctgcaccattgtctcagagtggattggctactgcaaatgggaagccagaacccacttctattagttgatagtttggggaaccattttactttggtggatttaaatttctcgttcttcaaagaagtatttctgatcatctctcacaaaacacaggcaacccagactaccttgtttttcttctggattgagtattatagtcaaacgtaaagccaaattttgaggacgtggaccgtgggtttcttcccactcagggcaaggaagagaaagagagataatccctatcaaagcttctgggattatttgggactatacctaaaaggaaagtgacatctttgtaatgggatttcccaagtcatggatagaaatccacttaagtagctaggtgggagctgtctttgtgagtggtctttgagatactgatggccctaatatcggttatctctatctgaagacctgcagtttagcttttcttcacctctacttaattgggcagtctttaacccctttccctggtgaactctggctttttatcctctgagaaaacagcccacaggactgggtcctccttatccgtcttgcttttaacctatgtaaatttctgtggttgctatcttatgtaaaatatagtaaaaatttattgtatatagtttctattaaatgttaaagaaaatgttatgaaaatatcaaacagtcacctgaattgaatgcatgttttgtttgagaatatagtttctttttcgcggttttggggacctgtctctgatgggaaagggaagttgggacagatcctccttccatcccaagaagtaaataaatctacagtagctc

SEQ ID NO: 364828 - DNA, 1571 bp, Homo Sapiens
  misc_feature (894)..(894): n is a, c, g, or t
  misc_feature (1431)..(1431): n is a, c, g, or t
  misc_feature (1453)..(1453): n is a, c, g, or t
agcggagagggcgagcggcgcggcagagtgcggcgccccgcagctcctgaggttttggttatgaacaggattcggattcacgtcttgccaaccaatcgggggaggatcactccagtgcccaggtctcaggaacctctgtcttgtgcattcactcatcgtccatgctctcaccctcgtctggaggggcaggagttttgcattaagcatatccttgaagacaagaatgcacccttcaagcagtgtagttatatatcgacgaagaatggaaaaagatgtcccaatgctgccccaaagccagagaagaaagatggggtgtccttctgtgctgaacatgtccgtaggaatgccctggcacttcatgctcaaatgaagaagaccaacccagggcctgtgggtgaaacactcctgtgccagctgagctcatatgctaagacagagctggggtctcagactccagaaagtagtcgcagtgaagccagccgaatactagatgaagacagctggagtgatggggagcaggaacccattactgtggatcagacatggagaggtgaccctgacagtgaagctgatagcatagacagtgatcaagaagatcccctaaaacatgctggtgtctacacagcagaagaagtggccctgattatgcgtgaaaagctaattcgtttgcagtcgttgtatattgatcagtttaaacgacttcagcatctgctcaagggagaagaagcgccgatacttacataatcgcaaagtggaacatgaagctctaggcagtagtctcctgactggcccagagggacttttggccaaagaacgagagaacttaaagcgattaaaatgtctgcgacgataccgccagcgctatggagtggaagccttactgcataggcagtntgaaggaacggagaatgctggccacagatggtgctgcccaacaagcccataccactcgttccagtcagaagtgcttggccttttgtggaatgatgttcctttgttccaataagtctccttccaatgaccagacactgcccttacccatatttgtcagggatacgaatcaggttctcttcaagtgctgccagggatctgaagaggtaccctgcaacaaacctgttcctgtaagcctctctgaggatccctgctgcccactgcatttccagttgcctcctcagatgtataagcccgagcaggtactgtctgtgccagacgatctggaagccggccccatggatctgtacttgagtgctgctgagcttcagcccactgagagtttacctctggagttcagtgatgacttggatgttgtgggtgatggtatgcagtgtcctccttcacctttgctttttgatccttcactaacccttgaagatcattttagtcaaagaaattgctgaaagacccagtgggatattttggggccaaatgcanatgggctggagatggggtgcanaatcccaggggatctcgaaattctgaaaaaagccctctgcaccaatggcctccaaaaggggattggcctacgggcaaatggggaagccaaaaccccacttctaataaattgaatagtt

SEQ ID NO: 364829 - DNA, 400 bp, Homo Sapiens
gactagagaagggcgagcggcgcggcagagtgcggcgcagcgcagctcctgaggttttggttatgaacaggattcggattcacgtcttgccaaccaatcgggggaggatcactccagtgcccagggtgtccttctgtgctgaacatgtccgtaggaatgccctggcacttcatgctcaaatgaagaagaccaacccagggcctgtgggtgaaacactcctgtgccagctgagctcatatgctaagacagagctggggtctcagactccagaaagtagtcgcagtgaagccagccgaatactagatgaagacagctggagtgatggggagcaggaacccattactgtggatcagacatggagaggtgaccctgacagtgaagctgatagcatagacagtga

SEQ ID NO: 364830 - DNA, 532 bp, Homo Sapiens
agtttaggtatgactttggaagtgcagaaacagaaggatactgttagaaaatcctaacattggtctccgtgcatgtgttcacacctggtctcactgcctttccttcccacagacctgagtgtgaaagactgagagttgaggagttactttgtggatcttgtccaaatttagtgaaatgtggaagtcaaccagaccaatgatggaattaaatgtaaattccaagagggctttcacagtccacagggttcaaatgacttgggtaacagaagttattcttagcttacctgttatgtgacagtgatttacctgtccatttccaacccaaaagcctgtcagaaagcattctttagagaaaaccactttacatttgttgttaaactcctgatcgctactcttaagaatatacatgtatgtattcataggaacattttttctcaatatttgtatgattcgcttactgttattgtgctgagtgagctcctgtgtgcttcagacaaaaataaatgagactttgtgtttacgttaaaaaaaa

SEQ ID NO: 364831 - DNA, 619 bp, Homo Sapiens
  misc_feature (556)..(556): n is a, c, g, or t
  misc_feature (562)..(562): n is a, c, g, or t
  misc_feature (564)..(564): n is a, c, g, or t
  misc_feature (603)..(603): n is a, c, g, or t
ggtgcgcggggctgtcgtgttccagtccctgtgttccccgtcgctggagtgcagcttaagtgcgaatcatttcttggaaagtttagagataattttgtcaactacccacaatatgtatgtgtggactagattactttcttatttcaggatctaaaggcaaaatggaaaaacgtcacattttgtggttattaccagggactgaagtgagttgcccggtggcccctggtggctttagctcccctggtcacctgaagggctgcagtgacccctcctggccagcagaggtattggcccagccaggctgggggaggctgaaactgcttcccttctctgcagccacaaagggctggattccttgggcgccaggaggggaggatttttcttttccctccgatagccctactgggcgctaagattgttgtgaatcattaccctcagaatttggactttctagatgcttcttaacccatgatttaggtgagtaaacttggaaaaatgtttttgcaaaacttgatgatcaagctgaacgtagaacgatattcctaatgggtgtgtntgcctntnttcccccttttgagacagggtctcactctgtcacccagngctggagtgagtggca

SEQ ID NO: 364832 - DNA, 550 bp, Homo Sapiens
ggtcatacaaaacgtagttgtgaaaggaaaagaaaatgccagccctgtttgacagacattagatttatgatcgttttttaagcctcaagtacgtcacaagaatcggcccacccactgcactgccctgattgtaaacacggccaagtgcccatccctgctcttcccctatcggacctgggctcctccgcttctgaacagcccttgtttccctctcctggtctctggtgggttaaaaagatgcctggctgtatatatatggagagcgtacaccatggagctctctgagctaaaacctccaagacaaacatagcccgctcacgccttccccgtctgccggcaggccgcagatgttaataaacatggttggggtttagggtttgcccactgattcctccatccattttacactcgacaagtcaggagagcattttttcccccttcccttaacgtacaaactcagtaaactgttgtaaggcttggcaacaaacttatgaattttggcctccagatgtggctggaaataaaagtaaacacagggtgtgagcaactg

SEQ ID NO: 364833 - DNA, 566 bp, Homo Sapiens
ctcttcccagcagcgccgggcaagtgggtgctagagtctgagcctcaggctctcctgccctgggcctcccaattggtgctatctgttactgcccgtgctcacggacatggatacagaccctgctgtgctccacaccctgcaggcgcctcgggaagcgcccaaaggattccccttcacgttggtgcacctgctccatagctccgggcgctgcgtcccgaggggccacagtctccatttcagcgtcttgcatggcctggcaccgggtggggtggtatgccccaggacccttgtttgtgtcaaaaatgactttccctgcccttgccgtgggtccggcgttcctcccagccgggatcacagtgggcagccggcacccggcaccactttggcgagcgtcctgcttccgccctcgccctcatctacgctgctccgctttcctcagacccctttttgccgtgcaaagggaattcttgacattaaataaaaggtatccagattgcagactgcatgttcacagagctgggggttctccagcttgcctacagtaaagcctcaatgaactggaatcc

SEQ ID NO: 364834 - DNA, 673 bp, Homo Sapiens
gcggccgcccaggctcgtggaatgccaagcgcctgtctctgctcggggctgacatcacctccgcgtgggaacagagcctgtgctcatgccgagctcatcgggattggcagaaatctgcatccttgtttggtttcaaaacagggggcccagaaggaagactcatgaaagatgcccttgtcggcggaaatttcaggagcttggcccacagcccctgtctgcacttcggctgtgaagaggccagaaccacgcccgctgcccaagagctaggctctgatgaggctgcaggtagcatcgacccggtacctgcttccaccagggcccaggctgagccctcatggcacaagggtgcccataggcgtgtggtggatgggtggacatctcggctaacgctcccgtcacctgtacctgtctccccatcagtagggcaggggcagctctcacttctcacggctatggccactcgatgtgttcagcaatctaagtgggtcgtcgcctcattctgtacatgaaaaaccagcccaagttactgcccaaggtcacacggccattccctctgtcccttcctccctgactcatgccatgcttgtgtgaggggctgctgcgtgcctggctgggacctagtggaataagagagaaagccccttgctcccatggagcaggcgagaggcgacac

SEQ ID NO: 364835 - DNA, 1303 bp, Homo Sapiens
acaggctgtactggtctggaattttaggatgcgctaggcagcacagccggacgggagtgtggcatctggggccgtgtggtatagccaggcaggagacatgtccctatgacatagcagtggtgagcctggaggaggacctggatgatgtccccatccctgtgcccgctgagcacttccatgaaggcgaggctgtgagtgtggtgggctttggcgtctttggccagtcttgcgggccctcggtgacctcaggcatcctttcggctgtggtgcaggtgaatggcacgcccgtaatgctgcagaccacgtgtgctgtgcacagcggctccagtgggggacccctcttctccaaccactcaggaaacctccttggcataatcaccagcaacacccgggacaataatacggtgggccacctacccccacctgaacttcagcattcccatcactggtgctccagccggccctgcagcagtacagccagacccaagacctaggtggcctccgtgagctggaccgcgctgctgagccagtcagggtggtgtggcggttgcagcggcccctggcagaggccccgcggagcaagctctgaggctgtgttaccacctttggaaagaagagtgacctttttctgctgtaggaagtgatgttgaggtgacggtggcctcaggattcagggcccagcccctgcaggggcccaggctgcctctcatctcccacccactgactgcagactgggctttgggctctggggcaaacttctcttcagccccatggatccttaacctggcagcccgttttggggtgctttcttgagcccccagttctctgtcccctagcactagactcagctgtattgtttttccttctggggagcccactccaactgcacagaagttctgggcctgacaggtagattccagctggaaggcaggcccgtgcctggttttgcgtctgttcccctgagggccatcgtcatcctggagcttcaatggggccttggctcctgtctgcctctcagtcagagtcagggctgacaaaggactcagcttccttagcatctcagcagaaaccttgctctgaagaccagagacagaagggacagaaacaggagtgcctcctgctgtgccaggcccatgggcagtgcaggcagatccctgaaggtcagcactcctgggtcttcatatgccaacaggggcgctcttgacactgtgccttcattttccagcccacagcctgggtctcagggatcttgaggggtagaacatgtctggttggggcttgggaataaacatgatctattgaa

SEQ ID NO: 364836 - DNA, 1727 bp, Homo Sapiens
  misc_feature (633)..(686): n is a, c, g, or t
  misc_feature (1156)..(1185): n is a, c, g, or t
  misc_feature (1702)..(1702): n is a, c, g, or t
tgcaaccgccacaccaccctgactggctcagcagcgcggtccagctcacggaggccacctaggtcttgggtctggctgtactgctgcagggccggctggagcaccgtgatgggaatgctgaagttcaggtgggggtaggtggcccccgtattattgtcccgggtgttgctggtgattatgccaaggaggtttcctgagtggttggagaagaggggtcccccactggagccgctgtgcacagcacacgtggtctgcagcattacgggcgtgccattcaccttcatggaagtgctcagcgggcacagggatggggacatcatccaggtcctcctccaggctcaccactgctatgtcatagggacatgtctcctgagtggcaaataccacacggccccagatggccacactcttgggggtggtggagcgcaccaggaccctggctgcttcccgaggggacacgtgccgacaggtcactacaaggcggggtgccacagccactccggagccccatacggtgccgcactccaccaacactgccgcggctgcccacaggggcccggagtctcggaggggcagaccccacgggacgcccacctctggcggcagaagggcggccagggcagcggtgctgtnnnnnnnnnnnnnnnnnnnnnnnnnnnnnnnnnnnnnnnnnnnnnnnnnnnnnnagagcagcgtgaagcccacccattcgccggccttccaacagagcggcgccaccaccagcgccaccagcgcccccgcgggccgcgcggtgaacacgccgccgccctcggtgccgggaaggcagcgtgcgtcggtaagcagcagtgggccggccacgttgctgagcaccccgcagctcagcgtgttgagaaagatgtcggggcagaaggcgccgaaaggggagccgcagaccagcaatggcgcacccttgggcacggccccgagaggcgacaccgccatggctggcccgcgctcctcctccacctcctcctggcctagccgcacgcccagcagcgcaaaccagcccagcgctctcagttgatccgcctcctcgtcctccgacacttcgtcatcccgcgccgcgctcgagaagcgccactgttccgctgcctcgtccccgaagaggcgcgcgaagtgggcccagaaggccggnnnnnnnnnnnnnnnnnnnnnnnnnnnnnnaagccggggctgcaggggacgcccgcgggacggggcaggtgggccgggctcgaggctcgcgcactggggcgtgcacagccctgggcggccccgctccgcgccgcccccgggacccgcggccgttggggcccactgcacgtgcaggcgcaggtcgtcccatgcaactgtcgccaggcaggaagacggcgccggccgcggccaggacttcgctgccagctcgcaggaaggggacgaagatgcccccgtggcaaagcaccaggcccgggctacggctcaggattaccccgctgcagctccacgggcccgcctcgggctgtccggcccgggaggcgctcaccatgcagcccgcctgctcggccgccctcatggcagacccccactgccttctcatggcctctaggccggacactcgggagcttctccgagaaacagcaagctagcgagcgaggacccctacccggtccggctgaagctgcctagctccatcggaagaattccggcccgcttccatcctatnttggagggagggtgaggcggcgcac

SEQ ID NO: 364837 - DNA, 462 bp, Homo Sapiens
ctccccagctccaccaggcaacccgttgttctgcagctgataaccggattaggcagcagaatggggcagatgagtaccctgaggggccctgcctgggaacaggggctccctggcctggcgtgagggctgccactgtcaacaccctaagccgctgcctcctgcagggcatttgcatgtgtgtgcgccctactgtacgcgcccaagagccagtgggaaatgccggcggtggcagttcacacggggcactgctgcacaaagccccaaggccaagcggcacggtggccctggctggcgaatgtcgcgcacccagtctctcgcagcagcgcctggcgcgacgactgctggaagccgggccaaacgcagtctttgcatgagtgtggccctggctgtgggagccgaagcacagccaccacgcgcgccggagcgcagggagagtcgcctgcatcgtccaaccctcctctt

SEQ ID NO: 364838 - DNA, 624 bp, Homo Sapiens
atttcccccaaaggcatcccagcctgggggccagtggggaactgagggcaaggggatatagtgatggggctcagatggactgggaggagggggagggtgatgcattaattaatggcttcgttaattaatgtcatgttgcttgtcgctttctcagtgtgtgtgtgtggtccatgcccactgctggtgccagggtgggtgtccatgtgcacccggcctggatgccagctgtgtccttcgggggcgtgcgtgtaactgtagtgtagtcaggtgctcaatggagaatataaacatatacagaaaaatatatattttaagtttaaaaaacagaaaaacagacaaaacaatccccatcaggtagctgtctaacccccagctgggtctaatccttctcattacccacccgacctggctgcccctcaccttgggctgggggactggggggccatttccttttctctgccctttttttgttgttctattttgtacagacaagttggaaaaacaacagcgacaaaaaagtcaagaaactttgtaaaatatcgtgtgtgtgattccttgtaaaatattttcaaatggtttattacagaagatcagttattaaataatgttcatattttcacttca

SEQ ID NO: 364839 - DNA, 606 bp, Homo Sapiens
gaagtattgattgacttttatttaatatgaatttctaaaaaacctctcatctactaaaggttcctttgaaattattagcctacagacatttatggttacatggcatatgcagctctaatataaacagatcaacccctctcactcttattttacactgcatcaggcactgaaaactaagtctgatgtaatagatctcttttgtagttttaatcataacaattgtaccaaatgacttttttgtgcatgtgataacatcataatggaaaaccaaatcgatagcatagttctcaatctaattatatgccttgcatttctaacccagctttaatgaaatacaataagtggtagtgtggaaattagaagaggctggaaaaaaagcagttgcaaataatactgtcagtgacaagaatagaagtatgacgatgctggtctgtgtgaacaatgcctcccattgtgactatgcaataaaaagctcccccaccacccaaaaaatgaggagggggtttatccaaacaaatcatcattttcagcaacaagcactttttacaaaacaagcctaggctacagcaattcaaaaatgtttaaggagcctcagaggttgcaaaa

SEQ ID NO: 364840 - DNA, 421 bp, Homo Sapiens
  misc_feature (286)..(286): n is a, c, g, or t
ttagagtaaactattcttaaactcaaacaacccttccttcttttgtcactactatattccctgtgctttccagatgcaaggaaagtaaaatggcagggctgggcctgggacaaagggttctgggtgctagcagggtgtggcctggtctggcctgcggacagatggcttcctttttccctcccacacagacccaagcttctgtgtggaagcgtgaacctcagacacttagacgtctccagttccttcaggattgagcaagtcagggtggggagagggggaggtggtnaagatctaagtctgtgtaggtcgtgtcccatctgtattcaaggagcatcttgggtaattaagcacctacccatgtccaaggccacgtagaggctttatagaattaaaatacctgctctcaaggagcttgaaatct

SEQ ID NO: 364841 - DNA, 510 bp, Homo Sapiens
ttttttttgctcctgaaataaaatcacagcatcttattgcatatactacatcatccaaggtcaaaaccctttcatagagacatttaaaactataaccaagtaaaagagaaaatagatgcaaatttgcttttacaaaatttgaaaatcaaccaaaagagtaaggcacaagatgcagtcagctacaaagcacttcagagaacagcgctttgctctcaggtctgggacccaccccctgggcaaggccgcctggcagcaggcaggaaccaaacccctgccacctccactcactcccagggttcctctttgcaggatggtggggagcgcaggcaccaaggcaggaaggccagggcaggaagatgccccgcgtccttcactttccctcagtgttgagcacaccaagttccctctaaccaggagaacaggaccctaggcaccaaaagtcaagcatgagggactgccacagggtcttggggcaggtgtctttcagatgctaaagtgccagggtttgaa

SEQ ID NO: 364842 - DNA, 314 bp, Homo Sapiens
gatgggataaacgtaagactgtgtaagacactgtctgtgaactgtacatattggacaggaaacggggtgagatgaccagagccaataccagcatctggaaaagagagataagtattagaaaagggggcaggattcagtgatggtagaagacagaggaactaagagggctttaaggctactttttccactgcaaacaaaagcttcaggaagtgtctcctaacacatctacttatgcccttagcatctagtcctctgcctgccacttagtaagtgaacagcaagtatttgtttcatgacaacccgggagccggctc

SEQ ID NO: 364843 - DNA, 367 bp, Homo Sapiens
ccttttcaactgacagggtcagtaatggagtaaaactcattgtaatcgtgtaacttatgtgggttaagaaattgaactttgctagtaccccagaagctcctttatgtcccctcctgattttaacgcttaatcaccttcatcctcagttttatggtaatcacttgtctttgcagttttagtctgtaaccatgcatccctaaataaatgtttagattgcctattttaaaaatttaatataattggttcaatgtgtgcatttcatgtatgacttcttttatgtctgtgatgttcatcagagttgtttcatttgtagttattttaatttctgtgtagtattatgtttcatgcatactaggtctatccctag

SEQ ID NO: 364844 - DNA, 538 bp, Homo Sapiens
tctggccgaggacaatctttgcgccgcttgcgctcccggcccgctctgctgcagggcgctggcggcgcagcttgcactgctgggccttgggctgctgcacgcgtagctgctggtgctgctgctgagccacctgcggaggctgcgggcccaggcccgcgctcgcgccacaccccggctgtcgctgaccgacccgctggtggccgaccgagccggaaccgaccagtcctgaggagagaaccggagcgtactgaggagagaaccggcgctgggcaacacgggcctgcaaactcgacaggaccctgcccgaggggccctcgcgccaacctgaaccggtccccgactcctccgctgcccaatctctcagacccaccccacctgcaggaccagaccacgagggacagaactcctgaccaccataccccgagggaggcgaacccagcacttccaggcttgggaggaccatcgggcacagtgctgtacagaccctgctgtctataccttccaactctcgtgctgaataacccttctgatctgctct

SEQ ID NO: 364845 - DNA, 1454 bp, Homo Sapiens
gtcaggtgggtacctcaggcaggtttgctggaaaattccagtaaacagtttcaaaggagttcaagttgcttgccagactaacttacttttaaaagtaagcagccttccaagttaagagatgattttaaatttcagggaaagtggaagaggagaccctagcaggcttcaagcaagctctgtaggacagcagttagacactgtttttgaggactaaattgccaagtctgtcttttaagaagagggtgaggggagttgggaaggaatgttcaagccctgagtgaagatccaataattttctttcaagatcagaaggagattttatcatgtgggcaacctgctgcaactggttctgcctggatggacagcctgaggaggtcccaccaccccagggagccaggatgcaggcctattccaaccctgggtacagctccttcccttccccaacaggcttggaaccaagctgcaagtcctgtggggctcactttgcaaacacggccaggaagcagacctgcttggactgtaagaaaaatttttgcatgacctgttcgagccaagtagggaatggggccccggcctctgccttctctgccaacggtttcgagctacagcctttcagcgagaggagctcatgaagatgaaggtgaaggacttgagggactatctcagcctccatgacatctctaccgaaatgtgccgggagaaagaagagctggtgctcttggtcctttggccagcagcctgtaatctcccaggaggacaggactcgtgcctccaccttgtccccagactttcctgagcagcaggccttcctgacccagcctcactccagcatggttccacctacctcacccaacctcccctcttcatctgcacaagccacctctgttcccccagcccaggttcaggagaatcagcaggccaatggccatgtgtctcaggatcaagaggaacccgtctacctggagagcgtggccagagtacctgctgaggatgagacccagtctattgactcagaggacagctttgtcccaggccgaagggcctctctgtctgacctgactgacctggaggacattgaaggcctgacagtgcggcagctgaaagagatcttggctcgcaactttgtcaactacaagggctgctgtgagaagtgggagctgatggagagagtgacccggctatacaaggatcagaaaggactccagcacctggtcagtggtgccgaagaccaaaacgggggagcagtaccatcaggcttggaggagaacctgtgtaagatctgcatggactcacccattgactgtgttcttctggagtgtggccacatggtaacctgtaccaagtgtggcaagcgcatgaatgaatgtcccatctgccggcagtatgtaatccgagctgtgcatgtcttccggtcctgagagcttgcatcggtttcttcagtgccttacagggaa

SEQ ID NO: 364846 - DNA, 238 bp, Homo Sapiens
ttttaagaacttgaaacttgtaaactgagatgtctgtagcttttttgcccatctgtagtgtatgtgaagatttcaaaacctgagagcactttttctttgtttagaattatgagaaaggcactagatgactttaggatttgcatttttccctttattgcctcatttcttgtgacgccttgttggggagggaaatctgtttattttttcctacaaataaaaagctaagattctatatcgc

SEQ ID NO: 364847 - DNA, 531 bp, Homo Sapiens
tctagagctggacatggccctcctgctacctgtcgacacaggtaaatttcgtagaatctgttccctttatagatccatgttgaaattcacttatagcctcacttgcatgagatttgccaggcagaagtgaagaagacattagtcaggtattggaaccccaccatacagggagacagcctgcttcctgctcattttcctggttattttctctgccaatcaaaagtatcctgaaaacaccctgagctgcttgacttccattctcaaagagatgtgttggtttccacagttgtctccacaagctccgcatcaaagatccacgtacagtttggattttccttctagccttcatgtgtggcccaagcatctatttcagactgtcatggttggcattgttctctgaggttctgtcttccctttgtgtttctatgagctttaatttgtatggttcttgttctgttaatgccactagggactatgtattcctgattccaccatgacagctacagtaaaacagtaaaattatgaacaagc

SEQ ID NO: 364848 - DNA, 529 bp, Homo Sapiens
  misc_feature (57)..(57): n is a, c, g, or t
actataagacttcaaaagaagttaggagaaggaaaatgtcctggacaactactctanatttacattaccttataaatgtactgaaatgttaactcagcatgaaataattgagatttgttattgttttgtaaagatgctaaataagaggggaaacagtacttcagagaagacgtctcttcatctgggcacattgcctaaaaagctgaaaattatcaacagatattattctaaatgggatttggaaaagaagaaattttgcggattaaattccaaatgaaattaagattactgtgggagagaaattgctgaatactggtctatttcacctactttcttgattagcatttgtgtttgacctctttatcatatttatacatttctattttctattaggtttttccaaaaaattgttttatagagtttttatgattttgacagttcaacatttatattccaagcaaaagtgataatctttttcaagcgtgtgttactaaggtcttacagaaaataaacccaatcattataatac

SEQ ID NO: 364849 - DNA, 1093 bp, Homo Sapiens
ggtaccggtccggaattctccggatgggaaccccaggaggaagctgctgagccatgggcgcctacgcgcgggcttcgggggtctgcgctcgcggctgcctggactcagcaggcccctggaccatgtcccgcgccctgcggccaccgctcccgcctctctgctttttccttttgttgctggcggctgccggtgctcgggccgggggatacgagacatgccccacagtgcagccgaacatgctgaacgtgcacctgctgcctcacacacatgatgacgtgggctggctcaaaaccgtggaccagtacttttatggaatcaagaatgacatccagcacgccggtgtgcagtacatcctggactcggtcatctctgccttgctggcagatcccacccgtcgcttcatttacgtggagattgccttcttctcccgttggtggcaccagcagacaaatgccacacaggaagtcgtgcgagaccttgtgcgccaggggcgcctggagttcgccaatggtggctgggtgatgaacgatgaggcagccacccactacggtgccatcgtggaccagatgacacttgggctgcgctttctggaggacacatttggcaatgatgggcgaccccgtgtggcctggcacattgaccccttcggccactctcgggagcaggcctcgctgtttgcgcagatgggcttcgacggcttcttctttgggcgccttgattatcaagataagtgggtacggatgcagaagctggagatggagcaggtgtggcgggccagcaccagcctgaagcccccgaccgcggacctcttcactggtgtgcttcccaatgggtacaacccgccaaggaatctgggcttgggatgtgctgtgtgtcgatcaaccggtggtggaggaccctcgcagccccgagtacaacgccaaggagctggtcgattacttcctaaatgtggcccctgcccagggccggtattaccgccccaaccacattgtgatgaccatgggctcggacttccaatatgagaatgccaacatgtggttcaagaaccttgacaagctcatccagctggtaaatgcgcagcagcaggcaaatc

SEQ ID NO: 364850 - DNA, 569 bp, Homo Sapiens
  misc_feature (87)..(170): n is a, c, g, or t
  misc_feature (181)..(214): n is a, c, g, or t
  misc_feature (455)..(456): n is a, c, g, or t
agcggaatgcctgggctcaagcaatcctcaacccttagcctcccaagtggctgagactacaggcacgtgccaccatgcccagctaannnnnnnnnnnnnnnnnnnnnnnnnnnnnnnnnnnnnnnnnnnnnnnnnnnnnnnnnnnnnnnnnnnnnnnnnnnnnnnnnnnntctcgatcctnnnnnnnnnnnnnnnnnnnnnnnnnnnnnnnnnngtgtgagccactgcatctggcttacttatttggtctattgtctgtcccactagtatgtaaagtcttagagagcaagaattttggttaatttctttctcttcctcctttcctttcttcctcttttacttcgttcactactgtattccacataaaatatatttggcatatagtaggtgttcaatatgttgaaggaatgaaagaatttatagacttgagttgcaatataaaatgtattcttttnnacggtgagttatggcaaaaaaagttttgaaagccgcttctaaataatgcagatgtcagtgctttgtatgaccctgcgaataaaaactgaaatgacttagtgatttccaaaggc

SEQ ID NO: 364851 - DNA, 1331 bp, Homo Sapiens
  misc_feature (727)..(735): n is a, c, g, or t
cgcccgtggtcctcaccccttgagctgctttggagactcggctgccagagggagggccatgggccgaggcctggcattcacgttcccacccagcctggctggcggtgcccacagtgccccggacacatttcacacctcaggctcgtggtggtgcaggggacaagaggctgtgggtgcaggggacacctgtggagggcatttcccgtgggcccccgagacccgcctagatggaggaagcgctgctgggcgccctcttaccgctcacggggagctggggccatggatgggacaggagtctttgtccctgctcagcccggaggctgtgcacggccctcgtcacaaggtgacccttgcagcacaggccgcgggtgccccaggctcggctcagttcttggaggtcaagggcatgggttggggtagtgggtggggaggtgaatgttttctagagattcaaactgctccagcaatttctgtatagttttcacctctgagaattacaatgtgagaaccgctaactatcacaccaatccaaactccttatccaccatacctccgccctcttattccgaccccccgctacccaccaagctccgccaccatgccggcccccttctaccccacccctccgcgggcgtcccgcccaccatttcctcccccaccgggaggccccccctcctatttcttccccccacattatttcctttgttctaatcaaagtaactccttnnnnnnnnntcgccttctccttccttaactaccccgcccccctctccggtttttttatttaacccacctcttccccccacggtgcaacaccctgccccccctgtcgcccgcatttttttggccgcgccactttctcgcccccgtcctttggcccgcttcgatctcccttattgctatcgccacccaccccaccccttgcattcaatatactctgctatgccgctgtgcttaactccaccccctcttttattctgtccgcccattcgtccgcctcttaatccgcccccctccgtacttaatcctgccctctatctttcgcaccctcttctccgcttatccgccccatatctgtgatcccttttaaccaacactcatctttgtacagcggccgtaccgttgtttgcttcaccccccgcgcgcgccagtttattttgtccaacctttcaccctgcccgcaccaatatctgatctttttgcccccctctctttatcacaccaaccgacttcacacatactattgtgagcaccacagtatataaataaaacggcgccgcgccactataacggcccgggaatcaatcgtaccgccgtccgaaaggcccgca

SEQ ID NO: 364852 - DNA, 915 bp, Homo Sapiens
  misc_feature (63)..(63): n is a, c, g, or t
  misc_feature (136)..(136): n is a, c, g, or t
  misc_feature (138)..(138): n is a, c, g, or t
  misc_feature (154)..(154): n is a, c, g, or t
  misc_feature (157)..(157): n is a, c, g, or t
  misc_feature (222)..(222): n is a, c, g, or t
gaggtcgtggcagggagattcatcgaggtgccctgctctgaggactacgacagtcaccagcangttcagaaggctgcactccccgaaagtgcggcagaggtgtcaccgatgtcgtcatcaccagggaggaagcggngnacttcgcagcgtaccnacnaaggggctctccctgggaggatctgacggaggggcatccattctggacttgcactcaggggcccntgtcctgtcgggaagcactgtgtgaacctgtacagatacttcggggataaaatacaagaacatcttctcaagaggaggacttcccggttatacccggaaggtgccggcagaaggtccagctcaccattgctgaggctttgggcatcagcgcatcctcgctgcatctgaccaagcccaccttcttctcccgcataaacagcacggaagcgcggacggcgcacgacgagtactggcatgcgcacgtggacaaggtgacctacggctccttcgactacacctcgctgctgtacctctccaactacctggaggacttcggcggagggcggttcatgttcatggaggagggtgccaacaagacggtggagccgagagctggtcgcgtctccttcttcacctcggggtccgagaacctacaccgcgtggagaaggtccactggggcacccgttacgccatcaccatcgccttcagctgcaaccccgaccatggcatcgaggacccagcgttcccgtagccagcagccgggccaaggtaacttcaggagggcccgtgtggaggcagccgcgccagtcgtgcacccacccccacgtccacccgctcctgttgcacagagtgccttaggaattctctgattttgatttgctgacgtgttaatcttttcatctgtgagtaaatgaagggaaccagccaaaaaa

SEQ ID NO: 364853 - DNA, 1323 bp, Homo Sapiens
  misc_feature (949)..(949): n is a, c, g, or t
  misc_feature (1087)..(1087): n is a, c, g, or t
  misc_feature (1113)..(1114): n is a, c, g, or t
gcgcaaacggcacgacaaaaaaacaaagtagcgaggcctgggtggcgaattcggcacgagggcgccgtgcctgcctcgcgctccctgttacggcgttcgtccccgggcctggcgcccgcgtccggcccggctccgcggcggcctggtccgatggctcctcaacggagggccgcaaccaaggcgcccgagggcaacggagcggccgagcgccggaaccggagcagcaccaagaaggaccgagccccgcgggaggtgcagaggctgtggcagaggccgtggctaaggaccgcgggcctgggggctggctttgtgctcaccgcactcctgctctggagcagcttgggggccgacgacggggtcgcagaggtcctggcccgccgtggcgaggtcgtggcagggagattcatcgaggtgccctgctcatgaggactacgacagtcaccgcaggttcagaaggctgcactccccgaaagtgcggcagaggtgtcaccgatgtcgtcatcaccagggaggaagcggagcagattcgcagcgtaactaaaaaggggctctccctgggaggatctgacggaggggcatccattctggacttgcactcaggggccctgtctgtcgggaaacactttgtgaacctgtaacagatacttcaggggaaaaaatacagaacatcttctcaaaaggaaggaccttccgggtttatacccggggagggggcgggcaagaaaagtcccaagcttccacccatttgcctggaagggcttttttgcggcaatccaaacggccaataccctacgcactgccacatcctggaaaaccaagagaccccccaaccctataaccctttcctttcccccggacacaattttaaaactcaatccccaaccgtggaataaaaaaccctcaacagtggataaacactcggagatcaccccaacaaccgaaaaacacnccaaggagcttcaacaccctttgaagggagaaaaacatgggtcacgtcccacaacaaccaaaagggtgagaaaaaacaagcccagggggttttggacaaacctaacctttaccccgcggggcggaccttccccccctnttcaccccggcacccttattaacagnnctccccttttagtaagaatattgggccgctgtggtggtaacacccttttctcctgccgtccgaaaattcaattaaattcttttgtcaaaaaagagaaaactttactttctaggccaatcaaaaataagaggacaccacgcccatctccaaagtgggggatatacgcatagtgggaaaaaaagtacgagaccgtttttctcccctctcac

SEQ ID NO: 364854 - DNA, 690 bp, Homo Sapiens; identical to SEQ ID NO: 43370

SEQ ID NO: 364855 - DNA, 990 bp, Homo Sapiens
gccgccccgtgcagcgcgcgcagcctgcggagccagcggccgtgacgcgacaacgattcggctgtgacgcgacaacgattcggctgtgacgcgagcgcggccgctcccgatgcgctcgtgccgcccccgccgtgctcctcggcagccgttgctcggccggttttggtaggcccgggccgccgccaggcctccgcctgagcccgcacccgccatggacaactacgcagatctttcggataccgagctgaccaccttgctgcgccggtacaacatcccgcacgggcctgtagtaggatcaactcgtaggctttacgagaagaagatcttcgagtacgagacccagaggcggcggctctcgccccccagctcgtccgccgcctcctcttatagcttctctgacttgaattcgactagaggggatgcagatatgtatgatcttcccaagaaagaggacgctttactctaccagagcaagggctacaatgacgactactatgaagagagctacttcaccaccaggacttatggggagcccgagtctgccggcccgtccagggctgtccgccagtcagtgacttcattcccagatgctgacgctttccatcaccaggtgcatgatgacgatcttttgtcttcttctgaagaggagtgcaaggatagggaacgccccatgtacggccgggacagtgcctaccagagcatcacgcactaccgccctgtttcagcctccaggagctccctggacctgtcctattatcctaacttcctcctccacgtcttttatgtcctcctcatcatcttccctcttcatggctcaccggccgtgccatccggcctgaaaaccgtgctcctggggctgggctgggccaggatcggccaggtcccgctcttggggccagctggctgcttttccgtggtctttgtgatcgtcctcttcttcatttacccatttcatgcaggctgaagaaggacacccttctagaggagcca

SEQ ID NO: 364856 - DNA, 797 bp, Homo Sapiens
aaggtagcgaggcctgggtggcgaattcggcacgagggacaacgattcggctgtgacgcgagcgcggccgctcccgatgcgctcgtgccgcccccgccgtgctcctcggcagccgttgctcggccggttttggtaggcccgggccgccgccaggcctccgcctgagcccgcacccgccatggacaactacgcagatctttcggataccgagctgaccaccttgctgcgccggtacaacatcccgcacgggcctgtagtaggatcaactcgtaggctttacgagaagaagatcttcgagtacgagacccagaggcggcggctctcgccccccagctcgtccgccgcctcctcttatagcttctctgacttgaattcgactagaggggatgcagatatgtatgatcttcccaagaaagaggacgctttactctaccagagcaagggtaaggcaggggttgggtgggcacgctggcaccttcacccgacttcgtcagggaccccgctcacagggaggacctgagacctcagtcccaaccactccagcagccttaggagggagaaactgtgacaaggtcccgaaatgggatcagattagggccatcaggccaggcggggcacaccgatgccccctctgctaccgttgacccccttcccaaggctacaatgacgactactatgaagagagctacttcaccaccaggacttatgggggagcccagagtcttgccggcccgtccagggctgtccgcacagtcagtgacttcattcacagatgctgacgctttccatcacaggtg

SEQ ID NO: 364857 - DNA, 713 bp, Homo Sapiens
  misc_feature (668)..(668): n is a, c, g, or t
cggagaggtgcaatgagtgtggagatcaccggggcctgccgcgggccgtctgcacttctcgttccagatttttctggcattttcgtgttccagctttcttccacccacgagcactttattctctctctcgagacccccttttcggtccccgtcctctctcccccaccagggggcgcgcttacattgtccagacagagaccagaaggtaaggtttagcaagaacaagaacacttgcccagggcagctgttgccgctccaagacggctccctccgtgtctctaagtcaattccaccccctcctcgaagtcccggcttccacccctctctctcagagtcccggcgtttacctcgtggtgtgtttgccttgggcctattcatgccccggctgcacacatcgtctgatgaaattgtggctgttcactcccgaggatgtgtcctagactccgggtcgcgtggatctaccctctagtttacttgctcgggagaagaaactgactcgttttatttagtgcctatttagcgagcccagagtaacgtacatttgtgctgttttcaattttgtgctatcgcaaatcacaaaaaaactgttatcaattcacattcatcatcagcacgagacccatttccttgtgctcctgccagctcaggatatagtttcttttgttcanatttacagcgcacgggcggctatataccaattcaacccccattgg

SEQ ID NO: 364858 - DNA, 478 bp, Homo Sapiens
gctaggtagggtgttaaatgtaactgcctccctgtggagatccttggaggtcctccagcctgctccaggccagccaccttgtctctgcttccacaacatccttgaggaaatacgcatttaaaacccgacctctacattccctgtagtttctcttcacatcgcctactccatattttccagcttttcaatttctctcagaacaaaggttttatttctgggcagggcactgacggcggtgacactaatatcggtacctccgggccacttgagggacgtccagacctgagtctggtctgatgctttctttaggatcccaaacatcgctgccgcctccgcagcgccgtcggatccctggggagagcatccaaaatgtgaaccaagtattaaaaacattggaatataactgtttttaattcttatgctgttttttggttatttgtaatttttgttgttgttgctattttaaacccagcgcact

SEQ ID NO: 364859 - DNA, 346 bp, Homo Sapiens
ttccccgtggacgcgtggtgatgggccttccaggacggggagcacatatttggattgtggttccatgcagccctggggcattatgggttcttcccccccttcccctccaagaccctgtgttcatttggtgttcctggaagcaggtgctacaacatgtgaggcattcggggaagctgcacatgggccacacagtgacttggccccagacgcatagactgagggataaagacaagtatgaatattactctcaaaatcttgggataaataaatattttgggggcatcctggatgatttcatcttctggaatattgtttctagaacagtaaaagccttattctaaggtgt

SEQ ID NO: 364860 - DNA, 1079 bp, Homo Sapiens
ggctaggtacgaggcccgggtgttaatcggcacgaggggaggataaggcgctgtcatggaggacgccgccgcgccggggcggaccgagggggtccttgaaaggcaaggagcgccgccagctgcaggccagggaggctgatgaattcatccgagcaaatgccaccaacaagctgacagtcatagctgagcaaatccaacatttgcaagaacaagccaggaaggtactggaagatgctcacagagatgccaacctgcaccatgtagcttgtaatatagtaaaaaaacctggcaacatttactatctctataaacgggagagtggtcagcagtatttttccatcatttctccaaaggaatgggggacaagttgtccacatgacttcctttggtgcctacaaactacagcatgacttgtcctggactccgtatgaggacattgagaagcaagatgctaaaatcagcatgattggacacgttgctaagccagtcagtggccctgcctccgtgcaactgaacccaacttccagggactgactcactgagagtgggctttgacaaacagctctcacaggacctggctgtcaacctccttgtagccccccactgttgccttgaggaattgaaagacatgtagggtgactcaaaaaacttcttggaaagagaccctgtgtgaatgtaaatgctgtcattatgacttttaattgggatggggaataactcattgagcacagagtcactgtctttcggggatcctctttggaccacagatacccaagtcagtcagttcagagtattggccagtgtactttccttctttcctctccatcacttcttcccttaagttcagagtggtacgaaaggaccttccttccccttaaacaggttggtggaatcgttttaaaaaacatatacaaaaccccgagggacttatttgaggagggcgcaaaacagacggtatatcaaggtgccacgtggtccataagtgataccgggacccagtttctgttacacggggaaccctcgcggaccccatagggagaccataaagtaaaaccggtacgtaaaatacaataactcaa

SEQ ID NO: 364861 - DNA, 1049 bp, Homo Sapiens
agcggggggaggataaggcgctgtcatggaggacgccgccgcgccggggcggaccgagggggtccttgaaaggcaaggagcgccgccagctgcaggccagggaggtactggaagatgctcacagagatgccaacctgcacaatgtagcttgtaatatagtgaaaaaacctggcaacatttactatctctataaacgggagagtggtcagcagtatttttccatcatttctccaaaggaatgggggacaagttgtccacatgacttccttggtgcctacaaactacagcatgacttgtcctggactccgtatgaggacattgagaagcaagatgctaaaatcagcatgatggacacgttgctaagccagtcagtggccctgcctccgtgcactgaacccaacttccagggactgactcactgagagtgggctttgacaaacagctctcacaggacctggctgtcaacctccttgttgcccccactgttgccttgagaattgaagacatgaaatgccactatgcctcccggatgctcctggtcagcttcctgttagacatggcagtcagggcaatgaccagccacatcaacatatgctccaaattgggagccgagctgaatgactttgccgtcttcaccaccttcggcttggcctccgctctgctcctaggcgtggatggacttctgagtgggatcctggccatcatctatgtgtcagctgcttctttccacttgtgcttttattcacctggagtcccctccacatacaagggtctaccctgcccctatgcttcctgcatcttggcttccacctcccttctgaccaaaggcaacaggttcatcctctgctgcatggcctcactcatgattctcttcatgatggaccagagctactatccatatgacaaaatcctggagtctgagaactggaaaaaattggtttatataggaggtgtcatcatgctgtttttctcccccattgtctctgtctgctttatactgcctgatgtggtcgctctcgtacatcttctttccagatactctgtggggc

SEQ ID NO: 364862 - DNA, 993 bp, Homo Sapiens
ttttccggaaaaacgattccccccaaccttttttatgggaaagaaggttcttcttttaacacttttaacttaagggaagaaagtgatggagaggaaagaaggaaagtacacttggccaatactttgaaactgactgactggggtatctgtgtcccaaagaggatccccgaaagacagtgactctgtttcaatgattattcccatcccaattaaaagtcataatgacagcatttacattcacacagggtctctttccaagaagtttgtgagtcacctacatgtcttcaattctcaaggcaacagtgggggcaacaaggaggttgacagccaggtcctgtgagagctgtttgtcaaagcccactctcagtgagtcagtccctggaagttgggttcagtgcacggaggcagggccactgactggcttagcaacgtgtccatcatgctgattttagcatcttgcttctcaatgtcctcatacggagtccaggacaagtcatgctgtagtttgtaggcaccaaggaagtcatgtggacaacttgtcccccattcctttggagaaatgatggaaaaatactgctgaccactctcccgtttatagagatagtaaatgttgccaggttttttcactatattacaagctacatggtgcaggttggcatctctgtgagcatcttccagtaccttcctggcttgttcttgcaaatgttggatttgctcagctatgactgtcagcttgttggtggcatttgctcggatgaattcatcagccttctgcacctgctctgcgagcgccacgaggtctaaggggtccccagccaggacggtcagctggtaggtggcattcaccaggaccaagccaccagccgacagggtgagaaaaaacaaaactcctccctggcctgcagctggctggcgctccttgcctttcaaggaccccctcggtccgccccggcgcggcggcgtcctccatgacagcgccttatcctccccact

SEQ ID NO: 364863 - DNA, 477 bp, Homo Sapiens
tttaccaattaataaactgaggttcagatgctgagggtaggtactcaggatgatatataaacccagctctgcctatctgactctaaagctaaagctctggaggctgaaaacaaaataaatcacttgtcatttatatctgcagtcttccaatggtgcccagagccatgcaaggcgcaggaaggcacatacaccgagttggccgaacttcaaaaccctggatcccccttctcaagaagcattggccttttgaggatgggtgctggaatgcccgttttccaaatggaaaaatgaaagtccagggtgctgagagcgttgggtcttggaggacagtagtgggctcccagcctcccaggcagctggcatcctgagttccaccatcttgtctcgggcctaggatggccactaatatccagtgcgcaggcaggggctgggcactcacttcagctccagagacgcctgtggcccctcaaagccccg

SEQ ID NO: 364864 - DNA, 457 bp, Homo Sapiens
tgtttggggaggtgaagctgccaggtgtgcacaggggcctcccaggctcctggctccaccagccaaggaggtgggggcaagggtcagggcaatgggggacaatgccgctcagggtgcagtgagctcccctgggaaaaccgaagccagcaagaccaggagagggccacctcactgggcctgcctcccccacctcctgggcctctctgacctcagctcctagaccctggacccttggctgggactcagcattttccagtctttttcaggggtagacaggggagcctgggttaaactttaccactgtgccctggcccaggcatcaccaacacggcctccctgcagctgccctgccaccgacagaccccgattaaacccacacctggccttggcctcccctgctctatgccttgcatggtttttgcctcacttggaataaaattccaactcctcaaaaaaa

SEQ ID NO: 364865 - DNA, 339 bp, Homo Sapiens
ccttacctgtggaaagcaaatcttttcaaaataagccactgggactcggtaggtgaagccccagctgctcttctagggacctatggggccttcgtggcatctctgtgctgtgtgctgggaaggaggttgatgtaatggtgactcttttctgatcagcaccttggccgtgattcccaaggtcccagccaaagcaaagggccagttgtttcagtttaaacagacatgtctttagtctaataaaattagttaactgccagtaaagttatttgttagctttgatgaaagctatgttggtatctttccctaatcatcaaagtaaataaaaaatcatttctatgt

SEQ ID NO: 364866 - DNA, 594 bp, Homo Sapiens
  misc_feature (348)..(388): n is a, c, g, or t
attatgaaaaattagaagctaaattacagattcattgatggagtcaattatgcaaagtggtcagtggttgttgaagcatgcattgcttcaacaggatttgcgtgcatttcccatgatcctgcattcttgtgttcttgatagcatacagacttactcagaatcaacagttgctgcttaatttgtctattttgtaagcttaggctactattttattaaaactggacatagatacttggctgaaaacaaatagttttgcagattgcaatataataaaggaaacagtaaaaactagtgggctatgcttaggtttttcttgaagcctaacattgctttaggctgggtgccgtnnnnnnnnnnnnnnnnnnnnnnnnnnnnnnnnnnnnnnnnntggtttgaacattattaagctgttgaatataaacttgaaaataattttctatgatacagctttcaggtagaaaaatgaattttcgttgtgtttaacaatgttgtgtttaacagcttatacaaataacacagtataaatggtaattgccactgtcattttaaaaatcagaaaatagtaaataaaaggatgtaaaaaagtctcatgtg

SEQ ID NO: 364867 - DNA, 979 bp, Homo Sapiens
  misc_feature (186)..(213): n is a, c, g, or t
tgtgtgttccaggcaggcactgggctttctggatcccacccacagtcttaggggcttggtagttggcaaagttcttaggcaccatagaagaacagcagatgccggtgatcagcagagagattgaactttgaggaggaagcagaatctttgcaagaaagtcagacctgtttcttgtaactgggttcnnnnnnnnnnnnnnnnnnnnnnnnnnnnagagagagaatcagacctgggtggaactctcctgctcctcaggaactatgggagcctcagactcattgtaattcaagctttccgagtcaagtgattgacaactgaagagacacgtggctagggttccactggagaattgaaaaggactcttgagccctcctggaatgaagctgaataactgtgcagagactttatccatgccaatagttgctgtccccttccaggggtcaccttgagaggcatgacagctgttccacaggggctatcccttctcagaaaacttctcttctgagcctctttaacagctttctccagaaccagtgtctgaaccaccctggaaattctgccttattatttcttactcaaacatgtttagagtggatagaaaattatgcagcttgcacacccatcgtctttaaccccaaatttcctttggctattaaaaaagtggtggcaaaaggcatcctcaaaagaaagagaaatgaaatatttctgaatggttgcacgttaaaaattaaaagaaggaatgggggcagaatgccatatttttgagggctgtactaggtttatctcatttaagccccacaacaccccacaggagggtaattttctaactctagtttgcagaggagcaaattgaggttcagcaaggtgagagaggtacccaaggtcacatagctagttatgtgagaaagttagagtacagatcctctggggtttcagcttattgtagcatattttctccgaaaggcaaaaatgtgccctt

SEQ ID NO: 364868 - DNA, 588 bp, Homo Sapiens
agtgataaactgcattatccgtaacaagagcaaccgtattcaaagagatccatttccaaaaggtgacatcatcagtcatggtatgagccttcattttacttttcatttcaatgttaaaaatctgaagagttttcccagctttcagtgcaattactttgctagctggattcatgatggcgctgtctgctgaaattggtcttcgaattggattacttgggtcattcatatcaatgattaccacctgggcctgctctcctactttttctctaatgcagatgaatttgtcagactccatagtcagggtactgaagccaatgtttgctgggttgatacccaggttctggagctggagatgctcctgaaaacgaattggcagaatctgggccatggcgctgtcgggggttatggtctcctcctgtcactggggctgcggggcagtggctgcccgggctctccaagggagaggaggagaaggggaggggggaggctgggctcagcaggatcctctccggggacgcaggaaactggcaggcagacgaaagagctcgggtcgggggcggaggctccaggggccaggagagccgcaat

SEQ ID NO: 364869 - DNA, 530 bp, Homo Sapiens
  misc_feature (148)..(148): n is a, c, g, or t
  misc_feature (188)..(188): n is a, c, g, or t
  misc_feature (291)..(291): n is a, c, g, or t
gggaaggccttcagccagtactcagtgctcatccagcaccagcggatccacacaggcgagaagccctatgagtgcggggagtgtgggcgtgccttcaaccagcatggccacctaatccagcaccagaaagtgcacagaaagttgtgancccatggctgacacaagaatcccattctcacagaaactgncatgtgaaacccacaagcagccttcagcccaagagaagtctctgttaactctataggaagcttttctttggcgattcagtgtcacaaaataactccagaaagnaagcacttagcgtgctgttcctgtggaaaaacttcagagactacctgttttattttcctcaacatcttgaagttatgttggagagtaatcatacaattgtagagaattttggtaaaaaacagccataattctttaacattagtttatttgaactaagggaatttaaggcataagaaccattatcccaataaaatcttacattccaaataaagttatttttcctaagaacattaaaaaaa

SEQ ID NO: 364870 - DNA, 172 bp, Homo Sapiens
gaagtgttcctcatgatccggggccccaagacccccattttttcgggcgccaaagagtccagcacggtgtttgaaattaagggcattgttgagggcatcctcaaacggcctccttaagaacaacggctgttcaaggaagacccacttttggatgatggccaaaccctggggg

SEQ ID NO: 364871 - DNA, 321 bp, Homo Sapiens
cttaggcatcccagctctcccctggaccattacagaaacctcctggctggcctctttttcagcttctcccatatgacccttcttggtacacatctttaaacaccagagtatatagtatggcgcttaagagattggctctggatttacaaagacctggattcaaatccaagcttagccattctctttgctagatgaccttcagcaagttatcccctctgagcctcagattccttacctgtgaaatgggagtgccagcctgggttgttataaagattcaattatacttgactaatacagattaagtatagtcctggcacagta

SEQ ID NO: 364872 - DNA, 778 bp, Homo Sapiens
  misc_feature (15)..(15): n is a, c, g, or t
  misc_feature (27)..(27): n is a, c, g, or t
  misc_feature (38)..(38): n is a, c, g, or t
  misc_feature (54)..(54): n is a, c, g, or t
aatccagcccattcnggtgcccactgntaaaaataccnccctttccaacctttnatgtagcaccaactgtgatggttgttgcaacttaacagcaaaacaaccatttatgaaaccttaatgtaaggcttcctgcaaacccagtataccagaaatggagaaccatagttctggactctgatttttctattaatagttgtcttcatgaaaataccgtgtattccaaacaataccttgcaaggtaattttatattttaagagatctggtgcagagcatcggaaaaagagttgataaagctattatagataaaaagctgtgaactgaaattacgatttgggaatgagacgagaagagggctgagactgctactgcaaaacaacccggggggcgtgcggatcaaagcgagatgtggctgacgcagaaatcagctcaagatacaaatacgccaagaaaggctcgaagccggcgggaacccttgaacgtcgcatttctaccaactcagtttaagaaacccctaacaacgcagatgtcatcgcttcgttaattggtgccgacgatgagccacagcgaccacgctcaaaccgtttcgactgcagccaacctagatgtgccatttccacctagtcttctgccatcgctatctcccctataacctcaaattcgtccaaactaaaatctcgctatgttagtgataagaagttcagtgatgcagcagccttcttcagcggtgagctctttcctcacacatctttaaaagtccttctaatccgttggtttctc

SEQ ID NO: 364873 - DNA, 2304 bp, Homo Sapiens
  misc_feature (936)..(954): n is a, c, g, or t
  misc_feature (1913)..(2084): n is a, c, g, or t
  misc_feature (2105)..(2113): n is a, c, g, or t
  misc_feature (2165)..(2175): n is a, c, g, or t
  misc_feature (2232)..(2245): n is a, c, g, or t
cgttggcacctcttgaacctctgtggccgttagcacggttttctgcccgcgtgcccgaagaaaccaacggattagaaggacttttaaagatgtgtgaggaaagagctcaccgctgaagaaggctgctgcatcactgaacttcttatcactaacatagcgagattttagtttggacgaatttgaggttataggggagatagcgatggcagaagactaggtggaaatggcacatctaggttggctgcagtcgaaacggtttgagcgtggtcgctgtggctcatcgtcggcaccaattaacgaagcgatgacatctgcgttgttaggggtttcttaaactgagttggtagaaatgcgaagcgtcagggttcccgccggcttcgagcctttcttggcgtatttgtatcttgagctgatttctgcgtcagcccacatctcgctctgatccgcacaccccccgggttgttttgcagtagcagtctcagccctcttctcgtctcattcccaaatcgtaatttcagttcacagctttttatctataatagctttatcaactctttttccgatgctctgcaccagatctcttaaaatataaaattaccttgcaaggtattgtttggaatacacggtattttcatgaagacaactattaatagaaaaatcagagtccagaactatggttctccatttctggtatactggtttgcagaagccttacattaaaatttcataaatgattgttctgctgttaagtgcaacaacatcacagtagagctacataaagattcgaaacggagatatttttatcaagtggcaccagaattggactgattaaaatagacatggcctaattggacaacgaacttcaggatcaccggtttctcctgctccatggacaggccttcagtatttggcatcacctttacatggagcacaaannnnnnnnnnnnnnnnnnntgtctttgccaaatggatgagcagcttctggggccacagctggagagaggaggatcagagaggactccgggaacgccaccgactgcaagccaccagtcacaggaaaacctccctgccctgcccacttcctgtgcttcccagaattccatcatctgactgccatcctagaaggcattctcatgaggaccaggaattccgatgccgatcgtctgaccgtcttcctagaaggcattctcatgaggaccaagaatttcgatgccgtagccacgtacgggattacagaaaatactcagaggatgggtcattcaaggagccactggaatcaaaaggaagatcccattccaaaattgagaaattttcagagtccttttgaacggcaacttgtgcttttagaaccaagcgttctgcctctttgggacctgaaagcagaaaggagagaaatgaaagagaatgcctgaggatggagataaaatcccgaaagaaagtagaggaagaaaggagctctaggaaagaagagcatggagaagcacacatggctcccctgtttgaaaaagggcctgaataatactctgcttctgcctcatgacatcagatgctactgttttggtttttttctttgagccccaattcaccatttcaggatgtggatgggggcggggttgggggtaaaaacagctataaaaagcaactgcagatgctgactgactgcagtgggcagggtatgtagctgctccaagatgacttgcatcataccccaattactgctggcatcttagttgagagtataatctgcttggttgcctttttatgggaataaagagaataaaaggtattttaatagaataaagaaaaatttgaaaatataatggaaggtatttaaagagccacccacatagcttcaccaacccttctcacacatcaactcataaatcatcttaaataaaagtcattggtatgannnnnnnnnnnnnnnnnnnnnnnnnnnnnnnnnnnnnnnnnnnnnnnnnnnnnnnnnnnnnnnnnnnnnnnnnnnnnnnnnnnnnnnnnnnnnnnnnnnnnnnnnnnnnnnnnnnnnnnnnnnnnnnnnnnnnnnnnnnnnnnnnnnnnnnnnnnnnnnnnnnnnnnnnnnnaaaaaaaggggccccctaaannnnnnnnnccttatttaaaaaagggggcgccgggggccccctttttttaaaccccccgcnnnnnnnnnnnaaaaaacccgccactcgtggggaaattttttggggaggaaaaaccccttctctttcnnnnnnnnnnnnnnacaaatatttggggaaaaacctccctccccaaagaaatttttcccgcccccccgggggg

SEQ ID NO: 364874 - DNA, 505 bp, Homo Sapiens
ctgaggatggtcccttcccgaatctttctgctatagggcaatgtatacacttcccatcgcgtagtttccctgctcaaaacctttttctgactcctcccgaccagcactttttaaagtccttaccgcgaggcggattcccgccctgggcgcctcccagtcttgtcttaaggcgccgtcgcccccccacctccctcctcgttccaggcccttatgctccccaggtctccccaccgcagtcaccgcttaccctgagcccgcgttggggaggtgcccggggctgtcatatgacaccgggtgttcttgcctgccctgcaccagcccctggaaaatgcgctcctccgggatgcaggcgtcttactccaaagccctcctgtgattgtgttggccaaagggatcaggagactgagagagagagcagtagaaaacctgagacagagaaaagaagaatgagaaagaccataacagatggcaaagtagaggatgagcgagggatttgccaagagag

SEQ ID NO: 364875 - DNA, 482 bp, Homo Sapiens
  misc_feature (41)..(41): n is a, c, g, or t
  misc_feature (51)..(51): n is a, c, g, or t
  misc_feature (67)..(67): n is a, c, g, or t
  misc_feature (166)..(166): n is a, c, g, or t
aatcccctggggaatctcacgctgtaacccagcaacgggangctggcccantgggtagtccatcctncaagacagcatagggaacacgggttcccaggggcctgggttgcccacagggaatgccccattccctctgctacctgcacaacggtggccacgtaacaanatcccacgggcccaagggagcccagtttccctgttcacacagcacagggtgtgtgggcaaagcatgggagggcagaaccaaaatacaaaagggacacaggtgagcagggttaagtgtctgtctgctagcatcacctgcattgggctccagtgaaactccagtacctgatgagttttgtagaagaacaaacagaagttggtaaagacgacccagagcttctgccagccatgactgtttttgaactttcttagcagatatcctgaaagctggttctgtcaataaaggaaaaatgcaggtgcattaaccagcacccagg

SEQ ID NO: 364876 - DNA, 462 bp, Homo Sapiens
  misc_feature (32)..(32): n is a, c, g, or t
  misc_feature (51)..(51): n is a, c, g, or t
  misc_feature (107)..(107): n is a, c, g, or t
ctcagcccgccttaaacaaatgcacagggaanacagcccctttaaggatgnacccataaaaatatagtggaattaatatttacctaaataataatttccccttatgnattttccttaatatttttctctagctttattataagaatatagtgtcctaatatgtataacataaaaaatatgtgttaatcgactgtttcagtaaggctctggtcaacagtagactattagtagttacatttttggggagttaaaagttatacatggcatgggggttggtgcccatatgatgggactgatggctttataagaagaggaagggagacctgagctgacatgcatgctcttgccatcttgccatgtgatgctttccatcatgttatgacacagcaagaaggccagatacggcccctccacagttcccagccctcggaaccatgagctaaataaacttcttttctttat

SEQ ID NO: 364877 - DNA, 908 bp, Homo Sapiens
acgtcatgagtgtcctttggcaggtctgatcagtaaagatgccataaaccttaaagccgaagcactgctccccactcaggaaccgcttaaggcttcttgtagtacaaacatcaataatcaggaaagtcaggaactttctgaatccctgaaagatagtgccaccagcaaaacttttgaaaagaatgttgtacggcagaataaagaaagcatattggaaaagttctcagtacgaaaagaaatcattaatttggagaaagaaatgtttaatgaaggaacatgcattcagcaagacagtttctcatccagtgaaaagggatcttatgaaacctcaaagcatgaaaagcagcctcctgtatattgcacttctccggactttaaaatgggaggtgcttctgatgtatctaccgctaaatccccattcagtgcagtaggagaaagcaatctcccttccccatcacctactgtatctgttaatcctttaaccagaagtccccctgaaacttcttcacagttggctcctaatccattacttttaagttctactacagaactaatcgaagaaatttctgaatctgttggaaagaaccagtttacttctgaaagtacccacttgaacgttggtcataggtcagttggtcatagtataagtattgaatgtaaagggattgataaagaggtaaatgattcaaaaactacccatatagatattccaagaataagctcttcccttggaaaaaagccaagtttgacttctgaatccagcattcatactattactccttcagttgttaacttcactagtttatttagtaataagccttttttaaaactgggtgcagtatctgcatcagacaaacactgccaagttgctgaaagcctaagtactagtttgcagtccaaaccattaa

SEQ ID NO: 364878 - DNA, 774 bp, Homo Sapiens
gcggccgcccagagcggtggcgagggcggcggggcgcggggctccaggacacagctgagccggcggtcagagcgagacctgcagcagagacgacggaggcggaagcatctcgatccgggaggcggcggcgtggggagccggggccgcctggggagccggggccgcctgggatgttcagtcatgaaatgagtgcgtaccgaggagatccagatggcagtgtcctgctacctcaaacgctggcagtacgtggactcagacggtcccctgaagcaaggactgcggctgccacagactgctgaagagttggcggccaatctcacggtacacagagaatctcattgtgccgacatagtgtctgcagtcccttgccaggcagagccccagcaatatgaagtacagtttggacgactgcggaattttctcatcgattctgattcccagcatagccacgaagtgatgcctctcctctatcctctctttgtctacctccatctcaacctgagccaaaacagtccgaagagcacagtggaaagtttttacagccgcttccatggaatgtttctgcagaatgctagccagaaggatgtcattgagcagctacagaccactcaaaccatccaggacatcctatctaacttcaagcttcgagcattcctagataacaagtacgtggtccgtctccaagaagacagctacaactaccttatccgctacctccaaagtgacaacaatactgccctgtcgggctagtcggggccccgactagcccgacag

SEQ ID NO: 364879 - DNA, 506 bp, Homo Sapiens
  misc_feature (162)..(176): n is a, c, g, or t
caactttcaaaaaactagtgtttaatcaaaacaaaaattgttgatcattaacaagtttataaaacagtgatttagttacataaataaattgatatcagtgtatcaaatcttaattactttcaacttcatgagcatgtttacatgggtgatgaattacaaccnnnnnnnnnnnnnnnacctattataataaataaaatggagcgcatgaaatagttcttctaaacaaaaatacctacaaacatacctctaagcatgttctctagtgaagggaacaagagacactggacaacttttgcaccaaaacataaaaattgctttaaaaagcacaaggttacagaaccatcagctaaagtaaagacactatactgtaaccaaagttggtatttaataatataatgaacagtttggtagttagatctccagtttggttattttaaagcattaagacaaggcaagatagaaggctgcttttgtttgagtaatttctagagaaaataaaatatatt

SEQ ID NO: 364880 - DNA, 520 bp, Homo Sapiens
ggagaggagctgtcttgccagggctcccaggcagggagaggcaggtgaggttctcagccgatgtgttagaggttgagcatcgcctgtgcccagcttgctggctgtcagtgcttgatgtgcccatcctcagctaaaacccagagctggcatgttggtcatcccccacctcagacgggacgcccagtccagagctggtgagccctgggccagcctttgggcctggcctgccccattcaccggccagcgccccacctccctggctggagggtcggggaggggctggcagagatggttggtccacagggctagccctgggtggtgggagaggggcccagggtcagggtgagagagagctgggccagggagctgctgcaggatgattttgaggtgtgggggaagcactcttggttggttttggtttgctttttaaaaattgtggtaaaatacataacaaaagtaactatcgtaacctgagcagttctgtgacatgaggtgaattcactgctttgtgtgaccttgg

SEQ ID NO: 364881 - DNA, 883 bp, Homo Sapiens
gggattacaggcatgaccccccatgccagacttcccattttactttttgcaagctgtttccctagcagctccctctaggggagaggtgaaatcttgcaagttgtagcaagagcacacaggaaacccctaactttcctataccccacccgcctcttcccctttctgtcccgggatacctggcggcaagagacttcttggctattgtccatgctcccagaatcaagcataaatgccagacacggcgattgagaagccaatcagtgaaccctttggcaaagcccccatccacacctggcactcccctctaccaatccctggcacagggttcctggagagcaggtgctgtacattttacagctttacaatggggctgttgacagccataattagggaggcatgaattatgcggctataatgcagagccctacaattaaggcgggaatgaggggctggaggcagcaaacggaatctgccctatgagcgtggctgttgagtcctgtctcctgggtctgactttccgtaatatgattggggtacagtagaggtgattaatggggctggcatctctctttggcctgaggttctgtattctgggaaaggtacacagggtggagtagggagaagctgccccaggaggcgatgtagtggtggaaagaagaggcagagaggtcgtcgtcgtcgcccagcagcaagggctgcaaaatagtagaactcgtggttgctttggacaggtgtgatttgtgcaagccaggttcaacccttgcctcaagaaatcagatgggaccaatttagtgtccttccacctgtgagccaagcccccatttgaggacatctatcgtattcttgtgtgctgggtctcaaatagaatttttaaaggattctt

SEQ ID NO: 364882 - DNA, 354 bp, Homo Sapiens
tcgatctttttaaaaagctccctaagtgtttctaaggtccaaaactgagagcctctaagtggactttggacggaagtggggtggaggttgatggtgtaggaactttggaatttttgactgtagctattttggtggttgtaattgaagtaaaactgcaccagggtcaggagacctgcggtaggcccagcaactctgtgacctatctaaactacacaacctcaagggcaggctgtggtacggggctgccccactgagccatctgcagaggtggtatcactcaacgatgaaagactcaacgaaccagcctttaacgaccagtcttttctatttccagagcagtctggactctgacag

SEQ ID NO: 364883 - DNA, 681 bp, Homo Sapiens
  misc_feature (392)..(392): n is a, c, g, or t
tccaccaccctgggggctgggatatacaggcgtgagccaccgcgcctggccaaaataaaatgtttttatctttcttcacttagaactatgtaggccttttcttgttctggtaaccccccacagtgtaattggtgctgataaatagtttcgtgcctgaggttctgttgtcactcactcactttctgacaattaggtgagccacttgaggattttctggcctgaagttataaaaacttggcatctgtcctaaggtaattgtaaaggcaaaatgaaagcattgaggtgaatttaggttatatggcatttatctggtaaagtgtttcagaaaagctagaatgaaaatgtgatgtaagggatagcaagtgtaggttgattcataattcttggtatanaaccaagttttccttagtcttgaggaatttgaagaaaggtaaaatgttggattttaagcaaagtaggattgaccagagactgttctgactttgacattcagacctttcagatgttcttccttcagaccagtccaagacactcagcatttccagccaagttgtctttttttctgccaataaagtattcattagttgacgtttgtttgtattttaagtaaagtcaattttttttaaagcattaatttaattcacgggtatgcctttcatttctctggccttcagttggttt

SEQ ID NO: 364884 - DNA, 524 bp, Homo Sapiens
agactttctggaagggaaacagagacagaagtcaaggtatagcatgagagacttggaaaagtcctagcagtagaaatggggtccaagaagtccttggttagtaagccttagcaattcagccttccactgggttcctctgttgcctccttgccatcatcgtttacatacatgtgaatatttagtgagtctgcagcaagcaggctactcagttcacactggaacatttgcattgatggggaagcgcagggtagccccaatcaaattccagacatgtatatttgaaattcttctttattttggattgaaaatcagctttctctcactttacccactgattctagtgctgctcccttgagcaacagataaacacagataaaatctttcatatgacagtttttcaaacatgtgaagccaggtatcatgtttaccctttgttgtttccatcataatatgcataccttgaattccaggtttttttcaggccatttagtctgttaaactagttcatgctaaacaaaacaaaa

SEQ ID NO: 364885 - DNA, 900 bp, Homo Sapiens
  misc_feature (51)..(51): n is a, c, g, or t
  misc_feature (579)..(631): n is a, c, g, or t
  misc_feature (678)..(735): n is a, c, g, or t
  misc_feature (820)..(858): n is a, c, g, or t
gatcagggtccggccaatggtatatctctttggtccatcctccaggcaganagtgatggtcaacatgcatcatccctcaaagaactcagtcgtgaatgcatcccaccagagattgtcacactcctctgtccagttctgaagccgtttggtaaagctcaaatattctgtagccagtttggttgccatatggtgtgtgcctcccaatccctggctccaggtatgtaggcggatacatgggagttgggcccacatccctatccagcatggtgccgggatggaaggggggaaaggcgttgccgttcgggggctccttcggcgagtacagcttgaatgactttgaggaacaacctgggagaactgagggggccaggagaggtacgggggagcgactgcaagcccagaggagtcctggcaggggtgagggctgacggggggacaacttcagcagctcatgtcccgagtgggacgggcaggcccgactgggagctccagtccgccggccgcacaaagactcgcacgcacagcctcggcccgccccgcggcggccgctgtcccgggggaaagttacaatggccactnnnnnnnnnnnnnnnnnnnnnnnnnnnnnnnnnnnnnnnnnnnnnnnnnnnnnagtccggagccttctttgtttgcaaggtttccctcaacaatggctgnnnnnnnnnnnnnnnnnnnnnnnnnnnnnnnnnnnnnnnnnnnnnnnnnnnnnnnnnnctgcctctgcctccgagcagcccgcccgccctccccaggccaccgggcccctctgctgggggcaccaggagaggcaggacccggnnnnnnnnnnnnnnnnnnnnnnnnnnnnnnnnnnnnnnngcagcgcccgccggccctcgtgccgaattcgccacccaggcc

SEQ ID NO: 364886 - DNA, 687 bp, Homo Sapiens
tgcgtttcgcccaccatctcctggggaccaggtggagtcgatatccgggacgggggggaggttgcggtgcccctcaggactacctctcaagagtgctatcatttccgcaggccagatcagaaaagggagctcaggtaccttccagagagtgagacccagcgcccttgtctcgcacccagtaggctttcatccccgccatggcggagctgatccagaagaagctacagggagaagtggagaaatatcaacagctacagaaggacttaagtaaatccatgtcggggaggcagaaacttgaagcacaactaacagaaaataatatcgtgaaagaggaactggccctgctggatgggtccaacgtggtctttaaacttctgggtccggtgctagtcaaacaggagctgggggaggctcgggccacagtagggaagaggctggactatatcacagctgaaattaagcgatacgaatcccagcttcgggatcttgagcggcagtcagagcaacagagggagacccttgctcagctgcagcaggagttccagcgggcccaggcagcaaaggcaggggctcctggcaaggcctgaccccatggtgggggcgaggggaggggagcgggagggaatgaggcagctctaggatctatactgtagctaataaaatgtaaaaacacctggaacaaacaag

SEQ ID NO: 364887 - DNA, 771 bp, Homo Sapiens
gggatcttgagtgagggcacgctctccttagaggggcggaacagtttttggcaccttatcgcgagcggcagcttatgcaagagtgacttaaaaaagaaaggcaggtccggggccaggggctaagtagcggtgcggtttctttttctggattagtttccccatcttgcctaaaaatgtcctagtctagtctttttagcagaactccactccctaaacatgtcagaactacacttcccatcaagggtcagaaagaaacttccggcacagtcttttcccagcattccttgtttacttccgggtttattactactgaaggaagaacgccagatcagaaaagggagctcaggtaccttccagagagtgagacccagcgcccttgtctcgcacccagtaggctttcatccccgccatggcggagctgatccagaagaagctacagggagaagtggagaaatatcaacagctacagaaggacttaagtaaatccatgtcggggaggcacaaacttgaagcacaactaacagaaaataatatcgtgaaagaggaactggccctgctggatgggtccaacgtggtctttaaacttctgggtccgggtgctagtcaaacaggaggctggggggagggctcggggccacaggtaggggaagaaggctgggacttatatcacacgctgaaaaattaagccggatacgaaattcccagcctttcgggggatctttggagccgggcaggtccagagcccaaacaggagggggaggaaccccttgg

SEQ ID NO: 364888 - DNA, 513 bp, Homo Sapiens
catggaagtattaagaggcactttagaaaaatctcctgggtaccagaaagtcctccttgcttccatttgcagaagcaaaccaatttaccttggaaattcagatcaatcactacagccaataaattaaccccctgtttttcatccgttggttaagtgttacaagaagtgcaaaatgaccaggtggcagtctgataagcagaattctgagatgaatgtcgtgactttccctctcttgtacacaccctgtgtaatctccccttgagcatggttgaaacctgtaaatataattggatagcacctccacgattatgctatatggcaaagggttcctaatcagttgactataatccaaagggagattatcctgcgtagatatgatctaattaggcaagttatttaaaagcagaagagttatcctgctggtctagaagaaaaacagcctgttgtgaaagtagggaccacagggacctgagggtgacctccaggagctgagagcagtcctcagctaacagt

SEQ ID NO: 364889 - DNA, 672 bp, Homo Sapiens
  misc_feature (16)..(16): n is a, c, g, or t
  misc_feature (33)..(33): n is a, c, g, or t
  misc_feature (82)..(82): n is a, c, g, or t
  misc_feature (101)..(101): n is a, c, g, or t
gcctttctcacatcanagatcaagtcactcttngtgcatcccttcctggctgagcgcatcatctccatgttgaactacttcntgcaacactggtttggccncaagatgggtgccttaaaagtcaaggacttcagcgaatttgacttcaaacccagtcagcttgtatcagatatctgcactatctacttaaatcttggggatgaggagaatttctgtgccactgtgcccaaggatggacgttcctattccccaactctctttgcacagacagttcgagtcttgacgaaaataaataagcctgggaatatgattatggctttcagcaacttggcagagagaatcaagtctcttgcagacctccaacaacaggaagaggaaacctatgcagatgcctgtgatgagttcctggatcccattatgagcacactgatgtgtgaccctgtggtgctgccatcttccagagtcactgtggatagatccaccattgcaagacatttgctcagtgaccaaacagatccctttaaccgtagtcccctcaccatggaccagatccggccaaacacagaactaaaagaaaaaatccaacggtggcttgcagagaggaaacaacaaaaggagcaacttgaatagatactgtgaactaaacaaaccaaaacaaacccagagtgcaat

SEQ ID NO: 364890 - DNA, 483 bp, Homo Sapiens
  misc_feature (45)..(45): n is a, c, g, or t
  misc_feature (287)..(313): n is a, c, g, or t
cagctcttcatttgagaaaatattttttcagatcatagactaaanaatcataccatcaaggtggcggcaccaggtgccaggaggaaaagggtacttgctgtgtatcctgggtcagtaatattgaaaactgtcttcttcagcttcctgtccttctatgtgttgtgtctcttgtgacagttgttttgtcttcaagccactgacttctggaatttgcagattttgcaatccatgcaaatgtgaagaaaagctctatgttactgaccattgttgttgttgtttatagtgcnnnnnnnnnnnnnnnnnnnnnnnnnnngatcaatggaggccttttggtgcttaccacagactgtgctctttcactgactgaatagagagaggaggcagagtaaacctatcctatatacacctcagtccaagcctggtctgtattatgaatggggcaacatggaaaaagaaaataaaatcagcagaccacataaaaaa

SEQ ID NO: 364891 - DNA, 943 bp, Homo Sapiens
  misc_feature (549)..(662): n is a, c, g, or t
gacactgtcagctcctaacgccgcaggttcctcctggtccccgaggcccccggtcgggcgttgcctgccccgcgcgggcggccgggccgagggacgatggtcagtggacggacggcgccaggagcagtgcccacgcgcggcagggcggtaccttcaggcctccagaggctggggctggctctgttggcctctgtgctgggtttcttcctctgcaccgcaggactggctctcctgacctctccaggtgtcatcgaacacccttgtgcttgctgtcacccgctgcctgtctgcaggatcccggattccgtatcaggggaccgaaattagtcggaaaataggaagcaggtgctcgcttggatggaaccctgaccctgtgctcacacttgtaggaggagggctctgcaggccgcctcccggaacgggaggttcccaagccactgcacttcggaggggctgtaattagagttgcacattcattcagttcccagtaaagtagaacgtgctccagccagtgaggacaacaggtgttttctacaaaaattagcattnnnnnnnnnnnnnnnnnnnnnnnnnnnnnnnnnnnnnnnnnnnnnnnnnnnnnnnnnnnnnnnnnnnnnnnnnnnnnnnnnnnnnnnnnnnnnnnnnnnnnnnnnnnnnnnnnnggggaagaatacaaaccaaattgaacacaccaaccccccacagaacactacgagcacgcagacacacgaaaacgcaagcacagcaagcgagaaagaaaaaggagcgaaaagcgcgaggacacacgccacaaaacaggggtagaacctccaagcgggagaagcgggaaaaagataagaaggaaacagagaggagcgcgccgcgacagagggcagaggccgcgcgagggagactaaacagcgagacgcaggcgcgacaaggagcagcgcgggccaggaaaaga

SEQ ID NO: 364892 - DNA, 607 bp, Homo Sapiens
  misc_feature (581)..(581): n is a, c, g, or t
  misc_feature (597)..(597): n is a, c, g, or t
gcggccgcaccctgcgacacgctggacttcagccccctggacgagtcctcctcgctcatcttctacaacgtcaacaagcacccgggcggccggcagaaggcccgcatcctgcaggccggcacgccgctggggctcatggcctacctgtactccagtgatgccttcctggagggttatgtgcagcaattcctctacaccttccgctacttctgcacaccccacgacttcctgcacttcctcctcgaccgcatcaacagcacgctgaccagggcccaccaggaccccacctcgaccttcaccaagatctacaggcggagcctctggcgtcctgcaggcctgggtggaggactgctacgctgtggacttccctcggaacagcgggctgctggggaagctagaggacttcatctcctccaagatcctacccctggacggctctgccaagcacctgctgggcctcctggaggtgggcatggaccggcgggccgagggcaaccctcgcggcacagacctgggagaaccccaggggaggccgaggaggattgccagacccttcaaacgccttttttaagaggtttttnagaggacggcattttncagggaagag

SEQ ID NO: 364893 - DNA, 592 bp, Homo Sapiens
  misc_feature (574)..(574): n is a, c, g, or t
tctagtgaaaataatctttatttgacatttagagaacaggattgtggggaatattcttattaagaactttggtacaatgtactacatgtggaacagtcaggaactgcctaggtccacaaagaaccatttactcagatagtctaactgtaaacaaataaataagctgcctaaggaaacctcagcaatttaaaatcatttatataatttatagctaaaattttttaaagttgtatttcataatagagcttactcttatgttaaagaatggcacaaaattaagctaaccagcttgaattacattttctttacttccagaattgtcctggaaaaagcagtaaattcgacctctcctcagctacttgctcttcatagaaactggcctcagtcaaatgcacaaaggctcttcctcctggaaaccagtactgtgagcctcaccacccagggcttttagccagcactcacagtcagtctcctacttcagttggcacagactggataatgagctcctgtgatgggaaaagcaggccactttggggttttcttgtcccaaagcctgcttttgaggtattgattntttttaaaaaaagggaat

SEQ ID NO: 364894 - DNA, 593 bp, Homo Sapiens
atcaaaagcactggtatgggctgtctatctgtgctggaacctgagtttaatctttgtctgcaattacgattcttctgggtttattttgccagctcattatccagccccctggaatcaggcctcccaaatttatcaggtgctggggaggaccctagggagtggtgtatgggggctagctggtgaaactgccctttcctttctgttctatgagtgtgatggtgtttgagaaaatgtggggctatggttcaggcgcacttcacatgtgcaaagatggagaaagcactcacctacacgtttaggctcagaatattgattgaaacattttgaatgatcaaaaataaaatgttatttttaaagtttctctctgagattttgcttaagttttggtagatattcttaagttttagtgacctcagtttgggaattaagtaagctaaacattgtgtccttattattagttatataaaactatgctttagactttgttagaaacttctgccccaccttgactgactccttttccatttctggttgtacaaaatgaattcacactttaatgctatggccacctttaaataaagtacagcgtgact

SEQ ID NO: 364895 - DNA, 447 bp, Homo Sapiens
ggggccgcgccgtagaccgcgctgcacgccggcggcagccatggcggatgtgtcagagaggacactgcagttgtccgtgctagtagccttcgcttctggagtactcctgggctggcaggcgaaccgactgcggaggcgctacttggactggaggaaaaggaggctgcaggacaagctggcggcgacgcagaagaagctggacctggcctgagactctgcgccttccgccccattctgtccccctcatggccaccttgccatgtccgcgccggagccccggtccgccggcgcccagaaccaggcttgccacacagtccccgcctgccatggccggctcttcctggagtgttgcttgttgaagatgcatatagactaccggaaagaaatgacttcttcttgcactttatgaatcaattttatttttaaaataaaaaaattaaacatcaa

SEQ ID NO: 364896 - DNA, 1051 bp, Homo Sapiens
ggaagaatgaaccggaagtagaagcagagcagcccctctgcagttctcagagccagtgtaaagaagaaaaaaatgagccactttctctgcctgagttaaccaaaaggcttaccgaggcaaatcagagaatggcaaaatttcctgagagcattaaggcctggcccttcccagatgtgctggagtgctgcctcgtcctgcttctcatcaggtcccactttcctggctgtctggcccaggaaatgcagcagcaggcccaagagctccttcagaaatacggcaacacgaaaacttacagaagacactgccagaccttctgtatgtgaattttcacacaccttgaagaaactgccaaattgaaaatgtttgacatctttcacctctgcagttatgcctcaccagacattcactctggtccctagatgtttttgcagtaatccaaaagaatacaaacaaggattaagtttgaatcaaccctgcctacccatagacaacggtggatctgactttagactcaattgtggtctcctactggagggaagatcatgaaaagcccacagtagttattcagaactaacacctgcagagtgttggtcatctctacagccttaggcaggtttcacccaaagaggagaaacttctgtcgtcacccaaagtgttacatgcttaaaacacaagctacctttgtaaatacttcatctgatcagaagtgtgtcatgcttgtttgagatggagttgctgcattttaggactattgatacctttttttaattgtttttataatatttaatttgaaagaggagacccttctctctctactctttcatagactgaagtttgaatatgaaataggccttaaccatcatgttgactctcctgtcagaattttaggttggaaatttggttttattctttcatgtaattgcttatttgaacagatcacttactaaagctttagaagaagtgattcaaatgtgtgttttcccttcagttttataacaaatggattgatggcagtcaaatagctcaggaataaattactgtttcaatggtt

SEQ ID NO: 364897 - DNA, 464 bp, Homo Sapiens
gccacagtggtggtgaacgccggggaccaagccaggtggcgttttttatttggcctttctggaagactcaagatatgtctcttcattctctctcagtattggtttacttgggttttttggtttttaatctcagagagaggtgtgtttagtgggcacaagctgtaatattcagcaaaacttggtcgacgggcacggtttacaagtcggttagcggcataagctcaataaaaagtgggtcggggcattacatcccctcgggcaggccaatagctgcatcaagcggtggggagaaaggggagggcaggggaaagatgtaaagccaaagtacagcaggaacccaccagcggtttcccttccttctcccattctactcccagtctggaatgccacgaggaccttaaccttgtttctggcttaagctgctagttttcccaaatctcagtgctttccctttttgaacttcc

SEQ ID NO: 364898 - DNA, 427 bp, Homo Sapiens
gctcatcatccttctccatagggaaaaaaatggcattaacttccaacaagaaactgctgctcttctaccgtatcccctttagaacataaaatattaagaaagggtttctgaagcattcacaggaacagaaaactgaagcctgaagcacttcactctgcagcaagataaccccttaaaaatcatccagaatttgggggatggaggtaacccgtcaacacccgcgacacccctaccctaaggtggggagcaggattccgtcaaacagaaaatgccactctccgccccctccgccatccggaacgctgaccggcgcggagtgcgggggcggccgagggcgggagcggcgaggaggcgggacgcgacacacgcaccacgccgagaactgcttcaccgcttttttaaaggtcgcagagggagcggcggccgc

SEQ ID NO: 364899 - DNA, 431 bp, Homo Sapiens
agaatgtggccacctccaaaggctcagagtagctgtgcaatgacttgtgtcaaaacccgatccagagcagcagtgatgaaatcaccctctcctttaagacctggcattacaatggcctcatcctgcatgtgggcaagtcagctctctgatggatggtgcaatttccttggtcattaacctgaggtctggggcctttaaagctattgaggagccagtgaatggagaattcgacaacgcctggcatgattgagggtgacacatcacggcagatgatggctgaggagacattgcccagaagtctcatcttaggtggttgagtaggaagtttgtgaagcaggtggtgggtgagatggagtgggtagagattcaggtatggagatgtcagtgtctaactttcttctagtctttgcaatttcccaaggaaaatccct

SEQ ID NO: 364900 - DNA, 1391 bp, Homo Sapiens
  misc_feature (1325)..(1340): n is a, c, g, or t
aagggactggtacggcccggaattagggatgcccgcgaggtgagcgaggctccaaccggtcactggtgggtcctggcactggcgggtcgcaacgctgtgggcgttccaggaggtggtcgtggcgaacctggcagctgcgggcatcatggtgggaggcttgaagaggaaacactctgatttggaagaggaggaggagaggtgggagtggagtccagcaggccttcagagctaccagcaagccctgctccgcatctccctagacaaagtccagcgcagcctgggcccccgagcacccagcctccgcaggcatgtcctcatccataacaccctccaacagctgcaggctgcacttcgcctggctcccgcccctgccctgccccccgagcccctcttcctgggcgaggaggatttctccctgtcagccaccattggctctatcctcagggagctggacacctccatggatgggactgagccccctcagaatccagtgactccccttggcctccagaatgaagtgccaccccagcctgatccagtcttcttagaagctctgagctcccggtacttgggggactctggcctggatgacttctttctggacattgacacatctgccggtagaaaaggagcctgcacgggccccaccagagcctcctcacaacctcttctgtgccccaggttcttgggagtggaatgaactggatcacatcatggaaatcattctggggtcctaaaactgtgatagaggggatcgatccttcctcatgtcatcttcggtggcctggatccctgaatgcaactctgggtgtgtgtttttgtgggggctcgaagcagtgactatggcctcctttgttcccatttcagggttccacaaactgtcttgcatgtgtgtgtgtgtctggttaccccgaccttctgtgaaggtgggtcttcctgaattaatttatctattccaaatgccttaacgagactctgtttctgggagtctgattttccacttacacatttcttccacctttcctgctagttcccactcccctgtgaccactggggcctcagggaagataaagaaagctgggcctgtcgaaggatgacagggatgtgctgccaggttgctatagaaacccaggctctgcctcttgcaccttgagggggtgggaggggctggtgtcctccctccaggctgaaccccacttcctcggcaggaccccagtctcagcagcctcctgatttcataaccaggccggaccacgtgcaatagggtggaaaccaaactgctccatgccgggttatttaaaagaaaggcagagtttgtggtggcnnnnnnnnnnnnnnnnggattgtttgtaatttttttaaataaaagtattttggaaggaaaaaaaaaa

SEQ ID NO: 364901 - DNA, 689 bp, Homo Sapiens
  misc_feature (100)..(100): n is a, c, g, or t
  misc_feature (368)..(368): n is a, c, g, or t
tggtgttccttgggggtcgttatgtataaatagcttttaggaagaacccccatttaagcaggatcgctggggaggcattcgggaaaaatcatgacccccnaagaagggtttcagtttccagcccaaggtgactgatgtgtctgaaaatgctaagaatctaattcgaagggctcatttgtagcagagacatcggacttggtcaaaatggaatagaagactttaagaaaccacccatttttccagtggaattggatggggataatattcggaactgtgaagcaccttatattccagaagttagtagcccaacagatacatcgaattttgatgtagatgatgattgtttaaaaaattctgaaacgatgccnccaccaacacatactgcattttctggcaaccatctgccatttgttgggttttacatatactagtagctgtgtactttctgatcggagctgtttaagagttacggctggtcccacctcactggatcttgatgttaatgttcagaggactctagacaacaacttagcaactgaagcttatgaaagaagaattaagcgccttgagcaagaaaaacttgaactcagtagaaaacttcaagagtcaacacagactgtccaagctctgcagtattcaactgttgatggtccactaacagcaagcaaagatttagaaataaaaaactt

SEQ ID NO: 364902 - DNA, 571 bp, Homo Sapiens
gcatgcccaaagatggcccagatgttggtattatcagacagacaggcatttcaaaataaatatagtaagcatattaaaggacttagtagaaaagttgaataacatgcataaacagttgagtgatttcagcagagagaggaaccataaaaagaaccaatgtaaatactagaaatgaaaagcacaatatcataaataaataatttatttattggacttaataacagactggatatagcggcagaaagaatcagtgaactttaagaagaaataatctaacgcacttcagaaataatctgaagcagtaagaggaaagaaaagtgaatacaaacagaatagatggtctgaaacgtgtgggataatatcatatggcctaacatacatatcactggagtcctgcaatagtaggggaggggatataagacagaagaaatatttgaagatatgatggcttggaattttccaaagatgaagagttacttcaactcacagatccaaaaagcttacagaaccctgagtaggataaatgctgctaaaacaactggattgtgtatgtaaaaataaatgaatacat

SEQ ID NO: 364903 - DNA, 905 bp, Homo Sapiens
agcgtgttctacatagtctgtggcattcataacatttctttctatgttgttgatcatttcaccctgagtctccacaaacatagccatgtccatgaacatctcatgcaactctcggatgctggtctccagcttcatgatgtccttgtgacgtgactcgatttcattgagagcttgtctagtaatttgtgaatctgatataatgtcggaagtgaagatggatggcttcccgctctccagcatctcttctagctcgtcgtctgtggtggttctcccagttatctccagctggcgctggatgcggcctttgctccgctcccgaaacagagtctgtgcctcattgtactccgccatggcttccacaaacttccgagacagcaccgaatgctgggttcttcgtatccgaagatccactgaagtccggttcccactctcatcctgatcaaaactttgttcaatagcctttaacttggctcgaattttattcgcagttttcttgatttctttgttcagatcttcaagctcttcttttatttttccttccgggtttggtgcagaaagaatgatgctgtggtttttctttacttcttcaacatattgagttattttatcaatagtgtttctaatctcctccacctgatggaagaaatcatccatgaaatgatctttctcaaccacaacaactgtgtctccatcatcattcttcctacacgccgtcaggtctggcagccggtcccgcatccccgccggccgggcagcgcgccccgccgctcaagcctgtcccgagctgcctccggccgggccgcgggctctccggtctccgcctcaggccccgcggtcccggcccggcgccagcagccctccctggagccggcgctgccacggcaaccgccccccgcgcgctctcg

SEQ ID NO: 364904 - DNA, 319 bp, Homo Sapiens
agaagcccttaagtcccaactcccacaacaacccccacgcccaaccacctgccttctctttgatttctaaagagggattcagcagagaccccccacccctccctggctcggtttgagtcccactgcccaccccatcacagccttcacgtctcagcccctcccgtctggtctgtccgtgtgccgtctgtttctctgggccatgtgtgagcagtgtccccatctccccatccgtccctgctgtccccgcatcattgggcctgagtgtgctctgtatacaacgtcatgtctgttacaccaattaaagaagcgggaaggcttc

SEQ ID NO: 364905 - DNA, 676 bp, Homo Sapiens
aagtgagccttacagctcttattgctgggtaaagtgatcttgcctggtgcctcttggtcttcagctcaattttccaggttgtcctggccaagccttgctctgttacgctcagtgcctctgcccactctttccccgccagcccttccctcccgccctgcaaacttgtcccttggctgtttcaccaggttctgccctgtatccttgcctccttggtacacaccatttcaggttcttccctttctgtgtcccattgtcctagttatgttctgttgtttgtgtaatgcccaaatttttctgctcgtgtggccttgaaaagtaggccagcctcagaggctgctgagctgaaaatggaactgagtaatcaggtgagctggaagggatgtggggggcggggcagacgggagacatgggttttgaaggcagtgaacaataaaaccttagggaggtggcaccgaggccttagcatttgaggagctgaaatgtttcagtgtgttttctcaccagccacaagcatcttatgagtttctgtgcaaggaagcgtagagcactgctgtgctgtcaggatgaagaagggctttctgcaggggctggcctttctctacccagaggccaagcaggctgcctgcactgtgtccttggttgggtgttgatgcccaaaatagagaaggtgcttgct

SEQ ID NO: 364906 - DNA, 1314 bp, Homo Sapiens
ggcctgggtggcgaattcggcacgaggctggcctatccgcgcctggcagctgtcggaactccggagaccacaaaggggtttatggtttaccccctccacggaaggtcggtctgatcgcagctgcgggtcggggagagggaccgggggtcccccagtcagtaggcctcagaacacctcttcagtgccggggcaccagacagcggattttgcattcgactctccccaaagtgtgccgaacaggttggaagcaaaggctccggtttaagctctgggcttggggataaaatacactttttaaggacccaagttcctcggcaacgactccagactgggaagacctttccattttcaggatcgacgcttcacgttgaggggagggcattcaggacgccctcttaaggcttctcccaacccatggcgctaccaggctcctcacaggaccaggcctggagcctggagcctccggctgccacggctgctgcctcctcatcttcgggaccccaggagcgggagggcgctgggagccccgcggcccccgggacgctgcccctggagaaggtgaagcggccgatgaacgcgttcatggtgtggagctccgctcagcgccgccagatggcgcagcagaaccccaagatgcacaactccgagatctccaagcgcctgggcgcgcagtggaagctgctggacgaggacgagaagcggcccttcgtggaggaggccaagcggctccgcgcccgacacctgcgcgactaccccgactacaagtaccggcctcggcgcaaggccaagagctcgggcgccggaccttcccgctgcggacagggaagaggcaacctggccagcggcggcccgctctgggggccggggtacgcgaccacccaaccgagcagaggctttgggtacagaccccccagctactcgacagcctacctgcctggcagctatggctcttcccactgcaaactggaagccccctcaccgtgctccctccctcagagtgaccctaggctccagggggaactgctgcccacctatacccactacctgccccctggctctcccactccatacaaccctccccttgctggtgcccccatgcccctaacccacctctaaccctcatggacgcagacctcacgggacgggcctcatcctccttttttaatccagcagcatcccctaccccaggctgtcaaccctttctcctgttggactacagttcagaggcagcctgcagtcctcccatgatagccagggagagccgcacaacatacaattatatttttggtagtattaaacagttttgtattattc

SEQ ID NO: 364907 - DNA, 328 bp, Homo Sapiens
ccggcaaacagcgtgcggtatttgctcaacccgggagggtgcgggacaggtccggtcgggaagctaggcgacgaagccgcgcgagcagaagtcccacacctcttcggcggtgatggggtgggtggtcgcgtcgtcgggaccgccgctggattgcgcgatgaacatgaccgtttgcatggtcatcgcggccacccgcttcgggttgatggtggcgcgcagcttgccggcctcgccggccgcctccatcagctccgtcagcaacgcgagcaagggcgcatgcgcgaccttgacctcagcggggtgtgtcaccagcaaacgcggtgcgaag

SEQ ID NO: 364908 - DNA, 377 bp, Homo Sapiens
ggacttgaaccttctcccaggtaggggcaggaggagccacatgagagagggagaaggaccgcgtttacctttagagttttgttttgttttttccttctgagtttgctgttggggcaggaataagggaaaggcccaaggtatccaagcctggggaagggcaggccagccagcacctctgccttctcagggacaagagtagtcctttaccaccctcactccgcctgtcccctctcctactctacagcattaaagactgtgggaccaggaccctaagtctcctttccttctgggtggggagttctggggttcttggtgtgtgggagaagttttataattgcttccaaacagctgggtttaaatataaaatagaccccctc

SEQ ID NO: 364909 - DNA, 554 bp, Homo Sapiens
aggttgatgacagaccagtccttgtggaataagattccctttaaaaactctttagccagtcgtgacatcaaccctagacctgtctgccttggcatttgctgtcaacatctgctgggctatgtaggcaggttaatcctccacttctcatgtggttgaaccagtgtgttttttggtaaaatggtgattgtaaataaaattagttccctgatcccctgccccctgtcccctgcctcttttcccaattcccttccttatgcgggacttttaaagcttaaaaaaaatccgattgaatataaatgcctaatttcattctttgtgaaatggttgcttcctcctgattccctaattgtgctgtgttcgtgtcttgcactggaattcaacattcccttctccttttgtactgtgttgtgcttgctgtctctcccggacacccttaaagactgtctttttagcaaaaaatttcagtaaagtgttttctgtaatctttttttaaaaggtgagaactaattattgtccatacttgtagcattcttaactaaagtcttgcttctctc

SEQ ID NO: 364910 - DNA, 1066 bp, Homo Sapiens
  misc_feature (482)..(581): n is a, c, g, or t
  misc_feature (653)..(653): n is a, c, g, or t
  misc_feature (674)..(688): n is a, c, g, or t
  misc_feature (699)..(721): n is a, c, g, or t
  misc_feature (763)..(774): n is a, c, g, or t
  misc_feature (806)..(818): n is a, c, g, or t
  misc_feature (957)..(965): n is a, c, g, or t
cctctttaaaatatttatatggatcaactttattgaaagtgaataaacagagataatgtggcaaaaagaaattttcccaatattaaacccttgatgatacttttaaattcactataaggaaaagaatccaccagtagtaggtagctacttatttttcctgagtgtcctctgcttttctgcatgctccacaatcttttcttccacataaagccccttccgctttcgtactgcgttcatgtacttccgggcttggttctcagagtcagccttctccccaaagtgcaagtattcctcctcagtagttggcacccagaaggggtcactgggaatgatcttgtaaaagaagatgacagaatgtgcaaggttaggcatttttaatttcaaaccttattcactgagctccccaatttatatagtcttagctaatgaaaaaaagttaggcaatgaacagctaagcttgctaggaatggtaataagtatgnnnnnnnnnnnnnnnnnnnnnnnnnnnnnnnnnnnnnnnnnnnnnnnnnnnnnnnnnnnnnnnnnnnnnnnnnnnnnnnnnnnnnnnnnnnnnnnnnnnntggaaaaactgggtgaaaaccccccgtctcttttcttaaaaatttcaaaccaacctactcaaccaaccaacnaaaccaaaaatttttcccttnnnnnnnnnnnnnnncgacattttgnnnnnnnnnnnnnnnnnnnnnnngcgctacccaggagggtggggggctcttttaaaacccccacnnnnnnnnnnnncatcctccctctttgtgaaaacaccccccccnnnnnnnnnnnnntcggcacaaaaaattttttttctcgcccacgctggggaggcccaccgctcacaataaaaaatatttatatttgttgtgcgccaccccacctgtgggtggtagtcttctccatactatcacaacaattattgtggtggannnnnnnnnagacacccacacactaagaataggagagggtgggcggtgggtcgctcctctgcccccctccctctctcttctttttataaacaccaaaataatcatactga

SEQ ID NO: 364911 - DNA, 555 bp, Homo Sapiens
  misc_feature (244)..(261): n is a, c, g, or t
caaaggaaggccagagagccgcgcagttctctgcaggtgcagatgcaggcagtggaggtggcctgagcaggcagaaggacaccaagcgccctatgttgcttgtcattcatgacgtggtcttggagcttctgactagttcagactgccacgccaaccccagaaaaataccccacatgccagaaaagtgaagtcctaggtgtttccatctatgtttcaatctgtccatctaccaggcctcgcgatnnnnnnnnnnnnnnnnnncgctgccaggttttagaagcagttctggtctcaaaaccatcaggatcctgccaccagggttcttttgaaatagtaccacatgtaaaagggaatttggctttcacttcatctaatcactgaattgtcaggctttgattgataattgtagaaataagtagccttctgttgtgggaataagttataatcagtattcatctctttgttttttgtcactcttttctctctaattgtgtcatttgtactgtttgaaaaatatttcttctataaaattaaactaacctgccttaagaaaaa

SEQ ID NO: 364912 - DNA, 697 bp, Homo Sapiens
gcgacatgttccacatcctcacgaagcaggtccagaagcccttcctcagaccggagcttggaccccgattgggctgcaatgctgaactttaatcttcagcaactttgtggccccaagtgccgtgacctgaaagttgaaaaccctgagaaatacggctttgaaccaaagaagctgttggaccaactgacggatatttacttacagctggactgtgctcggttcgcgaaagccattgctgacgaccagagatcctacagtaaggaattgtttgaagaagttatttcaaagatgcggaaggcagggatcaaatccacaatagcaatagaaaaatttaagctgctcgccgagaaagtggaggagatagtggccaagaagcacgcgcagaaatcgactacagcgacgctcctgatgagttcagagaccctctgatggacaccctcatgacagaccccgtgcggctgccctctggcaccatcatggaccgctccatcatctgcggcacctgctcaactcccccacggaccccttcaaccggcagacgctgacagagagcatgctggaaccagtgccagaactgaaagagcagattcaggcgtggatgagagagaaacagaacagcgatcactaaaccgttccgccgcccaccctctgctagacacagccaaggccaacgaggcaagcagaagcagcggccgct

SEQ ID NO: 364913 - DNA, 445 bp, Homo Sapiens
  misc_feature (29)..(29): n is a, c, g, or t
  misc_feature (51)..(51): n is a, c, g, or t
  misc_feature (64)..(64): n is a, c, g, or t
ctgtaaaacgtctgccggtttaaaagggncccgtgggggaaatttaaacangtgccgcaagaanaaggaacggtcccatgaagggtcccaaaagggcagccgcaaggggtctgtcaatgagggtgtcccatcaagagggtctctgaaactcatccaggagcgtcgctgtagtcgatttcctgcgcgtgcgttcttggcccactatctcctcccactttctcggcgagcagcttaaatttttctattgctattgtggatttgatccctgccttccgcatctttgaaataacttcttcaaacaattccttactgtaggatctctggtcgtcagcaatgctttcgcgaaccgagcacagtccagctgtaagtaaatatccgtcagttggtccaacagcttctttggttcaaagccgtatttctcagggttttcaactttcaggtcacc

SEQ ID NO: 364914 - DNA, 466 bp, Homo Sapiens
  misc_feature (391)..(391): n is a, c, g, or t
gagaaatggggagtaaagttgaaatataatgttgtctttcttcagcttatgatacacagcacctgtaaggattctttgaagattaatccaaccaattcctgttcctccactgaaatgggagtttttggtccttttcacttgtctcaacagcatgaattgtcctattatcctgtgatttcctaggagcttggaccccgattggctgcaatgctgaactttaatcttcagcaactttgtgggccccaagtgccgtgacctgaaagttgaaaaccctgaggaaatacgggctttgaaccaaagaagctgttgggaccaactggacggatatttacttacagctgggacttgtggcttcggtttcgcgaaagccattggcttgacggaccagagnatcctacagtgaagggaatttgttttggaagaagttgattttcaaaggatgcgggaagggcaggggattcaaatt

SEQ ID NO: 364915 - DNA, 452 bp, Homo Sapiens
cctcccatggaatggccaaaatcaaactgacccaccctcctggccccataaaccctgaatgacctttccccaagggcccacccgaggaaaacagtattatctgccggtggggggaggagatataggacaggaaaacccacgtgctcccactcccagctcccctgcccagtgcagtgactctgccagggaaaaactggcaaggaggctcaggtgcttccatctgtggtgactggaatgggacccacgtggagtaggtgacatatgcttcccagagactggtattgtggctgtgccaggagtacatgtgagactatgggaggaaagctccggaagaaggagaaacattgcagtggctactgtgttggcccagtagaaattgacagtattttgtatatatgtgcccatttatctttttcttttttaaaaaaagagaatactcttgtggtcccctg

SEQ ID NO: 364916 - DNA, 171 bp, Homo Sapiens
gtagcgagtttttaatttggtcaaatttattaatcaggtcttggccaactctctaatgacggcttctaggtcatgcttagaaagaaccttccactccagtgtggccgttttcttccagtacttctttcttctagtattttcttacattaagtgctttgagctgacacaaaa

SEQ ID NO: 364917 - DNA, 442 bp, Homo Sapiens
tcgtacccactttcagagtaggaatttcttttttatagtatggcataaagtttggtgtttttacagaggagaagcaatgggtcttagctctttctctattatgttatcatcctcccttttttgtacaatatgttgtttacctgaaaggaaggtttctattcgttggttgtggacctggacaaagtccaagtctgtggaacttaaaaccttgaaggtctgtcataggactctggacaatctcacaccttagctattcccagggaaccccagggggcaactgacattgctccaagatgttctcctgatgtagcttgagatataaaggaaaggccctgcacaggtggctgtttcttgtctgttatgtcagaggaacagtcctgttcagaaaggggctcttctgagcagaaatggctaataaactttgtgctgatctggaaaaaaa

SEQ ID NO: 364918 - DNA, 931 bp, Homo Sapiens
  misc_feature (456)..(456): n is a, c, g, or t
gtttcctgtgccaagatgttcaacgaaagctcaaggcgaaggtagtatctgaaattccatgtaatcgctcccacgtagtctgaccaaggctctgcttcccacagggtcatccgaattctcctcttctgtgtccagaagctcaatagtcagctggacctggccttggctctgaataaacataagcttaaagcaattctcatctgacattagctgcccagctttccgctgatacgttgactccaggaggctccttgagttctgagtgttcagctggcctccggtggccccattattattttctgccaggtaaaggtcagtcacctgcacacagatctcatcactcacgatatgctgcagctgtctgacaatgctctggatcagtttgtccatggtaaaggcaatgtaggcatgaatggtgaacatctctctcagtgaatcttcatactgtgatgagtntatgttgccatccagcaggctccgcaccatgtccaggaaagctgggtaataatcttctacatcaacatccataggttctttgagacgtagctgaatggcagggctgtcactcttgtctcgctttatgcccagcacttcccgttcccattctctctctcggttttcttcttcaatttgccgttcggcttgggaacaaatccgtagcagcctcaggcagagaatctggtgcagtcgcataaaaatataccagttgttgttgacatagaagaggttgtatacttcatccattcctcttaatttttgagctgctgtgttactaaacagtaacttggacttagggggactgcccccaacaccattgtgcttcttaactgcccctgtggcttcatctacatccatctcttcttcttcctcatgaatgttttcccacattcaccacatccatggggtttctctctctctttcagttctctga

SEQ ID NO: 364919 - DNA, 438 bp, Homo Sapiens
  misc_feature (403)..(403): n is a, c, g, or t
caaaaaatgttcaggtttatttgtggaaatgcaagatttctatgaaaatagtttttgtatggaaatttttgtaatactttttatcaacaaaacaagaacatgtgttcctgtcaggggtgtgatgtcaagcatgaatggtagtgcgtgtgcaccaccaacgtttggtgaaaactatttttatcaagaaaaaaggaatcatagaagagaaatattttcaagttagataatataaaagctaggtgcactaccaccactgcttaccatgccacacccctggtttccacgaggctgacaacatactgtaatgaacaattgtgtgtaaaatggtaaaagacacagacctcttgacaacattgtgataacagttgagtgcacacagtttgctgtttgaatccaatgcacnaaattaaaaaaaatcattaaaactatgttcatttt

SEQ ID NO: 364920 - DNA, 403 bp, Homo Sapiens
gacgccgcggctgggcgggggaggggagccagggccccaccccgcctcacgccccgcaggctcccgcccgcgggtccgtcccggctgaggtcacaggcggcgcgaccacgtttattggcaacagttgttttctaattggcggcaggtcagagaatgagttagacttttgacctgatgcttggaggtcggagcgcaacgttcttcaggaggacagactatccactgctaagtgcggccccggcgggagggtgccggagtccaggtctaaggagcgggcgccgggcggcggggctggattgagtggtgcaaattcagcgaacgcgcttaagacgcactcctttccggtcacctactctctcttcatggtgggaactgtttgtgtccagaattaagctatatttaa

SEQ ID NO: 364921 - DNA, 426 bp, Homo Sapiens
gttcaagatggggtcgcacactatgttgcccagcctggcctcaaactccttggttcaagggattctcccacctcagactcccacatagctgaggcacaagaattgcttcaggccaggtgcagtggctcacacctaactgacaatttaaacaaaaataatgacaatgtattgtggggttgatagcacactgataaggaaaaggcaacaccgtccaaccaatcatggaaatctaggagtcacccttgccaatgtcctcttgtcaccctaaccaatttatcacaatgccttgattttgcaccccagaaccctcaaatccactcatttctctgcctccatggccaccccctacatatcctaacttcctcaccaatccttctgccccctgcatcttccacagctgtccacactgcatccaggaagattttg

SEQ ID NO: 364922 - DNA, 1114 bp, Homo Sapiens
  misc_feature (784)..(795): n is a, c, g, or t
  misc_feature (800)..(801): n is a, c, g, or t
  misc_feature (805)..(812): n is a, c, g, or t
  misc_feature (816)..(816): n is a, c, g, or t
gggagagctaccatgagcaagcggaaccaggtatcgtacgtgcggccagccgagccggcgtttctggcccgcttcaaggaacgggtcggctacagggagggacccaccgtagagactaagagaattcagcctcagcccccagatgaagatggggatcacagtgacaaagaagatgaacagcctcaagtggtggttttaaaaaagggagacctgtcagttgaagaagtcatgaaaattaaagcagaaataaaggctgccaaagcagatgaagaaccaactccagccgatggaagaatcatatatcgaaaaccagtcaagcatccctcagatgaaaaatattcaggtttaacagcaagctcaaaaaagaagaagccaaatgaagatgaagtaaatcaggactcggtcaaaaagaactcacaaaaacaaattaaaaatagtagcctcctttcttttgacaacgaagatgaaaatgagtaagtgtaaatattttgaatttagtctactttgaaagtatatggagtgttcattaaaatcacattttttcctattataaagatactacaagttctttatagaaagtttaggaaatagagaaaaaaatttaataaactacatctattcatcaataaccctctgacttaaaatgccaactctatagaaattagctagtattaacattttgttatttcccttgtgtggttgtatatatatgtaaattatatttttaagcaaaatacatttttttgtgtgtaaacaaaattttataaatacaactgtattgcannnnnnnnnnnnccccnnggcnnnnnnnncccnggggcgggccgctctaaaatatcccctccaggggccccaagcttacgcggtacccagcttttcttgttacaaagtgggcccctaatagggaacccctattaataggctaaggcactggccccccctttttaccaacctcctgaactgtgaaaaattggctaccttgggaatctttttgggaaaggaaactttactttttggggggggtggacctaatttgggacaaacattaccttacaaagaaattttaaaggcccctaaggggaaaatattaaaaaattttttttaaggggtatta

SEQ ID NO: 364923 - DNA, 793 bp, Homo Sapiens
  misc_feature (531)..(668): n is a, c, g, or t
  misc_feature (709)..(717): n is a, c, g, or t
gaacacaaaatggcgacacgtggttagcattcgtcgccaacgagaaattggggtcggcccgaaagctctagaatgcacccctcttcctccccggggccttccacctccgcgagttttatgacttaaaaaagcccacaggctggtctgaaggtcggaggcctaattttaacgcgttttcctccctttaatttgaaacgggaacgcgaatgactgtaaaatgtgggcacaatatttaatctctcgcctttttaaagcttaatagtggataataggggggcagtatcaagggataatttgggtccccacagtaccaaagcatttagaaacctctgtttaatttaaggaatgagataagttactgcttttctagacttcctagcatgggctgttgtgctggagagaacgagagctacgaagagactacagtgcctctgactttttcataggacagttggccgaggaagacaaacataaagatgaagtgcttaattcaaggtcacacaatgtcggggatggacctccagatttccnnnnnnnnnnnnnnnnnnnnnnnnnnnnnnnnnnnnnnnnnnnnnnnnnnnnnnnnnnnnnnnnnnnnnnnnnnnnnnnnnnnnnnnnnnnnnnnnnnnnnnnnnnnnnnnnnnnnnnnnnnnnnnnnnnnnnnnnnnatgtgctatcacacccaacctgatacattgcctttataaannnnnnnnnctttattcttaaaaaccagaaaaaacaaaactgggatacatgttgcaggaacatgcaggcaggggattttctttcc

SEQ ID NO: 364924 - DNA, 349 bp, Homo Sapiens
  misc_feature (193)..(193): n is a, c, g, or t
tcatatctatcaccatacaggcaacaacacattcagagtggtgggcaggaagattcaggaccatcaggtcgtgataaactgtgccattcctaaagggttgaagtacaatcaagctacacagaccttccaccagtggcgagatgctagacaggtgtatggtctcaactttggcagcaaagaggatgccaatgtncttcgcaagtgccatgatgcatgccttagaagtgttaaattcacaggaaacagggccaacattgcctagacaaaactcacaactacctgctcaagttcaaaatggcccatcccaagaagaattggaaattcaaagaagacaactacaagaacacca

SEQ ID NO: 364925 - DNA, 516 bp, Homo Sapiens
gtcatgcagacaactctcctgggagctgaggaagctggtttctggggcaggtgggcctagtgcctttgacatgaacttgggccagctcccagcttgaagcctctgtgccctctttcatccccagcacacatagcactgctgctggcctggtcttcctgggtcctccctgtagtgtcctcacatctgtcccttcctcttcatttttcttcagagtccccactcctttcttacaacttcttgccactttcttttaacatttctgacctgtgctacagcttccccagcacttgctatatcctcctgcttggcctgagtgtttggtcggggctgggtctgcgtgtggggtctctctgcttccctctcagggcccagagcatcactcctcacttcttccacagagatcatctcagtgccccacatacaaagcactgttctgtgggctgcattcagaggtggccagactgggaggcccctgccctcatggagctcccattcctcggggaacatagtcactat

SEQ ID NO: 364926 - DNA, 608 bp, Homo Sapiens
  misc_feature (468)..(558): n is a, c, g, or t
agtgagacggtttactctggatagacttaagcaactgggagtagatgtttccattaaaccacggctaggtgctgatgaagattcctttgtgatacttgaacctgaaaccaacagagaactggaagccttgaagcagcgtttctggaagcatgctaatccagcagccaaacccagggctggtcagacagtgaattgtgaaccgtcatagtgaaagacatgggcactgatggaaaggaagagctaaaagcagatgtggtaccctgtgactttagcaccctaagaagttggatggagcaagccacacaaaaccaggtgaaaagcttcaggtgttaaaagctaaactgcaagaagcaatgaaactccgaaggtttgaggagcgccagaagcgccaagcactgtttaaattagataatgaagatgggtttgaggaagaggaggaggaagaggaagaaatgacagatgagtctnnnnnnnnnnnnnnnnnnnnnnnnnnnnnnnnnnnnnnnnnnnnnnnnnnnnnnnnnnnnnnnnnnnnnnnnnnnnnnnnnnnnnnnnnnnggaaatcaggagactgcagaattccttcttagtagtgaagaaatagaaac

SEQ ID NO: 364927 - DNA, 531 bp, Homo Sapiens
tactggacatgctggagcctgcccgtgtccttgtggaccatggaatttgcccggggttggggggcaggggtggagagaaataaaacttcctgtgatctatgtatcggcccagtacatagatcctggatagaggcgattgagctaagcatgggaccaagcatttctgtgcagtgcctgcagaattgagtttccttctggctatgggagattcttctgagctgtctcagttgtctgacatctggcatctgccatgggccaggaagtctggggcaggggcagaagaggacaggaggagactgccctagaggattctgggaaaacgggaaaacagcaaaacagagctacccaccaatctcaggctgatgcattattaataaaagtgactgttgactgagtttgtagacataatatgtttgaggtacctggcctagtaagcaccatacaagtgctattatttctaaatgattttatcaagataaaagacaccagcctgggcgacacaaggagaccctggatctaaaagtaaaaatg

SEQ ID NO: 364928 - DNA, 487 bp, Homo Sapiens
acttcagtctccacctctgcgaagggagaaaatagtagtgcctgacataacatatgtaaagcaccgggcaccatgcctggctcatgggaacccttagcataagctgttgttagaaatgagaagctgctatggatcttactctgtcctgagtgctagggatttaacagactgaacatgtggcccataccttgcattatgttgctactactgacatcttggaatccctatcttctcatctctgctgtagcctcacttctctggttcttaccctgattttgcctcaataacgattggcttgctgaatacctactgtgtgccaagctctggatatataagttaaatttacgtctcaacagccccaagagttaattattattatatccaccattttcccttcccatatttttgtttggttggttggtttcagagaaatgaaccagaaactctcacagctaagtagcagagctaagatttgaacccacagttt

SEQ ID NO: 364929 - DNA, 158 bp, Homo Sapiens
taatcggatcaatataaatctctttaggaaaaaaagcaatgttgctggtttgttctcactggggagggggcagggctgaggagcagctgcagtgcagtgtcagaaaggagacaggggaatggagggggtgtgagagacggagggtgaaagaagaagaa

SEQ ID NO: 364930 - DNA, 781 bp, Homo Sapiens
  misc_feature (150)..(227): n is a, c, g, or t
  misc_feature (261)..(276): n is a, c, g, or t
  misc_feature (732)..(732): n is a, c, g, or t
ccagcaatccttagtttttattctttttccagaaggtaatacatactctttgtaaaaatattaaaagaatacaggagagtatcaagtaaaaaagtagaagtcccccctcattttacatctccaattccactctccagaggtaatcattgnnnnnnnnnnnnnnnnnnnnnnnnnnnnnnnnnnnnnnnnnnnnnnnnnnnnnnnnnnnnnnnnnnnnnnnnnnnnnngtactcgtctgggcaacagagcaagactgtcttnnnnnnnnnnnnnnnnggtttaccagatcctgatcaacagcctctggaaacagttatagccccaaccacagtgcataactgccttgcaaacagcagttttgatgagaaacaaatgaaatctaaaaatatgccatccgcacatttggcatataatttttaggggttcgaaggccccctgacctgaagcccacacaggactcctggctaagaccccctttacaggaagaccctaacaggtcaatgaaaagctgggattgcatctttttctccgaaacatcatctgaactcctcaggcaggagcctactgtaggtgggcctgctgtgactccactgagtagcttaacccagggagacagagacaggaaacttgcacgcacagcttctgggggtcgtgaccctgacattttttcttgggtgggccctgcggtgattgcaattacttaccccaaagaagtccttgggactggtcacncttggaaggtcccaaagggaaataattttatttaagggcaccatgcaaa

SEQ ID NO: 364931 - DNA, 940 bp, Homo Sapiens
tcagaaggaaaaaacaaaacacagtcaagttcatagccaagtcctttccatccaatgggattgtgacccattgaggtcccagaaaggactggtcatctccaatggagcttgggacctggttgggtccaatgaggttcaaaagggggccagtcgcttaggagactgggttggagctttcctcatccaatcagggcggagacttccctgtccagtcccagtgaagttgggcgatcccgtccaatccaggtccctgattgtcccagtcacaaggtggggcccatggatggcactgtccgatcgggtcacatgaggctgcagcgcgcgggatgctgcgcttcggaccgcggcgcgcgctggccgccatagtgcgcaggggctggcgctgcggctacctcgagtgctccgccaagtacaactggcagcgtgctgcgtctcttccgcgagctgctgcgctgcgctctggtgcgcgcgcgccctgcacacccggccctgcgcctgcagggggcgctgcatcccgcgcgctgcagcctcatgtgacccgatcggacagtgccatccatgggccccaccttgtgactgggacaatcaggcacctggattggacgggatcgcccaacttcactgggactggacagggaagtctccgccctgattggatgaggaaagctccaacccagtctcctaagcgactggcccccttttgaacctcattggacccaaccaggtcccaagctccattggagatgaccagtcctttctgggacctcaatgggtcacaatcccattggatggaaaggacttggctatgaacttgactggaaacacgcagcctgctcctggagcttcactggacatattctttatgccacacctagccacggcgataactaaaaacgggacaaataatttgaaatagaaacagatagaaacaataaaatag

SEQ ID NO: 364932 - DNA, 460 bp, Homo Sapiens
caggtcctgaccctcagagccaagtccctgtcacgtctggggcagccaaaccctcgccccaaagggacctggacacgcccggccaggatgtggggttggatgggccattttctgtcctatccctcatctccacccccgccacagcctacacgcatcccacacatgcaggcacacacagcctgtgcacacatgtgttcttggcccggtttcatccccccatgactggtgtctgtgaggtgcagatggacacagcgcacacccagaccctccaccaggctgtgacctcgctgcctctgaggccttgacaaggcccctcaatcggaggacagccggccgtgcacactttcatcatcgtcggacaaacagcgtctactgcacatttttcttattcctattcttcagccatagctatggcatattcttctactattcctattataccacttaccagcttactcga

SEQ ID NO: 364933 - DNA, 1157 bp, Homo Sapiens
  misc_feature (734)..(763): n is a, c, g, or t
tgggtggcgatatccggcacgagggagagggaggctctgttggaggaagctgctccacctgcagaggtgcacaggccggccagacagccccagcaaggttccggactctgtgagaaggatgtgaagaagaaactagagtttgggagtcccaaaggtcggagcggctccttgctgcaggtggaggagacggaaagggaggagggcctgggagcagggaggtgggggcagcttccaacccagctcgatcaaaacctgctcaactcggagaacctaaacaacaacagcaagaggagctgtcccaacggcatggaggatgatgctatatttgggatccttaacaaagtgaagccttcctataaatcctgtgccgactgcatgtaccctacagccagcggggctcctgaggcctccagggagcgatgtgaggaccccaatgctcccgccatctgcacccagccagccttcctaccccacatcacgtcctcccctgtggcccacttggccagcaggtcccgtgttccggagaagccagcctctggcccaaccgaacctcccccgttcctaccaccagcaggctccaggagggcagacaccagtggccctggggctggaactgccctagagcccccagccagccttttggaacctccggagagaccccaaaagccctgccaaagcccctccctttggaaaatccccactgggataaaaacccctcccggcacggaatggtnnnnnnnnnnnnnnnnnnnnnnnnnnnnnntatgaaccccccccaggacccggagctttccggtcccaaaaggaatcgggagaaccggaaaagcccacagcttcctgggtcttgcgacaagggcggcccttcttccgctttggcaaagagagggtttggtcctctgagatatcactatgagattaggggggtggaaagaacgggccgttggaaacccgcgccctcccctacaggggaaggcgccaggcccctcaagcattgaacccctgcccgctcccgagaggaacacagggctcgccgcgcggcctatctctcagcgcgtgacctcccggcatacatcggctcacccgagagcgagagacgcgacccgagagccgacgacttcaacactgacacagcatcgatcagctaatgcctcgcccaa

SEQ ID NO: 364934 - DNA, 493 bp, Homo Sapiens
gtgagagccaagggcttggatggaagcttgagcatagggcaagggatggcagctagagccaacagcctgcaactcttgtcacccaagcctggagaacagctccctccagagatgactgtggcaagatcttcggtcaaagagacctccagagaaggcacctcttccttccatacacgccagaagtctgaggggtggagtgtatcatgacccacactctgatgatggcacagcccccaaagaaaatagacacctatacaatgatcctgtgccaaggagagttggtagcttttacagagtgccatctccacgtccagacaattctttccatgaaaataatgtgtcaactagagtttcttctctaccatcagagagcagttctggaaccaaccactcaaaaagacaaccagcattcgatccatggaaaagtcctgaaaatattagtcattcagagcaactcaaggaaaaagagaagcaaggatttttcaggtcaatg

SEQ ID NO: 364935 - DNA, 1573 bp, Homo Sapiens
  misc_feature (71)..(126): n is a, c, g, or t
  misc_feature (128)..(187): n is a, c, g, or t
  misc_feature (200)..(215): n is a, c, g, or t
  misc_feature (954)..(954): n is a, c, g, or t
  misc_feature (1352)..(1352): n is a, c, g, or t
  misc_feature (1486)..(1486): n is a, c, g, or t
  misc_feature (1507)..(1507): n is a, c, g, or t
  misc_feature (1538)..(1538): n is a, c, g, or t
  misc_feature (1540)..(1540): n is a, c, g, or t
cagcatgcacagcatagcaagactgcatctctacagagagtaaaaaaaattacccgagtgtggtgatgtgnnnnnnnnnnnnnnnnnnnnnnnnnnnnnnnnnnnnnnnnnnnnnnnnnnnnnnnntnnnnnnnnnnnnnnnnnnnnnnnnnnnnnnnnnnnnnnnnnnnnnnnnnnnnnnnnnnnnggaccctgtctcnnnnnnnnnnnnnnnntatatatatatatatatattatttttatgaggtgaagtgcatcaaacttgggaaagatttgaggaggctgggaacctcctggaaaaccactccttgaagaaagatatgagagacatttagaagtgattcctgctttcagaaggaggcggattcaaatacatcaaaagtcccttcctctgctaagtgtttatagttcaatgaataatttcaatatttgtatgtgttcttgtcattttatttttttctgaaaaacttccaaaaatttgaaaataaaattacagccttttcttcttaacgggcggggacaaaacgagcgagaagatcaataaataacccgcgtttcccctcgccccccctcttcacgatgatttaccccaccccgccgttgcgcgcgcgtggagtgagcggagacgccgactttccaccatcggcggatacccgccagcccgtaccgcgtgcccgcggccctggcgttacgcccgcggataaacgcgttttccgcgcataacctatgctcgccccgcctcgcgggcatctggttccgcgtcggtgaagaaacaccccgcggcgacacggccgggccgtggcctaaaagagataactggcgcatccccacacaccacaccacggtgttttgcccggctcccacccccgcctcataaataaaccacgccgccccccattggtcgcgcggccgcctcgcgccgcccggacttctattcatcccaccacacgacgngtgtagcggtcgtcgtgtcgcctccccccccgctctctcacaacaggcgttgtctgcggcttccacgagattatgagcggagggggaggccgcgtacagccccgcgacacctagatcaccacaccccacgtgcgcgggcactgtgccagcactcctccatctcatatctggggataaagagcggccctccacgcccgcccgccgttgctttcatattttttttctccccgccgctcggtgcttgctttcccgccacacaccgccgcgcctgagttataacaatcacatccgtagtgagtcagcacccccgcgcggcagtagaccggcaatttatgaggagtagtaggcgcacggtacgcatcgctcgtacccatgtgacgcaaggtcgacgcggcctnacttactaggtgactgacagcgggatgggtgtgtcgtcacccggtccgcgccccaccacgcccatggtgatatgacgtttcactatagtcctagacagacgtactcgtatttgcccacgggtctctgatgctanacacccacgctgttgctccancgttattacccataccacaagaatgacgagncncccctctattttattacacagcgacgccacggg

SEQ ID NO: 364936 - DNA, 818 bp, Homo Sapiens
acttgggctgggcggtcgccctgccccaccgcccttcggcgctcgcaggtccgctcccctcccaaaccgcagagcggcaggcgcggcgctggttcgagagctcggccggggcagcgcagccgccggctgcccctcgctcccaggcgccacaaccccgcgccctcgccgctgctgcgtcccgcgagacctgtggggaggccgggagtcacttcgggttccctttcagcccacgtggtcctgggacaactccacccaggaacctagatcggcaccgcgcagggaaatcccagcagcggggttctggccccaggcacgcgttgcggcagcctggcgagcgtccttgcgtgcctccaagtgccggtggcggtgcgtgccgccggggggcagacaaaatccatgtctttctttcccagaattgggggcgctcccgtttggtctgccctggtttacctaaaacgttttcaaaaagcccggacagaacactaccttggtttgagaaacatcaggcaaaaagcagctccttcttgaccaaaaatgggcaaagaagcatcctcaaggtttcagtgctcaatatactttccgatcaagactacgagagaatcagtcattacaatagccaacttctgttgataacgtgcgtgggacaaagcgcaaccaaagccctaaagggccagtgctggtgcaggggtcgacagtccaggaacccagaggagggcagagcaatcgcccggaatgggtcctggggtgactcatggagcgcaaacccaggccacagtaccgttaatcctcgtagaggatgggcccattgtccgtaccgg

SEQ ID NO: 364937 - DNA, 565 bp, Homo Sapiens
  misc_feature (295)..(295): n is a, c, g, or t
  misc_feature (298)..(298): n is a, c, g, or t
  misc_feature (300)..(300): n is a, c, g, or t
gaggcagagtgtattgagaacatgagagaaaacaaagttgggggcagagctcaacctggccgcaggagctgcaaaatgaagggcgggctcttccattggtggccctcaagggtagaagggagcaggggtccagggcaggggcttcactctgttctgggagaggccaggcctgaaggagctgagctcactcacaactcccccacgcataccccctcgatctgtgtgaaatgagctcactaagaaggcacccctgttcccatggagacaagcccagagctcacaaaaactgcaggcntcnanccagcatggcactgcctccaccacccctttgcccactggggaacccagaactagggctgggaaagagaagtgggtggtccgtcgcccccagccttgcgaagcttccatctgaatcctgccacttgtgtctgtattctctcaccccccacaaagcctggtttggtcgggggctgtatcatatcacctccaaaagtgtcagaggcgatgggaagtctccagctacctgacttaacaccctcactgtatgaatgtggaaactgagacc

SEQ ID NO: 364938 - DNA, 759 bp, Homo Sapiens
  misc_feature (46)..(46): n is a, c, g, or t
  misc_feature (255)..(255): n is a, c, g, or t
agtcataccctgactcagatactcactcacagccctgtgctgaaanatctgatgctgttcagatgcagagagagtggagctttgcgcggacacaccctctgctcacctcactgtaccgcagctctttgtgatgctgagtgcagaggagttggttggccatttgcaagaagttctggaaacgcaggaggttcactggaagagagtgctctcctttgtgtctgccctggttgtctgctttccagaagcgcagaagcntgctttgaagactgggtggcgcgtttgatggcccaggcattcgagagctgccagctggacagcatggtcactgcgttcctggttgtgcgccaggcagcacttggagggcccctctgcgttcctgtcatatgcagactggttcaaggtaagtgacctgccaatcggctacctaatacctgatcttcccagaaggcctgggagtggggacaatgctgtccccacctgattctctgtcatgtgagtgagcaaccttgccgtcagctttgccgagtggccttggcagatcttcctctgcgtgtgccgaggagcctgggttctccctgtcggggcctcggcggatcttcctctgcatgttccgaggagcctgggttctccctgtcggggcctcagctccttcccctggtttccgtctcacttagttgacggagcctcctgctgtcttttataagaaaattagcgaaatcaagcctggacaccatagtgaaacctcatctccaccaaaaa

SEQ ID NO: 364939 - DNA, 615 bp, Homo Sapiens
  misc_feature (275)..(320): n is a, c, g, or t
  misc_feature (362)..(362): n is a, c, g, or t
  misc_feature (476)..(476): n is a, c, g, or t
  misc_feature (500)..(513): n is a, c, g, or t
  misc_feature (548)..(558): n is a, c, g, or t
ctggaccggtccggaattcccgggatatgagttagttatacatacatttaagaaaaattactaaaaacaagataattacccaatttttggtgactctgagtgctggcagttgcagcgatggtgagttatatcacagaataaatgtttgcaaagcaaaaattgtcaggagcgcctccttccaccacgcaggtcaaacaccagaatgaacgggctcactgggcacttccgtacagcgtcatttactattgttgcatttgtatggttatgggaggcannnnnnnnnnnnnnnnnnnnnnnnnnnnnnnnnnnnnnnnnnnnnnccaactcagttattccagtttaaggtggtgggcgaccagagncctatcccaacagctcagtgtgcaaggcagggaccacccctggacaggatgcccctccatcaaagggaaaattaaaccccccaaacaaacttagaatgcgaccaaaaccccaanaaaacctcacctggacattctttnnnnnnnnnnnnnnaaggaaaacccaaaagggccccaaaaaaaattttnnnnnnnnnnngggggggagacccttaaaaaaagggggccacaaaaaaggggggcccccccccgcgcg

SEQ ID NO: 364940 - DNA, 467 bp, Homo Sapiens
  misc_feature (153)..(153): n is a, c, g, or t
  misc_feature (281)..(281): n is a, c, g, or t
ttcagcctgagctacagcttccacagcccgtctccctacccctaccctgccgagcggcggcccgtggtgggcgcggtcagcgtgccggagctgaccaatgcgcagctgcaggcgcaggactacccgtctcccaacatcatgcggacgcaggtngtaccgcccacccccaccctacccgccccccaggccagccaacagcacgccagacctgtcccgccacctttacatcagcagcagcaaccccgacctcatcacgcggcgcgcgaaccactcggtgcaanacgttccaggaggacagcctgcccgtggcgcactcgctgcaggaggtcagcgagcccctcaccgccgcgcgccacgcgcagctgcacaaacggaacagcatcgaggtggccgggctcagccacggcctggagggcctgcggctcaaggagcgcaccctatccgcgtcggcggcagaggtggcgccg

SEQ ID NO: 364941 - DNA, 427 bp, Homo Sapiens
gctctctgtattaaatcccctctgagtatctagtagtttttgttgattggtagaaatagcatggtcaggaatgccaggtactgcagaaagatggaagggatggaaatggaaaatggtcagatctttgagcaatgggggtagagcccagaattccagggcttgagaaggggatttctgccaaaccgatgggtgtataccaattctcatgaaggtcttaatttggacctactttgagactgcatactttttcatatttatcagacagctgggtacagtctgtttttgaagtgctttttcagctttagctgtcctccttttttggttttctgacttttcctcattgatttggagttctttgtatattctagatatgaatcctttatcagttatgtgtgttacaaatacctattctcattccagagctgct

SEQ ID NO: 364942 - DNA, 764 bp, Homo Sapiens
gctgcttggggtcacctccttgctcatcgcttgcaaacaggtggaggtgcacccgccgggcggtgaagcagcttctggccctctgctgcggcgccttctcccggcagcagctctgcaacctcgagtgcatcgtgctgcacaagctgcacttcaccctgggtgcgcccaccattagcttcttcctggagcatttcacgcacgctcgcgtggaggcggggcaggctgaggcctccgaagctctgaaagcgcaagccctggcgcggggggtggcagagctgagtctggccgactatgccttcaccagctactccccttccctcctggcgatctgctgcctggcgctggcggaccgcatgctgcgggtctcgcggcccgtggacttgcgactgggagaccacccggaggcggcgctggaggactgtatgggcaagttgcagctgctggtggccataaacagtacttccttgactcacatgctgcccgttcagatctgcgagaagtgcagcctgcccccgagctcgaaataaaacagatccttcgtttccttttagtccctggcccggctgctggacctctcccgtagcctcagaagagtgcagtactggtccacagagaaggcttcaggacctgcttggtcagctgcaggttgtaaatagtgtacgatactagcatctggtattttatttattttgcagcgagcacatgaggaagctgagtctttcaccaataaacagttgtggttgtctaaaaacacataaacacca

SEQ ID NO: 364943 - DNA, 239 bp, Homo Sapiens
cagcacacggaggatgtcttggacatgtgagatgtaacgtgacaggattttgcattttaaactgcagatcatttacatgtccttattttccacctcccccagtcaaaatgctttctaaatcattttcacagattatatacttcggatctgtttactgttcagttaagaaattcttggatcttattaatatttcagatgatagaatacatcctacagaaatacatgtttaaaatgtaaaa

SEQ ID NO: 364944 - DNA, 891 bp, Homo Sapiens
cctatgtccagcaggtggcgcgcagcggcggtagccgagcgagggcgcggtggcctctgacaggaatgactctgcgcacgtgcgtttcgcagcagtggaagtcttcacacccggaaactcgactttggccgtttctccatttctcctcacgcactgtctttccttgggccctcgtcactcctggcaccgggggaagggcttccccgcctctggccgggcgctggggcgcgaccgaaggcgaggcggcggcgaggaaccttctggaattcggccgtcggggcaggcgtcgagtttacaggagaaggcgcggtgtcccgggatgagcggagtcgccctcacttaaggagcgagggaggcctcgggggtccccagccggtgatgagccctcctcttcagctaggaaaatgacggtgttcagaaagttaaaacttcttcgctggcaaggatttcatcttaaagttgcggagactggaagaaattaacagtgttctaacatggaagagcattcaccacatgtgtactgtcatgggttgacatttagcttcaggtctccattttagaaacggaagactctggtagcacgtccttgaaatcttgatgccattgctatttttctgcattgtattgtatcttcgtctcaggtaggtgctccaatacaaaagacctgctactagctgccatgcacattgatatcagtttgttgccagacttctacaattttcctgaaaaataagattcaactagtttatatcccttctataaggtgaaaccttgacgggtgtcaccgaaatggtggaacagatcttcgatgtgacgttgcaccgttagatgtccatatgggtaacgatcgggaggaccattccactaagtacagttgaagttataccagag

SEQ ID NO: 364945 - DNA, 484 bp, Homo Sapiens
tgatggaggcacatcagcagaagccatgcaggttcccttggaagaagatgatgaattggaggaggaagaaattattaatgatgagaatttcctgggcaagagaccactggatagtcctgaagctgaagaactgccagccatgaagcggcctcggctattaagcactaaaggggacacgctagatgttgtgttattggaagctcgagagccactcagctcaataaatactcaaaagatcccaccaatgctttctccagtccatgtacaggacagtacagacttggcacctccctcacccgagccgccaatgttggctccagttgcaaaatcacaaatgccaactgcaaaaccattagaaacaaagtcatttacacctaaaacaaagactaaaactagctctccaggacagaagactaaatcacctaaaaccgcccagtcaccagcaatggtcggaagtcctattcgatcaccaaaaactgtatcc

SEQ ID NO: 364946 - DNA, 668 bp, Homo Sapiens
ggcaaacgagaccacgtctccaggctacgcccccacttggctggtttaaaacggatccactccaccggagccaagtaatcctaaccgtttttattcaattccaatctgtggatgtataaatgctgggggggcagccctggataggttttatgggaattctttacaataaacatagcttgtacttgagatctcaaatccattcatcctgattgggcatgaaatccatggtcaagaggacaagtggaaagtgagagggaaggtttgctagacaccttcgcttgttatcttgtcaagatagaaaagatagtatcatttcacccttgccagtaaaaacctttccatccacccattctcagcagactccagtattggcacagtcactcactgccattctcacactataacaagaaaagaaatgaagtgcataagtctcctgggaaaagaacccttaaccccttcctcatgcccatgactggtgatttcatgacctcataagccccctccgtaggcatcattcaagatcaatggcccatgcatgctgtttgcagcagtcaattgagttgaattagaattccaaccatacattttaaaggtatttgtgcctgtgtgtatattttgataaaatgttgtgacttaatggcaaacaggtggatgtgtaaaaatggaat

SEQ ID NO: 364947 - DNA, 595 bp, Homo Sapiens
  misc_feature (18)..(18): n is a, c, g, or t
  misc_feature (31)..(31): n is a, c, g, or t
  misc_feature (147)..(147): n is a, c, g, or t
tcggccacgagcctctcncattagtcttcanactgtccctcattgctgatgagcgaggtggtggagtgtgtagaaaggtctgaggtcgtcatggatggagtgtggaccagggacttgtcttctggcagaaacaggcccccaagtccnccgtccttctcggcaggactcccgacagacccctccaggctctgagtgctctccatggggctgtctgtgtacaactcctgggggccctcaggtggcgccagcgtcatagcctcctcctcgtcctcgggaaaaaagccgggttccctggggatgagctcgccatcagcaaaggtggggcctgtgacctcgctgccctgctccacgcagtctgggatctctggcgcgcacggcagcgtccccgagctctccaccgacagcacatccttcagcagctcctcgcaccctttcatggcgaacaccccccggcaaaagtccttgaagttgattctccccaggtcgttgggatccaaatatttcacaagtttttccacctcctcgccctggccgaagcgcagtccgagcgccgcgacgcgctccacgcgcaggaagccgtcggggtcgcggccgc

SEQ ID NO: 364948 - DNA, 856 bp, Homo Sapiens
ctgcgcttcggggctgcccgccgcgtccccgcgcgcctgccgaccctgcgcccgctggcttccgcgcctctgccggggagcggcccgcggatgcgcaccccgccagctctcgggagccagggcagcgaggtcacaggccccacctttgctgatggcgagctcatccccaggaacccggcttttttcccgaggacgaggaggaggctatgacgctggcgccacctgagggcccccaggagttgtacacagacagccccatggagagcactcagagcctggaggggtctgtcgggagtcctgccgagaaggacgggggacttgggggcctgtttctgccagaagacaagtccctggtccacactccatccatgacgacctcagacctttctacacactccaccacctcgctcatcagcaatgaggagcagtttgaagactatggggagggtgacgatgtggactgtgcccccagcagcccttgccccgatgatgagaccaggaccaacgtctactcggacctggggtcttcggtgtcttccagtgcggggcagacgcctaggaaaatgcggcacgtgtacaacagcgaattgctagatgtttactgctctcaatgctgcaagaaaatcaacctgctcaatgacttggaagcccgactgaaaaacctgaaggccaacaggcccgaaccgaaagaatctccagcacggcttttggacggcagctcatgcacagcagcaacttcagcagcagcaattggcagcaccgaagacctgttccgggacagcattgactcttgcgaacaatgacatcaccagaaaagggtagctccctggaaagacggtgacgagctgagatgacg

SEQ ID NO: 364949 - DNA, 313 bp, Homo Sapiens
gggagaatagcttttaatttaaaacaattgaagcaataaatcatccatctctctttccatctcaggcaaataatctcccaaaacatttgatacagtttaacaacaactgggactagtgcaaaataaaataaatacaaactctctcaggagccaacatcaaaacctgctggacaggtgggcacaggaacagactcagcctctgccaaggctgagacaagcggcacatcaagagtggcaggatttgtgcagtgtttcaacacacccagctttgaacagactcaacaatacctggggaggggaaaacacaagagga

SEQ ID NO: 364950 - DNA, 549 bp, Homo Sapiens
gtcacagagacttagtgaagtgcacacattgctcacctgggtgaactgaggtccagcgggggaaggcttcctcctgttgtaatcactaaccccaactctgtctcccttgcccgattcattcattcgttaattaattcatccaacatcctgtccccaagaagctcagtctggggacatactgatccagttaaatgcgagtgcttcctagttatacatggcgactgctgagaagggactccagagtccaggcacctacctcccaggggctcaccgttcactcctctagcctcatttagagctcgcattaagagcacgggatctggatccacactgtttggattcaaatcacaacttcaccacttagcagctgtgtgttctgggaaaatgacccaccttctctgtgcctccattttctcacctgtaaaacgggctcccaggctggtgggagggtttcaggtgtaagacatggagagtcctttagcgaacatgtagactggcaataaactcaataaatggtgactgttataattaatcctcggaaccatcaaa

SEQ ID NO: 364951 - DNA, 968 bp, Homo Sapiens
  misc_feature (47)..(55): n is a, c, g, or t
  misc_feature (184)..(216): n is a, c, g, or t
agtcgacggtaccggacatatgcccgggaattcggccattacggccnnnnnnnnntcaagatgagtttccctgtagattgtaccttggggtttttttctgtcgttttgttaaaattagcgccattttaatattaaaaatactgatttttaatattgaaaataaaagcatttaataatctcctcnnnnnnnnnnnnnnnnnnnnnnnnnnnnnnnnncatgtgtgtggggcgcgccctcgcgcgccctcgagaaaaaagctttttaagacacacattcgtgtggggggcgcgggggcgcccccagtggcgatcacgcgtgaaaccatgctgccccacaagcgcgtggtctcccccagggagagagaacccccggggcccccaggccacacgggggcgccgggcactccccaccacgaactaaaaataaccgcgccggggggcgacaacccagcagcgcggttctcgagaacacaaatccctagagatcgggcgtgtcctccggagagggagcaccatcacgcggggggttcttatcaaacgaggggagtgtcccaaagcgaggcggctcagtattctccaaaattagaacgccggccgcgtggatgaggcagccccaccgagcacacgccccgcatgccgcgtcgccctcacatccaccccgcaccccatcgcgatccacacaccagcgcgcgccagaagaaggcgggcgcggagcggcgccggccgcgcaaggagcaccagaacggagacacaggggcgagagacgggagagggctgcgcgctaccccccgcgtgaacagacggacgcccacacgaagcaggagcggagccggcctccccaggacggcggggacagcggcccacggagccgccaacacggcaggaaccacagcgtggagccgcaacacccacgccccggagcgccaccggccaacaaccaccagagcgccaaaccggcacgacgcgaa

SEQ ID NO: 364952 - DNA, 763 bp, Homo Sapiens
gaaaggctttggtaggagcttgaatcttcgccatcatcagagggtccacacgggagagaaaccccatatatgtgaggagtgtggtaaggccttcagtctcccctcaaatcttcgaggtccacctgggtgttcacaccagggaaaaactcttttaaatgtgaagagtgtggtaaaggcttcagtcagagtgcacgtcttgaagcccatcagagagtccacactggagaaaaaccatacaaatgtgacatatgtgataaggacttccgtcaccgttcacgtcttacatatcatcagaaagtccatactggtaaaaagctttagaaatgagaaatgtgttaccaacttttgtctgaatgcacatcttcaagtttttgggctagtccatgctggtggtaaaccctgtaaaactactgagagtggaagggggtttgttcacacttggaatctttctaacaaatccatcaagatgataacacagaaccatgaacaggaatagaactcgtatttaggggagaaatagggctggtggctctcttggtaagatctagttaatataaatgatcacctttcattgtgaatatatgcctgaagataatgtgtggaaggatatttgccatatgctaactggttttttggccagggagagttttgggttattatcccttttctttaattttcattttatacttacagtgatcattattttcataaaagctgtaaagctatgaaaaatgaataaaattactaaaaattttctgtagct

SEQ ID NO: 364953 - DNA, 303 bp, Homo Sapiens
cacctgaggaaatgcactgtgtggagcccgggaggtaattgggggtgaggaagatgtgcgggccagggaatgtgttccacagagagggacagcatgtgcaaaggctgagcaccaacacatagtggtcacctgggccttatgcccagggagcctccaaagcattcagctcctgcttggccagtgtggagaggaaaggagccacaggagcgggtgctacacccggcaagacagagcgtctccatctaaaattcctagggcaagcttccaacccggcccaataaccgccatgtgcccagaatatgg

SEQ ID NO: 364954 - DNA, 360 bp, Homo Sapiens
  misc_feature (52)..(103): n is a, c, g, or t
  misc_feature (123)..(144): n is a, c, g, or t
ccaactacttgggaggctgtggtgggaggatcacttgaacccaggagacagnnnnnnnnnnnnnnnnnnnnnnnnnnnnnnnnnnnnnnnnnnnnnnnnnnnncagagtgagattccgtctcnnnnnnnnnnnnnnnnnnnnnngtagaaagcaagaaagtgtctctgtacaggtaggcatgaaatgaatccttctcttcctcccctttactcctttaaccccttctcctgcaatgtcttgaagtaaattactgtcattacagaagagcaatgcactgcatccccccaaaacctttctatatgcttttgctaccccgttaacagaagaatatacagaactgtcttaggcgaaagtatgta

SEQ ID NO: 364955 - DNA, 414 bp, Homo Sapiens
gccatttgttaagtgactatggtactttgtgattccttaatctatagatgagtcagctccacacttgagtctctttttagagggaaatcagtaataaagctgtaaaataaggaaggaatcattgtcagtttgtgtcttgatctggtggtggttgggataagggtacacatcattttatacaaacactaaagctttttgctaacaacatagcaggtcaaaattcacacataagaaagtttaactctgtactgttcacacttttaatcctgtaaataatgctgcattttgatggttcttacttttttggtatttaatgtgggctggttttacaatgttatattcacttccagatgcatacctctgctgctttctctcctataaatagtgatgctataaacttcctttcacagagat

SEQ ID NO: 364956 - DNA, 590 bp, Homo Sapiens
  misc_feature (40)..(40): n is a, c, g, or t
  misc_feature (50)..(50): n is a, c, g, or t
  misc_feature (67)..(67): n is a, c, g, or t
  misc_feature (150)..(150): n is a, c, g, or t
  misc_feature (251)..(251): n is a, c, g, or t
  misc_feature (395)..(395): n is a, c, g, or t
  misc_feature (531)..(531): n is a, c, g, or t
  misc_feature (551)..(551): n is a, c, g, or t
  misc_feature (556)..(556): n is a, c, g, or t
aggagcgctgcacctggtgatgaccctcgtagtggctgcngcgcgggccnagaaggaagcattcgtncagtcagagagcataatagaagtactgcgttttgatgatggagggctactacagaccgagacaacacttggactcagttcatntcagcagaaaagtatatctctctaccgggggaattgcaggcccatacgatttgagccaccaatggctggattcccatgaaccagtaagtttaaaatttttnggactgtactttcccattaaactattaaatgtattttacaatgcatttgtcttgtcttttgcctgtgttacatctatgtgggaaagttacatgttctagtcatcaggaaaacaaatgatactgaatgcagtttgaaaatgggangtaagtatctattaggagtctaacatgtaatattaacttttaaagcttgaaaaatactcgcttgttgtagtctctggttcagagactctttggaaacagcaaagaacttatagttagctgttttgattagcacttnatttttatttttactatttnaaaancttcttatgaataaaatatattctatttgtttaa

SEQ ID NO: 364957 - DNA, 1152 bp, Homo Sapiens
gcggccgccgctgccacgtcggcatggttgaagtgtgcggggtactcgccctgcagcagcgcctcgaagtgcaagcggcagtagaccaggctgtccttcatgccgaagtggtcgcccgtggtcagcatcttgttacacgtggtgcacgtgaagcagttgaggtgataaaccaagtcccgagcgcgcatcaccatctccgaggccgagatgcccaggtggcagcgggcgcagcgctgcacagagaagcgcctgtagtagtcttccttgcagtagatgctaccgtccttgctgaaacaggtgagctccgactccaggttgagcttgcactcgcagcacttgaggcagcgcatgtgccactgcttgtccaccgccagcaggtagtagcggtccgagatcttgcccccgcagccggcgcacagcgcggcgcggtcactgctgatggacggcatggtcgtctcggtgtcgccgcggtcgatggcggagctgatggcgggagcctcgctcttggccctgcggtccatctcgtcgatgaccccgtgcacctcggggcccgacagactgtggaacagcatcgccggcgggaccagcagggaccgggggcgcggctcctccgagggagggcattgccccccgcctcagctgcacatggcagcatcctggcgctaacggggcccggtgcatcgccaccgcggccccggccccgcccgagctcggctgagcccccaggccgggctccgggccccgggcgctcgcggggcaggacgcctcccgccgaggcgcaggggcagctacattgcggggcgcactgggcgacggcgccaaagccagggtcacaagggcacgggacaagcggggcggggggagcaggagactaggacagaggtcggcgcccgccagcgggcgctttcacgccgcgggcatcgcccgcccggcttcagcgcccggggcgcaaagcaagggcgcaaactctgcccgaggcggcgacggctgcggtcggggttcaccctgaagccgctaggtgtccgcggcggcccagctgcctggacccctcccctccatggggtgcgcccccagcccaaggcgaccctcttgggcgctgagtcggcagactggagtaggggtttctccgaagcctgcgagccgagtcgagcc

SEQ ID NO: 364958 - DNA, 537 bp, Homo Sapiens
  misc_feature (166)..(195): n is a, c, g, or t
cagaacttaagcaagaaaagtaaagaaagaatgcagaattgtggagcaatgctttaggaaatatttctacctgaacacttgtactcttgaagtcacaacaaaataatgatgagcttttcacatcacctttatggtttcaatccctagctcaaagcttcctggaatnnnnnnnnnnnnnnnnnnnnnnnnnnnnnngttaaaataaataaaacattcaatgtttttctcctgtttctctcttattacttctttcctttggcattttcaatttgaaatgctttcccttggttgttggttttaatctcccccctacccctccccttttcctattaatcagaatataaacctgcaaagctctgctctggtttggttttgaaagtttaagcttttctgcttctgtgagagcacaggcttctgtcccttttgattccaactgaacttttgtgttctctaatgatactaacacggtgtaggttttacagtctcctaatttgtactggtaatgcatattccaaataaatagtttcttttgttgca

SEQ ID NO: 364959 - DNA, 810 bp, Homo Sapiens
agcggggatgaagagtgagaaagctgtctaggtgcctgtccaattagggcagtaggaagaatcctgatggccaggcagctcttatctcaggtggacatggactgcagggtccacatgcgacccatcggcctgacgtgggtgctgcaactgaccttggcatggatcctgctagaagcctgtggagggagccgcccactccaagccaggtcccagcaacaccatgggctggcagctgatctgggcaaaggcaagctgcacctggcaggaccttgttgtccctcagagatggacacaacagagacatcgggccctggaaaccatccagaacgctgtggagtgccgagccctgaatgcgaatccttcctggaacacctccaacgtgcccttcgcagtcgcttccgcctgcggctattgggggtacgccaggcacagccgctctgcgaggagctctgccaggcctggttcgccaactgcgaagatgatatcacctgcggcccgacttggctcccactctcagaaaaaaggggctgtgagcccagctgccttacctatggacagaccttcgcagacgggacggacctttgtcgctcggctctgggccacgccctaccggtggctgctcctggagcccgtcacttgcttcaacatctccatctccgcggtacctcgtcccagaccaggacgacgggggccgggaagctccctcccggcgttcccgcagccctcgcacctccatcctggacgctgcgggcagcgggagtggccattggaagcggcagcggccctagcggacgcgtggcctgagttggg

SEQ ID NO: 364960 - DNA, 1643 bp, Homo Sapiens
  misc_feature (24)..(24): n is a, c, g, or t
gagagttgacgccggcctggaggnggggacacaccgtgcaggccccgctctttcctcccttttctcagatacccgacggcgcggacccaacctggctgctgcagtacttgctctaactttgccgcagctgcctcccttctctcggaacccactctcctaacccacccccgagaggcggagagaatgtgggagcacttcagagaggcctaggctccggagatcgggccatctgggctctgaaagcaaattagttttccaactcatgtctggctccggcgttacccagacgcctgggaaggtccttcctgcagtctgatcaacattttttcctgctgcaattgaccaatcagctccccttggccttcaacctcgggaatgatggattaggggagtctagaaatggacgaagccctaggtgagggtttgaatcctcttttcccaagattcaggctggggatggagcctgagtctgggcccattctcggctttatctaaactccagattaccaagcctggggctgagccccaaggaggctcagaagggccagaccccaggcagggccttggggcacagatatcatcaccttcccctctgggatgtttgggaccggacctccgtattaaccctgaacttccgtactaacccctcagaaacgcagctgaagacgagcagaggacgcttctcggctacagaatccctccccaccttggagctcttatctcaggtggacatggactgcagggtccacatgcgacccatcggcctgacgtgggtgctgcaactgaccttggcatggatcctgctagaagcctgtggaggcgagccgcccactctcaagccaggtcccagcaacatccatgggctggcagctgatctgggcaaaggcaagctgcacctggcagagatggacacaacagagacatcgggccctggaaaccatccgagaacgctgtggagtcgccgagccctcgaagcgcgaatccttcctggaacaccgtccaacgtgcccttcgcagtcgcgttccgctctgcggctacttgtgggtacgccaggcacagccgctctgcgaggagctctgccaggcctggttcgcctaactgcgaagatgatatcacctgcggcccgacttggctcccactctcagaaaaaaggggctgtgagcccagctgccttacctatggacagaccttcgcagacgggacggacctttgtcgctcggctctgggccacgccctaccggtggctgctcctggagcccgtcactgcttcaacatctccatctccgcggtacctcgtcccagaccaggacgacggggccgggaagctccctcccggcgttcccgcagccctcgcacctccatcctggacgctgcgggcagcgggagtggcagtggaagcggcagcggcccttagcggacgcgtggccctgagttgggggagcgacccttcccccagccccgcccctcaggacacccagaaccccacccctcgtcctctcggccttctgtaatagttttgagatgtctgtccctcctccctggagctccagagacccacccctctccaggttatcccagaaatgacccaactctctcacttttccctctcccctttgaataaagtcgccagctagagcacgtg

SEQ ID NO: 364961 - DNA, 482 bp, Homo Sapiens
attcggaacgaggtgcagtacttgctctaactttgccgcagctgcctcccttctctcggaacccactctcctaacccacccccgagaggcggagagaatgtgggagcacttcagagaggcctaggctccggagatcgggccatctgggctctgaaagcaaattagttttccaactcatgtctggctccggcgttacccagacgcctggaaggtccttcctgcagtctgatcaccatttttcctgctgcactgaccaatcagctccccttggccttcaacctcgggaagtgatggagttaggggagtctagaaatggaacgaatgccctaggaaacgcagcttgaaagacgagcagaggacgcttctcggcttacagaattccctccccaccttgggagctcttatctcaggtggacatggactgcagggtccacatgtgacccatcggcctgacgtgggtgctgcaactgaccttggcatgg

SEQ ID NO: 364962 - DNA, 465 bp, Homo Sapiens
cactattagctgatatcacagtgtgtatcaccttaaaatgcttagggagggcagatagctgtgctctctacctttatctggagttattgagtctgatcccttcgggcgaggcctcattcccacttccatggctggtttgggtgcagacatcatccaactttggacagaggatacaggctggcttgagctggcagcttgtaaagattttcctttcttcatgggtattattgcttgtcttataatgttggtgatagatttttcaccttccaagctgcccaaacccagtcaatttccacgtgactatactggttttagtgatgataaagtcattgtttaagctacatttactcattgcagttttattctctgtgtgctgtgggttgagagcaaaattggagtctgccaaaatgaaaaagtgagtggttttgtgaggttttcaattttatgtacttccaaggaaatagc

SEQ ID NO: 364963 - DNA, 258 bp, Homo Sapiens
agaagctgccctctgttttttttatccactcgtaaatctggatttatttcttctgttttatacaagctctgttaagttatgtttacagtatcttgtatcgctgtttacaaatcttgcatggactcctgccacagtgaaagaagaaaatcttcatgtcttcaaaaattaggcaggtaatctttgtatacttctgacaattgccagatctatggcataaataggcacacaaaaaggtacttaaacagttatagtcaccaa

SEQ ID NO: 364964 - DNA, 422 bp, Homo Sapiens
gatgaggaagctgcattgcttcttgtgctcctatcccattggccagaacatagtcatgtggccatccctagctagaaggcacttgatctctgttttgctccattttccccaaccctcatgtcacccagtctctgtcttctctgcctccagacttacctgtcccttaccacaagcttgatgagttacaagatgaacaccccaaacccctggtcaaaaaaatagaactttgccaggccctccccacccagaagtccctctgtgtgcatcatcccaatcacagccccaccccggccccactccaaaagtgactgttactaacctgacactttcaataatcactccttgtttctttatggttttatctcccatgtgcatttctatacactatagtttagtcttgcttattttaaaaattccgatac

SEQ ID NO: 364965 - DNA, 732 bp, Homo Sapiens
agcggatgggaaacctaagaggaaaaagacaggggcctgcttgcccagccatgcgagggattccatgcccacctgccctctgcctgcctcgctggaatgtgggcccctgctccccgtcaggttgtgctgtctctgacctatgtttacatccccgaggggtttctgcctcctccccacccaggtcagggtgtggtccagcagcttgctgtggggtgctgacatgtgtcaccactgccccccttgccccccgggggggtcatggtctcctcctggatgctgctccttgaatcttttttcttgataaaccttttacaattaagataacacaagcatgactttttctgtttggatcccagaaaggcggagggcaggagaaggatagagccctaattgctcctgagagccattggatgagattctgaggtcgtggtgggcacaaattttccacagaacctcaaaagttcaggggagggctatgctggtggaaggtgccagcaggcaggaggagctagaggcggctgtggacccctgggtggatccatccctccctagaacgcactcttgtctctaaaacaggtggagtgctgcccaggggactggctgtactgccttgtgatctggggctgagggttgtatgaggaagggacaggacgctgtgccctaggacaattaatagatggtggctcactctccccaaggagccatgccatgcccttgcccttgaaaagccca

SEQ ID NO: 364966 - DNA, 723 bp, Homo Sapiens
  misc_feature (606)..(625): n is a, c, g, or t
caggacgaggggcggtgggcaggcagcgctgggtccagtggtcgggggaaggcgaggaggaccctcccggaggcgttgtctgcgactcggcggaggctccaacttccagtggcccggtcgggaaagatcagagcctcctaagaaatatccagaagtcaagccatggatccacctgcacgtaaagaaaaaaccaaagttaaagaatctgtcagcagagttgagaaggccaaacagaaatcagcccagcaggagctgaagcagagacaaagagcagagatctatgccctcaacagagtcatgacagaactggagcagcagcagtttgatgagttctgtaaacagatgcagcctcctggagaatgaggccccaggttcaaaccagatgggatcctgagagctttgagagggtgttgccagttttaagctgagatggcccatttggagccttacagaactagaccagaagacatttgtggataaatctgaactcacttcctgtgtgtaacttctaacttcactggttcctcccatctgaattggccacatgcttgctgaagagacttgtattcttcttctaagacagtggttttgttttttgggtttttnnnnnnnnnnnnnnnnnnnncacacacaaaaaacactttttctattgtttgagaaaaatcagtgtttctcatgaaactctatatcttctccaaaaatacaaataaaatactaataaaa

SEQ ID NO: 364967 - DNA, 465 bp, Homo Sapiens
ggtattgctgaatgcaagaagtggggcagcagcagtggagagatgggactgattctgtggcttaccttgattaacatcttttggaagttttgctagtgtgctttcctttctttactatgtttctcagattcctttgtatcagggttttgggtgtcacttaggttttgtccatcagattctgtgagacaccaggcatcgttttgaggatgtgggttatacacatggagtgcttctggaactatcagcccacttgaccacccagtttgtggaagcacaggcaagagtgttcttttctggtgattctccaggccatttaataccctgcaatgtaattgtccctctgtggctcacatttcattagtgagccatgaaatcaactcagtgggacatagccagcatttttgcataccaggttgggctataaaatatttctgttgtcaataaattttaaatgttttcctgcat

SEQ ID NO: 364968 - DNA, 365 bp, Homo Sapiens
gtccagcccatacactgcctgcagcatgtccaccgtgcagcctgacaccacctccagggtgcccggctgcttccagaagaagccgtagagcgacttgcgcatgtggaaggcgaagggctcggtccagccatcgtagagcttgaggaaaaggacgccgtcacgggccgggatctcgtccgcatcgtcaatgatgaagacgtcgtcgggccgcaggttgcgcagccgcgagacgccgtcctgggtgaggaaggtgcgcaggtagtcgtcggcgatccagccgtcctgccggccgccgggcgggaagtggtccaggaagacatagagcaccttgtggcggatgtactcgaaggtgccattggtcagca

SEQ ID NO: 364969 - DNA, 347 bp, Homo Sapiens
aaccacaacactactgcatggggatctaacacatcagaacagactcgcctaccaccttgtttcaaaggcttttagggaatctaagtggattcccctttacccatgcatttatttatcacttcgggaacctatacaagtaatcgtgcaggccttccagaagcctctttccaaacaggttctgctcactggggtgctggggaatcccactggcttggcaggggcaggggcgaactcgcctgtgtctcccggggtcctccagggagtggcgggggagggacactccgaaggcctcctgcccccagaccatggccgttcccaagtattccccaggacacagcccacactca

SEQ ID NO: 364970 - DNA, 396 bp, Homo Sapiens
aagcacctgctacttcgtcggtattcattgttccggctatgaaagcttagactaggaaaggatcttggaacagtctggtccactggttcctgaatgctcgaccgtggacctgcaggagcagaatcacccagaagtgtgttgagaaacagattccgtaggcacatccacagagacagaaagtggatccttgggccttggagttggggtgggatggatgggaagtgactcctgataaggatgaggtttatttaggggttaaggaaaatgttctaaagttagattgtagtgatattgcacaactctgtaaaaaccaaaaccatcgcattataagttttaaaccaagtgaacttaatggtatgttaattgaatcccaccaaacctgttaggaaaaaaaac

SEQ ID NO: 364971 - DNA, 400 bp, Homo Sapiens
agccaccatgcctggccggaactcttgttgcaagaacaataagcatccactactgcagctgaaaacatccctgacagacccatctccctggtattcagggagggatggactaggcaatgattcagaagtcatactgaaaagctgcccttttcctactggtgcccctgcagtctgagcccaagcagacacatacttcagaggtgctacatttgtgctacaaagcacagatccttcttgacctggaggccagccttacccactgagaccaggttcctgtagttctccagcatcacttccctgtacagggacttctgtttgaggtccagcagtccccactcttccggggtaaaacccagtgttacatcttcaaaggtcactggttcctaaaaatccagattct

SEQ ID NO: 364972 - DNA, 855 bp, Homo Sapiens
tggtgccctcggcagtgtgtcctgcaggaagtacttcctcctcagacatccaggtcacacccgtctaccagggccacaacctcttggcagttctctgggtgctgcgattccacccatgtccggagcttcacagggcagtgcacctaggaacttgctccagcaccagcagctccaggatctgctccttggagcgtgccttaggctgtagccactggtgacacagctctcggagctggtccagggcctcccggggacctgtcatgtccttataacggaactgccggaacctctggcgcgcggcctcagggtcacctggatgcttgccctgctgttggacctgctcactgggggcatctgcactcaggcttccatcttcagcatatagggcctggatctgggcattccggggaccagccacctcctggttcagtgtgaggacctcaacaacctcaatgttcattaggggactctcagcaggaagaggatccaatttagggtccagctggagctcaggatactctggaatggtgtcttgaggaattcctctctccactggccagaaatcttctgcctcctctaactgagataccacatctggtttggaaagctgatgttccactgagaccaggttcctgtagttctccagcatcacttccctgtacagggacttctgtttgaggtccagcagtccccactcttccggggtaaaacccagtgttacatcttcaaaggtcactggttcacaggaccaggccgtcggaagcctggaggccatagtttcctccttctcaatgtgtctctggtggaagtgggcagagtcccggcgcgcgccgcacaatggcgcccgtcggccgg

SEQ ID NO: 364973 - DNA, 712 bp, Homo Sapiens
ggatcccctccgtcgtggcttcagagtgaaagatttggaataacaggtttagaaaccctaggacacaggtgagccaaaggaatgggttttaagggagagggggatcaagaacgacaggagtcaccaaaggccacaggatccgtggtccaatgtcagcaaacaagtctctgtgttacctgcactgtggatggactcgtccccttggaatggacactcactcagggctcctacccgggccatggacccacccagaataattttcatagattccacaaagccctgcatcctcaaatacgccttctgtccagtcctaatctccagcccatcgacctccgctggaggaatgggggccagtgctggaaggactgcatgttggtcacccagtttgcagtccacgtagagatgtagggcagggctgggtctggagggacctcggagtcgcaggagaactgtgtgtgtgcgcccatcagccagggcccgcttgctgtaaggttcacggcgtggactttgccatcctcccgctggtatcgcaccagtactgcccaggaggggagaatcagtatgggcgctatcccccaccccctgcctcccagctgagccttggatcaactctgctagataccacatctctagggcccctatccctaattctactatgtggctctcaacaccttgtatttaataggtacacaataaatgtttttgaaattga

SEQ ID NO: 364974 - DNA, 1665 bp, Homo Sapiens
ctttgcaaccagttcttggtgtgttccggtgtgatatacggatgaccaggtaagtgaacgtggcgcctggatccgtccgcccttatggagtgtctgggtctccagtgaccagcgttgcccgtgtgcagcccccattccctgctttccgaggtggtggactgcatgggtagttgtacggagtacccaggctacgcgctgtgggccctgcccccctggccttgcagggcaacggcaccccactgcaggtggacatcaatgagtgtgctcacgctgacccctgtttcccggctccagctgcatcaaccaccatgcccggcttccactgtgaggcctgtcctcgagggtacaagggcacacaggtgtctggtttgggcattgactatgcccggccagcaaacaggtctgcaatgacatcgatgaatgcaacgatggcaacaatggtggctgtgacccatactccatctgcaccaacactgtgggctctttcaagtgtggtccctgccgcctgggtttcctgggcaaccagagccagcgctgcctcccagcccggacctgccacagcccagcccacagcccctgccacatccatgctcactgtctctttgaacgcaatggtgcagtgtcctgccagtgtaacgtgggctgggctgggaatgggaacgtgtgtgggactgacacagacatcgatggctacccagaccaagcactgccctgcatggacaacaacaaacactgcaaacaggacaactgccttttgacacccaactctgggcaggaagatgctgataatgatggtgtgggggaccagtgtgatgatgatgctgatggggatgggatcaagaatgttgaggacaactgccggctgttccccaacaaagaccagcagaactcagatacagattcatttggtgatgcctgtgacaattgccccaacgttcccaacaatgaccagaaggacacagatggcaatggggaaggagatgcctgtgacaacgacgtggatggggatggtgcaggcctggggctgaaggggtggctgggggacctgtgagaatttggatcaggtggggatgaagcagggaagctaggaagtctctgtgaaatagggaggcaggcttgtggacgttggcctgggtgaggagagattacctgcagcagatgtcaataggaatgtgaggtagggcgtagtgttaggcagagtgtggactagagggtgagacaagaaacaggcagatttcctggccagttgtcctctgggtggggagacaaagttcgggactttcaccaacctgttcttctgattagcgatggggatgggcatcaggacaccaaggacaactgcccacagctgccaaatagctcccagctggactctgataacgatggacttggagatgagtgtgatggggatgatgacaatgatggcatcccagattatgtgcctcctggtcccgataactgccgcctggtacccaatcccaatcagaaggactcagatggtaagcctgtgggactcaggccgggcctgtccttcctctttagctgggattcaccagtgacctctccatgggtgggaactgcagccacttctctccatcacccttctcaccacggacacaagcacctatgagtgatgttggtgaagtcactcctcccctcgtgccg

SEQ ID NO: 364975 - DNA, 1033 bp, Homo Sapiens
  misc_feature (195)..(255): n is a, c, g, or t
ttgctattctcggtgttcttcgtgtctgggtgtttctctcttggtggcctttctcgtgtttgtctactctctctttgtgctgtctttctcggtgtctgtgctgtctttttttgcttgctctttgtgttcctccttgttaggctgtcggttcttctctgtctttttgcttctcagtggtgctcgttttgtcacgtnnnnnnnnnnnnnnnnnnnnnnnnnnnnnnnnnnnnnnnnnnnnnnnnnnnnnnnnnnnnngtgatttgtgcctctgattatgcctcttctgttgtgtgtcttctcgtttctcttggtgtctgtggtgtcgctttgtttgggctctcgtttgccttggcgctgtccgctgtgggcgtaggcgtgtggctactttgtccattgcgtcgattgcttttgtttctggtcttctgttgctcgttggtccactgtttggctcgctcgtcttgcttccctgtgttctagctgcgtgttcacttttcgcgggtctgcattttggcggtgtcatgtggttcgtctgtaccgttcctagatgtgagtgcctctcgaaatcttttgtgttctcaagtcacgtcgacggctgtcggttggcaacgtgatgtgtgacgatgggtgggcgcagctcgcaggcgtggcaacttgaccttgggggaatatttcacatccatccagagctcggaatctacagcgtccagccatttccagcaagagcgcttcccattccggagacgtttcaaccctgcagcgggaaaggctgactgggaaatccattttgggtgggcaatttccttcaacgaagccggaaggcgagaagccgcggcggggccagcttgcctgccggttttcaggaatctaaactctcatcttgtgcaatttatcaggtgtggaactgttctactgtgcgtgtggtgtgctcgtggtgaataagatgaaatgtatatcagaaaaaaatctatctctaatttagagtgcggtacataattatatccgcaaataaagaagagacaaaggctaaaaaaaa

SEQ ID NO: 364976 - DNA, 447 bp, Homo Sapiens
  misc_feature (41)..(71): n is a, c, g, or t
gaagggagggcgaggccggagcccgagggcgacccgagaannnnnnnnnnnnnnnnnnnnnnnnnnnnnnncagagccaggcagcgcaggtacccctgtgcttcaacagcctgcctgctcacttccctgaatgctcctccacgatttactgcttctccatctttgcttatgctatttctctgcctggagtgaaaactacccctgacacatctccagctggctggcgtagtggagaaagcttgggctttgcagtcagaaacctgggttcggatcctggcttcacaacttattatttggagaagtatttgaacaagtatttaacatctttgagtctgttttctgatctgtaaaaatggaaataatgacacctactgtaaggattaaatgaaattatgtatacaatgcaagtgacatagagtcaataaatggcagatcactattgtttaa

SEQ ID NO: 364977 - DNA, 419 bp, Homo Sapiens
  misc_feature (96)..(96): n is a, c, g, or t
ctgggggcctcccctatcccaacctcagcaatcagcagacacgggagtttgtggagaaggggggccgtttgccctgcccagaactgtgtcctgatnccgtgttcaggctcatggaccagtgctgggcctatgagcctgggcagcggcccagcttaagcaccatctaccagaagctgcagagcatccgaaaacggcatcggtgaggctgggacccccttctcaagctggtggcctctgcaggcctaggtgcagctcctcagcggctccagctcatatgctgacagctcttcacagtcctggactcctgccaccagcatccacactgccggcaggatgcagcgccgtgtcctctctgtgtccctgctgctgccagggcttcctcttccgggcagaaacaataaaaccccttgtgcccactg

SEQ ID NO: 364978 - DNA, 542 bp, Homo Sapiens
cttggcttcacgtagtgtagggattacaggtgtgagccactgtgcccaggccaacccgtaccttttaaaacggatggacaaaggaccttcattgtaagcctattgcagtttcagccccacctattactctgagctctgaagactcaggggtgtgtttggcttttgccaccgaacgtaagtacccatttttccaagttattcgatatctgtctatttctttcagcagacagttggtttacttctggcaattcccctctaatcttccaatatatcaagggctgggacaagtgatagtcaactggctcagagtgagatgtgtgcagtatgtcattgcatcaagcttcgtgacagtttcagggtactccagtagccttaattgcatccattcccacgtgccagactaggtaagattcccagacgacgtagaggtatgcagtagtctgacataggtgcattcactttgatctatggatggctgcctgattctctcgatagcctaatgagaatcctgctcaactattgtgcccagctaccctggttag

SEQ ID NO: 364979 - DNA, 418 bp, Homo Sapiens
  misc_feature (184)..(198): n is a, c, g, or t
ccagtttaactttgggataaaatcctaggactgggaatgcagagtgcaaagggtaaagtgtgtatgtaattttactagatattgccaaattcctctccagaggtggcgcaccattttgcattctcttcagtggtatttgatcggtccaggctcactattagaatatgttaatgagcttctggannnnnnnnnnnnnnngcaaaccttataaataaaaagtggtatgccagtaaagtttcaatttacatttctcttctgaatgaaactgagcattttccattttcctcctagattcttaggaagcctttgtatctgcgatataagttactttctccttctttgacatgttgtttaactttgcactttctttttaaaacctgcagtaaattttaaatcttttcattcagtgcttctggtt

SEQ ID NO: 364980 - DNA, 817 bp, Homo Sapiens
taaacagatgaatagccctttagaaaaaccagaggatgttgaactgatgtgggccacactcccagggagccttcatagctcatcccttgaaggcacagtgtccagggaggttgccggtggcagggcctctgtgttcttggcattgctgtagatgcggctttgcttccgggacttccaggcatgtgtcctatcccagtcggtggccactgtctcattgtcccagatggtggaggtctccgtgtcactcaggtaccccggctggcctgtgtagtgcgtagggtagatgagcaagggttctgcagagaaggctttcaggtccctggattcataatactccttgtactcggctacaggatgcttgttgtacatgactggcagaaactcatccactggcagcatcttcccaaaaggattggctccaaccagcttctgtgctccttccagagagatgacgtagcccagggtccagtaggaatagtcggcttcgaccaggtttgccacattgggcactgctttctctggctcctttacttgcatcctcttcctaccaatataaatcagttcccagtccagctgagcctggtcaatgttatccatcagcttcatcagcttcttcttaaactcgactgctctaaaccgcacatcgtctatcacattacaagagtcttctctagctttcgatccattacctctttccagactgagtagtggctgagaaagcagccgatttcaccccttgttagaggcctggaggaatagggatctcgcccacgcgtccgcggacgcgtgggtcgacgatatcccgggaacttccgga

SEQ ID NO: 364981 - DNA, 469 bp, Homo Sapiens
  misc_feature (60)..(61): n is a, c, g, or t
  misc_feature (94)..(94): n is a, c, g, or t
agacgcagcccatagcagctcctgtgagcccaccttcccacctcggggctgcctaccagnngcccttgagagcactctgttagcataggaaggnaaggcaacctcaaaagcctttattcaggaacctggctcaggttcccagccactgggtattgagagagctttaaaaccacaaagtggagaatttgggaaatcaagttaaaggtgtgtgcacgtgcacactcgaatgcgtgtgctgaaagtcacctggcctgccctcctgaggcttaactcttgacaggttggtgcagaggccaaaagacatggcctgccgagccgctgctgccttagtggagcccctggaactctgaacagcccttcacagcacccatgggacaagtgcatgcgctttttcctttttctccctttccccctgaggttaaagatattttttttaccataaaagaaaaatgtacagagtgcataaaac

SEQ ID NO: 364982 - DNA, 546 bp, Homo Sapiens
gctggtcccgtccgagtgacctttccacagggcagggttacatgcacaaggattctcctaacagcactgactgcattatccaaaatggaaagactctgaatgctcaccaacaggagactgggcagataagccaaagcatacccattcgatgacacatcatgcagccaccaaacgagaggcagctctctatgtgagctgttacaaaaaaagtctgagacatactattaacagaaaaaaggaaggtgcagggaacacatgtccagcatgaccccacttacaggtttcctaaaggtctgtctttgcatgtgtatgtgtaggctatgcatgcttgcctatgcacagaaaatttctagaggaaaattaagaggccattaacagtaggatagtagaaatgaagtattcacgtctacaaaagtgatacctgtattttttcatctttagtatcttctgtactattccagtgttttctcttctcttttttgttttatgcactctgtacatttttcttttatggtaaaaaaaatatcttaactcccctgtgaagta

SEQ ID NO: 364983 - DNA, 547 bp, Homo Sapiens
gagggattgcacttcagaaaaacatctaaaaaacttagtctatgtttgaattccccacctccatcccatctatgggaagagccgttcagtgtttagagagtggggagatgggtccctgcacttggcctctccataagccttggagggtcagggctgataccaggggtcctggcaagccattgggcagagacagaccacaagagcagggcatttttttacgctgggcatacatatgcacacaagcatgcacagaggcatgtcccgtgcccagcctctccaccgtcactgtccgctgctggctggaggggatgcaggggtagtgtatgcagaccttccactgggcaaatgccatgtgtcaggagggaaaggcctaggaagcccccatggggaaggttctggatttattccctcctctaaatgctataaatacgttagcacttgagtcgactggaggctgccaggaattcaggatgcatacagctgtaatttaacccagagcagctccacgtgagagcattaaagatgtaatgaagatgtttaaaaaaaa

SEQ ID NO: 364984 - DNA, 514 bp, Homo Sapiens
  misc_feature (49)..(49): n is a, c, g, or t
  misc_feature (98)..(98): n is a, c, g, or t
tgtatctccatcctcccctgctccagccagggaggactgagggagtgcnccgagacccacgcacatgttggggcttctgggcccaagagtactttttnataataactaatttctaaatccaaaagctcaaggaatagacagtgttctgtgacatggattggtttgaaggagttacccaccatcccagcacgataatgtcatctcccaagttggatggcagcacgatctggccctagggagcttcctgttcccagaagtcattgtcctgggctatccagatgtccctagtaaatcttgcttccttctgcaatgttagtaatgccttaagctgacagttgctattttgcagaacagttttcctctttgcttagctagtaacttgcctctgagcctgggctgatctgagaaacaggtgtgacaagagcatgaaccagaggtgcacctggggcagttccctaataaaactggtttgtacagtcatggtgttggggtgatcagaatggaagcccttttc

SEQ ID NO: 364985 - DNA, 1697 bp, Homo Sapiens
  misc_feature (1619)..(1635): n is a, c, g, or t
acgtgatcatggggggtggccggaaatacatgtaccccaagaaataaaacgtgactgtggagtatgagagtgacgagaaagccaggtgcaccgaggctggacggcctggacctcgttgacacctggaagagcttcaaaccgagatacaagcactcccacttcatctggaaccgcacggaactcctgacccttgacccccacaatgtggactacctattgggtctcttcgagccaggggacatgcagtacgagctgaacaggaacaacgtgacggacccgtcactctccgagatggtggtggtggccatccagatcctgcggaagaaccccaaaggcttcttcttgctggtggaaggaggcagaattgaccacgggcaccatgaaggaaaagccaagcaggccctgcatgaggcggtggagatggaccgggccatcgggcaggcaggcagcttgacctcctcggaagacactctgaccgtggtcactgcggaccattcccacgtcttcacatttggtggatacaccccccgtggcaactctatctttggtctggcccccatgctgagtgacacagacaagaagcccttcactgccatcctgtatggcaatgggcctggctacaaggtggtgggcggtgaacgagagaatgtctccatggtggactatgctcacaacaactaccaggcgcagtctgctgtgcccctgcgccacgagacccacggcggggaggacgtggccgtcttctccaagggccccatggcgcacctgctgcacggcgtccacgagcagaactacgtcccccacgtgatggcgtatgcagcctgcatcggggccaacctcggccactgtgctcctgccagctcggcaggcagccttgctgcaggccccctgctgctcgcgctggccctctaccccctgagcgtcctgttctgagggcccagggcccgggcacccacaagcccgtgacagatgccaacttcccacacggcagcccccccctcaaggggcagggaggtgggggcctcctcagcctctgcaactgcaagaaaggggacccaagaaaccaaagtctcccgccacctcgctcccctctggaatcttcccccaagggccaaaaccacttctggcctccagcctttgctccctccccgctgccctttggccaacagggtagatttctcttgggcaggcagagagtacagactgcagacattctcaaagcctcttatttttctagcgaacgtatttctccagacccagaggccctgaagcctccgtggaacattctggatctgaccctcccagtctcatctcctgaccctcccactcccatctccttacctctggaaccccccaggccctacaatgctcatgtccctgtccccaggcccagccctccttcaggggagttgaggtctttctcctcaggacaaggccttgctcactcactcactccaagaccaccagggtcccaggaagccggtgcctgggtggccatcctacccagcgtggcccaggccgggaagagccacctggcagggctcacactcctgggctctgaacacacacgccagctcctctctgaagcgactctcctgtttggaacggcaaaaaaaaannnnnnnnnnnnnnnnnggtggtggttaaaagggaacacaaaacatttaaataaaactttccaaatatttccgaggaac

SEQ ID NO: 364986 - DNA, 377 bp, Homo Sapiens
gattgattgggacctaagagactgagtcaggagagggcaagaaagcagctaagtggcaagtttcaggggcactagagcaaatacattgagaaatgggaaatacaaacagcatgcaaaatcacatcctactcctacccaccccactcacaagggaaattgctgggttttggacgaattttcactttgtgtgcaccttttatgtatgtaaaactacaaacatactactttgaaatctgattccgctatttcatgtttgtcttaccatgttattatgtattttcctacatccaaagctacctagtatctcttttgtatgaaggtttcatcatgtatcccccagtgcccttggtgttttcttgtgtccggatgtggtaccg

SEQ ID NO: 364987 - DNA, 506 bp, Homo Sapiens
  misc_feature (481)..(481): n is a, c, g, or t
  misc_feature (493)..(493): n is a, c, g, or t
ccttcaccttcatgtcctcctgcagtttggccgactcttcctccccaatgtatctgctgaaaaccacaggatgggcctcacccatgaaatcgtgctcggcttcctctatgtccaccacatccgagtcagaatcctgcctgaggagagtccacggctctgaatcgtgggagttggggctttttgaacaactaacatataaccttccctcggtgtcttcatcggccctgcctacatgaaggaagaagccatccgtggatggtccctgggggaacggatcgaatccgccaagggccagaggcccaccacagacctctcctgcggtttccactgacagtggtcctgtctcggtggggtcgatgcccatggggaattctgagcatggaatcggggtaaaagtcctattcaagtcgcgactgccagtcattttccttcgtaccaaaggctgggggccctcgctgggcctcctagacacgatggttcntcggtttccttnccccctttaatcc

SEQ ID NO: 364988 - DNA, 274 bp, Homo Sapiens
taaacagaaggtagtatctgcagcccctaaaggtgaaggaaagctgggatgaacacaagtgatggatgtaggtgggtaccaaatgctgactgagcttagctttttcagcctcagaggcaccttggtgaatgaatggggtgaccctctcagaagggctggggcaggagaattcaggagagaggtgaaagtgaataagatttagagggagaaatagtttccctaagttattcatcacagggcaaagtatagcaatgagaaatgagtaagaaagatt

SEQ ID NO: 364989 - DNA, 494 bp, Homo Sapiens
cgccacccaccccccgccaccttccagcatggaggagcaggacttggagcgaaggttcgagctgctgagccgcgagctgcgggccatgctggccatcgaagactggcagaaaacgtccgctcagcagcaccgagagcagctcctactggaggagctggtgtcgctggtgaaccagcgcgatgagctagtccgggacctggaccacaaggagcggatcgccctggaggaggacgagcgcctggagcgcggcctggaacagcggcgccgcaagctgagccggcagttgagccggcgggagcgctgcgtgctgagctgaggccgccggcccgggtggcccataacttctcgcgtccccggcgtccgccgccgccccgggcctgcgctgcggacgacccggccgtcccggaggccgcgcgcgtgtccgctaggggccgccggcgcccttccccgtatagggcagggcggatccccgaccccacgggcggggcggccgc

SEQ ID NO: 364990 - DNA, 1119 bp, Homo Sapiens
  misc_feature (764)..(842): n is a, c, g, or t
  misc_feature (882)..(892): n is a, c, g, or t
  misc_feature (916)..(929): n is a, c, g, or t
  misc_feature (1039)..(1039): n is a, c, g, or t
  misc_feature (1063)..(1063): n is a, c, g, or t
  misc_feature (1087)..(1087): n is a, c, g, or t
  misc_feature (1091)..(1091): n is a, c, g, or t
ctaaggtagcgaggcctgggtggcgaattcggcacgaggcagcagctcgttctcgatggacgatccggacgcgggagccatgggagctgcggctgcagaaggccaggcccctgaccccagccctgccccaggcccacccacagctgcagactctcaacagccccctggtgggagttccccctcggaggaaccacccccaagcccaggggaggaggctgggctgcaacggttccaggacacaagtcagtacgtgtgtgcagagctgcaggccctggaacaggagcagaggcagatagatgggcgggcggctgaggtggagatgcagctgaggagcctcatggagtcaggtgccaacaagctgcaggaggaggtgctgatccaggagtggttcaccctggtcaacaagaagaacgctctcatccggaggcaggaccagctgcagctgctcatggaggagcaggacttggagcgaaggttcgagctgctgagccgcgagctgcgggccatgctggccatcgaagactggcagaaaacgtccgctcagcagcaccgagagcagctcctactggaggagctggtgtcgctggtgaaccagcgcgatgagctagtccgggacctggaccacaacgagcggatcgccctggaggaggaccagcgcctggagcgcggcctggaaccgcggcgccgcaagctgagccggcaattgagccagcgggagcgctgcgtgctgaactgacgaaaacgcccccaattgtttaccaaannnnnnnnnnnnnnnnnnnnnnnnnnnnnnnnnnnnnnnnnnnnnnnnnnnnnnnnnnnnnnnnnnnnnnnnnnnnnnnttttatgccccgatttgctttattttcccgccttatccgnnnnnnnnnnngcattttcaccaacattcatagannnnnnnnnnnnnnacaattcttccccatatcccccttattaatccacccgaccgcataaacaagtaccacccgcctatatttccccaccccgcctactcgcccgatatatatataccgctttntgtaaacaaaatatgcccgccacncccgaaataaacttataaaaccgnttanatagttcttatttatgaccacaccccct

SEQ ID NO: 364991 - DNA, 760 bp, Homo Sapiens
  misc_feature (16)..(16): n is a, c, g, or t
aaaacaaacgtgagancatcaatgtctaaaaatcacgagtagtctacattaagtccagatttctggcttctcttggaaaaaggtgacaatgtggcaatgctgggcctgcacccctgcaaggcggcgtgtggctgggctgaataacagctgcctcttcagccagggtatggctctctggtttgctacaggcccctggactctatgaaagcgtcagagttttggggtcctgcatacattcttcttccaagctcctagggggtctatggggcttcttcgttcatctcccaaccccagcaccagccccagtgattcccccaggccctcagctgcagctgcatcagccggctggtcctgctctcctcccctctcaccttcaccgaataggccaacgagatggtgacggccagagggagcccctcgggcacggcgaccaccagcaccgtcacgccaatgatgaagaacttgacaaagtactgcacgtagacgggcgtgcactcaggcagccacggcttcttgttgaccacgaaggtgtccacagtgaagtagagcaccaggatgatcaccgtgatggctgacatcaccaagcccgccttcccgatctgcacagccagcttggtgagcttgccctgcagcacggacttctccttcttgtgcatgctggccttcttcctgtcgtcagcgtcgccgccctcggcactcttgaggggctgcatctccatggcggctgccccgtcctgttgtttgagaaggtccaggtatg

SEQ ID NO: 364992 - DNA, 390 bp, Homo Sapiens
cacacgctcgcgctcgcggtccgcgggtcgccggggccgaaggcggcagagtcagagcgggagccgaagtcggagcaggagccatgggcggcgaaaccgacggcgccgggaggacgagggacggcgcagacggaggcggcggagccgggagcgcaggtcagattcagaggaagagcggtggcagcgctcagggatgcgaagccggagccccccgcggcccaagtggcactcaagagatgggtcctctcagtcggactcaggagaggagcagtcacggggccagtgggctcgccggcgacggcgcgcacgcatgtggtctcctagctcctcagcatccagatccgcgtctccagggcgatcccagagcccccgggcggccgccaggcttat

SEQ ID NO: 364993 - DNA, 904 bp, Homo Sapiens
cccccaaaatacaccagcaagcaggtaggcaaggcctttaagtttagcccaaggccccctaccccacccctaccacggagccatctggaccgaggtgtgggagtgatggagcaggtttactgtgcctgcccgtgttgggggccagcctgagccagcagtgggaggtggggccttagtgcctcaccgggcacacggattaggctgagtgaagattaagggagggtgtgctctgtggtctcctccctgccctctccccactggggagagacctgtgatttgccaagtccctggaccctggaccagctactgggccttatgggttgggggtggtaggcaggtgagcgtaagtggggagggaaatgggtaagaagtctactccaaacctaggtctctatgtcagaccagacctaggtgcttctctaggagggaaacagggagacctggggtcctgtggataactgagtggggagtctgccaggggagggcaccttcccattgtgccttctgtgtgtattgtgcattaacctcttcctcaccactaggcttctggggctgggtcccacatgcccttgaccctgacaataaagttctctatttttggagaagaaaaaacaagcagaacacatcgagggactcgtatgacgggacgcggagaacccgggtcatgcaagtggcgccagggccaataagcgagttgcccatgagcccagactcctatggtccaagcgagggacagaatctgccgggacccccgaataggggagcgcgaataacattcgccgattaggcccgggttcaccggatatagacctcgcggacaagcagacgccgcaaaacacgcgctggagaaagaaagtacgagcgtgcggatgacatccacaccaccaacaacaagacacaacgt

SEQ ID NO: 364994 - DNA, 2082 bp, Homo Sapiens
  misc_feature (113)..(113): n is a, c, g, or t
atcccaccaaattcctcagtgacaaagtggtaaagcggccagaagaacgagtgaaggtgggaagtgactgttcactcgccgcatcatgaagattgacattgagaagattcagntgcagacctgacctgccgcacctcagacctcatggacaggaacaatgagtggaagctgcccaaagacacctactatgactttgatgctgaagctgcagaccacaagcaggaggaggacatgaagcggaagcagcagcggaccacatacatcaagagagtgatcgcacacccatccttccataatatcaatttcaagcaagcagaaaagatgatggagaccatggaccagggtgatgtgattatccgaccaagcagcaagggcgagaaccacctgacagtgacctggaaagtcagtgatggcatctaccagcatgtggatgtgcgggaggagggcaaggaacaatgccttcagcctgggagccactctgtggatcaacagtgaggaattcgaagatttggatgagattgttgctcgctatgtccagcccatggcatcctttgcccgggaccttctgaatcacaagtattatcaggactgcagcggtggggaccgcaagaaattagaggagctgctcatcaaaactaagaaggagaagcccaccttcatcccttatttcatctgtgcctgcaaggaactgcccggcaagttcctactgggataccagccccggggtaaacccaggatagaatatgtaacggtgactccagagggattccggtaccggggccagatcttcccaaccgtgaatggactgtttagatggtttaaggatcactaccaggatcctgtaccaggcatcacccctagcagcagcagcaggacccggacacctgcctctatcaatgctaccccagccaacatcaaccttgcagatctgacacgggctgtgaatgccctgcctcagaacatgacttcacagatgttcagtgccattgctgcggtgacaggccaaggacagaaccctaatgccaccccagcccagtgggcctccagccagtacggctatggcggcagtggaggcggcagcagtgcttaccacgtattcccaacgccagcccagcagccagtggccacaccactaatgacccctagctactcctacacgaccccaagccagcccatcaccacccctcagtaccaccagctccagggccagcaccaccccacagtcggcccaggcccagccccagccctcttccagctcccggcaacggcagcagcagccaaagtccaacagccatgcagccatcgactggggaaaaatggcggagcagtggctgcaggaaaaggaggcagaacggcggaaacagaagcagcggctgacacctcggccctcccccagccccatgatcgaaagcacccccatgtccattgctggcgatgccaccccactcctggacgagatggatcggtagggggcctgctcctcggactctggttacctctgaggctgggaaaggcctggctgcccactgcctccctccctgcccctccttttatgtccataaagtggcgtgaagtgagacgttctctttggtggtcaacccggatgggtgacaggctggatggccttgtgaacttgagctcagtgtatgctaggcaacaattctcccgctccagaccctcaccgaccacctgtcctgggaccaggctgggaggggagtgtggcagggaggaggaagaggaaggtgagaatgagtagaacagttttgtattctactccctacaagccattttgaacttctgccctcaccggactctgggctgtgactggggcaccaaactcagcacatgagtctcccctagctctcgtggggagagggatgctatttattcagtttggggcaggagggagaggagggaaagtatttctgaccctgatgccaacagccgggtggctgtccaagcaggattgcaggggacacagggaagcactgcccagcccctgcctggctgccctttcccccctgctgctgccaccgcttcctgcctgtcatttgaataaacagtgtttctattgaaaaaaaa

SEQ ID NO: 364995 - DNA, 788 bp, Homo Sapiens
actccctgaacccctttaaaggcctgaaggaaaaagaggagaagaaacttcgaaagtcgccgatatcggctttttgccaaccgatccagtatcatgaggcattttggaacctgaggacccaacgtctgtggaatgaatgtgacagaggaactgatgtcagatgaagaggacagtcttaacgagccaggtgtgtgggtggcccgccctccccgtttccgggcccagcgcctcacagagctctgctaccacctggatgctaactctaagcatggcaccaaagccaaccgtgtgtatgggcctccctcagacagactgccttctgctgaagcccagctccttccaccagaactttacaatcctaatttccaagaagaggaagatgagggaggggatgagaatgcacctggctccccatcttttgaccaaccccacaaaacctgctgtcctgacttgaactcattcattgaaatcaaggtggaaaaggatgaataaaatctacagccaagaataactctggctttcgcccatgccccatgtctcagaaataggtggccatggggcttcacaaaataatgagatgctctgtgcagtctgagaaagcgaatttgcctcttttcttaacacagtctctactggggaagcagaacactggtgggataaaaacttatctagaaggggagaaactccctccactgtgaacagtaagccagaatatgcttattcctcagcataaacagtatctcggagaagcctgggatgaccaaatcaggaggatgggtccaaaaaac

SEQ ID NO: 364996 - DNA, 453 bp, Homo Sapiens
gatgttttattttgtttatacaaggtacaatgtcaaaatacaaataatatataatgtatagatataatagacaaggaagtataaatataaacgcatatattcgtaaaatggcactgagttgagttttcttcttcctgaatccttcaatggagaggattcgctgggctcagcatctctcccacctttcccaggtccctgtccatgtgtgcagagcagctggagacagggtggttagaagcccaaacgctggtgtcttccctgtagacgtctcccacgccaggagaagccttgtaattgacagagagctttgggtatgtcacttttctctgtgaactgaaagttaggatgagggacggaagattcggggcagggtttttatttcattaccacatgtattccaggcagctcacactgtaatgaaataaaaatcctgctcagaagcctttggtctct

SEQ ID NO: 364997 - DNA, 502 bp, Homo Sapiens
  misc_feature (15)..(15): n is a, c, g, or t
  misc_feature (22)..(22): n is a, c, g, or t
  misc_feature (41)..(41): n is a, c, g, or t
  misc_feature (50)..(50): n is a, c, g, or t
  misc_feature (68)..(68): n is a, c, g, or t
  misc_feature (87)..(87): n is a, c, g, or t
  misc_feature (138)..(138): n is a, c, g, or t
aaactccccccgggnaaaaccnaaggctccgaagcgggganttttaattnccattaacagtgtgaagnctcccccggaaatacatgngggtaatggaaaataaaaacccctgcccccgaatccttcccgtcccctcanccctaactttcaagttccacagagaaaaagtgacataccccaaagctctctgtcaattacaaggcttccccccggcgtgggagacgtcctacagggaagacacccagcgtttgggcttcctaacccaccctgtctcccagctgctctgcacacatggacagggaccctgggaaaggtgggagagatgctgagcccagcgaatcctctccattgaaggattcaggaagaagaaaactcaactcagtgccattttacgaatatatgcgtttatatttatacttccttgtctattatatctatacattatatattatttgtattttgacattgtaccttgtataaacaaaataaaacatctattttc

SEQ ID NO: 364998 - DNA, 448 bp, Homo Sapiens
  misc_feature (15)..(15): n is a, c, g, or t
  misc_feature (57)..(57): n is a, c, g, or t
ccataggatcatagnaaggggccctattttcctgctgcttcccagctcagacatatnctgaatggaatgtatttttaagagaataaagtctatttttttgtattttaaagattgagagggctaagaaagtagccctcaaataaactgttattgcattataggcccctttgttgggggcagcctgttggtccacacctacttgctcaggcaggtgctctggtctctctcacccctgccccttagagtcctaggtgcagcagctccaagcatgggaccaaggaggccagaacctgtcgctggaaaccagggcaaagcagtggctcagggctccttgggtgcatgtgtatcattggagctgcctgtctgcatgtatcctctggcgcgaatgctctctgttggctctgcagtacaatatgtaaccaataaagctccctcgtttccgtaaaaa

SEQ ID NO: 364999 - DNA, 373 bp, Homo Sapiens
tgcagccagtataaagtagaaaaagaacacaacttattggtgccaagaagggctgcgttcctttctggaagctctgggggaaaatccatgcttgccttttccagctgttagaagctgcccacatcctgtgggtcaggagcccttcctccatcttcaaagtcagcagtaaggggcaaagttcttctcatgctgccatctctctggttttccgcagccaagaaacagttccccaattttaagaacttgtgatgagattggacccacctggatagtccagggtactctccccatttcaaggtccttaaatttgatcacatctgcaaagtcccttttaccacataaggtcacatattgacaggttcccaggatcagg

SEQ ID NO: 365000 - DNA, 489 bp, Homo Sapiens
  misc_feature (407)..(416): n is a, c, g, or t
ggttctgggtcagataaacccaggggattccggaaggcaatttcctgccatttcgccagtgccgattgccactacatttgacgtgaagggcaccagtcaagaaaacatcgagaaaggaagttgtaggaatagcacataaattctttggagctgaaaatagcgtgaacttaaaggatatttggatgtttcgagctcgacttgtgaaaggagaaagaaccaatctttgaaatagccatctgctataactcgttcaacagaaaaccaaaaccaaacgaaatgtctaaggaaaatgttttcttaatgagatgatgtaaccttttctatcacttgttaaaagcagaaaacatgtatcagggacttaattgcaaaaagttagttttgcagcccaatggtgttgctttaatggnnnnnnnnnncagtaaaagtgaaatattactgttttaaggaaaactaatttagggtggcagccaataaaggtggttggtgttt

SEQ ID NO: 365001 - DNA, 355 bp, Homo Sapiens
ggtagcctgaggaaaggccaagctgccctccctgggaatcactcagatgccccaagatgtccgttgggaagctcccaggacagcactttttatacagaggacaccgcctcggccccacgtccttagaggccagagcacatctgaaaactgcaatcacagccgtccgctggaaaaacgtttcgaagcacagtggccagcgagcgagcacgtggctactccctgttgcatgtcaaatccacacagatgtcagcggcagctgctcggcagcccagccctgggcctgggtgggttcatgtccaatcttgttcgatcactagatgattctaacatcgaaataaacctctttttatatggc

SEQ ID NO: 365002 - DNA, 580 bp, Homo Sapiens
  misc_feature (67)..(67): n is a, c, g, or t
  misc_feature (75)..(75): n is a, c, g, or t
  misc_feature (103)..(103): n is a, c, g, or t
atgggtatcaatgggatttatcccccggcaaaggacattcaaacctgagtatcagtacatgcctagnacctgggnctccggccagacgtcccaacagcgtggnatgttcgatgacattcatcaacacgagaagacaggagggcagacaatgaccccacgactcatccttatgactccattcaaatctacggttatgaaggcaggggctcagtggccgggtccctgagctccctagagtcggccaccacagattcagacttggactatgattatctacagaactggggacctcgttttaagaaactagcagatttgtatggttccaaagacacttttgatgacgattcttaacaataacgatacaaatttggccttaagaactgtgtctggcgttctcaagaatctagaagatgtgtaaacaggtatttttttaaatcaaggaaaggctcatttaaaacaggcaaagttttacagagaggatacatttaataaaactgcgaggacatcaaagtggtaaatactgtgaaataccttttctcacaaaaaggcaaatattgaagttgtttatcaacttcgctag

SEQ ID NO: 365003 - DNA, 488 bp, Homo Sapiens
  misc_feature (342)..(345): n is a, c, g, or t
ctggctatggagaagagccaggctgggtaaatgtttgctgtgactaagccaggatcaaagaactgcctgttgcttgcaactggctggcactgagcttgccaactctgtgaactgtgcttccttcccctgcatggacctgtgcctcagtcactattatccgcaggccttctccaagggcagccctctccttgtttatccctcttaagcctgcgtgcaggaaggcacattaaccctgtggccccctgcaggcaggagggtgttgggtgcccttacctaccttgccctttttcttgtaccgtaggctgtgccgtttatgagtaagtgatgtgtgtctgtgtgtcnnnntagaagtgctgcactcaccttgtgttattggaggttgtgtaaccccctagctttgagcctggtctcagatgttccttttccgttctctgtccagccgttaccgcccccagtctgtaataaaagcctatcagccgtgaaaaaaa

SEQ ID NO: 365004 - DNA, 461 bp, Homo Sapiens
caggctgacaaaagcgtcctcggatgcggcctggttccccacccttgaggggagccagggtcttgatatatagaaaatggaagaatcagacccggaaagttctaaacggcactgagaggaaaactcccatggaaatccatctttgttttcccagttcggaggcgcgtgggccctgcgtgcgcgggcctcggtctgagcggccggcctcggcagacagcaccaaatctgtaaacggagctaagctcacacgaggactctcggcggctgcttttgttcgtagatgagccagcagtcgatactggagggtctggggctgcagaaacaggcatatatagcagagataattaaaacatttcatgattatgacagccacattctgctgctgcaagctggaggattcatgccacccaaatatttagcaagcatcaaataaaacactggtggcaaaataaaagtaatag

SEQ ID NO: 365005 - DNA, 349 bp, Homo Sapiens
  misc_feature (203)..(203): n is a, c, g, or t
aggggagaaagtactttaattaaaaatcaataactcgaggtttttgggatacggtttgccatttcctaattaagaaatgggtttgacagtccctttgtacacactgctatgcaaaccccaaagggttggcggctgtccgggcgatgacactccggtcccctgcgagaccccgggccagccaggcccgtccgccgccggcctcntggggtccgtccccggctcgcgcagacctctcgcttctctcggctctgtctcctgcgctcagctctgctcggggccggccgcctcaggctcgccgccaccaggtcgttgcaaataccttttccctccccggggccccagcgcgcgg

SEQ ID NO: 365006 - DNA, 549 bp, Homo Sapiens
aaacaatgatcactcaacagaataccttataaaattacgtatcataatgaagctaaggaaaagcttcaagactagcagctgaactgtgaaacatgtaggacaacagaaggcactacataagcatcaattccttctaaccataggacagttcagtctttctgttcttaagaagatagccagtgtgaatgttatttttatatccccctgagttttaacatgattgggcaaagcagcaccaatttaaaaaaatatctgcaatgccagcactgcagtatgaaatcactaatactgatggcccacaagtctctcataagagcactttagaacatgattaaaaatatagaaatgcctttcggtgtttcagtattaaagtggaaccaccacagatatccactttaaaaagtaatgcactaaaaaggtctgtttatacaatacagtctttctaccctaactagcattcatggcaattttccactccgctgccactgagagatctcctttgtgcgtctggttgaaatgtcagtatgcttcatgatgcataatcctttt

SEQ ID NO: 365007 - DNA, 485 bp, Homo Sapiens
agtaaggtacacctccttggtcaagtacgactccgagaggcacttcatcgacgacgtgcagctgcccctgggcctggcggtggcctcctgcagccagacggtcacctgtgtccccaatggcacgtggcgcaactacaaggccgaggtgcgcttcgagccacgccacaggcccacccgcttcctcagtaccaccatcgtgtaccccaagtaccccaaggccgtctacaccaccaccctggattacaactgccgcaagacgctgaggaggtttctgtccagcgtggagctcgaagccgcggagctcccgggcagcgacgacctctctgatgaatgctgacccagcaggctgggctggggtcggaccggctctcccgctgtcctgcccccgactgccctggccaagctgggcgaccttacccttcacgtcattccagccccagaggagtctaacctagagatacctccaagcgcggccgggggaagag

SEQ ID NO: 365008 - DNA, 902 bp, Homo Sapiens
tctagaggatcccggacccggcacactaccagctccgggcctgccccagccatcagcctgatatttcctcgggtcttgagctgcctttccctcctggggtgcccacattggacaatatcaagaacatctgccacctgaggcgcttccgctctgtgccacgcaacctgccagctactgaccccctacaaagggagctgctggcactgatccagctggagagggagttccagcgctgctgccgccaggggaacaatcacacctgtacatggaaggcctgggaggatacccttgacaaatactgtgaccgggagtatgctgtgaagacccaccaccacttgtgttgccgccaccctcccagccctactcgggatgagtgctttgcccgtcgggctccttaccccaactatgaccgggacatcttgaccattgacatcagtcgagtcacccccaacctcatgggccacctctgtggaaaccaaagagttctcaccaagcataaacatattcctgggctgatccacaacatgactgcccgctgctgtgacctgccatttccagaacaggcctgctgtgcagaggaggagaaattaaccttcatcaatgatctgtgtggtccccgacgtaacatctggcgagaccctgccctctgctgttacctgagtcctggggatgaacaggtcaactgcttcaacatcaattatctgaggaacgtggctctagtgtctggagacactgagaacgccaagggccagggggagcagggctcaactggaggaacaaatatcagctccacctttgagcccaaggaagaatgagtcaccccagagccctaaagggtcagatggggggaaccccaccctgccccacccatctgaacactcattacactaaacacctcttgg

SEQ ID NO: 365009 - DNA, 1260 bp, Homo Sapiens
  misc_feature (1244)..(1244): n is a, c, g, or t
agacaaataggtcgattgtcctattctcagaatgaattatcttctatggtaatgaagaactctttggcttagtcagaaggaattaacgaacctcggtaggaatgtatttccatcctcccaccctacagatataagaggttaaaataacagttcgcccaatttaagcccagtagtgtcagttttcctaatctcagtccaggtaggaattaagaaatatctcaagtgttgatgctatccaagcatgttggggtggaagggaattggtgcccagaaaatgggactggagtgaggaatatcttttcttttgagagtacccccagtttatttctactgtgctttattgctactgttctttattgtgaatgttgtaacattttaaaaatgttttgcccatagctttttaggacttggtgttaaaggagccagtggtctctctgggtgggtactataatgagttattgtgacccacagctgtgtgggaccacatcacttgttaataacacaacctttaaagtaacccatcttccaggggggttccttcatgttgccactcctttttaaggacaaactcaggcaaggagcatgtttttttgttatttacaaaatctagcagactgtgggtatccatattttaattgtcgggtgacacatgttcttggtaactaaactcaaatatgtcttttctcatatatgttgctgatggttttaataaatgtcaaagttctcctgttgcttctgtgagccactatgggtatcagcttgggagtggccatagatgaccgcatttccatgacctaactgtatttcaccccccttttccttccctactgttcttgccccaccccaaccagttcctgctgctgcttttggcttcttggaggtgaagggcttaaaacaaggcttctaagcacccagctatctccatacatgaacaatctagctgggaaacttaaaggacaagggccacaccagctgtctcctctttctgccaattgttgcccgtttgctgtgttgaactttgtatagaactcatgcatcagactcccttcactaatgctttttgcatgccttctgctcccaagtccctggctgcctctgcacatcccgtgaacactttgtgcctgttttctatggttgtggagaattaatgaacaaatcaatatgtagaacagttttccttatggtattggtcacagttatcctagtgtatgtaaacatctaccaatattctgtaattaaaaatntaaattttaaagtcaa

SEQ ID NO: 365010 - DNA, 892 bp, Homo Sapiens
catcaacccaaccaaacaaaaccataaaccctcaaacaaccacaggtggtaccggtccggaattcccgggatctcgcggccggctccgcgccgcatcgctcgggtgcagcgcagctcagcgcagcgctgcggcctttcggcagccgaacggccgcggcagttcaggacaaagaggtgtgggcaggccactgggccagctggtaacatcatggcagagaaagtgaacaacttcccaccattgcccaaattcatcccgctgaagccatgtttctaccaagacttcgaggcagatattcctccccagcatgtcagcatgaccaagcgcctctactacctctggatgttgaacagcgtcacgctggccgtgaacctggtgggctgtctcgcgtggctgatcggaggcgggggagccaccaactttggcctcgcctttctctggctcatcctcttcacaccctgctcctacgtctgctggtttcggcccatttacaaggccttcaagactgacagctccttcagtttcatggcattcttctttaccttcatggctcagttggtcatcagcatcatccaggccgtgggcatcccaggctggggcgtctgcggctggattgctaccatctccttcttcggaacgaacattggctcggcggtggtgatgctaattcccactgtcatgttcacagtgatggccgtcttttccttcatcgccctcagcatggttcataaattttaccggggaagtggggggagtttcagcaaagctcaggaggagtggaccacaggggcctggaagaatccacatgtgcagcaggcagcccagaacgcagccatgggggcagcccagggtgccacgaatcagcctcagactcaacattcaacctcaaaccta

SEQ ID NO: 365011 - DNA, 362 bp, Homo Sapiens
atttggaatctggaatcagtatttacagcttggctgtgttcccatttcatgcatgatagtcaatgagcagttagttgcattcaaagcacattgctcattttggttatatttaccttcaaaatcaggaaaatacggaataaatatttgcgtttatgtggttaatactcactaaacttttgaatagatttgtttttcactatccctttcttttgtaaaattattcataaaatcatttaaaaatacaaaaataaacagagttcactgaacccagatggtaaatggtggtgatgactattttttcttgtataccgaaagttattaatagaatattccagctgccctcctccagaatcttttaaaaa

SEQ ID NO: 365012 - DNA, 1127 bp, Homo Sapiens
cccagggcgagactgcagtgacgcggcccgggagacatggcggacgggcgtctctgaataagcagaatccggagcccctcgctacccgcggccgccgcagcccgggccatgccgcacggctgctgaccgcacgcaggggccggccccgaggacacatgcggcggcctttgccgcctcgcccctgaccctctgccctgttctccatgttgcatttctcgtcagtttctcggggcggtgtagctgccgctgccaccagagccggcggggcatcgcgctgctcattcatccggccgcactttcttttccgtttccacccatcccttcccatttccttctccctttccccgccagcttcgcatccatctcccccaccccgtaaccccctcctgcctccatccaccggggctatggccgcagaagaggtattgcagacggtggaccattataagactgagatagagaggctaaccaaggagctcacggagaccacccacgagaagatccaggctgccgagtacgggctggtggtgctggaggagaagctgaccctcaaacagcagtatgatgaactgaaggctgagtacgacagcctcaaacaggagctggagcagctcaaagaggcatttgggcagtccttctccatccaccggaaggttgctgaagatggagagactcgggaggaaacgcttctgcaggagtcagcatcgaaggaggcttactatctggggaagatcttggagatgcagaacgagctgaaacagagccgggctgtggtcactaatgtacaggcagaaaacgagaggctcaccgcagtcgtgcaggatctgaaggagaacaatgagatggtggagctacagagaatacggatgaaggatgaaatccgagaatataagttccgggaggcacggctccttcaggactatactgaattggaagaagaaaatatcacattgcagaaactagtgtccacgttgaagcagaaccaggttgaatacgaaggcttaaagcatgagattaagcgatttgaggaggagacggtactgctgaacagccagctggaagatgccatccgattgaaagagattgctgagcaccaactggaagaagcccacaagactttaaaaaaa

SEQ ID NO: 365013 - DNA, 494 bp, Homo Sapiens
tcggcccgcgactggcgccctcgcccttgccctagacctgcagccatggtgcctggggtgcccggcgcggtcctgaccctctgcctatggctggcggcctccagcggctgcctggcggccggccccggcgcggctgctgcgcggcggctggacgagtcgctgtctgccgggagcgtccagcgcgctcgctgcgcctccaggtgcctgagcctgcagatcactcacatctccgccttcttccagcacttccagaacaatggttccctggtttggtgccagaatcacaagcaatgttctaagtgcctggagccctgcaaggaatcaggggacctgaggaaacaccagtgccaaagcttttgtgagcctctcttccccaagaagagctacgaatgcttgaccagctgtgagttcctcaaatacatcctgttggtgaagcagggggacagtccggctcctgagaaagccagtggatttgcggccgcctgtgttgaaag

SEQ ID NO: 365014 - DNA, 2003 bp, Homo Sapiens
  misc_feature (484)..(484): n is a, c, g, or t
  misc_feature (1564)..(1564): n is a, c, g, or t
  misc_feature (1656)..(1697): n is a, c, g, or t
  misc_feature (1796)..(1823): n is a, c, g, or t
gcggccgctttgccatcgaccccgagctgcgtggggctgagtttgagcggatcacacagaacctggacgtgcacttctggaaagccttctggaacatcaccgagatggaagtgctatcgtctctggccaacatggcatcggccaccgtgagggtaagccgcctgctcagcctgccacccgaagcctttgagatgccactgactgccgaccccacgctcacggtcaccatctcacccccactggcccacacaggccctgggccggtcctcgtcaggctcatctcctatgacctgcgtgaaggacaggacagtgaggagctcagcagcctgataaagtccaacggccaacggagcctgggagctgtggccgcgcccccagcaggcaccccgctcgcggtccctgatagtgcacttccacggcggtggctttgtggcccagacctccagatcccacgagccctacctcaagagctgggcccaggagnctgggcgcccccatcatctccatcgactactccctggcccctgaggcccccttcccccgtgcgcttggaggagtgcttcttcgcctactggctgggccatcaagcactgcgccctccttggctcaacaggggaacgaatctgccttgcgggggacagtgcaggcgggaacctctgcttcaccgtggctcttcgggcagcagcctacggggtgcgggtgccagatggcatcatggcagcctacccggccacaatgctgcagcctgccgcctctccctcccgcctgctgagcctcatggaccccttgctgcccctcagtgtgctctccaagtgtgtcagcgcctatgctggtgcaaagacggaggaccactccaactcagaccagaaagccctcggcatgatggggctggtgcggcgggacacagccctgctcctccgagacttccgcctgggtgcctcctcatggctcaactccttcctggagttaagtgggcgcaagtcccagaagatgtcggagcccatagcagagccgatgcgccgcagtgtgtctgaagcagcactggcccagccccagggcccactgggcacggattccctcaagaacctgaccctgagggacttgagcctgaggggaaactccgagacgtcgtcggacacccccgagatgtcgctgtcagctgagacacttagcccctccacaccctccgatgtcaacttcttattaccacctgaggatgcaggggaagaaagctgaggccaaaaatgagctgagccccatggacagaagcctgggcgtccgtgccgcccttccccgaaggtttccacccccggacgcttccagccagggtggccacacagatgcccctctactcctcacccatagtcaagaaccccttcatgtcgccgctgctggcacccgacagcatgctcaagagcctgccacctgtgcacatcgtggcgtgcgcgctggaccccatgctggacgactcggtcatgctcgcgcggcgactgcgcaacctgggccagccggtgacgctgcgcgtggtggaggacctgccgcacggctttcctgaccctagcgngcgctgtgccgccgagacgcgccaggccgcagagctgtgcgtggagcgcatccgcctcgtcctcactcctcccgccggagccgggccgagcnnnnnnnnnnnnnnnnnnnnnnnnnnnnnnnnnnnnnnnnnncgacactaaaagcctgttgttcccatctgcgccggcctccgtcatgaatgccttccgggccgggcggaaggggacgcgggctgtgccttacttaagtcnnnnnnnnnnnnnnnnnnnnnnnnnnnnccgaaagctgagaccctcgccacggggagggggacgcgcccacacaccggtcaccgagacggctggacctgcacgccaccgctgccttttgctgctgctgctgcggcgaccgccgcagggacggggactggccctcccttgcaggtcggtttggtttgttgcaaataaaagtatttaatt

SEQ ID NO: 365015 - DNA, 1263 bp, Homo Sapiens
  misc_feature (97)..(125): n is a, c, g, or t
  misc_feature (223)..(266): n is a, c, g, or t
agcagcaaaaggcagcggtggcgtgcaggtccagccgtctcggtgaccggtgtgtgtgcgcgtccccctccccgtggcgagggtctcagctttcggnnnnnnnnnnnnnnnnnnnnnnnnnnnnnacttaagtaaggcacagcccgcgtccccttccgcccggcccggaaggcattcatgacggaggccggcgcagatgggaacaacaggcttttagtgtcgnnnnnnnnnnnnnnnnnnnnnnnnnnnnnnnnnnnnnnnnnnnntcggcccggctccggcgggaggagtgaggacgaggcggatgcgctccacgcacagctctgcggcctggcgcgtctcgcggcacagcgccgctagggtcaggaagccgtgcggcaggtcctccaccacgcgcagcgtcaccggctggcccaggttgcgcagtcgccgcgcgagcatgaccgagtcgtccagcatggggtccaagcgcgcacgccacgatgtgcacaggtggcaggctcttgagcatgctgtcgggtgccagcagcggcgacatgaaggggttcttgactatgggtgaggagtagaggggcatctgtgtggcaccctggctggagcgtcgggggtggaaaccctcggggaaggcggcacggacgcccaggcctctgtccatggggctcagctcatttttggcctcagcctcttcccctgcatcctcaggtggtaataagaagttgacatcggagggtgtggaggggctaagtgtctcagctgacagcgacatctcgggggtgtccgacgacgtctcggagtttcccctcaggctcaagtccctcagggtcaggttcttgagggaatccgtgcccagtgggccctggggctgggccagtgctgcttcagacacactgcggcgcatcggctctgagagagggagagcagataggcctgctatgggctccgacatcttctgggacttgcgcccacttaactccaggaaggagttgagccatgaggaggcacccaggcggaagtctcggaggagcagggctgtgtcccgccgcaccagccccatcatgccgagggctttctggtctgagttggagtggtcctccgtctttgcaccagcataggcgctgacacacttggagagcacactgaggggcagcaaggggtccatgaggctcagcaggcgggagggagaggcggcaggctgcagcattgtggccgggtaggctgccatgatgccatctggcacccgcaccccgtaggctgctgcccgaa

SEQ ID NO: 365016 - DNA, 705 bp, Homo Sapiens
  misc_feature (572)..(641): n is a, c, g, or t
gcgagtggctgccgggggacgtgccggcggcgggagccgggtcccagcgctcggccgggcgcccggggctgggagctgcggccgaggctgggcgcgccgggcgccgggcgaagaagttggggcgaggcgggcagcgggggtcccgggggctgcagccgctacggggcccaggggcgccgcatctcgttccctgccgcagcggtctggccgggcgatggtggtttcgcctcagcggttcccagaagcttctcgggtggaagaaggatccagccagcctcccaaacttccaccgaaggttgacaccagcgccccggccccatgctccaggccgtggggggaacccgaggcgtggcggcaaatgcgtagagtcactcaacacgcactcggcctctttggagggtgagggtttctcatagttggcgtcttctaaaggaaaaacactaaaatgaggaactcagcggaccgggagcgacgcagcttgagggaagcatccctagctgttggcgcagaggggcgaggctgaagccgagtggcccgaggtgcctgaggggctggggcaaaggtgaaagagnnnnnnnnnnnnnnnnnnnnnnnnnnnnnnnnnnnnnnnnnnnnnnnnnnnnnnnnnnnnnnnnnnnnnntcgcgccagcagcgtcctcctggggtttttgttgatgtaactgtgagaactgtgcgccggactg

SEQ ID NO: 365017 - DNA, 466 bp, Homo Sapiens
ggccccggccccggcggcacaggctgtcggctggcccatctgcagggacgcgtacgagctgcaggaggttatcggcagtggagctactgctgtggttcaggcagccctatgcaaacccaggcaagaacgtgtagcaataaaacggatcaacttggaaaaatgccagaccagtatggatgaactattaaaagaaattcaagccatgagtcagtgcagccatcccaacgtagtgacctattacacctcttttgtggtcaaagatgaactttggctggtcatgaaattactaagtggaggttcaatgttggatatcataaaatacattgtcaaccgaggagaacacaagaatggagttctggaagaggcaataatagcaacaattcttaaagaggttttggaaggcttagactatctacacagaaacggtcagattcacaggaattggaagctggtattattcttctgg

SEQ ID NO: 365018 - DNA, 415 bp, Homo Sapiens
gcggccgcggcccccggcgaggccctgcactaccgcgccaaaggcggccagcgacgcgggcaaggcgggcgcgcacccgctcgagtcccactaccggtccccgggcggcggctacgagcccaagaaagatgccagcgagggctgcaccgtggttggcgggggcgtccagccctacctatagaagggccgagcacagcaatgcaagtaagtgggcaccctggtgcttcccagaccctgtggagcctcccagcaccaacttgcttaatgtgtttttcttgcttctggtcatggggttagaagacagagcatttcaatcttgtccagcttttctttccttaagggggaaactatattttctgttctatagattccctctttttggcacaagttctatcactcctttacctagggaagg

SEQ ID NO: 365019 - DNA, 354 bp, Homo Sapiens
cagttcctgccccagggcgtttgcacttgtcactccctctgcctagagcaggttccctcagacacccatatgactcactcacctcttcactcttagtcccacctgcagcctctgcagtggcttttgctatttcttcactttatttttttctccatggtgcttactactaaaatgccacataacttgtttatttactttgttgtatcatttctgtttctccattagaatgtaagctgcataagggtggattttttgttccgtttgttcagcagtgcctagcacagagcaggcatgagaaaaatgtttgtggaaatgaattgaaattgaattaaaatagtcataaggatgtaaaaa

SEQ ID NO: 365020 - DNA, 401 bp, Homo Sapiens
ttatcacaagcattgataagtccagcagtgaacacatctgtttagctttgtttagcccatacttatttgattatggaaacctgttactgagtagttctactttgaatcctgttcatagataataaactgcagataaaaattagttatctttcctgtatactaaagtaacaaatgtagaaaatatacttggtggaaaaaggattcccaattcacaacaaaatccatggaccatgaaggaataaacctcacaagaaatgtgcaaaacctgtatgaaaagaaatgatagctccaacctgaaggatatgaaataagacctaagtaaatggagacatataccatatacctgaatggaaagactgattattaaaagatgtccaccaggcccgctggcttacagcttt

SEQ ID NO: 365021 - DNA, 315 bp, Homo Sapiens
gcgctctttttcttcttggcaatgattcataagtttgagaggctatagggttaaagagggaaagcgttctctttgccctctaaaagttcactaaaaattaactgacagaaggtagattaataggataaaaaagcatataaaatttatttcatgtgcatagtaagcacaggggaattgcaggagaatgataacccaataaagtccagatgcttatatacctacccttctttaacagggaaggggagatgaaggttataagagtaaattattttcaggggaaaagaatgagcccaaatgctgggtgcagttgctcat

SEQ ID NO: 365022 - DNA, 1147 bp, Homo Sapiens
  misc_feature (592)..(602): n is a, c, g, or t
  misc_feature (606)..(614): n is a, c, g, or t
  misc_feature (673)..(681): n is a, c, g, or t
  misc_feature (738)..(738): n is a, c, g, or t
agtgatttatcctcaggcacagatttgcactatgtcaccactacttgtatgtagaagtgagtcaccggctggcaaatgggcatagctgctgggcagtggatgcagctccatgcatgttattctcatttgatacaggatctcattggcttctcacagcaatcctgtgcactataggtattgctcccgggaacagatgaggaaacaggagagcgcgagattacagcaatttcgtaaatgggaggatctgtgaaggtttcagacatacaccctctctcatatgtcaaggatatgaagtctaatgaatcccctaaagcagcaggggttggcaagctgcggccctggggcccaaatcagcctactgccctgtttctgtaaaaaacccccatgaacgcgggctcccaccccttgtcggccgctctcggcccctcgaaaaaacgctctcctaacaccactccgtttttggcgccgcccggaccccccctatggtaaccgcggaaacattgggtccctacctttggtttttcctcacggaacaccccttggcccgcccgaaaattaccggggcctgtgggattttccccaaacccaaatnnnnnnnnnnnccannnnnnnnnggtgcgtgcacaacaccccaaaaagcgcggctttccgtggcaagcaccagaatctttgnnnnnnnnnaaagcggggaaaattttgccccccgcaaagggagcccccactctataaacgtggggngagattccccgctcgccataccaggtggcacagtcttccggaaataggcggagagctctcccgtcattttctcctccgactttttatacggcgcgcccaacccagcactcgtgttgcacaaccttcctcttgtccgagagataaccgcgtgggtgcggccaactggcccctgttgtaagacgctatgctcctcggagcgagacaaattgtgaaagaccgtttcttcccccacaaaccctgtgcgttttgtagcacgctataccccccggaacacggccgccttatttgtgcctcgcccaataaacgcgcctgtgccctccccgttgcggcatatataacacacccctctcgcacttcttgttggggcaaaacccttgagctctcgccacaccaagactttttatatatt

SEQ ID NO: 365023 - DNA, 473 bp, Homo Sapiens
caggtgtctgcctcgaaactgcctgaaggcaggcagggtaggacaatgtctggaggctcacggttttatagactaggggtccccaacccctgggctacagaccggtacccagaaccgggccacacagcaggaggtgagcagcaggcgagcaagggaagcttcatctgtatttacagccacccccccattgatcccacagcagcctgagctccgcctcctgtcagatcagtggcggctggagattgtcataggagctggaaccctatggtgaactgcgcatgtgaggaggttgcgcgcttcttttgaaaacctaatgcctgatctgtcgttgttgcccatcacctccagataggactgtctagttgcaggaaaacaagctcagggctcccacggatcctacattactgtgagttgtatatttcactatatgttacaatgtaataataatagaaataaaatgtacataaatgtaa

SEQ ID NO: 365024 - DNA, 446 bp, Homo Sapiens
  misc_feature (53)..(53): n is a, c, g, or t
ttaggggaaggctgcggcaggtccctggtgggcaggcctaagctttagggggngcaggccagagaccacccgggtacccctcactcttcttgcagacatgcgggagccggtgtttgagttcgtgcggccgcccccttaccaccccaagcagaagcgcttcccccaccggcagcccctgcgctacctggaccggtacagggacagtcatgagcccacctatggcatctactaaggagccagagtgtgcgcatttcagagcatgggattgatcggcagcaagagtaaagacacagctccagaggcccacactgtggggtctgggccctgccttaggcagcccccctctttggccccctcccgtcaggcccagggcttggagtgaaagtgactctcaggtggtggggtggggaatgtgaataaacatgatttcttgccgggaaaaaaaa

SEQ ID NO: 365025 - DNA, 523 bp, Homo Sapiens
cgaaaagaaagcccaaggcaaagaagggggaaggaaaacaaacttcgccactctctcttctccttcctaaccctatgtctagagcaccacaccgctcacaaactctttccaaatgctcagttggctcccaaagttggagcctggcatgggcagggagcccacaaaactctaaccaaactggaggctggcatgggagaagtgcttctggttcactcttcctaccctctccctcctaaccctctcattgcctgacaggggagcccctgtggcctggactctaggggatgccgccaccagaaacccctctgccaatccctaccttgcaccctgggaactgcagtaacttattctcaaaggctttaaacacagagatcctctcagcggccgtgggcctgccccttgtcctagccctgccacgtgagggtccagcctccagggacaggcactgcccaccaacggcaaatccaaagctcttttaaaacaaaactgaaacacaacctaaaaagcaagagcgatctccagg

SEQ ID NO: 365026 - DNA, 864 bp, Homo Sapiens
gtcattaatgaaaaaacacaccatagacggttacctacactgagaagagtggaaacgatggtgttaggggagaggaataagaaggtccgttcagttagagctttgcaagattcgtatatacagcaccagatcctatgaaatcagcgcccctcgagtcagtacagtttgtgagaaatgaacacttcagaattgcagtagaaaatatggccataaaaaaacttcggtcttccagtcctatgcaggaaggggcaccatgcaaggtggggtctcgctggagtggctcgcggctctggcgaccctggggctccccttccccagccccgaccccgggccccacctccagggccagtcacttgcttccagagtgcactgccgtcacagtggtgggcctgggtctccgctcggctccaactcctgagacccccgacgaagaagaaatgaaactacagagcgtggaaggtgccagacagtctttttggcgtggccaaactgaggctgctcgaaacacttgcatttgaactgtccaggctgctgccgaggtgtagttttctcatatgtctgacgacggccgtggcattaaatgcttgtctccatttgctcttggcaaagtttttccggatctgggcgctgacggactccgtggatgtttttgttgagggctgtgtcaccaacgatcccatgggtgccgagctgcctgctcacacgtgtatctttttaatcgggtccttctccatcaggttccgaatgaagtcttttgcagagtcggagatgtcctcccaagtagggagagtcacactcatattccgccttgaggaatctgctcaaagagcttgggaatcatttttcatcataaaaaaggacggg

SEQ ID NO: 365027 - DNA, 752 bp, Homo Sapiens
  misc_feature (54)..(90): n is a, c, g, or t
gggatgtatacgactcactatagggcgactggagcttcacgcggtggcggccgnnnnnnnnnnnnnnnnnnnnnnnnnnnnnnnnnnnnnatcaggccaaatcggccgagctcgaattcgtcgagagcggagtggaagaggagcacagagtgtgctcaagaggggaggattcccagcacagaggatctgatgcgaggagcttctgctgaggagctcttggcgcagtgtttgtcgagcagtctgctgctggagaaagaagagaacaagaggtttgaagatcagcttcagcaatggttgtctgaagactcaggagcatttacggatttaacttcccttcccctctatcttcctcagactctagtgtctctttctcacactattgaacctgtgatgaaaacatctgtaactactagcccacagagtgacatgatgagggagcaactgcagctgtcagaggcgacaggaacgtgtctaggcgaacgactaaagcacctggaaaggctgatccggagttcaagggaagaggaagttgcctctgagctccatctctctgcgctgctagacatggtggacatttgagcagcctgacctgtggggagggggtctctcccgaagagtttctgtttttactcaaaataatgttattctcagatgcttgatgcactgttggaaatgtgattaatttaatcatgcagataaaccatttaaatgtcagtctcccagtttttcataatgaaaagttgttttcccgc

SEQ ID NO: 365028 - DNA, 466 bp, Homo Sapiens
tttgaggtgagcctctctgagaaatttgtgaggagggtccagccgcgggtcggaaggaaggacgtggggagcgaggctcgagcgagcgacagcgagtgcgaagcagactgctcgacaaacactgcgccaagagctcctcagcagaagctcctcgcatcagatcctctgtgctgggaatcctcccctcttgagcacactctgtgctcctcttccagttacggtgcatgtgaagcaatggtatgggaaaattgtttgcagaaggatgaaaaggctttattgccaaactgtaagtacatgatttgaaatgtttatggtcaagagaaaatatttctacagcatcatgtaaagcatgtagatacatttgcacatgtgcattaacatgtaagaacatgtgcctcagacacatgtgccctcctggaacagctcatgctggccccatgcctgcttccaagcttccatcaagtca

SEQ ID NO: 365029 - DNA, 828 bp, Homo Sapiens
  misc_feature (493)..(493): n is a, c, g, or t
  misc_feature (742)..(742): n is a, c, g, or t
aaagaaaaaaagcacccttgtggccctgctctgggtgcagttttgagggggcaacagagctagcaggtgtactacaatcagctgaggttggggtgaagactggagtacctgagtttaaaatatcaaagtagttatggaaacaacatgctggctctgagaaatccagcttgccaaagcaaaaggaggctggcaccattaggtaaactgtcctttcagacaggcagggcaatgctaatctagttctgaaggaatttcctggtaagtggaaacaggcaaagcatactttgttactcttttcagggcatcttatatgcacttggttgcacagaatgaggctaagagggaacagcatttgtgaccaatactacaaataatatggaaagattaaccaagctctctagataaactctaaatgttcaagttccaccaggatgatggaactggttatgcgatgcgggaaggcagctcagttcatttttcaaaaccatctaanagaagtccactgagcataattaggttaggttaacaagtccgtttacattataggaagctggcaacatttcacacccaaaacttgggtcctgctaacctgacatttccttcactgctctttaggagaatcacctttggttgattctcttaggcagacagaataaagctttgaaattaagaatgctggggccaaaatgaagacagaagactccacatcatcactttggttgtaattaggggtgttaacaanataaattaaggaaacacaaggacttatttatgactcttatagtctcaacttttcctaaagacaaccccagcccaagatcactgggt

SEQ ID NO: 365030 - DNA, 1713 bp, Homo Sapiens
  misc_feature (222)..(245): n is a, c, g, or t
  misc_feature (598)..(686): n is a, c, g, or t
tttagacaaggaggagtaagcaaggaacttgttctgctttctatcgtggtcacatggtgatgctcgggacctgccaggtcagaatttatggatatctgaaccctgaccccgttcattctctcagtccacttccaatccacatcagttgttgtctgccttggagagaagagccaaaactggggtgggcgggtgggtggggagtgcaggatataaatgtgtaannnnnnnnnnnnnnnnnnnnnnnncttagtgaattattcacccacagacatgagagaaaaaaagagggagggtgtgtggagaaaaaatgtttacagggctaacaagggatgatgtgtcatttagtatgttactaaaaagtgtggaaatgacttgattttaaggggagggtgaggccgaagagggaagcccaaagcagatcttaatgtttcaaaggagtgcagcccttcacagccatcagatatgagggcactgttctgtctggtgttgtagccatctcaagaacaaatcaacagcaacaaaagagaaagaataaatttttaaaatttagaaaacaaacccaaagaacgcgctgaatacaagcaggagcagagagacnnnnnnnnnnnnnnnnnnnnnnnnnnnnnnnnnnnnnnnnnnnnnnnnnnnnnnnnnnnnnnnnnnnnnnnnnnnnnnnnnnnnnnnnnctagaaaattcttccccaccacttcctttgggcacctccgcccaccccgaagaacgcggaacaccttgcccctctccctccgctttcccacgaaaaaccaggggtacacaacataggggtttgtgattttccccgcgagaaaaacaaaacccccgccggcggcgccaccaccgactccgcgtctctcaaacccgtccttcccaatggggagccgcgcgcacgagcgccctctctgatcgggggactccctcctcccacgcggggtggaccgcgcaattagccgctcggtcctcgcttgtatcgtaattgtcttcccgcgcccacgccccgctccctgcttcacccctacttctcaccttcacgtccacccatcgcataggtgctcgctagaaaataaattccgccgctcacgcacacgccagcagtttcttactcgcgctcgacactaaaacacgccgagtgcccaaaagcgccacgcccgccgcccctataaaatggacgcgcacgaacgaatcatgtaagatcgaacaccacccccgccttccacacagacacccctcttaataacaaaaccgagcccgcgtctctctttccctccaccctctcttgcggtgagacacgaccgctaacttagggatgaaaaatgttatacaaacaagaaattcaccaccccccgcctgaccgcggggggccagagacaacgtatcgagcgggggcgcacatacaaaccgaatatattcatcttctcgcgcccagactattgcgcatgggcgagagcccagtgaggcatgttacgaacgtcgcaccatacggcacggtagtgtcgagaccacaatgatctcactcgctccgctaggcgccctaaatctgcttacctcccatttttaccacaatacaaagataccctttctcttctcattccccgcccttatacgccacaccttcgtttccgacgtgagaataccacacctaggtcctccacgattcttcttctactacactcgccccgcgtacgcggccgcgcaag

SEQ ID NO: 365031 - DNA, 473 bp, Homo Sapiens
  misc_feature (57)..(57): n is a, c, g, or t
  misc_feature (103)..(103): n is a, c, g, or t
tgcctcagaccccagctcatcagcctccctgtccccctcaactaagtgggtgtcacntggtgggcctccttcccccactccccactgacctccctcactcctntgcgcctccccccactgctgtgacttctctctctccctgtcttcactttgttcatttctcttctgttttctgtccccgtggcaaggcccgactgtccgctgcgtcctgcccgaccctcctgtacctccggcctcccagcggccccctcgtcggcggtggcgtcgagcctgttgagactgttagccgccctctactcccaggctggagggacctctccagaccctgggctgcggctgaggcgcatccgttttcctgccctgggcatctgtctctgaaagtgtatggcgggtggtgggcaaggggcactgggaagggaggccagtgcctagagtgaagacagctgctgttttaatatatttttgtgactttc

SEQ ID NO: 365032 - DNA, 491 bp, Homo Sapiens
cagcaatgagtgcaggtagctaacactgaccaacctgcatctggtagttcatttaaggtcggccttggctttcaagttaaggccatggtctttctctgcagtccccagccaatacgtgggcacagaaaggcacagggcatggctgattcagcccaacatgaggctcctcaccctagaactccctgtggagttggccgatactgcctgtgacctgcaatgtggtctaagctgtcagacctccacagtggccagaaggttttccatacctgagcctgcttctacccacttttatttttcccaggagtcacgcttagtcatctcttgctctttgaactccatgtctgtatcagctacccagaggacccatcagacagaaagtaatatgcagataacagcccaggggaatctgggaagcactgtgaaaccaacatttcttcagtgaaacctagaacaaaagtggaataaataaaaactaaatgtctcatttcaaa

SEQ ID NO: 365033 - DNA, 474 bp, Homo Sapiens
cagttgcagaagatgtaatctaatattgccatccaatttagcatacataaaatgttgccactcaccttccctgtttgagcttcttttcctgacctgagttttgtatcagcaatgttgatgatgttagcatgggtatgggattagaaaatgtccttcccttaaatctcttggcttttactgggggcaaggtaaataatggcctatggattttgttttgcctttcctgttttgcttttgtacaaagagacctgccttaaacaagtactgcctgagataagtgtctgatcaagcctacagtgtactttaagtaaaaatggcaaagttgctttgttggggggctgatactgatgattttaggataaattcatttctttaaacttgtaaaacatggttttattgcttgtttctccccaggatagtaaagatttctctatttcaccccaacctaataaaagtggtcagatttataatgtt

SEQ ID NO: 365034 - DNA, 456 bp, Homo Sapiens
tagtttcacggtcgccccggctgagcgcgttgggtcggctggaatgtgttgccttagggtctaagtgaaagttgtaaattgtttgtctaaatttattttctccagccaatttctgttttgtctttgtcccctactttctcttcctagtcttgtcatgccagtttacgcttctggctttgatatgtttactttttgagtactgagagtgacagcggtatgcaggacacattcttagcacctaactgaacccctccttgcccccaataaaacatgcttcctaataaaagacacagctgatcttactgttagcactgcatgtactgacagtgaaattggtgtagggtggagggcggtggctccatcacttgtcccaaactgctgttaggatttctcaaactagattttcaaagacacaagtgtgtttagttaacctgaaaggtttatttgctggtgcag

SEQ ID NO: 365035 - DNA, 1107 bp, Homo Sapiens
caaaccaccaggaaattcttctacttctgaaaatcccagaaatgttaaaatatggcttcccccctctataaagtaaactgaacaagcttatcaatcatttaaaaccccagcacccaacaatagcaattaggaatccaaattcatagcacaaaagaacacagataccagtgttggacagtggttttgttatggggactgggtgacagcttatcctaaatcctgcgcatccgtccataccaggagccgggttacccttggtaccaggtgcctgccccacaaagcctgggtcgggagagggcttggtgacgggcctgcagctcccgtgagtaactgtcttttcccaggctgtgcacgcatggccaggtggtcctcagggtggctggttctccttccaggagcaaccatggcaggggcttaaaagttgagtagctctgggaaatggtccttggaaggcagcgatgggtccatgagcacagtggtccctctttgccttggctcctttcttcttggtctgccctaggcttctgtggctgccacctccccattcacgtaatccggttccccgtcctcctcgtctgggcttcccaccgggccaggggatgcttctctctggagttgccccatgaccttcctggactcgcgccactgatggatggatgctgagttctgataatcctcagattcctcatcttcttccggggaggcagagggacagagaccagaagtggggccagtcttcagggccagtgacaggctgaggtcccctctgcagaggccacctatgccctcctgctgggcacctgtctctgtgcttttctgcttgcaaatgagcacattctcgtaggaattggcatcatcatcttctgggggcttcgagaaccgcccccagttgtaatactccatggcatggggtctatgtaggcttcctccgacccgtgtctgcttcctttgctgaagttctggtacctggaagatgctggatctggaagaaagacccagctaattgctttctccctggcccctgctttgcacccagctcgggtgctgcagcccaaggcagggccagctatttcccgtgtctgagcctttgcagtgctccctgtcccc

SEQ ID NO: 365036 - DNA, 700 bp, Homo Sapiens
  misc_feature (86)..(147): n is a, c, g, or t
  misc_feature (641)..(649): n is a, c, g, or t
gcgcggtgactctcaggatcttacacacgcctggctattttcgtattttttgtagagacaggcttcaccgtgttgacaggatggtnnnnnnnnnnnnnnnnnnnnnnnnnnnnnnnnnnnnnnnnnnnnnnnnnnnnnnnnnnnnnntgagccaccgcgcccggcactatttgtgtttttaacaccattctcccccacttctctcctgggtgacataagagagaaataacctgtagtacagcagctaaagtattctcctttcagagaatttttttggaggtctctaatatatatttcccccttgtctctgtgatctcttatttatactatattattgtcccatgtactttctaaactgagcttggaacatttagtattcctgcaattggacttcccacttaacaattatacagactttgcttttagaaatagattaggttccaaacagaaagttcaagtgtaacaacaacaataaaaatagattatgaaacaggctataattggctcttttggatttgataggggcaagatgaaaggcaactttcttgcttttgaaatcatgttgggtaagaggtaaggaatccagctacaattttattagtgcttgaaacgggccttccttgaaatctccggcctatcannnnnnnnncttactatcagaagagagctggggtaaaagcccatgttttgttttccatga

SEQ ID NO: 365037 - DNA, 420 bp, Homo Sapiens
  misc_feature (50)..(50): n is a, c, g, or t
tgtacaatgcaaaggacaaagattaaattatattagcaatctaggagcangaagggcaagactgcttttttaaaaaacagctaaaggtttaggaggttttattaatatttaaattgtattgaaaccacagctgcagcctttgactccagcatagagatatgcaaatatggctttcaaaagaaaggcaatttcagacagccctcaaagtaacaagaacaaataaaacaaatgattttgtaatttatctttattgactgatgttgcacaaggcacagcccataccctgtgagagtcagcaacagccgagctctctgaggagagaagagaaagccaggctggagggagaggcaggccgacccatagacaggtgacaggaaagacacagagcaggcagatgggagaagaagacaactaaattaa

SEQ ID NO: 365038 - DNA, 500 bp, Homo Sapiens
gcggccgcggcgtcgctgctgtcggcggacacggcttctgaggtgcccacacccaggccgctctcagagggctcctcgggccggccaggcccaggggccgcgtcgctgctgctctccacctcgttctcctccatctgatcggcgggctgcctgacagcggggcgtagggtctgggaacttcactctgagaagagaggtgaccgtggctggaacaagtgggccatctccccagccccggcaaccacggccacccatttgcacccctgcgcccattttgcagatgcgaagattgagtctccgacggggcggagcttcctggtgtattgcgaggggagctcgggaaaaacttgacggagaagctgtgcttcccaggctaaggcccttcccgggagggtggtcaatggctggtaatcttgaccctttccctcgcccccacgattctcgtggagcgttccgctctgtgagccccatccgggcccagtggttcagcccttcggccc

SEQ ID NO: 365039 - DNA, 612 bp, Homo Sapiens
tttaacatccagaattttaaatcccacaactggggcagaatttaaagctgcaacacagctggtgatgagaggctccctaagcccagtcgccccttagcacccaggcaccgtgggccccggatggggaactgcaagcagccctctcagctgatggctgcgcagtcagatgtctggtggcagagagtccgagcatggagcgattccattttatgactgttgtttttcacattttcatctttctaaggtgtgtctcttttccaatgagaagtcatttttgcaagccaaaagtcgatcaatcgcattcattttaagaaattatacctttttagtacttgctgaagaatgattcagggtaaatcacatactttgtttagagaggcgaggggtttaaccgagtcacccagctggtctcatacatagacagcacttgtgaaggattgaatgcaggttccaggtggagggaagacgtggacaccatctccactgagccatgcagacatttttaaaagctatacaaaaaattgtgagaagacattggccaactctttcaaagtctttctttttccacgtgcttcttattttaagcgaaatatattgtttgtttcttcctaa

SEQ ID NO: 365040 - DNA, 506 bp, Homo Sapiens
  misc_feature (85)..(85): n is a, c, g, or t
aggacaagtagcacaaactgtataacggtttatgtccgtagttttatagtcctatttgtagcattcaatagctttattccttagnatggttctaggggtggggtttacagctttttgtacttttacctccaataaagggaaaatgaagctttttatgtaaattggttgaaaggtctagttttgggaggaaaaaagccgtagtaagaaatggatcatatatattacaactaacttcttcaactatggactttttaagcctaatgaaatcttaagtgtcttatatgtaatcctgtaggttggtacttcccccaaactgattataggtaacagtttaatcatctcacttgctaacatgtttttatttttcactgtaaatatgtttatgttttatttataaaaattctgaaatcaatccatttgggttggtggtgtacagaacacacttaagtgtgttaacttgtgacttctttcaagtctaaatgatttaataaaactttttttaaatt

SEQ ID NO: 365041 - DNA, 353 bp, Homo Sapiens
gcaccgtggggtgttcaggcttctgtaaggccccagtgagatcctgtggctgtgcccccatcacctccacccactctgccctcccactaggtgcccaacggatgaatcaacgccttggcagagttttccagcagggccttgcagagagtgtgtgtgacctgtgtggccaatgccttggggaagggtgaggagttaacctggaacattcccagcgtgggcattattgtcctgttgcaagttcagggcaaaaccaggaatccagttttgtcgatccaattgagaaaacatttcatgaacaactacttgtggcatgcattggcactcggaataaagcgcactattgacactaaaaa

SEQ ID NO: 365042 - DNA, 507 bp, Homo Sapiens
aatttttaaaagcttggggaatgtaagcattttctacatgactaatgaagctaggcattgtagataagagaagcagtgaatgttttaaaatcagtcacggttactgctggattttattagaaacactcagactggtctagttttggggggttaatatgaaatttatagcacagctgagtaaataagggtatccacttattttcagaaatgatttttgaagtttaaaccacttactatgaacattttataacatagaaaacaggtacaaagtagatagaatagtataaacaaggcaatcttgtttcatctatatacctgtagcccaccactcctacctcctactggttttgagacaaatcccagaccacactatcttttcatctgtaactattgcagtgtataactctacaagataaagattctttgaaaaaataaacacaataccaatatcaaaccttaaggctaaaaattgtaattgattttttaaaaaatgagtgaaatatggct

SEQ ID NO: 365043 - DNA, 921 bp, Homo Sapiens
  misc_feature (23)..(23): n is a, c, g, or t
  misc_feature (59)..(95): n is a, c, g, or t
gggaaaccgtattactagactantatgggcgaaccggagctctacgcggtggcggccgnnnnnnnnnnnnnnnnnnnnnnnnnnnnnnnnnnnnnatcaggccaaatcggccgagctcgaattcgtcgagagcggaggcgcaggcgcagaggccgacaccaccgggcggctggtatgtgtccaccggcccctaggcgcctcgagccccgcccctgggagacgcaggctcctccccgcggagcgagagcccgcggagctgctccgaaacccgcgggagggcacctccggtcacccgagccgcaaatccccgccgtccgaagaaggtgtcgccccgggctggcggcccagcgtggcttaggccaggtacaaccggcagcgcccgccaagccctgggctagggacgcctgcgggagttcacggggaggcgccggtgtctgaggtctgagaagacagcggccaccggaaaaggtgctaatgtttgcagaccccgatccatcgacaccccaaggaaatgctgtgcacaaaattccaagagggccttttcgaatagacgcatgaacggtgtttgtgtctggatcgtccagcctcccgggatcgattgggaatctagcttctgcttgcctttccagcgcgacgcacagtaggagcctaataaatgtaggttgaatgaatgctgaatatcgaactcagctctggaggccagaagcctaagatccaggtgtctgcaggaccctgttccctcctctgcaggctctgggggaggctccttcttgcctcttccagttcccgggggatctgggtgtcccctgggcttgtggcggcaccactgtattctctgtgaatccacgtggccttctcctctgtgtttgtgacttcttttccttcttataaggacacctgtcattgggatttagggcccta

SEQ ID NO: 365044 - DNA, 409 bp, Homo Sapiens
ggaccaggcccggtgccttgatattggtagatttatttgccatcagactaatgagctggggacattgactgtttcctggcaactgagtcctctgattgtgtaaacaatttgcctgcaaacaaaacctgagtgcttgaaagggtaagtgatcctgatctgccatagaaaccttcatgcttagggagtttccctagctaattcctcagctaagattctccccaggagtttcactcacctgtttccagtgcctcctttgggctgtcagcatctgtgattccacattccccagagggagattcctccccaaagctggttgtatttactgccagtcctgggctgtagccagggcagtctttgaacacattatcaagaatactttttaaaataaaagtctgtttcgacttccaaa

SEQ ID NO: 365045 - DNA, 978 bp, Homo Sapiens
  misc_feature (529)..(542): n is a, c, g, or t
  misc_feature (784)..(786): n is a, c, g, or t
  misc_feature (788)..(788): n is a, c, g, or t
  misc_feature (790)..(790): n is a, c, g, or t
  misc_feature (792)..(792): n is a, c, g, or t
  misc_feature (796)..(796): n is a, c, g, or t
  misc_feature (799)..(799): n is a, c, g, or t
  misc_feature (809)..(810): n is a, c, g, or t
tttgtaacatttaaaaaagaaacctgaatagcctttaattctttaataatacacttaaattttatgtaaatcggttttcgccacgtgtgtttgttcacattctaaatgacttaatgggattctcacggtctgtgtctttgtgtcacgtgtataaaatgggcttgtgatgtaagcgtttcatctggtcagtggttcctttgatattgtactgctgctgggagtgggctgtggaacctgccttcgggtaactgggttcctcttgggtagattggagagatgggggtgggcgtgggcaaattctcacacatgttttcttaacctatttgcagaaactttcaaaaggcatttgattaaacctcttggcagtacagtattcttgtatttgttaacgtctgtgtttaggtactggtacctttttgttttaaaatgttctaagtgttggctttaaagtgaatttatctttagtatgatagttatatgaaaattataggatttgtgtgcagagaatttttttataaagtgctttgtnnnnnnnnnnnnnntgtattctagcttttgcggtacatatgtgtgataactttaatacccatgacagttaagtgcaattatttcatcactctaaaaatgctatttttgtgtcagttcctgcaggtgttttcatgtctttgcaaagtgacacattttgatgccttcttgataaagtggtagacattttgtagctttctagaaactttgtattcatacggtatcaatgaaaaataaagaaaatgaaagtgtgggaccnnncnanancggnaanaaacaaaaannaccgtgtcggccgccctcggccctcgaaaaacttttctagcaccattccctttgggggcgcgggcccccagtaagtaaaggggaacctgggcccataagctggtttcccaagggagaatcctggggccattggaccttaggggccttgggaatttcctccccccaaat

SEQ ID NO: 365046 - DNA, 1519 bp, Homo Sapiens
  misc_feature (135)..(152): n is a, c, g, or t
  misc_feature (872)..(872): n is a, c, g, or t
  misc_feature (891)..(891): n is a, c, g, or t
  misc_feature (928)..(928): n is a, c, g, or t
  misc_feature (943)..(943): n is a, c, g, or t
  misc_feature (945)..(945): n is a, c, g, or t
  misc_feature (987)..(987): n is a, c, g, or t
  misc_feature (1021)..(1021): n is a, c, g, or t
  misc_feature (1032)..(1032): n is a, c, g, or t
  misc_feature (1038)..(1039): n is a, c, g, or t
  misc_feature (1071)..(1071): n is a, c, g, or t
  misc_feature (1073)..(1073): n is a, c, g, or t
  misc_feature (1132)..(1133): n is a, c, g, or t
  misc_feature (1138)..(1138): n is a, c, g, or t
  misc_feature (1203)..(1203): n is a, c, g, or t
  misc_feature (1251)..(1251): n is a, c, g, or t
  misc_feature (1276)..(1276): n is a, c, g, or t
aaaccccaacaacccgctaagcccctaagtagcgaggcctgggtggcgaattcggcacgagggtcgcgccgagaggccggagggggctccaggcagcctggagctgacggcgccgggctgcgtcctcttcacctnnnnnnnnnnnnnnnnnncacgtactttgtgaccaggatggtgccgagccccctctacggcgggagcttgcaggggtgcgggggtgtgactggcgctccgcggactcgtgtccacagcacagaggacatgtagggttcggccggggcgcggctgcaccggggcctgcctcgcggacctggactcgggactccgggcggccctgcctggtgccattgcctcagccaagtctcccacctctctgctcggtttcccgcacttctccctgtagcggcgggcctgaccgtccggaacggccggagtgtgctgatgcctgctgctatctgcttgatcccttcaccctacctctcatccaggacttcttccgcggatgcgcagctagcgatttccacaggcgagattgaaaattccgggcgagtatatgaggctgagtaaatcccgcttcagggaggaaccaccagaatgacatttcctttaagcccaaacccaaacttattattttccatctaaccaaaaccaaaacggcccaaccaacgaaaaagcgcccacggcaccgcacctgtgacccaataccaaaccaccccgaaaccgcaaatccattgcggagtccacaaacatccgttttttaaaggcctcgaacgaaactcggggcccggagcatccacccaattacagtgacacatttctcatcataccttgaggggagaccctgcgacccctccccaattcgcagcgtgccncaagacgcaattttccacnctgaccctcggccggtttatcccccacattcttccanaactggaaaatgtcntngcctctttcgttgcgacccctgctgttttattttaacaggtncttgtaaaaacaaagtattctttatcaattgtantggtttgttanttcaannttagcatccccttattctctcccctcccctcntnttgggattattactacctagcacccacgaggtgtggggcttatttccagctgggcgccnngtgangtggccctgaaccacgcctggcccatcccctcggggcgggcgggaggataatggccgccacacgntttgtgttgacccaagcgcagcccgtttggctccgcaaccaaatcccncgaacccgggcccaaacctacaacnaacatgtaactctgtggcggtcagacccaccctccatctcacacttaactaccgcccaaaaccccttcccacacaacccagccaaatacttaccgccattctatgaagtgattcaccttttctgtcccctacaatcagaacctactcgccgcttttataacccgacccgtccgctttatacacccccgccacgaatactgacctaccaccaacaccagtctgaaataacaccctcccaccgcc

SEQ ID NO: 365047 - DNA, 173 bp, Homo Sapiens
aacatgaaaaaacacatttaatggcacttaagttataagaaaataaaattcctaagtgaattcaaaccatagacacaattccctttaaaggttgttttcctccatcatgtcaggttgttacataactaaaattaaccaacttgaatctgattgtttaaaatcagactataaat

SEQ ID NO: 365048 - DNA, 1124 bp, Homo Sapiens
tgggcttcattaattattcattaggtacttgaaagctctgcagggattggtggctgagaggcctagtcgactgtttcttagctagaggtacgtgtcacccagtacgcggctggagttttgcataaattattccgataaggagcggggcggggctctgtgcatagattagtcaaatgagcctgggagggagggaagccggctacgaattagcctaagttattaaagatggcgacggagcgcagtcgctccgcgatggactcgccggtcccggcctctatgttcgcccccgagcccagctccccgggggcggccaggccgcggcggccgccgcccgactccacggcggctttgactcggactgcagcgaggacggcgaggcgctcaacggcgagccagagctggacctcaccagcaagctggttctagtgagccctacatcagagcagtatgacagcctacttcggcagatgtgggagaggatggacgagggatgcggagagaccatatatgtcattgggcagggatcagatgggactgagtatgggctgagtgaagctgacatggaggcctcctacgccacagtgaagagcatggcggaacagatagaggccgatgtcatccttctgcgggaacggcaagaagctgggggccgcgtgcgtgattacctggtccggaacacgagtaggagacaatgacttcctggaggtcaggctagcagtggtgggcaacgtggatgctggcaaaagcacgcttctgggggtcctgacacatggggagctggacaatggccgaggctttgcccgccagaaactcttccgcaacaaacatgaaattgaatctggtcgcaccagcgtgtgggccaccgaccactccgtgggcttgtcacggtaacgggcatggtttgttgaacaagcgtgtgaaccccgtgggggcccctgtgtggtgccccgacctgtgagaatcccgaaagctttaccccaccgagtgggggcgtagaacccctgaaccctgtttttgagttagggcctgcaattgccgcagtgcgcgccctgctggggtcacaacacggtgtggcgccacgagcctgttgtccaagggtgtccccaacacaagggggagagccc

SEQ ID NO: 365049 - DNA, 404 bp, Homo Sapiens
ggctcggaccgttttgggctgtcgtgcgtgattacctggtccgaacgagtaggagacaatgacttcctggaggtcagggtggcagtggtgggcaacgtggatgctggcaaaagcacgcttctgggggtcctgacgcatggggagctggacaatggccgaggctttgcccgccagaaactcttccgccacaaacatgaaattgaatctggtcgcaccagcagtgtgggcaacgacattctgggctttgacagtgaaggcaatgtagtgaacaagcctgacagccacggcggcagcctggagtggaccaagatctgtgagaagtccacgaaagtcattaccttcatcgacttggctggtcatgagaagtacctgaaaaccactgtcttcggcacgacagcccaaaa

SEQ ID NO: 365050 - DNA, 504 bp, Homo Sapiens
  misc_feature (51)..(60): n is a, c, g, or t
ttgagacagggtctccctctgtaccccaggctggagtacaggtctgcctcnnnnnnnnnngaacacaaaggtactcagtgcgcagcctctataaactggccagaaccagcccatggtcagtggtgtcttatcaggagaaaattactgaagtcagtctcttgttcaatcaaacctgtagttatgctttgtggaatggagtctggagtctgggggcatcagttagcatctgacaattggtaagttagaacatttattattttagtgtaggggtatgtgacttttgcctggcatggccttagtcttatttataatttcataatttataagccacaaagactccattccatcagtcttatgatctctgttttacaaccctggatttgtccagctctccaccatctcttgtcctaggtacaagcagtttctccaaggaggtgtctacacccaaacaaccactggcctgtttcctgtcactacacattcatttgcatttctagtgtactg

SEQ ID NO: 365051 - DNA, 259 bp, Homo Sapiens
  misc_feature (24)..(24): n is a, c, g, or t
  misc_feature (200)..(200): n is a, c, g, or t
  misc_feature (207)..(207): n is a, c, g, or t
agaaaattcagaatgaagttctgnagaaaggtatgttactgtagtaattactctttgaacaggttttgtgttttgtcattagctctgccctttttaattaaatattttggttcatggaccaaagggtttacttgacaaatttgtgtgacagactccgaacaattcctttactacgaagtataatttataaaataaaatanacccatnttaagggtacagtttgatttttgaccagtgaaactatgatccccatcaaggt

SEQ ID NO: 365052 - DNA, 680 bp, Homo Sapiens
gcggccgcggagcccggggcgggtccggcgcgggagccagcgcggctgtgtggctatctgcagaagctgtcgggcaagggccccctgcgtggctaccgcagccgctggttcgtgttcgacgcgcgccgctgctacctttactatttcaagagtccgcaggacgcgctgcccctcggccacttggacatcgcggacgcctgcttcagctaccagggcccccgacgaggcggcggagccgggcacggagccgcccgcgcacttccaggtgcacagcgcgggagccgtcacggtgctcaaggctcccaatcgtcaactcatgacttactggttacaggagcttcagcagaagagatgggaacattgtaacagtccttgacatggtcaagtgggaaccgatgacctcatccactcccgcgggattttcccaagggcccttgtggccacgagataacactgactttgggcgtccctctccgccaaatggcttctggcagaaaaaacccagtaaatgttcccaagccgcgcggacacttggggcccggtaatcacttgcccgagaaagaacactagcttcccgacatgctcgccggaccccccgagggcgcatcctggaggtgccgctgccaaatctctttaccatacaggagggcaagagcggcgcggctctcagataggatctc

SEQ ID NO: 365053 - DNA, 499 bp, Homo Sapiens
attttaagatgtctcagagttgaaacactgttaaaaaacaacacaggctctcatgtggtttaggggttgtaattgtacattctcttgagaacacacggcactcccctctagtcccagactgggaggtgagggtgccccccagaaagcacaggctcctgagtgtgaacaccgggccgccgcaggtccctagggcgctgctgagaggaagagaccagggaatcagcccttggagaaagcacgtctcttccgacagcaaaacactgggcaggttcattttaagtatcatttatctagacttgcagttgcactcaaagtatttctacaaagttgctagtttttttagatcaaaagattacagttacctcattttatcaaaataagtattaaataaaaagtaagcacaagtaccaataactgcctcaaaaatacttgttatatattttattgtaactggttttataaaatttcctagtaatatcgtctcaatgaaaagcaaaac

SEQ ID NO: 365054 - DNA, 411 bp, Homo Sapiens
ggaagggcttctcccccgagtgcgtgcgctcgtggctctggtaggaactgagctgcgtgaagcccttgccgcaggccgggcagcggtagggcttctgtgccgcgtggatgcgctggtggcacgtgagcgaggatgagcgggagaagctcttcccgcactcggagcagaggaaggggcgctcgccggtgtgggacctgcgggggtgtggaggacttggcatgaaggcgacagacccataacgtgaccccactgcctgtctgggctgtactttaggggctccccaaacgttcgtgggggcctaggcttaatcccctaagagccacatggctgcaccccagaggaagaagccttcaggctggctgggtgtctctattccaaagacctgtctctgcacattaaagaccaagatat

SEQ ID NO: 365055 - DNA, 747 bp, Homo Sapiens
ggacttcgggccctctgtgagcctctgtccgccaaggcgatggagctgtgtttggagtccctcgtctttggcagcggctggggccaaagcccgggcaagaccaacgccttcggcacccggactcaggctccgtcctctctgccagcgtgcggctacaatgactcgacatggcaggccactgccttcagagaaggtgacagagggccatgtctgaaacattctcccacaaccaggaaccctcagcagccgctgaagaggaaaggcagttaaatggaaagacttctgagcaagtggaggaaaagtcacgtgtgacctagggaggggctcccacaggaaggggcaatgcccttgccctgttcacctagcctccaggtggctccccacttgaaatttccagaggatggcagaaaccctacttacaaggaaatgaaagagggcacagcaaccttaagaccagagcagcccacgatattttttaatgagggcaaaaatagaagacttgcaaaagacccctgaaaataatgcctggaagctgcgaaacatcagactgacaccgcacaaaagaggtccagctgagcaggagaaaagcttgagaagcatccagaacaatgtaggtggagaggctaagaagaaagaggagcccacatggaatgaataaccaaggtcgggacagaggaaggttcgccagaactgggagggctgaaattggacattgagataaattaaagagtgttctttaaaactgtc

SEQ ID NO: 365056 - DNA, 462 bp, Homo Sapiens
tcagacctctgacagagcgacgatgtagggtctcccggggcccaaggtggtctcagggtcaggggtgggatttgcagggaactcggggagcccacgggctgcgccacctctgccctggcagctgaagcctgggagagtccctgcgtggtgtaattggcctcagcccgctttctctgtgccgtcgcacctcagtgtttctcatagcttgtccccacgggtcactttccatccacgggaaaaacaaatgccccttctccatctatcattgcgacttcctcccaggaggcctctcaggttgggtaaagcaggggcctccagtggtcaggccaaaagcaaggaaaacctggctgccccactgtggctgaaaactcaaaacatctggaactacccttctccaattacgttccctcttgcttaaaaacaaagctaattaaatcatcctgccacccgagggtccaaacc

SEQ ID NO: 365057 - DNA, 866 bp, Homo Sapiens
tactactccacagggtcacagggtacagcacggcttctgactgagaggaatacagtaggtttttgaaaaccttgttgcctgcccgaagaagtgaccacacggaacatgtccgttcctgagtatgcttttcccctctctccttggcgttgttgcacaggaatgttccaaacaggcaggaataggtatgctgcaccagtttcacaaggaatgcttcattgaactcaaaagagcaaggaaattgcctctgaagctgatgaacacagtcaagccactgcagaaacactgggcaacgttcattcagatcatccgagttctccccatgaccacaccggtcagcaaatttatggccaaaatccagccactccatttccacgaggacctggaaaccctctatggttcggtaataagggtccagcaagagcttagccaatgccacaatctggggggtgcggtcccagccatctgagcagtgtactagcaccggccgctgatcctgatccacagcatgcactaccagaagcgctgatttcagaagcacagacaagtgatggagccattttgtgctttcaagagctgatagccaatttcccggatctggcatctgagtgcacagcaaccgcagagactgaaaactcctccgaatagaatgaatgtttgccatccccataaacacaacttcacagtttgggtaatactctgggcattcgcagcctcctcctttggctcggtttgccacagcagctgcataggagcgtgcatccaagatcaaaagcttctgcggttggatggctaaactctctgctcctgaagcatttgacagagaagaatcgaactccacgtcagaaaggtctccccctgtgagaata

SEQ ID NO: 365058 - DNA, 305 bp, Homo Sapiens
tgttagcactgttatatgctgccttagaaagacttttggttgaaggctgaatatgaggggaggggatatttatgactgtgttaatcttttttgatcattagctgaatattcaatatttgatatgtaaccatatagggatgtgttcgatataactatataggcaagggatatattgatttggccacatctatttgatttatggagggcaaatacctgtttcttttagatacagccattgccggggcattctaaaagttttctactaagataaagatgattgtgtatggctgggagcagttgctcat

SEQ ID NO: 365059 - DNA, 360 bp, Homo Sapiens
agcgggcttgtgtctgtactttagccaaaacgcagaagcttatggccaccctccactcctcacccctcatccctcaccacctgcctttcaattctcggaacgagcgacgtgacacaagaggtcccaagggagcaaacctgaaagccagagcctcctgaatacacaaactgccggtgggccagatgacattagacactcctgagatacgagaagcatcacttccttcagacagagtcggtgagactatgatgtaatgagagttctccctgtgttcctcaggaaggcagcttgtgcctttctacttgaggcatcatctttgatggctaaagaattctgcagcttggccagcgcggtggctta

SEQ ID NO: 365060 - DNA, 357 bp, Homo Sapiens
tcctggtctgatgcttaggaggcttcattcagtgactgagagtgcttttggggttatcaaataacaatagtgaacattcatgaagcagcagctacatgccaggcttctatgtctattgcctggctcagtgcccctaacaactctgtgaggtagatcctaatatctccattttacagctgaggacataaggcacagagaggttaagtaacttatccaaggccacacagctggtaagtcaagaagcagattccagacttgactccagaatcttatttgtaatcactgtagtacatggccttccagttctgctcaagagacagtggaacagttaaattacagactcagccaaaaaaaatc

SEQ ID NO: 365061 - DNA, 1043 bp, Homo Sapiens
ggcctgggtggcgaattcggcacgagggtcaaggcagcaatgaatcgtgtcttgtgtgccccggcggccgggtgagctcctcaaggtctcggagggccgagggcagacaccggcgggcgggcggagcgcttactgctctctctcttccagggccgtccgggcgctgaggctcataggctgggcttcccgaagccttcatccgttgcccggttcccgggatcgggcccaccctgccgccgaggaagaggacgaccctgaccgccccattgagttttcctccagcaaagccaaccctcaccgctggtcggtgggccataccatgggaaagggacatcagcggccctggtggaaggtgctgcccctcagctgcttcctcgtggcgctgatcatctggtgctacctgagggaggagagcgaggcggaccagtggttgagacaggtgtggggagaggtgccagagcccagtgatcgttctgaggagcctgagactccagctgcctacagagcgagaacttgacggggtgcccgctggggctggcaggaagggagccgacagccgcccttcggatttgatgtcacgtttgcccgtgactgtcctggctatgcgtgcgtcctcagcactgaaggacttggctggtggatggggcacttggctatgctgattcgcgtgaaggcggagcagaatctcagcagatcggaaactgctcctcgcctggctcttgatgtccaaggattccatcggcaagacttctcagatccttggggaaggtttcagttgcactgtatgctgttggatttgccaagtctttgtataacataatcatgtttccaaagcacttctggtgacacttgtcatccagtgttagtttgcaggtaatttgctttctgagatagaatatctggcagaagtgtgaaactgtattgcatgctgcggcctgtgcaaggaacacttccacatgtgagttttacacaacaacaaatgaaaataaattttaattttataccccccccaacacatccctaaaagaacaaagcatggcggc

SEQ ID NO: 365062 - DNA, 152 bp, Homo Sapiens
aaaaagtgttcttttcacttgggagagatggcaaacacagtggcaagacaacattacccaactatagaagagaggctaactagcaacaataatagatgatttcagccatggtatgagtagatctttaataaaagatttgtattgattttatt

SEQ ID NO: 365063 - DNA, 477 bp, Homo Sapiens
  misc_feature (356)..(356): n is a, c, g, or t
aggtgccagccggtctccgcctaggaccttccctcccgcccagccagggtgggcggcatcctacgcggtgaaacgagctcatggactgacccggggctgggcctcgccagccaggagagagcgagggccgcacggcagggctggcccaggcagcttgtccagggccattcagatcccaagcatcaggaaatcattttgtacaaccacccgaagcagagatattttttaagaagcgtaaattattttcagttgttttctgatcctgcctttttcttttccccacaacttcacgccagtgattcgttcacatcaggtaaatcttgagaaagccttggtgccctcccccccaccccccnactcagtaaccacgtgcgtgcacccccgcatcctttctcagtagttaagacgttctaggcaataccatagacacatctgactgtgtctctctctttgagtgcaagaaactcaagtcatctt

SEQ ID NO: 365064 - DNA, 431 bp, Homo Sapiens
  misc_feature (331)..(331): n is a, c, g, or t
aaagacaagccatgaatctgattgatgttaattttcttgattttcttcaagtgattttattttttgaaacagtgtatgggccacatgaaacatcataaggtcacatttagcctatggactttcactttccaaacttcccactaggccatcatacaagatgtttgttcttcaacctgcaacatttttttgcctgtaatatctggctaaaatctgtctgttctgtctcagtgtaatagatacttcgtcagggagggtttatatgcctgactccaaagcaacctttctcaaattaggctaggtattttctatactaccacattcttcccctgtnaatgagtgttattgattggataggtgcaaatatctttcaaattgttttccccactatgtgctccacaaagagaaggatgatctgcatagccttggcactt

SEQ ID NO: 365065 - DNA, 568 bp, Homo Sapiens
  misc_feature (22)..(22): n is a, c, g, or t
aactgaactctgggtctgcctnggggcccttgaccaagcacgcctgactccagccccatgaggagcatcctgtctgggttcccgtagggatcatgggtcctcttaccactgtgcgccaaagcccccagcccacctctgcctgggccgacttcctggttgggcctcccatggtaggggcctcagttccccaggctcctggctgagcccccagggagcaccatgggcctctgagaccctagacctgtcccaccacccagaccagagtgcctggacgccccccactcccactcaacatggttcccacacactggtctctgggccattcaggggatgccctttgtggacatgcagaatttctatgaatatagttttttgtaaacattttgtaacaatttgggtttcatagtaactgtgttacttgccaatcattctaggctgatgtaaataaatttccaaacaaatctgattattttcctttttaagacactgtgatatatcaaagtgcacagtttgctgtatgaagtaatatggttttaaattttaaataaaatgtttctagaaaacaggg

SEQ ID NO: 365066 - DNA, 1058 bp, Homo Sapiens
ctcgcgctgaggtgcgtcggtgcccggccccccgcgcccccgcgcgccgcggctcctgttgacccggtccgcccgtcggtctgcagcgcggctgaggaaacttggctgtaacttcaaaagaagatttgattctttatttctggactgcatatatatatataacaaggccattaaaatgtcgggagcctcagtgaaggtggctgtccgggtaaggcccttcaattctcgagagaccagcaaggaatccaaatgcatcattcagatgcaaggcaactcgaccagtattattaacccaaagaatccaaaggaagctccaaagtccttcagcttcgactattcctactggtctcatacctcacccgaagatccctgttttgcatctcaaaaccgtgtgtacaatgacattggcaaggaaatgctcttacacgcctttgagggatataatgtctgtatttttgcctatgggcagactggtgctggaaaatcttatacaatgatgggtaaacaagaagaaagccaggctggcatcattccacagttatgtgaagaactttttgagacaaatcaatgacaactgtaatgaagaaatgtcttactctgtagaggtgagctacatggaaatttactgtgaaagagtacgagatttgctgaatccaaaaaacaagggtaatttgcgtgtgcgtgaacacccacttcttggaccctatgtggaggatctgtccaagttagcagttacttcctacacagacattgctgacctcatggatgctgggaacaaagcccaggacagtggcagctacaaacatgaatgaaacaagtagccgttcccacgctgtgtttacgattgttttcacccagaagaaacacgataatgagaccaacctttccactgagaaggtcagtaaaatcagcttggtggatctagcaggaagtgaacgagctgattcaagctggtgccaaagggactcgattaaaggaaggagcaaatattaataagtctcttacaactttgggcaaagtcatttcagccttggccgaggtggataactgcactagca

SEQ ID NO: 365067 - DNA, 466 bp, Homo Sapiens
  misc_feature (189)..(189): n is a, c, g, or t
  misc_feature (237)..(274): n is a, c, g, or t
gggcaggcagcccggcagccactacacacggacccgtgacgtcgggcgtagcgcggcgcacgtcacggccgctcgctcgtgcgcgcgcacccctccgcccggcggtagcggaacccgccgcgggcgcgcgcccggcccaggggagtgggtcggcgcctgcgcagaggcccgccacgcccacacacaggnccaccgcccccaccggccggacggcgcgggggattcccagtcctggcnnnnnnnnnnnnnnnnnnnnnnnnnnnnnnnnnnnnnngggcagcctgtgctgttccgtgtgcgcggcgcatacgcacctgggttgtctcgagcctgcggtagtggccagatcccagacatccgagtagatcccgtgaaaaggtctcccacgtgggctgtggacagggcccaagggtagcagagctagcagaggcagtgacggactgtgtggcaggtcatttgcaaggag

SEQ ID NO: 365068 - DNA, 544 bp, Homo Sapiens
agtgtgctgagtgcctccactgggctgaagctcacagggccaaggcccttgtgtcgccttttcccgagggagtctctcgcttcctcatctagacaggaggaccgtgaaggaggagcaggcggaccagccatctgtcaggtgtgagtcctgctctagcactggtgtagccctgggtggggtctagattcaaggggaatggacatgaacactgtgaacaccaccagagcccccaaaacaggacaatgtcatcacaggctgctataaaaaaaatgccaacctgagatactagcccagcgaaacagttttccaaaatgaggatacaataaaggcatttttggacaatgaaaagagaatttgccaccagcagacatttaaagaaattctaaatgcagaaagcaaaggtgatctcaaatggcatgtctggtttgtgaagaaagtggagcaaagagaataaataggtcagtaactccaaattaacagtggctatatcaatactttgtgagattaaaatgtttcataaaaatacttgggaacccccaataaa

SEQ ID NO: 365069 - DNA, 331 bp, Homo Sapiens
gcttaggggaaggttcaccctggtagtgaagcccagcccctccaatgcacatgggtgtcccacacccaggacagagctgcgttgtgttggcaggtggaacaagctgggaatggctttgaagtagctatgcaacagtggctactgcctgtgacagcctcttctgtgacatgtggcatatgctgcctcgaattgggattatgcatgtgtggtctgtctctacaatctgagaagcaaaaagctaaatatatttcctatagtacccagcacagtgacttgcaccaaacaggtgttgcaaaaataatgaacgaataaaacttgaaagttgaaaatg

SEQ ID NO: 365070 - DNA, 461 bp, Homo Sapiens
  misc_feature (99)..(177): n is a, c, g, or t
  misc_feature (198)..(237): n is a, c, g, or t
  misc_feature (358)..(367): n is a, c, g, or t
tttgtaagcaaaattgccccgtgtttctacctccagagaagatcactatcagacaaccccacacatgaacgtaacatctattttcatttaaaaaattgnnnnnnnnnnnnnnnnnnnnnnnnnnnnnnnnnnnnnnnnnnnnnnnnnnnnnnnnnnnnnnnnnnnnnnnnnnnnnnngagacactgtgccccgccctnnnnnnnnnnnnnnnnnnnnnnnnnnnnnnnnnnnnnnnntgaatatttcctttgagcatcgtgtcaacactcaaaagtttcggattttagattactgagttttcagattaggaatactcaacctggataagtcagttttctttggctgctttccaggttnnnnnnnnnntgtcttttctttagtttattgcctcaacatggttttccttgagatgatcttattggaattcactcaccttcgtgaatctttaaaatatttatta

SEQ ID NO: 365071 - DNA, 778 bp, Homo Sapiens
  misc_feature (481)..(481): n is a, c, g, or t
  misc_feature (491)..(491): n is a, c, g, or t
  misc_feature (637)..(648): n is a, c, g, or t
taggctaggtacgaggctgggtgtgaatcggcacgaggctcagtatcccacgtctaaatctatagcagccagaactgtagacaccaaaatggaaagcaatcgatgtattccaagagtgtggaaataaagagaactgagatggaattcaagagagaagtgtctcctcctcgtgtagcagcttgagaagaggcttgggagtgcagcttctcaaaggagaccgatgcttgctcaggatgtcgacagctgtggcttccttgtttttgctagccatatttttaaatcagggttgaactgacaaaaataatttaaagacgtttacttcccttgaactttgaacctgtgaaatgctttaccttgtttacaatttggcaaagttgcagtttgttcttgtttttagtttagttttgttttggtgttttgatacctgtactgtgttcttcacagaccctttgtagcgtggtcaggtctgctggtaacattntcccaccaanctctcctgctgtccacatcaacaagctaaatcatttattcatatggatctcctaccatccccatgccttgcccaggtccagttccatttctctcattcacaagatgctttgaagggttccgattttcaactgatcaaactaatgcnnnnnnnnnnnngtatgtattcttcactactgagtttcttctttggaaaccatcactattgagagatgggaaaaacctgaatgtataaagcatttatttgtcaataaactgccttttgtaaggggttttcacataacataaa

SEQ ID NO: 365072 - DNA, 705 bp, Homo Sapiens
ctgttgaaaattcagtttttaatatttcattattttagtcacataattgccctgtcagattgtgttctgttatctggaagaccaaaatggatgctcctttatcaactaagaagaaccctaaagttaagaaaacgaaagttacctatgggtggagggttcagggcttggttggcatgggaacttcgcaaattcctaaggctacaagaaaaaacacaatcttgctaaatttgctaaaaataggagctattgggaaaattgtcagaaccttaccaaacctgatttacaatccaaaccacttatagctctgattggacaaaggaccagccttacaaaaattctttcctgataagcaaccgaagacctcgagccagtgtcagccagtttatagagactgcatgcaaactttgtgtccaatagttcaccttttgacatgaagggccaagttccaccttattttaatgttaaaaccttaccccaaagtgaacgtgggatttgtgttacatatgtttatccattgcacgtgtgttcaacttccctcatagatatgtataacttttctcccaaaactgctgaatatgttttactctattgtgtgatacaggccctgtgaggcataaaaaccaatctgcccttttccctctgggaagagagcacttttggcataagctggagactgtctcttcccgctgtgcaaactgaaatgag

SEQ ID NO: 365073 - DNA, 1264 bp, Homo Sapiens
  misc_feature (452)..(473): n is a, c, g, or t
  misc_feature (477)..(575): n is a, c, g, or t
  misc_feature (1144)..(1168): n is a, c, g, or t
gcaggtggggccactgaagccggagcatgccgggcaggggtcaggccctggcggggcgagggggcctccttggctccttgtcgccggatgcccgtcctcgttctcatcttcccgcctgccgccaggcctttccgtggggtcccgatattttcctttctgcttctacccactgaagctggttcgtcgccagggtcggccacgtgcccgccttgggtgctcccacagcccgggaggtgcagctgcgtccccagaccctcgcgggggtctccagctgtaggcagcccctgggcaggaggggcttctgcgtgttcaggccaccccggcttccctggcctgtggctccagtctcctctgggctcctgactacccagtgtggctgcttctcccgggtgggagagacacagcgaggaccttatccctccccatcaccaccctggcaaagtcaagccgcnnnnnnnnnnnnnnnnnnnnnnattnnnnnnnnnnnnnnnnnnnnnnnnnnnnnnnnnnnnnnnnnnnnnnnnnnnnnnnnnnnnnnnnnnnnnnnnnnnnnnnnnnnnnnnnnnnnnnnnnnnttgaagaagcctcagcggaggcgatacggcctcctcgccaacactgaggaccccacggagatggcctcgctggacagcgacgaggagacggtctttgagtcccggaatctgagatgatgctgagccaggggaggcggcccttccagcagccatgagggaaggacaggagatggggcccaccccagtgcccagcaaccccctgctccaccgctcattcccctgctggccccggggctggtctcacccagtgccaacccgagagctccttttggaacctgcacagcccgccgacctgttgccacctgcacccaccgctggaccatgcagcctcgcctcctggatgctgtcccagcctggccgagggtcccaggtgaagactggagggaccccaacagccaccgcccaggacgctgaggctcccttgcctgactgtgacttgtgcctctctcctgcccccgtggggacatggcagcccagagccaaggctgggtgggcaggtgacccaaggaacctttctgggaacaccttctcgccgggctgggaacaataaatgcagccatgtctctgcnnnnnnnnnnnnnnnnnnnnnnnnnaactcgaggcatctatgtccggtgcgggagaaagagtaaggaaatggcacatggtcatagctggtttcctgacccagctttcttgtacaaagtgga

SEQ ID NO: 365074 - DNA, 567 bp, Homo Sapiens
agcaggcagtgtaggcaggtaatcatcagagagaaagcccatctttctaagccagaggatgaggaaaaggggccccctgggtgccagggagtctggggggaaatcctgaagagcaaagacctgaaaagaggattctctaattctgtacatgagctgaattccgtgctcagcccagagctgcacatacaagagacagagcccaggcaacacagccacactctgaactgacactcggaccaccaccaccaaacagaaggcaacgcaggacctgcagactaaggctaacgaggctgattgcctgacaaaacagaaaaaaaagaaacattcttcagggaattttaagcagaacacagagtctcccaacataaaacagacagtcctcactgcacagcagttcagaactgtaaaaatgaccttccaacctgaaactgccatgtgctgttcataatcattaatgggtaaaattgtgatttttttcctgtcttttgaaaattgtcaaaacattgataatcttgtactgttagaaatgtataaggaaacaataaagtaaatatttttgtaaaaaaa

SEQ ID NO: 365075 - DNA, 754 bp, Homo Sapiens
ccacgtgttcaaggctggtactggggcctggcaccctttaaggtcctctgtgcccaccccacctcccatccagctcggcagcctggtgacgcaggaggccccggctcaggacagcctgggcagctggatcaactcttcccctgacagcagtgagaacctgtcggagatccccttgtcccacaaagagaggaaggagatcctgactggcaccaagtgcatctgggtgaaggccgcccggcggcgctcgcgggccctgggaaccgaggggcgacacctgctggcacccgcgacagagcacagcagcctgtccctgcactcactgagcgagggcgacgatgcgcggccaccaggcccactggcctgcaagcggccgcccagccccacactacagcatgctgccagtgaggacaacctgtccagcagcacgggcgaggccccgtcccgggcagtcggacatcatggggacggccccaggccctggctgcgtggccagaagaaaagcctgggcaagaaaagggaggagtcgctggaggcaaagagaaggaagcggaggtcccgatccttcgaggtcaccgggcaagggctctcccaccccaagacacacctcctggggccccatcaggcggagcgcatctcggaccacaggatgccagtgtgcaggcacccagcccctggtatccggcatctgggaaaggtcacgctacctttggccaaagtcaggctccctccaagccagaacacgagcccgggggag

SEQ ID NO: 365076 - DNA, 467 bp, Homo Sapiens
ctcaaaccaggccctgaggatgggccgggcaaggaggaagctccggagctggacgaggccgaattggactacctcatggatgtgctggtgggcacacaggcactggagcgaccgccggggccagggcgctgagccctcgtgctggaatggttgtctggtatctgaactgagcctgctggctggaccaactgtcctcgaaaagacacagctggcttccctagtacagagaacagggcttgggccactttggagagacagaatctagtcctgggcaacttcacatccgtcctcctgtctcagggctggcagggggagcctggaattaccccctagtgatggaatgacagggtctggtggggactgaattccctggccctggggtcatagcttgggctgttccttctctgatacgggaagagaccccaatcagatttttcaaattaaagccagtcctgggaaatctcaag

SEQ ID NO: 365077 - DNA, 1523 bp, Homo Sapiens
  misc_feature (149)..(149): n is a, c, g, or t
  misc_feature (256)..(256): n is a, c, g, or t
  misc_feature (501)..(547): n is a, c, g, or t
  misc_feature (688)..(696): n is a, c, g, or t
  misc_feature (739)..(781): n is a, c, g, or t
  misc_feature (801)..(869): n is a, c, g, or t
gggggctgggcacgttggcagggcgcggggtgcgacgtggatatgcatgagacagaggggcaggagagatgtggggtaaaaggggaggagagagttattgggcggggaaaacgagctactgaatagagggacaggggcgagcgatgggngatcaggccgtttaggtccagaaattgattgaagagtggagaaaagggtggagggcctattctgtagcgtctacgagaccgattgatcaaatgtgtacgaagagtgngagcaggcgcgaaggaggaagagttcaatggacggtagtgtcatgacgtgacacaaacgtgagattagtgatggactgtaagagagacgggggatgatagaggatgtgacgggtggggagtgttggggtggataggggatgaaagatacgggagttttataccgtagaggatagtgaggaatatagataaggcggaagggcggatacataagtggaggcaaggtgtggtggcggatactgaggcnnnnnnnnnnnnnnnnnnnnnnnnnnnnnnnnnnnnnnnnnnnnnnntaggctaaagaatatggtaagggtataggggtttgaacggagtggcagagggggaaagccatagaggaagggaagaggaggagcggggacagcataggacaacgtcgtaggcgtgggggtggatatttgattgcgggtgcnnnnnnnnnagaaatgggggattgaagatgtggcggggcagaaactattgtnnnnnnnnnnnnnnnnnnnnnnnnnnnnnnnnnnnnnnnnnnngtggaagactagggtaagannnnnnnnnnnnnnnnnnnnnnnnnnnnnnnnnnnnnnnnnnnnnnnnnnnnnnnnnnnnnnnnnnnnnagcagttttaccgaggacgggagggcgtagggggggcgggcaggggcaagggtgaaaataaggcgcactagtaggggccactttgtcaaagaaagctgggtacgggtaagctagggcccctcgagggatactcttagagcggccgccctttgtttaggggggagataggtgtggggtcagagagcaagctatctgtacttgtgcgtttctcctaccagattgtgcatgcctcctgtgggcagagcctgtgctgacttgctcctgggtctccagcatcacccagtctggagctgaggacctgggtacctacagatttccttccacactgtcagaattgagatgaaggaagcccagagaaatcaagtaccctccaccaggcagagcaaagtcctgggtgcccaaaatccagggaaggcaagggctgggggtacaagcagaggatctgaagaggtatatgagagtggccagcacagacctggcataagcttggtgctcagtgaaggttacctgatgttgctgggcaccaggggtgatgcagtgcaaagggccttggccaacccactttgcagcatagctgggtgacctggtacagatcacatcgcatttcagaagctcagtttcccctcaggcagagaaagatgacaagagaagcct

SEQ ID NO: 365078 - DNA, 1322 bp, Homo Sapiens
  misc_feature (44)..(79): n is a, c, g, or t
  misc_feature (647)..(647): n is a, c, g, or t
  misc_feature (785)..(795): n is a, c, g, or t
  misc_feature (828)..(838): n is a, c, g, or t
  misc_feature (983)..(1003): n is a, c, g, or t
aacgggaaccgagcgcagcgagtagtgagcgaggaagcggccgnnnnnnnnnnnnnnnnnnnnnnnnnnnnnnnnnnnnagtcgacggtaccggacatatgcccgggaattccgggccattagagacgctttctagacctgtcgttaggagtgcgtactcagaatggaactgaacatggatctttgctgttacctagtgtactcctgctcttgcctagtgcttgtatttgtccacggatattacattaaaggcgccggtcgctccctatctggtctgaacaatgtcctgatgcagtactgaggtcattagtgaatctgttcatattagagtagtcctcccggagctcgagatctcatgtgaactgcacgctgacctgggagatactcctgtgactgtggagctctggaaggcttggtgggagtgaatttgcccacaccttacaattgtggcaggatccagaagagcctgtctttttatatccattccttgatgtcattggctctcccaccgatttcattacggtgccacgcagtcattggatctgggtagtccggaaaacaaaaggagggaagacagcctggtaatgaataaagatccttaccacagttttctcatgggaaataacataataaaccctttcatcttnttttttttcctttaagaattaaaactgggaaatagaaacatgaactgaaaagtcttgcaatgacaagaggtttcatggtcttaaaaagatactttatgtggttgaagatgaaatcattcctaaattaacctttttttnnnnnnnnnnncaatgtatattatgttcctgtgtgttgaatttnnnnnnnnnnntactttacttggatattcatgtaatatataaaggtttggtgaaatgaactttagttaggaaaaagctggcatcagctttcatctgtgtaagttgacaccaatgtgtcataatattctttattttgggaaattagtgtattttatnnnnnnnnnnnnnnnnnnnnngactactacaggttaagataatttttttacctgtcttttctccatattttaagctatgtgatttgaagtacctctgttcatagtttcctggtataaagttggttaaaatttcatctgttaatagatcattaggtaatataatgtatgggttttctattggttttttgcagacagtagagggagattttgtaacaagggcttgttacacagtgatatggtaatgataaaattgcaatttatcactccttttcatgttaataatttgaggactggataaaaggtttcaagattaaaatttgatgttcaaacctttaaaaaa

SEQ ID NO: 365079 - DNA, 794 bp, Homo Sapiens
  misc_feature (368)..(376): n is a, c, g, or t
cctgaacatgagccttactccatcacaggggaacacacacattcgacccagtcacaaacatgctgtcttgggatgtaggcaaaaataaatccacaaaagctaccaagtttgaaggggaccatgagtcttcaggctggagcttccaaaccagatgaaaaccccacaattaacctgcagtttaagatccagcagctggccatttctggactcaaggtgaatcgtctggatatgtatggagaaaagtacaaaccctttaagggcataaaatacatgaccaaagctgggaagttccaagttcgaacctgaagggagcatttgctgagggaatagtcttgcacattttttcatttcttacttgtctaaaagtnnnnnnnnntatcagcctgtctcctaggtcagtcccctcctggacccacccgctcccttttttccttagccttcagtgccatggaactaatcaagggaggaaaaggtcaccagggagaactggacagaactgaaacacagcaacaccagttctcaaggacaaggtgtgtgatgggggtaggaagcttggtgcttatgtaaccattttaaacgtggtttctataggaaagaccaacatttgtttagcttgcttggctttaattatctaaagccaatgaaagacttctttgttgattttttaagatagaaagattaaaagaaagaaagatgggaagaaatgaatgttagtcaagcaaggccacttacggattgctcatgaagagaagaagaggaaaagagtaaggagttagacgagaccttaatgaaga

SEQ ID NO: 365080 - DNA, 458 bp, Homo Sapiens
ggccgctcgcgcagcgcctcgcgcacactgcggactgcgggcgtgcacataatccgcgagcaagacgaggccggcccggtggagatcagcgcctgagccgcctcgggatcccctgagaggcgcccgcggtctgcggccagtggcccgggggaaagctggggctgggaagcccgggcgcggcgcgctggggacgaggggaggtcccgggggggcgctggtgtctcgggtgtgaacgtgtatgagcatgcgcagacggaggcgggtgcgcggaggcggcagtgttgatatggtgaaaccgggtcgcatttgcttccggtttactggctgtgtcctcacttggtataggttgtgccctcttaggaccacatagattattacatttctggcccaatacccaaaagggttttatggaaactaacatcagtaacctaacccccgtgactatcctgtgctcaacc

SEQ ID NO: 365081 - DNA, 512 bp, Homo Sapiens
ctgaccatctagtccttgtcatctgggcaccctcacacatctccttaaccacacttaatctccaaataagtacgataacatagtcatagtcccacccaacatgatgcagttatcttgcatacaactgaagacaactaaccctttccccaacagagcccaccagcagtggtggagatgtcggtccatgagcgcacacacaagactgagggactgtcggccctcccaggtggtgtcaacacaacatcacacacaggtgggggggcctgatagcccagcacccatgatacagggcctaccaatgcttaaaaccacacccagggagcccacagaggcactcagtgggtggtggggtgatggatacacatctatcaggcacagggcggaggtgggcaccactgagttgcactcagcaaacacattgggtatcttgtgcccaaggcctgtatttgtggagctgatgttctagtgagagacagtaaatgtgacaaaagtaaaatatatcagatggtgag

SEQ ID NO: 365082 - DNA, 896 bp, Homo Sapiens
  misc_feature (54)..(55): n is a, c, g, or t
ctgcaaggtacaggcaaagctgatgcagacacatgaaggccaatgggcgccccnngatgtggtgttccagacaagtttggggctgagatcaaggccaaatgttcgaagaaagcggctacgccatccagggtctcaaatggcaacataaatgaaatcactttctgcatccagaattacaccccaaaggtgggcgagtatgccacatacgaggccattcgcaaggcgttccgcgtgtgggagagtgccacaccactgcgcttccgcgaggtgccctatgcctacatccgtgagggccatgagaagcaggccgacatcatgatcttctttgccgagggcttccatggcgacagcacgcccttcgatggtgagggcggcttcctggcccatgcctacttcccaggccccaacattggaggagacacccactttgactctgccgagccttggactgtcaggaatgaggatctgaatggaaatgacatcttcctggtggctgtgcacgagctgggccatgccctggggctcgagcattccagtgacccctcggccatcatggcacccttttaccagtggatggacacggagaattttgtgctgcccaatgatgaccgccggggcatccagcaactttatgggggtgagtcagggttccccaccaagatgccccctcaacccaggactacctcccggccttctgttcctgataaacccaaaaaccccacctatgggcccaacatctgtgacgggaactttgacaccgtggccatgctccgaggggagatgtttgtcttcaaggagcgctggttctggcgggtgaggaataaccaagtgatggatggatacccaatgcccattggccagttatggcggggcctgcctgcgtgcatcaacactgt

SEQ ID NO: 365083 - DNA, 1046 bp, Homo Sapiens
  misc_feature (928)..(960): n is a, c, g, or t
aatttccgggatcgcggggcaagatggcggtagtgcgtcggctgctgccccgggtctggcagaactcgggtgtttggggctgagacagtggcagctgcggccccgaccccaagtgcggggacctccgggcgaataaagaaaaaataacaagcttttctgaagtgagaagctgttctcagccacgagtcctgtgcaagatcactaatgattacctggcatttctgcgacacaggcaggtcctcagggtttgtgcaagtttgcaaacatgttcaccctgtctcagacctcgagagcatggttcatcgatagagcccgtcaggcacgagaagaaaggcttgtgcacgaaggaacgggagcgggcagctgttgtgatccaggcccatgtccggagttttctctggtcggagtcgactgcagagagatatcaggagagagattgatgacttttttaaagcagatgaccctgagtccactaaaagaagtgcacttggtattttcaagattgccaggaaactgctgttcctattcagaatcaaagaggataatgagagatttgagaagttgtgtcgcagcatcctgagcagcatggatgctgagaatgagcctaaggtgtggtatgtgtccctggcttgttctaaggacctcaccctcctttggattcaacagatcaagaacattttgtggtactgctgtgattttctcaagcagctcaagcctgaaatcctgcaggactcccgactcatcaccctgtacctcacgatgcttgtcaccttcacagacacttcaacgtggaaaattcttcggggaaaaggggaaagtcttccaccagcgatgaaccacatttgtgcaaatataatgggacatctcaaccagcatggattttattctgtgctgcagtgctgtgatgggctgtttcctgatttggttnnnnnnnnnnnnnnnnnnnnnnnnnnnnnnnnntccgttggcagaagctggtatgactggcagttgtctcgctagaggaaccttctacttcataccataattaaacggcttctaaaata

SEQ ID NO: 365084 - DNA, 839 bp, Homo Sapiens
  misc_feature (455)..(455): n is a, c, g, or t
gcacaggatggaaaaatggaaacaggtgatgtcattgtctatattaatgaagtttgtgtccttggacacactcatgcagatgttgtcaaacatttccagtctgttcctattggtcagagtgtcaacctggtgttgtgtcgtggctaccctttgccctttgatcctgaagaccctgctaacagcatgggtgccaccccttgcaataatggagaggccacctccagtgatggtcaatggaagacacaactatgaaacatatttggagtacatttctcggacctcacagtcagttccagatataacagatcggccgcctcattctcttgcactccatgccaactgatggtcagctagacggcacgtatccaccgcccgtccatgatgacaatgtgtctatggcttcatctggggccacccaagctgaacttatgaccttaaccattgtgaaaggtgcncagggcttcggcttcactattgccgacagtcctacaggacagcgggtgaaacaaatacttgacattcagggatgccctggcctgtgtgaaggcgacctcattgttgagatcaaccagcagaatgtacagaacctgagccatacagaagtagtggatatacttaaggactgtcccattggaagtgaaacttctttgattatccatcgaggaggtaagacaaacactggctcagcaataaaatatgtgggtaaaatagtaggatcatttaataatattgttaaaatgcagatttccttggagttgaatgaaattatactttaaaaaataaagcttaaagagtgagagagaaaaacatgaattaaaggaaactttgtttttgaattc

SEQ ID NO: 365085 - DNA, 903 bp, Homo Sapiens
  misc_feature (398)..(406): n is a, c, g, or t
tttgagaacaccataccatgggaactttaattagaacagagacatgtttcgtacaggctgaaaaaccagaaaccccgggaaggttatgcttagctttggagaccagaaatcaagctagccatggctgctgtgtcactgggcagaggacagggtcccaggatgctggaggacacagcagcttctttccatctgatgtgaatgctccaggcagaggctgtctggtcaggctgagctgggctcatggtgggtcctcgggttgggaattttccagaggagattcgcagcctccaatgcagagaaatggccttggggtgcaccacgtccccttggccaatgtggtggattatgctaggtccttggccaatcattgcttgaggaaatagctaagaattgggagnnnnnnnnntacagtgcagagagaagttcttatagcacaggaccccggagaaaaagctaccaagggaatgttggacattgagtcaagctgatctgagctcaagggagcttgggcatgtcaactccccctcctgagcctcagttttctcctctgaaaagtggcaatatgacctatgtcactgggttatttgaatgattgtacaaaaatatagcctgacaatgaacaatggttaaatccagagcagggcaaggtaagcccatcttggtctctcccgtgatgactttggaccacggggcttagagagaagttcaaactaaatacagagggctttaacccaggatacaagagttatcaaggtgacagcaacttgaggtctcccatatatgactgtgggactcaacgactatgacctcattctgcaaatgaagtccaggccctacttttttgtttccttccttggttgacaccctttaatctgccctcgtgccgaattcgccacccaggcc

SEQ ID NO: 365086 - DNA, 494 bp, Homo Sapiens
gccttggatgagcagatgctgcaggagggcatccaggcctcgcttcttgacgggccagcccaggaaccccagagcgcaccatggctgtccaagtcctctgtctcctctctgcggctgcagcagctggagcgcatgggcttccctacggagcaggcggtggtggcactggcagccacaggccgtgtggagggtgccgtgtcactgttggttggaggacaagtgggcactgagaccctggtgacccatggaaagggtgggcctgcccactccgagggtcctgggcctccctagcccaggcagagagtggggcacaggcaggcccttgggtgctaagggctgggctgcatgtgggtagcccgagctcctactctgtctaaagagggccacagtggggagcaggggcacctctggaggcaggagaggccccccagcatgctgccctagtacgtgtttagaataaaaaccagtttgtttttcaacctggacctccttgg

SEQ ID NO: 365087 - DNA, 669 bp, Homo Sapiens
  misc_feature (316)..(316): n is a, c, g, or t
gacctggctgaggttctgttccggccgagctctgggagcctggggctcagctggaagtggaagggggccccgtgggggggcaggtcctcatccgtggcgcccaggaggaggcctgggccttggtgtggctcgctgcacaggctgcccggcggcggcggggccagcacaggtgcatggtcgttcacctccaggatctcgatggacagggtgccggtggcggtgcggggctgggaggcgtcatcctgggccaggacgatggctctgtaccagccgcccttgaggaagggggacgccgggctgagcacgtgctgggtcntggatccggccagtgcctgcgtccacttgcagccagtctcccgggtcgtagtccttggagtagctgagcctctgcagctgctctgtgtcagggtcccgggcagagaaggtggccaccagagtgcctgggggtgccccctctgctaggctggtccgaagtgggttctcctggaacacggggggctcgttggtgtcctgcacatgcacgcggaccttggcctggccccgctcagccctaagggcagccgcctgcagcggggcctcattctgcaccgacactttgagttcgtagtgttcacagctctcatagtcccaggccttcacaatggacagaaacaccctcgtggtcttggg

SEQ ID NO: 365088 - DNA, 628 bp, Homo Sapiens
ggaaagggaaccaacacggtggatgggctcgcgcttctggccgctgtgctccgacactggctggcacgtggacccacatgcccccacatctttgtggccaccaactttctgagccttgttcagctacagctgctgccacaagggcccctggtgcagtatttgaccatggagacctgtgaggatggcaacgatcttgtcttcttctatcaggtttgcgaaggtgttgcgaaggccagccatgcctcccacacagctgcccaggctgggcttcctgacaagcttgtggctcgtggcaaggaggtctcagacttgatccgcagtggaaaacccatcaagtctgtcaaggatttgctaaagaagaaccaaatggaaaattgccagacattagtggataagtttatgaaactggatttggaagatcctaacctggacttgaacgttttcatgagccaggaagtgctgcctgctgccaccagcatcctctgagagtccttccagagtcctccccagcctcctgagactccggtgggctgacatgccctctttgtttccttatctccctcagacgcagagtttttagtttctctagaaattttgtttcatattaggaataaagataattttgaag

SEQ ID NO: 365089 - DNA, 1196 bp, Homo Sapiens
gctggggtgttcctacttgagaagagagaccatctcccttggacccctctgtcttacctctaatctgttttgtagggcctctctgaaggggttcgttctcatgaagtatcctggggtggaatccgggagtcttcctacagcaacaacactgtatttttactgaggcagggcaggttcccctgtggactcctgctctgtgttttggatctttcctagtctcttgttttgagactaaagaagcaatatctttcttcaaaataaactttattcctaatatgaaacaaaatttctagagaaactaaaaactctgcgtctgagggagataaggaaacaaagagggcatggcagcccaccggagtctcaggaggctggggaggacactggaaggactctcagaggatgctggtggcagcaggcagcacttcctggctcatgaaaacgttcaagtccaggttaggatcttccaaatccagtttcataaacttatccactaatgtctggcaattttccatttggttcttctttagcaaatccttgacaggcttgatgggttttccactgcggatcaagtctgagacctccttgccacgagccacaagcttgtcaggaagcccagcctggcgagctgtgtgggaggcatggctggccttcgcaacaccttcgcaaacctccttcctgtcctgaaacccttggccaatccaaatactgcaccaggggcccttgtggcagcagctgtagctgaacaaggctcagaaagttggtggccacaaagatgtgggggcatgtgggtccacgtgccagccagtgtcggagcacagcggccagaagcgcgaggccatccaccgtgttgggttccctttccaattcatccataaggacagcgactgtgcagtggcattgttaacggctttggccacctgtttgaggtatatgctctaccctgatgagttggggtcagtgatgactttgaccctccttttgtccccacacattctgtgaagtttggcacaaagttcgggcacaaagttcctcagaggaagtctgcaaatcggaatcgtaacccaggactttggggagtaacccgccttgagtagcccctcgtgcgaatcctgtgcccaaggcaaatttctcaaatggagcgaataaattcgaaccagccaagcggttccggggtaaaatgtaaccggccaaatccc

SEQ ID NO: 365090 - DNA, 846 bp, Homo Sapiens
  misc_feature (63)..(118): n is a, c, g, or t
  misc_feature (193)..(313): n is a, c, g, or t
  misc_feature (347)..(416): n is a, c, g, or t
  misc_feature (431)..(451): n is a, c, g, or t
  misc_feature (500)..(511): n is a, c, g, or t
tcctgggatgatcccttaccaattcccggttaaaacccccccagctggggtccaagttgtcannnnnnnnnnnnnnnnnnnnnnnnnnnnnnnnnnnnnnnnnnnnnnnnnnnnnnnncagagatccacatctatatttataacaccatttatggatgaaaattaaacaggtgtccgggtgcggttactcatnnnnnnnnnnnnnnnnnnnnnnnnnnnnnnnnnnnnnnnnnnnnnnnnnnnnnnnnnnnnnnnnnnnnnnnnnnnnnnnnnnnnnnnnnnnnnnnnnnnnnnnnnnnnnnnnnnnnnnnnntgtggtgtcacgcacctgtagtcccagttacttnnnnnnnnnnnnnnnnnnnnnnnnnnnnnnnnnnnnnnnnnnnnnnnnnnnnnnnnnnnnnnnnnnnnnnagagaccctgtctcnnnnnnnnnnnnnnnnnnnnnttaaatgggtagtgacgttaagagatatatatcagcttctagtaaaagnnnnnnnnnnnnaaacctgctagctacatttacattatgtaaaaataaagggaataatcactgagaataaagcagttgagtatttataacaataatattttatggggcgcttataatgtttataatattgtaaaccactgtgtactctattcatttaatgctaaatgacttgaccattcttgtgggataagagatcattaaaaaaatgctagggccgggcaccatggctcaccacctgtaatcccacggactttaggaggcacaagagcaggtgggatgaacttgagctccaggaggtttgagaccagcgctggggcaacatgcatgaaaacctcccgtctcgtacc

SEQ ID NO: 365091 - DNA, 715 bp, Homo Sapiens
  misc_feature (416)..(429): n is a, c, g, or t
cctgttcccgggaatggcaggggcgcccgcgcgaggagggtcgccgggagagccgcctctcctccaagctggagcagccgtgacccagattgcgaccgcggcggcctcgccctgcctaatccccccctcttcttcctccaggggcaccctttggagaagaaccccagcctggggtggggacgcaccggctctccgacagctcaaacacagacagatcttctagagccgagggaatttcttttcgcagaagccattactccccccgagagaaggctgcaaagctgggaagcccagggtgtgctcctcccgcccttttggacccccgggcttgcaccggctgcactctgagaaccagctgcgcgcggagcggtgcaatgcagcacccaccctgcgagcctggcaattgcttgtcattnnnnnnnnnnnnnnttacggagggctccgggggtgtgtgttggggaggggagaccgatgcttctaacccagcccccgctttgactgcgtgttgtgcagctgagcgcgaggccaacgttgagcaaggccttgcagggaggttgctcctgtgtaattacgaaagaaggctagtccgaaggtgcaaaatagcagggagaggacgcgcccccttaggaacaagacctctggatgtttccagtttcaaattgaaagaagaggggcgccccccttgtttgaaaataaataaataaataagtgcgaa

SEQ ID NO: 365092 - DNA, 604 bp, Homo Sapiens
  misc_feature (432)..(497): n is a, c, g, or t
ggggggcagaaaccttgctcgttctactttataaatagtagcttatcaaccggcagccagtgaaacactaaacccaaaatttgcctcattgtgtcatggagattattcctcaaagggagaaacctgccaagccctttccaagaggtgctatgtgccagcccaatccccaaaccctgccaagccacggagtgctttctaggctggtgacaggccccagtgccagctaaatgcccgtatgctcggggatggaaacagaaaggagctcatttcactgctctcagagagctggagtgcagaggaccttagaactcaagtgcaccagaagcttcaagagtttagcggcgagtgagctcttctccccaccaaacgaaattctatgcacaatatgtaacacatatggatgcagtataataccaaaaatgcagttctatnnnnnnnnnnnnnnnnnnnnnnnnnnnnnnnnnnnnnnnnnnnnnnnnnnnnnnnnnnnnnnnnnntccctgctctcaggaaactcacattttagtggattttttaatcaaactcagcatccagaaaattcaacctaaacagggctacatcccaaaacctgcactggaagtcc

SEQ ID NO: 365093 - DNA, 479 bp, Homo Sapiens
tgcatgtgctggcctcgctgcctttgctgctcctgctggtgacgtctgcctccacccacgcctggtcgagacccctctggtaccaggtggggctggacttgcagccctgggggtgtcagccaaagagtgtggagggctgtaggggtggcctgagctgtcctggctactggctgggcactggagcaagccgcatctaccccgtggctgcggtcatgatcaccaccacgatgctgatgatctgccgcaagatactgcaggggcggcggcgctcacaggccaccaagggtgagcatccgcaggtgaccactgagccctgcggaccctggaaacggcgggccccaatctcagaccacaccctgctccgtggggtcctgcacatgctggatgccctcctggtccacatcgaaggccacctacgtcatctagccacccagcggcaaatccaaataaaggggacttccacccagagtgggtaaccg

SEQ ID NO: 365094 - DNA, 499 bp, Homo Sapiens
gcggccgcgctgctgcaggaacggcggtacctgcgtgctgggcagcttctgcgtgtgcccggcccacttcaccggccgctactgcgagcatgaccagaggcgcagtgaatgcggcgccctggagcacggagcctggaccctccgcgcctgccacctctgcaggtgcatcttcggggccctgcactgcctccccctccagacgcctgaccgctgtgacccgaaagacttcctggcctcccacgctcacgggccgagcgccgggggcgcgcccagcctgctactcttgctgccctgcgcactcctgcaccgcctcctgcgcccggatgcgcccgcgcaccctcggtccctggtcccttccgtcctccagcgggagcggcgcccctgcggaaggccgggacttgggcatcgcctttaattttctatgttgtaaataatagatgtgtttagtttaccgtaagctgaagcactgggtgaatatttttattgggtaataaatatt

SEQ ID NO: 365095 - DNA, 2039 bp, Homo Sapiens
  misc_feature (66)..(74): n is a, c, g, or t
  misc_feature (108)..(108): n is a, c, g, or t
  misc_feature (158)..(158): n is a, c, g, or t
  misc_feature (1133)..(1247): n is a, c, g, or t
  misc_feature (1275)..(1311): n is a, c, g, or t
  misc_feature (1397)..(1473): n is a, c, g, or t
tggttttttgcttgagtaagaacaatccttttttattttcttctgtacagtctaaagctacagagnnnnnnnnntgcactcttcccttgccggctcctggtaccattngtctgaacagctgtagttggtctactccttacttagcacttgattgtgtngggaaacaaaggtgggaggggtggggaatactggaaataatcagggcaatttttttctttcccataattggactagataccttggtactgttgaccttctcagcatctcccttttgccttagatggcaacaccctccagtctgtagcagagcagtccaacccagattagttgcagcccggagccttagggttgcagcctccctggtcttcctccacacagttgttcaccaacagaccagacctcctctaaccacagtgtcaacatagtatcggaaagagagccatttcttaggggaataaaacagtttcgcttctttagctcatctgtggtgtcagaatccttggagctgaagagagaaatcaaaagagcatgatgatggctgcctggtttcaggtggaacttaatgcattgatctttagaagctccttctgttggaagttgagtacctgtgatctaaaatgtcctggaggccagatgacatctaaaatatgtgctttccaaccagcacagctggcgctcttagctcctgattggttgtgtgttttattaaggatcagtgcagttaagtcgtattttaaagtgttacctcccctcctaacccttccccttcttggacactgaaggaaaaggccaactagggtgttagccctctgggcaccaaggaaactaacagctttctcaaagcggtgaccactcaggccagcccagacaaatctgagggatggccagtgcactccaatgatgggacaggcctaacaacacatgtaagcttccccgagagctttcagctggttcacctctttgttctctagactcttaagtactgactgctttgacttttgtgattatgttatggtgatgtgtagtcagtgtaccaatatgttcacaacctaggatcatgataatggagtgtgttttgggttttttttaactgttcagaaaaaaagtaaattacaaatataagattaaagtgnnnnnnnnnnnnnnnnnnnnnnnnnnnnnnnnnnnnnnnnnnnnnnnnnnnnnnnnnnnnnnnnnnnnnnnnnnnnnnnnnnnnnnnnnnnnnnnnnnnnnnnnnnnnnnnnnnncaagggggggcggccgccaaaaaagatnnnnnnnnnnnnnnnnnnnnnnnnnnnnnnnnnnnnnttctttgtactcaggcgtcggcgccccaagtggcggcgcggcaacgccggacgcgcggcgggcggggggcttcgtacgcacgcctnnnnnnnnnnnnnnnnnnnnnnnnnnnnnnnnnnnnnnnnnnnnnnnnnnnnnnnnnnnnnnnnnnnnnnnnnnnnnaggaccatatggacgagccagacgccgaccccccgcacgcccgcacaccgcacccgccgcgcgccggctcgcccgccagtatcacgcaacgcaccgcatagcgggcacgagacgggaccacggggaaagcacgctaacgaccgactaatctgggacacgccggactatcagcgaaacgtagacgctccgtttaatcggtgcatagcagcgcaccaagctacacgtaacctgaccctcatcacacgcccctaccgcccagcgacgagcgctcagtaccctcaaccgcaccgacgcacaccctgtgcgagatataccgcgcgcatcctacccactcccggactgctcgcctgaccccaccggccgcaccctcccgtgctacctcgcaaccgacacacgcgcactgtaggacctgggcgcacgagcacacgtagcatcgaatcatggctcggctcgcgcgctccacccgtcacatcagacggacacagagattagatggtgcgccatactcggagagcacctagcgctctcgcgagtacgcgatatgcgaatgcagtcgcacacgacac

SEQ ID NO: 365096 - DNA, 945 bp, Homo Sapiens
  misc_feature (86)..(86): n is a, c, g, or t
  misc_feature (159)..(159): n is a, c, g, or t
accttctcccttcatttcaggagcagcctcagaaccaaagtgagaccagtccagccctggagatgaaatcttgcagctgggtggcnactgccatgcagggccttcacacggtttgaagcctggaacatcatcaaagcactgcctgatggacctgtcacngattgtcatcaggagaaaaagcctccagtccaaggaaaccacagctgctggagactcctaggcaggacatgctgaagccaaagccaataacacacagctaacacacagctcccataaccgctgattctcagggtctctgctgccgccccacccagatgggggaaagcacaggtgggcttcccagtggctgctgcccaggcccagaccttctaggacgccacccagcaaaaggttgttcctaaagtaagggcagagtcacacgggggcagctgatacaaattgcagactgtgtaaaaagagagcttaatgataatattgtggtgccacaaataaaatggatttattagaatttcatatgacattcatgcctggcttcgcaaaatgtttcaagtactgtaactgtgtcatgattcacccccaaacagtgacatctatctctgctcatgaatctgcaatgtgggcagagattggaatgggcagctcatctctgtcccacttggcatcagctggcgtcatgcaaagtcatgcaaaggctgggaccacgtgagatcattcatcatacatctggccgttgatgtcggctgggaactcacctggggctgctggcctgaatgcttatcaggtggcctctccttgtggcctgggcctcctcacaacatggtgtctggcattcacaggatgaggcatcccaggatcgcaagagccatgtagaacgctgcatctagatacatacctatgcccatggaagtcgcatggcatcacctacacactctccatgacgtacac

SEQ ID NO: 365097 - DNA, 588 bp, Homo Sapiens
  misc_feature (55)..(64): n is a, c, g, or t
agacgtaccgatccaaggctggccacgactaccacgtgcgctcggagcacacggnnnnnnnnnntgaggagcccacagacaagtcccctgaggctgaggacccgctgggtgtggagcggaccccaagcgggcgtgtccgccgcacgtcggcccaggtggcggtgttccacctgcaggagatagcggaggacgagctggcccgcgactggaccaagcggcgcatgaaggatgaccttgtgcccgagaccgcacggctcaactacactcgaccagggctccccacgctgaacccccagctgctagaaggcatggaaggaatgaagtgaaggagaaaggccacgtcaactgtcccaacgactgctgtgaagccatctactccagcgtgtccggactcaaggctcatctcgccagctgcagtaagggggcccacctggcagggaagtaccgctgtctgctgtgtccgaaggagttcagttctgagagtggcgtcaaataccacatcctgaagacccacgcagagaactggttccgaacatcagcagacccacctcccaaacacaggagccaggaaacattggtgcccagaag

SEQ ID NO: 365098 - DNA, 568 bp, Homo Sapiens
aattgtgtgttgggaggatgtgaattgggaggacggtgtcactagactgtggattagggatggtaaagtagggaggatgctattttgcaactatagtaacgacttagtgttttggaaaggaaaagaagttaaacttgaaatacgtgactagaacagttgtcatgtttataatgtgaaaagggtgaaatcatttgggggaggggccgtctgtaagaaatcattatgcactatggcttcctcctctggtctgggaagaagcggggactggctggccctcaggggatctgtaaatcccagaaaacagtatttttaacagcaagatgtcattcaacattggtggggaaggaagagaaaaaaatcaaactattccatagaactagctggccccctcactcccatgcccttcccactcagcctgggcccctccccgctccattcataaaagctgagagggttgagctaatcttcacaaattgtaatatttttgtagtatctgttagttccttcgtcagttctgcagaaccttgccctttccttttgtaatgtgaataggggaggacaaaaggac

SEQ ID NO: 365099 - DNA, 500 bp, Homo Sapiens
tcaagaatggaatatttgatttattctaaaatttgtgaatatttaaaaattttcaatataaaaagccagaggcctgggcagggacaggcccaaagatgtctctgcctgagaactaagtgatggggcaaacccacttaatagtggccagagagcaaaggagagttataagaaaccgtaaaccaggctagggcagattcaccttcctaggggcaagacaaagaaggaagggggtagacagagcctactaagtaagctgcttatcccttctgccacatggttcagattcaatctaagaatgtgtatggtgacacctagtcagagacaggccctggcaggggacataaaaaacaaataaggcttcacccttcctctcaaagagcttacatgcaaagacgaaggaccaaccaggtacagaccagatgcacagttactgagcttatgctttgataaatgcttagccagcagcatcaatgaacactatgaaagcccaaaaagagagg

SEQ ID NO: 365100 - DNA, 441 bp, Homo Sapiens
caaactactataaaattataaagaaaccaatggatttatccaccgtgaaaaagaagcttcagaaaaaacattcccaacactaccaaatcccggatgactttgtggccgatgtccgtttgatcttcaagaactgtgaaaggtttaatgaaatgatgaaagttgttcaagtttatgcagacacacaaaagatttaatttgaaggctgattcagaagtagctcaggcagggaaagcagttgcattgtactttgaagataaactcacagagatctactcagacaggaccttcgcacctttgccagagtttgagcaggaagaggatgatggtgaggtaactgaggactctgatgaagactttatacagccccgcagaaaacgcctaaagtcagatgagagaccagtacatataaagtaaaatgacatggatttaaatcaattgttt

SEQ ID NO: 365101 - DNA, 450 bp, Homo Sapiens
  misc_feature (19)..(19): n is a, c, g, or t
  misc_feature (91)..(91): n is a, c, g, or t
aagtattgaaatcccccgnagccctgttcccgccttcgaatacccaacctacctataaaatttataaaagaaacccaagggatttatcccncccgtgaaaaaagaagccttccagaaaaaacattcccccaacacctacccaaatccccggatgactttgtggcccgatgtcccgtttgatccttcaagaactgtgaaaggtttaatgaagctgattcagaagtagctcaggcagggaaagcagttgcattgtactttgaagataaactcacagagatctactcagacaggaccttcgcacctttgccagagtttgagcaggaagaggatgatggtgaggtaactgaggactctgatgaagactttatacagccccgcagaaaacgcctaaagtcagatgagagaccagtacatataaagtaaaatgacatggatttaaatcaattgttt

SEQ ID NO: 365102 - DNA, 617 bp, Homo Sapiens
  misc_feature (236)..(276): n is a, c, g, or t
accagaagtgccctggaatccagccgtgtcagccctcaccccagggcccccaggaaagcatggcctgcttgaagccctctgctccctgcagaaactggggcgaggaggagctttttccttcagttagatctttccctttccctgctgcctcgctccctttagcttttggagccctaaagttagtggacaagacactgggataaagctctatggctgctggaaggaggtctgagtcnnnnnnnnnnnnnnnnnnnnnnnnnnnnnnnnnnnnnnnnncctcatttgcagaagtcttgctaccagttagggtgttaagagcatctccactgggcgaagacctggcattttgttttccactgttaagagaatgacacaccccctgtcatgtaagggaggagctattgagttagacattttccctatgggaatcctcggtttggtttgtgggaaaggagggaatggataagtgatttttatctctaatcgtcaacacagctgttcttccactgaatttgtgctattgcatacatgtagccatctttcttttcactgcagcagtgtttatcagtagttcaaaatgatttatttgctcctgggaaataaaaccttttttatta

SEQ ID NO: 365103 - DNA, 478 bp, Homo Sapiens
  misc_feature (99)..(139): n is a, c, g, or t
ccttccctgctgcctcgctcccttagctttggagccctaaagttagtggacaagacactgggataaagctctatggctgctggaaggaggtctgagtcnnnnnnnnnnnnnnnnnnnnnnnnnnnnnnnnnnnnnnnnncctcatttgcagaagtcttgctaccagttagggtgttaagagcatctccactgggcggagacctggcatttgttttccactgttaagagaatgacacaccccctgtcatgtaagggaggagctattgagttagacattttccctatgggaatcctcggtttggtttgtgggaaaggagggaatggataagtgatttttatctctaatcgtcaacacagctgttcttccactgaatttgtgctattgcatacatgtagccatctttcttttcactgcagcagtgtttatcagtagttcaaaatgatttatttgctcctggggagtaaaaccttttttatt

SEQ ID NO: 365104 - DNA, 394 bp, Homo Sapiens
  misc_feature (205)..(245): n is a, c, g, or t
agcggggacaatcacttatccattccctcctttcccacaaaccaaaccgaggattcccatagggaaaatgtctaactcaatagctcctcccttacatgacagggggtgtgtcattctcttaacagtggaaaacaaatgccaggtctccgcccagtggagatgctcttaacaccctaactggtagcaagacttctgcaaatgaggnnnnnnnnnnnnnnnnnnnnnnnnnnnnnnnnnnnnnnnnngactcagacctccttccagcagccatagagctttatcccagtgtcttgtccactaactttagggctccaaagctaagggagcgaggcagcagggaagggaaagatctaactgaaggaaaaagctcctcctcgccccagtttctgcaggg

SEQ ID NO: 365105 - DNA, 584 bp, Homo Sapiens
atgactacagtctgcaaaccatctaaattccccacttcaaggaacttaaagtctagcaggggaaattttacttacacgtgagtaattaacaaataacttagaattggcttaataccagaaaagggtggtgcagacctactgctatagcggtaccttaagagaaaagagaaatagtagagccttggatgatcagaggatcaggaaagtcttcatgggttgaagtgaattaaatcagtctcagagactggaaggattctgataggcaaagagaaagccacataaaggttcagctaagaagtgctcatctactgtttggatacatggctgaaagatcatgaagaaacttgaatgtcagacagtgagatctgtttctgatctgttaatcatttctctttcttacattctccatatctgttgccccgagtccccttccaggaaatggtctgtttcctgggtactaaaaggattgtcaactaaactgagaaaaagttttctgtgcaagtacaatttttcctcttccaaaggaatttgccttttagctccggcccccattagataattatgaacaatatggaaagtttaag

SEQ ID NO: 365106 - DNA, 747 bp, Homo Sapiens
gaattctgcaatagaggccagacgtggcgcagcgactcggaggttcgcctccagcttgcgcatcatctgcggccgggtcccgatgagcctcctgttgcctccgctggcgctgctgctgcttctcgcggcgcttgtggccccagccacagccgccactgcctaccggccggactggaaccgtctgagcggcctaacccgcgcccgggtagagacctgcgggggatgacagctgaaccgcctaaaggaggtgaaggctttcgtcacgcaggacattccattctatcacaacctggtgatgaaacacctccctggggccgaccctgagctcgtgctgctgggccgccgctacgaggaactagagcgcatcccactcagtgaaatgacccgcgaagagatcaatgcgctagtgcaggagctcggcttctaccgcaaggcggcgcccgacgcgcaggtgccccccgagtacgtgtgggcgcccgcgaagcccccagaggaaacttcggaccacgctgacctgtaggtccgggggcgcggcggagctgggacctacctgcctgagtcctggagacagaatgaagcgctcagcatcccgggaatacttctcttgctgagagccgatgcccgtccccgggccagcagggatggggttggggaggttctcccaaccccatttctttccttccccagctccactaaattccctcctgccttataaaaagaaacaacgatctccatacaaaaaaaggg

SEQ ID NO: 365107 - DNA, 1394 bp, Homo Sapiens
tcgaacctggcgccgttacttagggcacctctcttgtgccctgttggaccggggaaaacccagtggcgagctattttatgcagagcagttgccttgggtcccactgtcacaaaggcaaccagtcctgctgctacctgatcacctagagtcacacaccccttccctcatcaggcacacccatgaagacagtgcctccctcctccagctgtaaccatggataccacacatttctcatctcattggcccccaccccagagacctccacctcaacttctggctgtccctaccctgactcaccgccatggagatcaccctccccgaagctgtcgccagggtgacccaacatccagttctccggctctcaccatggaaacaaactgtccctgtccccaggcccactccagttccagaccaccctccatgctccacccccaggcggtttggaccccaccactgttgccatggtgaccaaactctggagtccgaggtaacagaacacctgtccccctaggcttttccttgtgggacaacggggccctgttcaccaagctgttcccatagagactgtcaacgttgtcctcatgacaaccagacttccagttctcaggaacttctcattgtgggccagaagtcctgggtgcctcctactagggctaccctactgcaccccatcaggggcctgatggctgccccttccccagacagggctggactcctggagctgctaagccaccctccgtttgcacgttaactctatgccggatagcagctgtgcacgagacaatcttgcaacacccgggcatgtttgtcgtcgtcctacaaatgaggaaaccgagcctatggcgtgccctggtctgttgagatatgcaagcactgagctcctcttttgtcctctgagaccccatctccattctcacccagttcctctctccttccctgacccccacccacatttccctccttagagatccaggagggatggaatgttctttaaaattcaacacccaccaggctctaagcggcgatctgtgctaagaggtcaggacccagccgaagtcctcggcgttgacaggcagctggggggacatgatccatggacaaggccatcccggccgtgggagaccccagtcccgaagtcttgcctgcaggagtactggggtccccctggggccctctttactgtcacgtcatctctaggaaacctatctctgagttttgggaccaggtcggtttgggtttgaattctgcctcttcttgctcactgtgtgaccaagtgacaaactccttctgaacctgtgttctcccactgtaccagggctgttctgtggtccccgtgagtgccaagcatacagtaggggctcaataaatccttgtttcttttaatgaatgagaaa

SEQ ID NO: 365108 - DNA, 241 bp, Homo Sapiens
aagcctttctatggctaatgctcgaactccatcctctctttcctagaaggcaatctgggataaatttttcagaactccatttgttgcctctgttagaaagaaaacactgggcaagatgaacctgcaagtagagtaaatggtttatttcttatttgcttttaggagtgtgtaaggagattttttggtctcccgtttttactttataaaaaatgagtgagtgtgccaagcggttgtggctcat

SEQ ID NO: 365109 - DNA, 347 bp, Homo Sapiens
tttaactgtaagagtttgatcttttcaaatgtgttcagaaactaatttggattctttgattctagtatctcaacgtggtttatttttagattctgataagtgaaatggatgtccttgtggagctctggcctccccagcttatctatcagtcctgctgtcctcacctccttgcctctttccatgcttacccttaagccaccatctttctcaagctagcgtgtgtgtttctagtgtagttgggccctccaatattcaaggggtccaagcatctgtgggattcaaccaacccgcaggatttggaaatattttggttgggaaaaaaatggatggggttacatctcctaact

SEQ ID NO: 365110 - DNA, 500 bp, Homo Sapiens
ggcgtttgagacatgtccaggcggaaacagagcaacccccggcagatcaagcgttccctcggagacatggaggccagagaggaggtgcagttggtgggtgccagccacatggagcaaaaggccacggcacctgaagccccgagccctcccagcgcagacgagctggagccggtggtgcaggatgggcagaggcgcatacgggcccgactcagcctcgccacgggcctgtcctggggcccgttccatgggagtgtccagaccagagcctcatcccccaggcaggcggagccgatgagaaaactgaggctccaagatgttaagtcaattgcccaaatacccaggatcaaacagcagagggagaaatagaacccacatctgcctatccccggagaccctcgcaagctccttaatggtagggctgaggggctggcaccggcccaggagtcatccccacgggctgccctttgccctagctgcagtcacccctccctgtccgcctg

SEQ ID NO: 365111 - DNA, 509 bp, Homo Sapiens
tagtcgacagcactgctttacagaatgtaaaccgtgcactcccaggaaaatcgcagacacagcacgcctctttgggaccgcggtttatactttcgaagtgctcggagcccttcctccagaccgttcgtcccacaccccgctccagggtctctcccggaggtacaggcctcgctgtaggccccgggaacccaacgcggtgtcagagaagtggggtccccttacgagggaccaggagctccgggcgggcagcagctgcggaagagccgcgcgaggcttcccagaacccggccggggcgggaagacgcaggagtggggaggcggaaccgggaccccgcagagcccgggtccctgcgccccacaagccttggcttccctgctagggccgggcaaggccgggtgcagggcgcggctccagggaggaagctccggggcgagcccaagacgcctcccgggcggtcggggcccagcggcggcgttcgcagtggagcagggcaccgggcagcggccgc

SEQ ID NO: 365112 - DNA, 736 bp, Homo Sapiens
gggacagcagtcactgcgctgcagggacagtccccaagtgccaaggcacagcctaaaggggcctgttcccaccatggcatccgtgacaagaaccaggagccagaatgcaggtttctgggacttgtcagctcccttctgagtgccctgttgaggattcctagaagtccagacacctcacccccctaacctggatggaccacgcagagccaataggaatacttttctgtggacgtgccatgttggaatcccagatctccctgccctgccagcccctgccagcttcctggggacccaactgaccctgaagaaagcctctgatgggcctagaacagagaaggtgacccaggaccttgcccagcctttctggacaactggaagacagttacgcttcgtcctccacctctccctccaacaaaaggatcttagcaagtgttggagaggtgctgaagtcgtattaggaccaaccagactttttctttgaggatactcagaaggagtgaaggagaatggaacagggggtgtgaataaatgagctttctccatgtgtgattcaaagtggtttaacccatgcctcaccttctagaacacccgtggccctctctagccatgagaagtgtcaccactagccatcaaaatgctcccaaaagtccaacctttgaccaaactacatttcagattttcatttcagattttcttaaattctggagaaaaaagaaaataaagtaaaagaataaat

SEQ ID NO: 365113 - DNA, 384 bp, Homo Sapiens
catgtatatttgtacaaaaagtttttaaagttatactaacttatattttctatttatgtccaggcgtggaccgctctgccacgcactagctcggttattggttatgccaaaggcactctccatctcccacatctggttattgacaagtgtaactttattttcatcgcggactctggggaagggggtcactcacaagctgtagctgccatacatgcccatctagcttgcagtctcttcgcgctttcgctgtctctcttattatgactgtgtttatctgaaacttgaagacaagtctgttaaaatggttcctgagccgtctgtaccactgccccggcccctcgtccgccgggttctaaataaagaggccgaaaaatgctgcaaaaa

SEQ ID NO: 365114 - DNA, 956 bp, Homo Sapiens
ggacggcagtactctcgggtaaaaggtagcgaggcctgggtggccgaattcggcacgagggtacccatcaagctctactgtaacggggacggcgagtggctggtgcccatcgggcgctgcatgtgcaaagcaggcttcgaggccgttgagaatggcaccgtctgccgaggttgtccatctgggactttcaaggccaaccaaggggatgaggcctgtacccactgtcccatcaacagccggaccacttctgaaggggccaccaactgtgtctgccgcaatggctactacagagcagacctggaccccctggacatgccctgcacaaccatcccctccgcgccccaggctgtgatttccagtgtcaatgagacctccctcatgctggagtggacccctccccgcgactccggaggccgagaggacctcgtctacaacatcatctgcaagagctgtggctcgggccggggtgcctgcacccgctgcggggacaatgtacagtacgcaccacgccagctaggcctgaccgagccacgcatttacatcagtgacctgctggcccacacccagtacaccttcgagatccaggctgtgaacggcgttactgaccagagccccttctcgcctcagttcgcctctgtgaacatcaccaccaaccaggcagctccatcggcagtgtccatcatgcatcaggtgagccgcaccgtggacagcattaccctgtcgtggtcccagccggaccagcccaatggcgtgatcctggactatgagctgcagtactatgagaaggagctcagtgagtacaacgccacagccataaaaaagcccaccaacaacgtcacccggcagggcctcaaagccggcgcaatctatgtcttccaggtgcgggcccccaccggggaggctaagggggctaacaggggagatgtcttccagaccatgaagaagcgggtaccgaa

SEQ ID NO: 365115 - DNA, 505 bp, Homo Sapiens
gccgtggtgaagaaggcggcgaagaggagctccacagccgactcctgcaagacagccccgggctgcactgagtctcgggcggtggagtcgcccggggcgctgacccgacggccccgtggagatgaaaagcacccaaatttactattgcgaaaagccagggggcagggaagtgctattaccgccgcgactgtgtgtacggttttgaagtcgattaaatctcaagtccaccatttgggaaagtcagctgtagcaacaggcaacattaggatctatccacccgccttgcgatggttcccagagagaatgcgggaacttactctaagcactcttcttggtgctttaagcatattcactcattcggttctcacctcccctctgtgaggcacaattgctgctcttgttttatggagttgaaaacggagactccagagtagtgctcaaggtccctacagctagcactcccggcaggagtccagtgctcttcaccacctggtggtgcggccgc

SEQ ID NO: 365116 - DNA, 378 bp, Homo Sapiens
cgattcaggagctatttacagcacctgccagcatttctaatgtctcagtgctgcccctgagaaccagcgccggcgtcacaaccagccccattccccctcgtgttctcagctgtagccaagccctggtccagcagtagctgggtaggaaatgcatgcagctcctgccggggcctcccggccccaacccctctctcctgacaggcgatttgctgggctggaggacagggccaggtcttggccttggcaccgtcctgggtcacgagtgtatggttctggtcactctgctgtggtgcgaggatgaaggtgccagcccagtgtgggcaaccctcacagccagaatgttccagtgccccgcacctcgggaccctggatgtgtgc

SEQ ID NO: 365117 - DNA, 1024 bp, Homo Sapiens
  misc_feature (883)..(899): n is a, c, g, or t
gctggagtggcgaattcggcacgaggctctctttacgccctatgagatctgggtggaggccaccaaccgcctgggctctgcccgctccgatgtactcacgctggatatcctggatgtggtgaccacggaccccccgcccgacgtgcacgtgagccgcgtcgggggcctggaggaccagctgagcgtgcgctgggtgtcgccacccgccctcaaggatttcctctttcaagccaaataccagatccgctaccgagtggaggacagtgtggactggaaggtggtggacgatgtgagcaaccagacctcctgccgcctggccggcctgaaacccggcaccatgtacttcgtgcaagtgcgctgcaacccctttggcatctatggctccaagaaagccgggatctggagtgagtggagccaccccacagccgcctccactccccgcagtgagcgcccgggcccgggcggcggggcgtgcgaaccgcggggcggagagccgagctcggggccggtgcggcgcgagctcaagcagttcctgggctggctcaagaagcacgcgtactgctccaacctcagcttccgcctctacgaccagtggcgagcctggatgcagaagtcgcacaagacccgcaaccaggacgaggggatcctgccctcgggcagacggggcacggcgagaggtcctgccagataagctgtaggggctcaggccaccctccctgccacgtggagacgcagaggccgaacccaaactggggccacctctgtaccctcacttcagggcacctgagccaccctcagcaggagctggggtggcccctgagctccaacggccataacagctctgactcccacgtgaggccacctttgggtgcaccccagtggnnnnnnnnnnnnnnnnnagggttggttgagttgcctagaacccctgccagggctgggggtgagaaggggagtcattactccccattacctagggcaactccaaaaaagtccttttaaataaatgagctaatttagtgctgtg

SEQ ID NO: 365118 - DNA, 619 bp, Homo Sapiens
ggtgtcttaaatgtttatctacgtctgaaagggcaaacaacaatagacaatccactgtggtcttcaagtgggaataaagcacaaagatggaatgaggctcatgttaatatatacccaataacttcatttcagctcatttttgaaggtatccgaggtcctggaatagaaggtgacattgctattgatgatgtatcaattgcagaaggagaatgtgcaaaacaagacctagcaactaagaattccgttgatggtgctgttgggattttggttcatatatggctttttcccattatcgtcctcatctctatcttaagtcctcgaaggtgaccttatcctggcagaggctataaaagattcaccaggcactggcatgaagaaagagtctttgtaaatggacattgaacaaacaaactacccaaagattccctcccactgactactgactcaaaaataaaataataaaaacaaatttttttaagcactggggataaaaagacatcatggaagtataacttattccagactaaacataaaagataatcttgacctgagtagagaagagaccttcaggtgcttttgtggctaaaaagattacagcgtcatctggttgaactctgga

SEQ ID NO: 365119 - DNA, 392 bp, Homo Sapiens
  misc_feature (90)..(90): n is a, c, g, or t
  misc_feature (115)..(115): n is a, c, g, or t
  misc_feature (117)..(117): n is a, c, g, or t
ccttccgaccccccccagtcttggaggtcagttgtgtaaagttccccgtgtgggtggccgtactcggggcgggcgatggggttcagcccntgcttccccagtctctgggtcaccngnattttcccacccctgttctccccgaggaggttgagctcttgagcaagttgggacttgggccggggcctggaagaatgattggctgggaggccgcgggagggaggccaggaggcccggaccagttgggaggagtgagcaggccccgggggagggggatgagcgcagtttgctcgctttcctcccctgccggccccctccgcccccacacacactcgggacgtcttcattgaagattcacttacaaaggaatgtttcactaaataaaagaaaaccag

SEQ ID NO: 365120 - DNA, 397 bp, Homo Sapiens
cttaaaactaaatgcatgactgcagagcggtagaggtgtatatttttcatactgtggggcaaagtatttgtgctgctttttggagatggactggaacgtctggtttctgtccccgggcccggcagctacgtctattttctgtagaaggtgccacagtgagacctggagccaccccttcctgccctggcgccgtttagagctgggagcccgtggactcccggcctgtttctaccttctattcaaccactctgacgtggggagacaagaagaaatagaactttttgatagtgtggtaaaaacattgatttgaactattttagtaaaaggagtaacaaacaagattgtgatagtgtctactttgagctagataaataaaggcctctttgtgagcctcctg

SEQ ID NO: 365121 - DNA, 252 bp, Homo Sapiens
tttacaaagagccttcaacaggttactttagttgcacagcagtgtgtggggggggaaacgtccctcttcccatctgtggcagcgcccgcccgcttcgctccgaggtcccccatgcggtgagcgtgaacccttccacagcacctctcggcgccccctaccccgccgcccgcgggggcaaaatctgggggcgagggggacccgggcgctgaggccgctgcccgcctatggggacgcggctgggaccgtggccgc

SEQ ID NO: 365122 - DNA, 878 bp, Homo Sapiens
  misc_feature (50)..(50): n is a, c, g, or t
  misc_feature (65)..(65): n is a, c, g, or t
tagaataccaaccttagttaataaataaaaggaaacataggtgactgcgnttctgggagaccatncagtttcctgagggcctctcaacagtcttctctgagactccactgccacttccactcgggcaagcctaatggtgcggccatgaagtttgtagccatcttgtcttactaatgccacggtgccaggctgcacccccaacaccagctggcacatgacagatgagttcatgctcatgggggtcatatttgtcaccaatgggtgtcagtttctccaggccatgcttggcaaacacacttttcagctttgcttctaaaagcaacaaccctcggaagaccttctccagagtgagcttttggtcctcaggctccgattcttcagaaatgcactctgtagtcttctccaaaatgtcagccacctccaccaagtccttacagaaactctggattccaaatatcttggcgtcttccacacatctctgggttcgcctccttatgttttcacaatcagctatagctctctggtatctcactgttaaatcttggacttctttctccagtttaacagcttttacccttaaggctcgttcagcaagagggggcccaagctcatcaggagggtcctcagaacggcagtcctcaccagcagttctctgggtggcagtgctgaatggaagcggccatcccttgctctcccacgcggcactccaggccagtaggcgctgcacccgcagccggcccgcccacagcgaccgtacggccatgtttccaatttgggctgagaggcagcgcacgcgcacttgctgcgagtgaagagatgctcccgcttaaaaaccagcctttgcgggcgtttccctctcaggacttccggacaccgct

SEQ ID NO: 365123 - DNA, 607 bp, Homo Sapiens
ttccggtgctttttaaatcgcttttctgagaggaattggaatggggaaggatctgccaaggaacttttgcagcatccatttttaaaaataggccagcctcctgtccagcttgactcgtctgattatcgctgcaaaggaagcaattaaggaacacaagccgctaagactgcaagccttacagcctcaccatctccctcatgagtaagactgaaataaaactctgctgcaggaaagatggaagaaaagacagtcaaatggggtgggggttctttacctttcaaatgaatagaaacttcttataagcctttttcctactccctcagattatgtaatttatttgtaagcctgaatcgcagcccaaacagggcagcaatgttgaagtgaccataaagtggtcacttccaccgtgaagcgaaagagccagtagtgaatcccctcattttgtgcattcactttgaagaaaaaggtttctcaaagatgcacactccctcttcatagtgttgtgtttgtttttaagttagagagtagtccctcttgcattcaaacctccttcaaaactccttacccaatgtgatgtttttcacttgcattgtcattagatgtccag

SEQ ID NO: 365124 - DNA, 503 bp, Homo Sapiens
aagcctgaaatgatggctttggtaactgtttactgggtaaccccactgtgacactgtccttttcatgtgatgtggaaacctacttctgtcctccaaaccactgaaatgtgtcatctagactgcagagtacttgagtgctttgcctcccgatatgccagagcttgtggtccaaagcccattcctgtgtgtccgtcctgccatttagccacagaaggctgcggagtgaggcggcagctagcctggccagtggctgtcccgtggaccgacacctgcgcccccttctgcaagcaggattttctggtgccaacactcattcatcattcccgatcaactaggatgaatttaagactgtgctaccatgtgttctcaagtggtagtttaaaaagtggatttttaaagtgcctttcaattgtctgtgaacgtctaaaggactgatttgtctcattttgactgttgagtctttaatgggtgccatttaaaaaacaaaatgctattttttaaaa

SEQ ID NO: 365125 - DNA, 629 bp, Homo Sapiens
attctgaaggtgggctgcggatcaggagccatctccctcagcctgttgagccagctcccccagagccgagtcattgctgtggataagcgggaagctgctatctctctgacccatgagaatgctcagagctatgaagaccccgcggccctggatggtggggaggagggcatggacatcattacccacattctggccttggcaccccggctcctgaaagactctggtagtatcttcttagaagtggacccaaggcacccggagcttgtcagcagctggcttcagagccggcctgacctgtaccttaatcttgtggctgtgcgcagggacttctgtgggaggccccggttcctgcatatccggaggtttgggccatagcatggctgccctgtggatgccttgtcagtgccgccagcctgaccagaggggaggtggatggcactttccagagcccaggttcttatggcatttcccagggttctgtgatttccccatgctctgcatttctaggatatttttaggacacctggattggctccatcacatcagagtggctgagggcagttgctctgtgttggtgaaattgctgtgggggtatcgggggatatggccagtaaagtattgagagacta

SEQ ID NO: 365126 - DNA, 919 bp, Homo Sapiens
  misc_feature (836)..(858): n is a, c, g, or t
ggggcctgggtggcgaattcggcacgaggggatgggggaggagcatgtccactgagtatcttccttatgttgctgtgatattgatagcttttattttctaatttttaaaaaatggtcatattatgagtcaaagagtatcaaatcagtgttggatggaccacccaagggtgaggagaggggctggaagccctgggcattaggagaagggagtgggtgctggcatggacatgactggatagaattttctcaggagggagcttggtggattttgaaggtaaaactttctgggtttatcatgttttaattttagagacagggagtgatgaatcatcaccggttgtccccttatctaactccataaaagtgggaatttcaaaagaacacctcatccaaggagctggggcagacttcattgattctagagagacctgtttcagtgcctactcatccctgccctctggtgccagcctccttaccatcacggcttcactgaggtgtaggtgggtttttcttaaacaggagacagtctctcccctcttacctcaacttcttggggtgggaatcagtgatactggagatggctagttgctgtgttacgggtttgagttacatttggctataaaacaatcttgttgggaaaaatgtgggggagaggacttcttcctacacgcgcattgagacagattccaactggttaatgatattgtttgtaagaaagagattctgttggttgactgcctaaagagaaaggtgggatggccttcagattataccagcttagctagcattactaaccaactgttggaagctctgaaaataaaagaaattgaacccannnnnnnnnnnnnnnnnnnnnnnaactcgaggaccacccggagaggtaccactcccttcatgtggaaacaacttcttcaaacaa

SEQ ID NO: 365127 - DNA, 517 bp, Homo Sapiens
  misc_feature (15)..(15): n is a, c, g, or t
tagactcggtgagcncaggctgatggaccgtgcagtccagtttgagccagcccagcagccctcaatcgggcgggcagggaagaaggcctcctactgccgggaagaggccagcgcgctccaagttccccgcaattccgcccttcccgcctggcacggttcccttgcaccgctgtgctccgctcccaggcttctgcccgccaagaatgcttgccccgggggcgcgctcgctggtcaggaacctgtcggcagcccccgggaacccctgagaatgcggaggtgggcccgagagctgcggcttcgatgccggggtgggagctaggcaggccgcgcgccgccgcagtcctgtcgcagcgcgtgccctggtccctccggaccgaaaaggccgaagccgtcccccgcgaccgaccccgcgcaactggctcgggtctgcacctagatggctgtgggccccacagggatggccgggcgggcccgttcggccgctacctcagggtcgccagtccccgcgcgcggccgc

SEQ ID NO: 365128 - DNA, 1353 bp, Homo Sapiens
  misc_feature (1094)..(1094): n is a, c, g, or t
agcggacggtggatgcggacgccgggaggaggagagccccagagagaggagctgggagcggaggcgcaggcaatgctcagccctggatgtagctgagaggctgggagaagagacgaccgctggagaccgagcggcgtggggaagacctaggggggtgggtgggggaagcagacaggagaacactcgaaatcaagcgctttacagattattttattttgtatagagaacacgtagcgactccgaagatcagccccaatgaacatgtcagtgttgactttacaagaatatgaattcgaaaagcagttcaacgagaatgaagcaatccaatggatgcaggaaaactggaagaaatctttcctgttttctgctctgtatgctgcctttatattcggtggtcggcacctaatgaataaacgagcaaagtttgaactgaggaagccattaggtgctctggtctctgacccttgcagtcttcagctatattcggtgctcttcgaactggtgcttatatggtgtacattttgatgaccaaaggcctgaagcagtcagtttgtgaccagggtttttacaatggacctgtcagcaaattctgggcttatgcatttgtgctaagcaaagcacccgaactaggagatacaatattcattattctgaggaagcagaagctgatcttcctgcactggtatcaccacatcactgtgctcctgtactcttggtactcctacaaagacatggttgccgggggaggttggttcatgactatgaactatggcgtgcacgccgtgatgtactcttactatgccttgcgggcggcaggtttccgagtctcccggaagtttgccatgttcatcaccttgtcccagatcactcagatgctgatgggctgtgtggttaactacctggtcttctgctggatgcagcatgaccagtgtcactctcactttcagaacatcttctggtcctcactcatgtacctcagctaccttgtgctcttctgccatttcttctttgaggcctacatcggcaaaatgaggaaaacaacgaaagctgaatagtgttggaactgaggaggaagccatagctcagggtcctcnagaaaaataatagaccaaagaaaatggcaccaggaatcacacgtggtggcacctaaaaccaaacaaaacttggaccaacacaaaaccccaaggcagcttagggataattaaggttgatttacccagtaaaggttattgatcccttttaggggtgagggactcccttgagtgcaacctcccatctccaagacactggctggttggaaaaacccccatttccctccttatatctattcaacctcctaggaaaaagggaaga

SEQ ID NO: 365129 - DNA, 633 bp, Homo Sapiens
gcggccgctccaacatcacctctctctcctagacgcccagtaccggcccctgtgagccgtgctggccccacccgaggccgcgggggccccagggcactcgcccccctccttagcattttcttttgtagaagtttctcgaaggtgcttggcggtcttgccttccccctccccacaggctctccttgtggggtcccaggtcctgctgccaagagcccctcaagagaagggctgaacctggggagatgtcactgccagggtgaggtggagccacatggcagggacaatgccggcagcctgagcccaggcaccccagtgcccgctgggcccagcctggggacagggaacctgccgggctcacagtgtgggagcagctggacaccaggcttcttggtgaaccggcgaggggccgagtcccgcctggtgggcatttgccgccgcctccccaccaccagtcactgcctcgcagagccctacactcccgcagccgctcctcagaggcctgtgcccatcgcaggcctgggaggaaagtgggcgcagagccctcctgctcacacagctgctgagacttcagggacccatcagaacttggtgccagcacagccccgacccgtggagggtcccttttacgcaccc

SEQ ID NO: 365130 - DNA, 1053 bp, Homo Sapiens
  misc_feature (921)..(929): n is a, c, g, or t
  misc_feature (931)..(991): n is a, c, g, or t
gcctgaagtggcgaattctccacgaggaggtgctgatcaatggaatcctccagcaggagcagtggatgaatgtctgtgttggtgatattatcaagctagaaaataaccagtttgtggcggcggatctcctcctcctttccagcagtgagccccatgggctgtgttacatagagacagcagaacttgatggcgagaccaacatgaaagtacgtcaggcgattccagtcacctcagaattgggagacatcagtaagcgtgccaagtttgacggtgaagtgatctgtgaacctcccaacaacaaactggacaaattcagcggaaccctctactggaaggaaaataagttcccttctgagcaaccagaacatgctgctgcggggctgtgtgctgcgaaacaccgagtggtgcttcgggctggtcatctttgcaggtcccgacactaagctgatgcaaaacagcggcagaacaaagttcaaaagaacgagtatcgatcgcctaatgaataccctggtgctctggatttttggattcctggtttgcatgggggtgatcctggccattggcaatgccatctgggagcacgaggtggggatgcgtttccaggtctacctgccgtgggatgaggcagtggacagtgccttcttctctggcttcctctccttctggtccgtacatcatcatcctcaacaccgttgggcccatttcactctatgtcaggtatgtgccttctctgacctggggtctctccagggagtcaggcggtcccatagaacttttcttttctatgaagatgaagtccttgagaagtaacgagaagtcctcttcttcctgtactgtaaacatttgatgttatctgtttatctttgtgggcagagcaaactttttaccacagtttcctggtacttggaaatgtattagagnnnnnnnnntnnnnnnnnnnnnnnnnnnnnnnnnnnnnnnnnnnnnnnnnnnnnnnnnnnnnnnnnnnnnncatcacacaataaaatgatgaacttaggaatggatctccttccgtctaggacgcgtaatccg

SEQ ID NO: 365131 - DNA, 645 bp, Homo Sapiens
  misc_feature (24)..(24): n is a, c, g, or t
ccttttaaagtccttttgagttgngcagtgccccctggccacccagaaccccatgagtttaacaccgaaaacattgaagtggtctacttgcccccgaacacagtctctatttcagcatctagatcaggggatcatgaggacctttaaggttaataacacacggtactctaacctcaatagaacatcatgaaaatctggaggaattacaccgctgaagatgccatcgttatagaaaaagccatgaaagccatcaagcacaaaacagtaacttcctgctggagaaaactgtgtaccgatgttgagcatgatttcacaggatttgtagcagagccagtcaaggaatttatgaaagagactgtggataagacaagagctaatagacatcaaccagaggaatcaacagaagatgatttaaatgaagatgccggtgcttccaaaccagcgttggacgataaggaagaaggcaaagaagtagtgccagaaaacaaattgactgtagacaatctggcagaagggttctgattattcaagactgctttagacttactgtacaacatggaccattgtgtgatacaggcactgaaactgaagcaaatgatgaaagaaggattggttttgtatagaaatattttataacaaaaaaaa

SEQ ID NO: 365132 - DNA, 343 bp, Homo Sapiens
  misc_feature (73)..(196): n is a, c, g, or t
ccaaatgaatcttttgtgcctggagggcagcatgggtgatatgtggattgtcacttcatttggaagcatctcnnnnnnnnnnnnnnnnnnnnnnnnnnnnnnnnnnnnnnnnnnnnnnnnnnnnnnnnnnnnnnnnnnnnnnnnnnnnnnnnnnnnnnnnnnnnnnnnnnnnnnnnnnnnnnnnnnnnnnnnnnnntgaggtctgaagcaacagtggcagttcaggggtggtgatcatggtgagttgctatctgaactcttctttcacctcctttgggttcccagtgtcaaaaagagtggtgtccttttttagcttaattaagcaggactgaacaaaaataat

SEQ ID NO: 365133 - DNA, 459 bp, Homo Sapiens
gcctccagctacttgttcacacgttgggcactagtgggtccacatcttgcagggggtgagtgcccgatggactagggccaaggcctggttgacagacggcccgtggggcccggtgtcactcacagctccatctctttgttttgaatgtccattctgagtctcagcccaggtggaccttaggaagggctggatccctgtccctgaacaccaactaccgagacagctgatgaggctggctcagtgtgtgacggaggcccccgggagtcagcagagccgagcgtacagtgcacatcaggcagagcaggccacgggcagggacgacgcatcgggacagggctctgcaggggaccgtgactacaggccagctgtgagtggtcccctacagaggctgcccacccaaggtttggttggggtgaaacatgatgacaacacatacacttaagaaggtgggaaccgggg

SEQ ID NO: 365134 - DNA, 350 bp, Homo Sapiens
  misc_feature (178)..(223): n is a, c, g, or t
ttgagactaggtatccctctgtcacccaggctggaggagtgcagtggcacgatcacaactccactgcagccttgacctcctgggcccaagggatctttccacctcagcctcctgagtaactgggactacaggagtaccccaccacatccagctaactgtttattttttgtagaaacannnnnnnnnnnnnnnnnnnnnnnnnnnnnnnnnnnnnnnnnnnnnntgtgagactctgtctcagtgtgtgacccccaaatgcaggaaagctctctttccaatctgaaactatataaatcaatgttttaagctagttgtcctttccaacataggataaattatttgtgtagagg

SEQ ID NO: 365135 - DNA, 291 bp, Homo Sapiens
aaaagttactttggttttaaggaataagaagccttgaaacactcagccctggactgaatcctccaggcaccagagctgtgctggtctggacccttccaccccacttgaaacctgttggccctgttgcaaccctctcttgctttccctgagaaccctaaggtgaccccaggggctgctgatggagacagtcacctccttgccctgctccctgcagcctctcactttggctgctttgctatcataaggaaggaaacataaaagctactttttaagacattacaaaggttaaaa

SEQ ID NO: 365136 - DNA, 487 bp, Homo Sapiens
gcggccgccgcttcacctacccctcactgctggtcagccacaggcgcatgcactcgggggagcggcctttcccctgccccgagtgtggcatgcgcttcaagaggaagttcgcagtggaagcgcaccagtggatccaccgctcctgctccggggggcggcggggccggaggcctgggatccgggctgtgcctcgggcccccgtccgaggtgaccgggacccgcctgtgctcttccggcactacccagacatcttcgaggagtgcggctgagcggcaccgcaggctggagttgagcctgaccttggcacgaaggactgacggatccctgaggtgggccactgagtcggggactccggaactgaaattcatgccctgggctttcctcaaggatccctcaagtttccaacttgtaaaaagaaaagtgcctgtaaagattcgaatagattagacttgccacccatctccccagtcttatttggggccgaggc

SEQ ID NO: 365137 - DNA, 583 bp, Homo Sapiens
cccacagtgctgggattagaggcatgagccactgcgcccggcccctggagcaagttatttcttacaaagctgctgaaggtaagattatcaaaattataaagcatttttcacactcaagtgaaacaaggttgacaaactcacttcgcaggtcacatgcctatacatcacttattatatttgggtctgaaacttctcacatgtttgggaggttttatgtgtcctcattgggaaaatgggtgtaattcagcataaaacctcatatgattgtcctgcctcatggagctgttgtatagatcccagatccatcccatgatttgttcctgtctgaggcatagaggcaggcaagccgtggattttgcacatggtgactttcccactgtgccatgatacagtctgcatcttatagcagtgcctttgtctcagggcctctgctggcagtctagaccttttgggcagaaaggagcttcaaatggctgtgataaggaatattaaaaattgtgtttctactttaattgtattggctgttcatgtatgtaggagttaaaataggccaaactggagaaataaacgcattctgtccacc

SEQ ID NO: 365138 - DNA, 473 bp, Homo Sapiens
  misc_feature (173)..(191): n is a, c, g, or t
ctggccagcttttcatgctggtccttcagagctgcagttatgccaagaccatcagcctgcctcccagtagaggcccttcacctggagaagtcagaaatctgacccaattccaccccctgcctctagcacctcttctgtccctgtcattccccacacacgtcctgttcacctcnnnnnnnnnnnnnnnnnnncacctttcttccgtctgttcactctgcggcctctggaatcccagctcttctctctcagaagaagccttctcttcctcctgcctgtaggtgtcccagaagtgagaaggcagccttcgaagtcctgggcattgggtgagaaagtgatgctagttggggcatgcttttgtgcacactctctggggctccagtgtgaagggtgccctggggctgagggccttgtggaggatggtcggtggtggtgatggaggtggagagcattaaactgtctgcactgcaaaaaaa

SEQ ID NO: 365139 - DNA, 407 bp, Homo Sapiens
aggaagaggatttgcaaggggtatttacaagtcacttcctttctaaatgttggatctcagaattcagagaaagagacaggaagtccagctcatagctgaggtattctcacaaatatgggaagtgcagaggaactgacgcttcttccaaattaacagacttgaaaaggcatggacgaaaaagtaataacaagagtagagcaggtgatttgcaggcgcccacagatgagggtgagcctgctcactgcttcctcttcccctccacagctgcaccgttaccgggaccatttgcacactttggtaaggcatagaccagttccctggtagcagcctggatcctccattcaaacaggaaaatgcaacataaagggggaaatcattcaggcaagacatgtactttgattttcttt

SEQ ID NO: 365140 - DNA, 532 bp, Homo Sapiens
gcggccgcacacctgtggaagaggaatgaatagagggggtgtgtgaaccttctcgctgcagactaactggcgccaccgaccaaactcaagacatgcttgatcaacaacccaaaacaaaccaccaggtcagacaacacccgcccgcggccgggccaggcgccgagcaggcagctgcggccctcgggaagcccggagaggggacccactccggcgccctgcccgcgtccccctttgtgggtgacagaatgcacgggaggacaccggggcagctcccatgcccacgagggtgccctccctcgggaactagggaaggcagaagagcccgctgaccaccagaaaaaacacggggacggcggggacaagggctgacccgtctccaccgagactgaacctcgagttctaaggctaagtacgggtttacttgctacttaagtggcagggagagaggggatttacttccttgggagtttgctctcagaaacgctgggggcaaagaacaccgcggtgcctggccccggaagccctcggggac

SEQ ID NO: 365141 - DNA, 571 bp, Homo Sapiens
actagtccacggttggctcaatggcatctgggttatttctaggctttgctttgtgaatagggttgctatgaatattcttgtacacatctcctggtgtacatgtatgagtttctctaggatttatccccagtattggattaactgggttatagggtagctgaatgttcaattacagcagataaactgttttccaaagtagttctctgcttttcttatctaggtctgcctgtccccaattagatgatgactctagaggcaggggaccctctcattttgaattaccactgcttagcattcaattagcactaggctggatatccaggagtccaagggcagaagcccaggcacctgaggcctcttagcctcagcgaatactaagtactatacagagtgaacagcatgcagggaccatatgccacgcacggaggcggttacggtcctactcagagcactagccatgctccttaaagctccatcttcctagcttcacctgattttgagtctcagagatcttccaggcccctcaattacaatgcaaatcccaaaagaaggcttaacctcagacaaacgt

SEQ ID NO: 365142 - DNA, 864 bp, Homo Sapiens
  misc_feature (47)..(47): n is a, c, g, or t
  misc_feature (504)..(770): n is a, c, g, or t
  misc_feature (773)..(774): n is a, c, g, or t
gtacccttgcaggatgaagggcaggccggcccttgatgtgccatttntgaataatagtcactgccgccgagtctaggatgtcctgttctaactcagccctgcctcggatgcaccaccgatctgtgcagagtgggtgtgggagtgtgggtgagggtcgaaatgccaaaggtctactttccagaatcaagtgccttctgcaaatcatgttggaaaagtccaaacctggagatgtccctgtgcctccgcccctacccaccccttttccttcagctgtgttaggaaggagaagttttcagaaccctctaggctggtggctttcaaacttcagaccatgatctgcagcaagaaacgtgccttccatcataaatcagtccatttgtttacaactgtgttccaagcaggtttcataaagaaattcttaaccttagaacctcggatatcctctatgttttagttttcatttttttaaaatgcttcttaaaattcactaaattgggctaggtnnnnnnnnnnnnnnnnnnnnnnnnnnnnnnnnnnnnnnnnnnnnnnnnnnnnnnnnnnnnnnnnnnnnnnnnnnnnnnnnnnnnnnnnnnnnnnnnnnnnnnnnnnnnnnnnnnnnnnnnnnnnnnnnnnnnnnnnnnnnnnnnnnnnnnnnnnnnnnnnnnnnnnnnnnnnnnnnnnnnnnnnnnnnnnnnnnnnnnnnnnnnnnnnnnnnnnnnnnnnnnnnnnnnnnnnnnnnnnnnnnnnnnnnnnnnnnnnnnnnnnnnnnnctnnaacaagttacttataccaacatctacatttcggccgccttcggccctcgaaaaacttttctacaccttttcgtttggcccgggggcccaa

SEQ ID NO: 365143 - DNA, 494 bp, Homo Sapiens
gactttaatgatgttcatttatttaaacgatctgtatgaatttggtgattttgtggatacgcccctgacagacaaggattcacagccgacggaagtcagggaggctccctgcaaattcttcatctccgcggggcctgcccgagccctgatcctgcagagccgtggggctgaggtagccgccggttgtggtccaggagtgcgtctttctggatgcggggcaccttcatttcaccgtagcaaccgggtaccaaaagtagaagcggatttttggaaaatgagtcattaggtcccaaagagaacctattgcaacatggactccataacgttcttgaggatcatcctgagaaactgatgtctctcgttagacaaaaatgcacgatttgcttgggaaaggggagtaaaaatggtgctggcatccattggctggctgggaacttgaaccagcagctccaacaagcgacatgtagaaaatgaggtataggccgggcgcggtg

SEQ ID NO: 365144 - DNA, 1102 bp, Homo Sapiens
  misc_feature (45)..(89): n is a, c, g, or t
  misc_feature (98)..(682): n is a, c, g, or t
aggtagcgaggcctgggtggcgaattcggcacgagggtgctgctnnnnnnnnnnnnnnnnnnnnnnnnnnnnnnnnnnnnnnnnnnnnngagatggannnnnnnnnnnnnnnnnnnnnnnnnnnnnnnnnnnnnnnnnnnnnnnnnnnnnnnnnnnnnnnnnnnnnnnnnnnnnnnnnnnnnnnnnnnnnnnnnnnnnnnnnnnnnnnnnnnnnnnnnnnnnnnnnnnnnnnnnnnnnnnnnnnnnnnnnnnnnnnnnnnnnnnnnnnnnnnnnnnnnnnnnnnnnnnnnnnnnnnnnnnnnnnnnnnnnnnnnnnnnnnnnnnnnnnnnnnnnnnnnnnnnnnnnnnnnnnnnnnnnnnnnnnnnnnnnnnnnnnnnnnnnnnnnnnnnnnnnnnnnnnnnnnnnnnnnnnnnnnnnnnnnnnnnnnnnnnnnnnnnnnnnnnnnnnnnnnnnnnnnnnnnnnnnnnnnnnnnnnnnnnnnnnnnnnnnnnnnnnnnnnnnnnnnnnnnnnnnnnnnnnnnnnnnnnnnnnnnnnnnnnnnnnnnnnnnnnnnnnnnnnnnnnnnnnnnnnnnnnnnnnnnnnnnnnnnnnnnnnnnnnnnnnnnnnnnnnnnnnnnnnnnnnnnnnnnnnnnnnnnnnnnnnnnnnnnnnnnnnnnnnnnnnnnnnnnnnnnnnnnnnnntgagccactgcgcccggcctcccctctcatttatgatgccctctgtgcaggcagacggctcttgggctcttttccccacctgtctctaacacaggccccacggtgatggccacaggcagtaaaggagaaatgaggatgggttggggagcggggagtcgcggcttggctcttcctggtttctgagagggacatcttcatccctactccccttggtccccaaccacagtcctgctgaagatgtggatgataatgctgccttgattctccaaatgaagacagctctattgcttaactctattgtacataggatacacgttcagtgtaaaataaagtgtaaaggggaattcaggcttaatgctgcacctagatataaatgctaatgatacttgggtttatagccttctgatcctttatttctgc

SEQ ID NO: 365145 - DNA, 881 bp, Homo Sapiens
gcggccgccactcgagcgtgcggcccatgtcctggctggcttccagcatgcagaaggacagtgacccctgggcttggcccagtcggaggaggatgctctgggggtcattcagctcagcagcagaggtgatgggccccctctcagctgcccactcaaggatctgggtcttggggaaggatggcagctctgtggtgttgacccccgggggctcttggaaggtgaccaggctggaattgtaggccaagtgcagtgggattcccagggcctggagatgcaggaagacactgctgtttacactgaggaccagaagcacctctcggggccaggtgccattttgcttggatgcctggagagtcagctccagctgtgacgggcccgttgggaactccaggaagaggacatggacttcaaggatggcattgggggcctgagccacgcagcccttcgagacctggctagtggtatatgtcacctcgcccctctcggggcccacaggctgaaggtcacaatggactgtttctgcaagacttgtggggctgaggctgcagctggccagcagcagggcaacagccagagggagcgtgccgcggtccatgctgtccacgtgggggcctgtgcgctgggccttatcctgtgtccagtggcagggctgcgggcgggcaccggggccggcgtgggctcgcacggggacccgaggggagcaggcggccggagcgacggcgtccctgctccagccttctggggtggcggccgaggggtcaggagaagtggacacagggacgcggggctgggctggagttgctgtccgaaggatgggcggggagggggtgctgggctccaatggatggcagtgacagcagcagtcctggccccagggcgca

SEQ ID NO: 365146 - DNA, 288 bp, Homo Sapiens
  misc_feature (164)..(176): n is a, c, g, or t
gggcagcgttcagcatggcactgtcttggcttacaaaatctgctctatgcttgctgactgctgaatgaatgaatgaatgaataggtagtcacaaagaatgtttagaatgtttctcagacaggctgagaaaaaacacaacgaaacattatttccgtttggaaagnnnnnnnnnnnnngtgttcaggactgaagtaaaacaaaaatctgaataacagctgcaccgttaaaaatgaaattaccaaaatatgaactctaggcatcaggcaaaaataattttttgtagataac

SEQ ID NO: 365147 - DNA, 468 bp, Homo Sapiens
gtgtaatatttctattagaatgaaatgaagccagtactttaaagtcactttgatgcccatccactgtagactggataaagaaaagtggtacatatacaccatggaataccatgcagccataaaaaagaacaagatcatatcttttgcaggaacatggatggaaccagaggtcattatccaaagcaaacttaacacaggaatggaaaaccaaataccacatgttctcaattttaagtgagagctaaatactgagaacacatggacagaaaaaggggaacaacagacacggagtgtacttgagacagaggagggtggaaggagggagaagttcagggaagaaaaactgctaggtaccatgcttactacccaggtgacaaaataatctgtacactaaacccctgagtcacgagtttacctatgtaacaaacctgcacatgtgcccctgaacctaaaataaaagttgattta

SEQ ID NO: 365148 - DNA, 418 bp, Homo Sapiens
tggatgatccaagatgaagaatacattgctgggaaccaagaaataggaccatcctatgaagaatttcttaaagaaaaggaaaaacagaagttgaaaaaactccccccagaccgagttggggccaactttgatcacagctccaggaccagtgcaggctggctgccctcttttggccgcgtctggaataatggacgccgctggcagtccagacatcaattcaaaactgaagctgcagcaatgaagaagcagtcacatacagaaaaaagctaatcatgctctctaccaactaccatgaggctaaaagcaaagtcaacaaacccctattataccttccaccaaattctttatcattgtctttcttaggaaacagacatactcattcatttgatttaataaagttttatttttccaaatgtaa

SEQ ID NO: 365149 - DNA, 518 bp, Homo Sapiens
  misc_feature (77)..(174): n is a, c, g, or t
  misc_feature (353)..(418): n is a, c, g, or t
tggtcactcctagcattcctcactctgttgctaacagcaacagcaataataataagggttacaacttactccatacnnnnnnnnnnnnnnnnnnnnnnnnnnnnnnnnnnnnnnnnnnnnnnnnnnnnnnnnnnnnnnnnnnnnnnnnnnnnnnnnnnnnnnnnnnnnnnnnnngacagctggtttgcaagattaggagggatgaaggacccaggggacaatgcgagggaaaactctgaccccggggccccaggctggatgttctttatgcctgtgaaccacagcttatcacatgtctggagttagggaccccacttaaagtgagattttggctggaggtggtggatcatacnnnnnnnnnnnnnnnnnnnnnnnnnnnnnnnnnnnnnnnnnnnnnnnnnnnnnnnnnnnnnnnnnntgtaggtaacagctagaccctatctctacaaaaaatttgaaaattagctgggtgtggtggtatgtgcctcaagttccagctactcaggaggctgaggtgg

SEQ ID NO: 365150 - DNA, 799 bp, Homo Sapiens
  misc_feature (143)..(143): n is a, c, g, or t
  misc_feature (180)..(277): n is a, c, g, or t
  misc_feature (438)..(438): n is a, c, g, or t
gtatgatccaccacctccagccaaaatctcactttaagtggggtccctaactccagacatgtgataagctgtggttcacaggcataaagaacatccagcctggggccccggggtcagagttttcccctcgcattgtcccctgngtccttcatccctcctaatcttgcaaaccagctgtcnnnnnnnnnnnnnnnnnnnnnnnnnnnnnnnnnnnnnnnnnnnnnnnnnnnnnnnnnnnnnnnnnnnnnnnnnnnnnnnnnnnnnnnnnnnnnnnnnngtatggagtaagttgtaacccttattattattgctgttgctgttagcaacagagtgaggaatgctaggagtgaccatgcccagcaccgaatgaggccttcatagccttgggctaaaagaaaaagagcagaaaggtgaacacaggggaaggcctccatttcnacacagatgcattagacccaggactctgaactcactttccctggaggtgggggtgctatcagctgcttaatggagcatcatggaaaatgtgggactccaggcctgaagggcaggggttggccacttttccacatggagtgccaaactgctaacccgtcttctagtgtgtgagaatagggaccaaggtggtggcgtgaccttaactctcagaagcagaggaggcaggtgggtggagggggatgctgggaattcacctgcctcttgctttttgtgggtggctgctgccaccaccccgctgctatatagtttaggtttctgaggttgtgagcctgtcgggctagtcggggggtcacggctcgat

SEQ ID NO: 365151 - DNA, 590 bp, Homo Sapiens
gcgctccacgcacgcgcggcccgcgcgcgccacgtggcgccagaaggtggcgttgaagtggtcgtagaggccggcgtccagggcgttccaggtgcgcgccgcccgcgccagcgccgcgaggatggcggccaggcgcgagctggcggcgcgcgcgttgagcttggcgtagagcacgtcgtccaggtcccaggccagtaggcgccgcagcagcactagcgactcgtcgaagtactcggcgatcatgacgagcgagaaaacctcctccacctggcggatgaggcccgccaggtaggcggcgtcgtcgcgcgggctgcgctcattgtcgccgcccaggtcgtaggccagcgtgttgtgtgcgaacatggcgaagtgctcgccagcgcggtagtatgcctcgggcgcgcgcaggaaggcctcgagcgaggcgttgggcacgcgccggaaggccgggcagtactggttgtagtagctgaagagcgactcgaacatggcggccggctcgcgcaggatggtgacatagacggtgctcgccggcatgaggcgctccagctccgcacaaacgaagcgcaggtggctggccagcacgtgcg

SEQ ID NO: 365152 - DNA, 537 bp, Homo Sapiens
  misc_feature (33)..(33): n is a, c, g, or t
cccagattaatctgaatgattgccttatttttncttaggcaagtcagtaagccacccactagacagccatatccagcaaaataagagaagtttcccagatgccaaatgataagccaccatcaacccagaggggaagccttctggttggtttggctgtatgagattcaggaaggccagaatacccaaaattattcacacgacgttaacttattggtactggctaagcaatacatgtatttccctaaaggaggagatggtcttttggttgatttatggacacacttgtttcatctgactgtaaatatattgcatgctttattctgatggtgcactatttcatccagcaagcttttcatctgagaatgtttaatgttgaccttattcttagagcaagtagatctaaatatttttcagctgagttattagggagtcattattctgtggtacaatgctgcaaaaagcatcatgtggaagaatgggaactatgcttactttatgaagtgatgtataacacaatgaaatctgttttacaactac

SEQ ID NO: 365153 - DNA, 1500 bp, Homo Sapiens
  misc_feature (1054)..(1094): n is a, c, g, or t
gtgtcttcagggaaaaagtgtgttattcggttactcccggactggtttgctgtgccaactggcaaaaagtgccctttttgttggactattgcttgtgtggtttccctatgttgcataagagatatgcccattggtccaggaggctcttgctttatccggtgacgagggtacacggggcgtccgcttcagttccccccgaggaacgtattcgctgactgggacgagtctactcctcccccacagggcccacgattcaaatcctctttgctgcaacctctcgaggaccctggactgagttgagctgacagtagccatgttagtggaaacctgatgacgtgcgtcgagtcgtgatttccagcctgcattgacagagttgacacatcacgtcgccgatctctggaaatacttcttctatcaaggatttgtcaccgcttagcgtgatcctttctccgaggtctggggccacacgcacgacgaggcactcacagggccttgaaaatcgaccagtttctctgtcctgcttccatctttccatctccaacaacatgggctgaagctgaaaatattttgcctcttcatataacaaagtgtagtccttgaaatcatcaggaatgaggagtttggatgttcgtagaaaattcaagatatatctgaacatctgtccatctctgtcaatgaaatagtgctgtttgagactgtccaaaacaatgggctctgtaccatcaaaaagtcttccgattctggattcagggtatttggtgagggtggccaggctgctggtgtacatgtggccgcccacatcaatgtggacaggcgcattggattttgtgagttgcgctggagtagggatgtccttgcttgttcagtggagatgcaggggatctagtgatcagaggtcttgacatattgggccgactgtccctctggcggagaattgcgcgggcccgggcgggagagagggagggccggcgagagggctgggacggtctcgtttctctaagtaatgcccgaggagcagtgccccttccactgccccctcattgccccccggagnnnnnnnnnnnnnnnnnnnnnnnnnnnnnnnnnnnnnnnnngtgctgccgcgggaaacccgtgtctggggccgcccggagcggagcggagcaggcaggttaatgagcagggtggaggaggcacggcgaggccccgcaccctctcggcgcccgcggccagggcgcagcgggcgaggcttgggagcgggatggggctggcggcggcggcggctcccccacctacttgctggcggcgaggcgcgggggcctggggccagccgcgcggctcccaactccctttccgactcttgcaaaggagcgaaacacgccccacgtcagccacatccctttcgacttttccaacagccacatttaagctgtcattaaagacctggggcgctccccgtaggtctggggcaagtccgcgccccgctctcgacgaattcgagctcggccgatttggcctgat

SEQ ID NO: 365154 - DNA, 1174 bp, Homo Sapiens
  misc_feature (44)..(44): n is a, c, g, or t
  misc_feature (564)..(564): n is a, c, g, or t
  misc_feature (1064)..(1110): n is a, c, g, or t
gcccaaaacgagaggtgcttaagattacacataagacagataanattgtactatacgcgcgcggagggggagaaggtacgaatccgacagaggacagagcagttaagagagcgaaccgtggttaaggtgaggggaacacaatccctctaagggtgcgacccgggtggacgttagctggaaatagtaataccaaacagggccgtttaccgagatatagacggtagcgggcgggcagatttatggaaaatcgtattttcatccaaggaattgtacccacgatgggccgggaccttttcccggaaggtctgggcccacacgccccctcagggctctcgcagggccccgaaaaatcgccccggttttgggtcccagttgccatctttgcatctccaacaccaggggggaagctgaaaatattttccctcttccatatacccaagtgtagtccttgaaatcatcaggaaagaggagtttggatgttcgtagaaaattcaagatatatttgaacatctgtccatctctgtccaagaaatagtgctgtttgagactgtccaaaacaatggngttgtaccatcaaaaagttttccgattctggattcagggtatttggtgagggtggccaggctgctggtgtacatgtggccgcccacatccatgtgggcaggcgcattggattttgtgagttgtgctggagtagggatgccttggttgttcagtggagatgcaggggatctagtgatcagaggtcttgacatattgggccgactgtccctgggtgggggaaacaatagcaggtgaaactattgtgggagaattggtgcttctgtgcccattggcttctggaagaagaggcagggggtcgtgtttcacggaaaccaccaccaccgcatccacaggctccgaggggcggatacaaagtcttttgggggaagtggggccgcagatttcccccgacccgaacacagactcgtacagggcgcgcttgggcgcagcctcggatttcacgtcgggcccgacctggctgtctttggggaggatgtaagtgttccccagcgagggcggcnnnnnnnnnnnnnnnnnnnnnnnnnnnnnnnnnnnnnnnnnnnnnnngtgccgtgccgccccgttcagagcctcggcgtagcagccctgcggggcgggcatcccgaaaatc

SEQ ID NO: 365155 - DNA, 1027 bp, Homo Sapiens
ggggggacttggagagagactttgtgcttcaatgtctcaggacagtcggcccaatatgtcaagacctctgatcactagatcccctgcatctccactgaacaaccaaggcatccctactccagcacaactcacaaaatccaatgcgcctgtccacattgatgtgggcggccacatgtacaccagcagcctggccaccctcaccaaataccctgaatccagaatcggaagactttttgatggtacagagcccattgttttggacagtctcaaacagcactatttcattgacagagatggacagatgttcagatatatcttgaattttctacgaacatccaaactcctcattcctgatgatttcaaggactacactttgttatatgaagaggcaaaatattttcagcttcagcccatgttgttggagatggaaagatggaagcaggacagagaaactggtcgattttcaaggccctgtgagtgcctcgtcgtgcgtgtggccccagacctcggagaaaggatcacgctaagcggtgacaaatccttgatagaagaagtatttccagagatcggcgacgtgatgtgtaactctgtcaatgcaggctggaatcacgactcgacgcacgtcatcaggtttccactaaatggctactgtcacctcaactcagtccaggtcctcgagaggttgcagcaaagaggatttgaaatcgtgggctcctgtgggggaggagtagactcgtcccagttcagcgaatacgtccttcggcgggaactgaggcggacgccccgtgtaccctccgtcatccggataaagcaagagcctctggactaaatggacatatttcttatgcaaaaaggaaaacacacacaaccaataactcaaacaaaaaagggacatttatgtgcagttgggacagcaaaccaagtcctggacgtaaaatcgaataaaagacacatttatatccaatagagaccacacctgtattcatatgggaacaattggaatagtgatatcctcaaggtgtaaaaa

SEQ ID NO: 365156 - DNA, 848 bp, Homo Sapiens
  misc_feature (286)..(458): n is a, c, g, or t
agttcgacggagactctcttcatgtgagcaactatggaatgacatgggaagagaggtgtcctttttatattatgctttttttacccaaaggatttcgtttaaatattattacaaatatttctgcatgagcccattcctaatttcaactccctcccgctttagcctcttcggtagctgggaactacaggcacatgccaccatacccaattaatttttttaatattttgtagaaacagagtctcactgtctgctgcccatactgccaaaacagagtaaggaggcctcnnnnnnnnnnnnnnnnnnnnnnnnnnnnnnnnnnnnnnnnnnnnnnnnnnnnnnnnnnnnnnnnnnnnnnnnnnnnnnnnnnnnnnnnnnnnnnnnnnnnnnnnnnnnnnnnnnnnnnnnnnnnnnnnnnnnnnnnnnnnnnnnnnnnnnnnnnnnnnnnnnnnnnnnnnnnngtgtgagccctgcacctggccctggtttaataagaaccagagccacaaccctctcagagtgacccagtggagccccagttacctgcctcactctgagagtgaaattaggcagcgagaaaggaaaagccagtttttcaaccagcaggcaacttttcccctctcaacagggacacttgggacttacttatgtgccagcccaggctgaactaactactgtgtgacttactgcctcagctaaagcttgcagctcaagaaggaggatgccccttccttcgcgaaccctccgtgggtctggcaggcacccagcctctgtgcatggcctgggaaggaaccactgccctgggttagagaatgccacgtgaacacaagaaaaaggatgcggcaggagtt

SEQ ID NO: 365157 - DNA, 744 bp, Homo Sapiens
gggggggcggggctgaggccaaggaagaggttggactgtgtctcgcatgctcctgacgcagaaggttttgaacctttttttcacctcgtctgaaatggctgcctcccagtgtctctgctgctcaaaatttctcttccagagacagaacctcgcctgtttcctcacaaacccacactgtggcagccttgttaatgcagatggccatggtgaagtgtggacagattggaataatatgtccaagtttttccagtatggatggcgatgcaccactaatgagaatacctattcaaaccgtaccctgatgggcaactggaaccaggaaagatatgacctgaggaatatcgtgcagcccaaacccttgccttcccagtttggacactactttgaaacaacatatgatacaagctacaacaacaaaatgccactttcaacacatagatttaagcgagagcctcactggttcccaggacatcaacctgaactggatcctccccgatacaaatgcacagaaaagtcaacttacatgaatagctattcaaagccttaaattgggcatcactcaggatgtgtataagatcttaatattgactagtttcacatccaggtttctaagaaatgataagatacttcacttttccagagtgaaatgtaggagggagcacattctaagtacagctaaaaatttagctcactgtaacacagtttcactctctgaataaataaagcaaaaaacacagtaaaaaa

SEQ ID NO: 365158 - DNA, 794 bp, Homo Sapiens
  misc_feature (531)..(531): n is a, c, g, or t
ttgtctaatttagatatttgagatataaagaacttccttacaataggcatcacaaaactgaaatgggttactgagaaagaaaaagatgcaagcattactttgcctaaggatctttaatagaaaagaactgtgccaggagtcaacctgcctgtcagcagagagaaaaggctctggaggtccaaggcttctttaatttttgacatttagtggatgtggtaaaactccatgaaggggcaggtacctgttacatgtggaatctgggctataggattattattagcagatgattaattaacaaagtgtccttgtccaagggtcactagaccgacctccactaccacttaatatgtgtatttctgtagcttcaaattagggcacccactctcatcctctggatcctttcctggggacttaagagccttagccaggcttactgaatagtgtccacaaaaggtgaattagaataggacttgaagggtacaaggctattgtaggcctagtctgaacattgataaccctacaacctttacntaaatcacttaacctcccagtttactcatcagtaaaataaggggattggactaatttatagtgttagtcccttcctgctcgaaaaaagtttgtgattctaagtcacaggactcttttggaccccagagagatgttaaaaaaaatggtcatcccttcagtaccatggagagtgcagtggctaccacagaagccacttgggccacctcagtaccatagatagagctatgaggtgctagaggggctgtttgccattttagcatcgc

SEQ ID NO: 365159 - DNA, 550 bp, Homo Sapiens
  misc_feature (356)..(356): n is a, c, g, or t
  misc_feature (529)..(529): n is a, c, g, or t
tcccggccagcgacgaacgcgctccgactccggccgccgccagctgcctgcctggccgcaagggcggcagcggcattaccgccgcgcgcccggggtgaggcgcccccgccgggcccgcggacaccaggcgaagagcaaccgggcgacgcgcgctgcggcagagccggggagccggaagagcagaggccgagcgccgtcggagccgcgtctggttggagaaagaggcggacgtgaaggggcgggggagccgcggaggaaaaccgggaccggcggaaacgtctcgagacccctgcgcgcttcgcgcgctcgctcggaactcggcaggcggcgctgcgccgggccccgaggaaacctgnaggtccccgccctccccgcgcccgaaacaccgcgcgtcctgataggcccgcgcccagcagccccctccccgcgcccgccgcaccggggccccaccgcctcctgcgtcaccggcgcccccggcccgcccggggaccccgcggtgaccgcgctgcttggggttgaaggacgcgtngggagccccggatacattggt

SEQ ID NO: 365160 - DNA, 358 bp, Homo Sapiens
attagtaagagtttagagttggcctttggaaacatcttaaggtggtggtactgcatagattcaaactaattagatgcatacgtaacaagcagaatgaaccagttcatcttgtacatctgagtgaattacatcctcttttgtaggagagatgccatcaccttttggaagagaaaagtatagattttatgggccacttcttttgaagctttatcttggatctttttaaaagcactcataatcttctagataaaccggagtttgagtagacaggggaaggtgtagaagcagaggaatcatgcaagcgacagggaggaagtcggtgggaggtcactagtcattcctgccactccaggaggag

SEQ ID NO: 365161 - DNA, 529 bp, Homo Sapiens
taaaaaatctatttgtatctatcctaaccagttcggggatatattaagatatttttgtacataagagagaaagagagagaaaaatttatagaagttttgtacaaatggtttaaaatgtgtatatcttgatactttaacatgtaatgctattacctctgcatattttagatgtgtagttcaccttacaactgcaattttccctatgtggttttgtaaagaactctcctcataggtgagatcaagaggccaccagttgtacttcagcaccaatgtgtcttacttaatagaaatgttgttaatgtattaatgatgttattaaatactgttcaagaagaacaaagtttatgcagctactgtccaaactcaaagtggcagccagttggttttgataggttgccttttggagatttctattactgccttttttttcttactgttttattacaaacttacaaaaatatgtataaccctgttttatacaaactagtttcgtaataaaacattttcccttttttaaaatgaaaaaaaa

SEQ ID NO: 365162 - DNA, 495 bp, Homo Sapiens
gacaagtaaatgggggccgttgggacggcgggtgcctggagggcagctctgggctcagcgggcagtgcttagagcacaggcccctctgttgggggatggggaggagagcagtctgcccttgggagcgtaggccccagggagacttctaaagccccccctgtcgtctgctcttcacccagcaccacagaggcacctgctgcacacacaagcatctcactcggcccacggagggggccaggcttcctttgcctgaagctgttttgggaagggtctccacacaggcactgatctcccaagctttggtcatgatgtcttttaccatttgataattttaaacattgtttttaaacccaaaacatttagtggtccgttgcctctgaaaatgtaaacaaacaaatacactatttctgggaacatttatattgagattctttgtggctattggtgtgtctcacaggcaaaatttgatttggctaaaataggctcagatgtatt

SEQ ID NO: 365163 - DNA, 314 bp, Homo Sapiens
ttaacttttcagaacaatgttattggtttattaaataaagattgcttgttacacagaaaattattttctttaattatcatacatagctctctttcacatcaggcagtagaacactgcatttacttcatctcaggatactggatacaagattaatagtcagtttgtctcaaaatatgtcaatgtgttctgtctgaaaacatgcagaggggcttggagtaatcatatcattttacgaggtgctttagaaaaccaagctacaggtcctgaatacattccaaaaatcctaaataattaccaacagaagagagaactct

SEQ ID NO: 365164 - DNA, 131 bp, Homo Sapiens
tggaggatgatttaaaagatgctttctatctctgggaaaaaggagcagcatttggccatgttcttttgtttttctattcctgtcccaaatcaaagagcataaatctcaccaaaaccagttccccagtttat

SEQ ID NO: 365165 - DNA, 420 bp, Homo Sapiens
  misc_feature (30)..(30): n is a, c, g, or t
  misc_feature (67)..(67): n is a, c, g, or t
ccacctggtggctttcacctgacccagccntgagtcctctccaagcctctttccggcccctcccacntggccactgcctcctccagtgctgcgggaggcgggccagggccccacctggtggctttcacctgacccaaccctgagtcctttccaagcctctctccggcccctcccacctggccactgcctggcattgggatcgccccaaaatggacccggcccctcctgttatttgctgggaagtccagcggaggagagggtgcaggtcccccgctgagcctccagtctctgtagactgggctgccggcccttcagccccccttggagcccctcccgccacagccgcaccttctgctcccggcccctccctttgtatttggagacaatgtgttgtaataaagcttaaagtggatgtttgtc

SEQ ID NO: 365166 - DNA, 426 bp, Homo Sapiens
tctccggggggcagccacctggccaatgtgcatttttgcacatgctggaaccttccatgggggtctgggcttattggctggagccaggacatgagtcaggggcaccatggacctcaacgtgccagggagacttgaatgtggctgtcactcttccggacgccaagggctgcaggaggctgcttttggcactacccaccccgtgtgacagaataggagccagcgactcaggactgctcacgggtcaggagggcaacgcctgaagtcagacctccctataggtcaacagggacaacctggggatctctggagcagggccctcctctctcaggcttggcccactcccccagacacctggacacgtggccacaaatctgggacaaggggcccccgcacagcatgaaataaaaagtgcctgagaagtgtgaa

SEQ ID NO: 365167 - DNA, 711 bp, Homo Sapiens
  misc_feature (193)..(250): n is a, c, g, or t
atgagcgagtcccccgcccagattccggcccaggtaccgaaggcctttccgccccaggccacgccagcagcctaccacagaaggtggggatggtgagaccaagcccagccaaggtcccgctgatggttcccggcctgagccccagcgcccacgaaaccgcccctacttccagcggagacggcagcaggccccnnnnnnnnnnnnnnnnnnnnnnnnnnnnnnnnnnnnnnnnnnnnnnnnnnnnnnnnnngtgtcaacagtggggaccccaccaccaccatcctggagtgattccaactcaactcagaggacacccagagctgccatctggtatctgccagtttttccaaatgacctgtaccctacccagtaccctgctccccctttcccataattcatgacatcaaaacaccagcttttcaccttttccttgagactcaggaggaccaaagcagcagccttttgctttttcttttttcttccctccccttatcaagggttgaaggaagggagccatccttactgttcagagacagcaactccctcccgtaactcaggctgagaaggaaccagccagctcttacctcctcctggttgcttttcttgcccccaacccaagtctatttttgttttcccccggacccctacctctgaagccatgttatgatctgtcatgtgccacctaagcctccagtaaaaacaaaaacagaa

SEQ ID NO: 365168 - DNA, 1351 bp, Homo Sapiens
  misc_feature (1119)..(1144): n is a, c, g, or t
cgtaaagaaagcaaccaggaggagttaagagctggctggttccttctcagcctgagttacgggagggagttgctgtctctgatacagtaaggactggctcccttccttctacccagatgtcagctgctgggtgtcctctgacgttgagtttcggaatcactccaggatgtgtgctgctcgcgggtccccattgcttgacatgggcgctgaggtctcagggtgcttcggtctgccgggtggccaggggcctgctggggggccaggggcctgctgccagtctccgctggaagtaggggcggtttcgtgggcgctggggctcaggccgggaaccatcagcgggaccttggctgggcttggtctcaccatccccaccttctgtggtaggctgctggcgtggcctggggcggaaaggccttcggtacctgggccggaatctgggcggggggactcgctcatctccctgctgttggtgcccctccaatggggctgtctctttgggttctaccctgtcagtgccctctataggctgctgctggttgggaggccgggggcctcgcacaaaccgccgtcggtagaagaagggtggggggcaccatcgtcggggccgttgcccagagtcttcagcccgctcccctttactgccaggtcctgtccccgccgaggggatctctgccaccatgggtggtggggcaactgagggaggccgggggatgaatcggcgggacttacgtcggttgggggcataacggctgcccttcacgggtactcccccaggcccagttacattagtggcttctgcgcccttctctccttccacgacatcaaattccacagtctccccatctccaacgctgcgcagaaacttcctggggttgtttcttttaatagctgtctggtgaacaaagacatcttccttggtgtcattcctgttgatgaatccgtaaccattccggacgttgaaccatttgacagtgcccaggacttggattgccagcaccggcttgtccgcctgactccgggccggggggtcgggggttcccgagaccgccgtcgccggattgccaggggtgcgggagcccggcgccgagggggtcccagcagcggggcccgaggcggctnnnnnnnnnnnnnnnnnnnnnnnnnntttctgcggctcccctgcgggcaccggtaccaccaccgctaccacccctgccgccgtcgcgggcaccgtcgccgcggggaccgctgtagcccccgctgccgcctccacctcgctcatcccgccgggtccagtaccggccacagccgccaccgccccggcccctccccccggctcgcgaaccatcccgggaattccggaccggaccac

SEQ ID NO: 365169 - DNA, 551 bp, Homo Sapiens
ggtgttcaagggagccgggagctgtttgctgccattggtcctgaagaggcctggatctcccagacagtgggagaggccaacttcctgccccccagtggctccccacactggcccactggaggcagcaatctctgccccccagaactggccaaggcctcgggatccccgcatgcagtctacttcctgctcctgctgactctcctgatccagagctgaggggctagggtcccagcaccacttcccccttctccaccctctacttcccgcccagtggggctggaatgtggcccagccggctggaacctcaagggccccacccaccgagattgcagcggctctggctaattgggcctcagtgcccgggctattttgaacccaggaatccttgggggtggtgggaggaccggacaataaaggtgtaaacaccggagagaaattagccgcgccacagcccacacgccaacccccaacgtctgctcgcggcccagtaccaccgccccgctcctggagcgggggagcggccccactgcgtaaccacgaattattaaaaa

SEQ ID NO: 365170 - DNA, 455 bp, Homo Sapiens
cctaccacctctgctcccccttctcttctctaccatttaactgtctcctctgctttgtttcttatcactgctgctggtgtctagagccagccagcaagtacctggcagacatcgccgaccctgcgggcagcgcttaggactgcacatttacatttcccaaatgatctgggtagatggggacaggtgaagacttggggaaacggaaatatacgaatgacatgagacatgcatatctagtgtcaatccattcgactgggcacaggacagcagactgctgacagtgctatgtaagattatgagtgatcctccctctattttgcaaacagtctgtaagtaactgataaaactttaaaatatgcaaattttaaaattatatagtttgatttactcatcaaattatcatgtatgctgttatttaagtatgaataaaggcttttttaaattgggaaaaaaaa

SEQ ID NO: 365171 - DNA, 900 bp, Homo Sapiens
  misc_feature (876)..(876): n is a, c, g, or t
gcgaccgccggcaggttaggcctagcttgggagccgtagagcccttcctcaaccatcatctcagggcggcttcacgtcccctccacccacgcggaccgagctgcgcttcccttccccctgctcgggcccgcgctgggcgtcccagactcgacacttcctgaaggcctgtaatttttaattatagcagatttatgttgagaaaacttcatactgaaatcactgatttattttgggattacccaatttttttcctactattctcagatatctatcaaactactgctctgtggattcttatattaagtttatccttttctccatcttttctttcttgccacctaatgaaggaaatgtctccaaggtctttttgactaatagaaactaaatgtataactcgacatctagaagggtttcaagatagtagatatgtctgctgggatgttttgtcattaccctgcccaatgttgcgacgctaggagtttccttgacactacattataaataaggcccaacctgttagcaaaaatatcacattccctaattttctctcctttaactgtgtgtaatttatccaggcatgtctttagttcagtaaaggttatttccctctttttcattcatacacaaataagtctggtcaattattattatcctaacactagtttttgtgcatacatccaccccaaactctcatttttagtgttcttatgccacctgtatggaatggcttataattttatttttcccaactcacacttgttcattataactttaataattcattgtaagtactctattatgctgtcatacctaatacactatgtccaagcacttatgtattgaagtctatattattttattgtaaacagtgcttgncttgtagaaatttctccatttgcc

SEQ ID NO: 365172 - DNA, 880 bp, Homo Sapiens
attgatgcttccagaagggaccaaagttcgaagaaatcttttcaaccaggaattgctttccccttcaaagagatcactaaagcgggggttgcctagaagccattctgtgtcagctgtggatggtctagaggataaacttgacaacttcaagaagaacaaaggtaccacatttcagaatagcagcactggtgttatcagaccctgtgatctttgtgatcttgttaagtgagaagctgcctgtctccttaataagtgttaattacaagtggtatggaataatccttgtgcatgtggttcctcgaggtcctctgatcctggtcctgatattggtgttgttgaagagtccccacacaggctcgagcgtttccaggtcaagggtaacggagcgtggaccaagtcccgcgtctcctcccgggtgcggggggccccctcagtgaggggggacagccagagaagctcgggtgccaggtggagctcatcttcatttccaggagcctgtctgccctccgagcacaggctcctcttctccccacccctgctgtggcctacagcgttcacaccgccgagcttctgtttcagttcctggtttatccacatgtaacggcccagttccttctccagagcttgaatccgggcctcatactgcctcctgctgtctgctaacccttcaccgaggtggtctcgactctgctgcaggagcagctgcatgttctgctcgtgctccttctgctgcagggtcagctggcggtccatctccaggcgctgccgctccagggccacctccagccagtacaccagcctctgctgctcctccagctgcatctccagttccgagaaggcaatctgctgctggtgctgctcctctcggagcgtcaccacc

SEQ ID NO: 365173 - DNA, 629 bp, Homo Sapiens
taaaagtggagctgaaaagcccggggctctggggcctgcaggaatcagcttgctctctttgcactttcggggaaggaggactcacagtgaggaagcaaaaactgtgcacagaagtggatcacctgctggtggaaatgtggacatctcttgttcagcagatggcagtttttaaaaaataaaggttgtgaggaaaagacttatataagaagaaaagcatttccagtggtgtggcctgaaaacaaagaataacctaggctgctggaaagcacccttttggttgttttcaatctgttccctcccattgtagattgaactttgttctctgctttctttttcttggaaagagaggacttagctttaagtcagcactgatttgggactgttcctaaggcatatcagtgcttcattgtcattgtgtttttaaactttttaaaattaaaacagttcattttggggatgattatgtggctctagggttttgaatgtatagtcacactttgatcattttaaaatcgattcttaggagttcctttgtttactacctctgttgataattgagcttacagccatgtatgaggttttttgtatgatgccatttttaagctacataaacactaaaattatgacag

SEQ ID NO: 365174 - DNA, 517 bp, Homo Sapiens
  misc_feature (204)..(214): n is a, c, g, or t
ggatcatttctgaaaatgttaagactctgcttgcagtggacttggcctcagtttcatgaaatgtgtaactctgtatgtgtatgttaggaggagggttggttgaaagagcgggggcagggaggggaatctgattacctcttgggaaataattttcttgccaacaaaaagatacacttgaagtttcttaaggtggcaagtccattnnnnnnnnnnnttgtgttggaccctccccagtttagatcaagtatttcttgggggtcttgctattgtggttgataccaataaatggaagatccagaatattttcatttaaagctcaaccattaattggaacatggtgaaacattgtacacattgtaaaagtagggaacagtacaaaagaatggaatcaaatactatattatgtgaataaactagagtgattttggaatttcactctcttcaccccttctcacttgtatgttctgtaaagtgtatttctactttggtaggaagaaagacttgatttaatatttca

SEQ ID NO: 365175 - DNA, 750 bp, Homo Sapiens
  misc_feature (41)..(41): n is a, c, g, or t
  misc_feature (85)..(85): n is a, c, g, or t
  misc_feature (131)..(131): n is a, c, g, or t
  misc_feature (149)..(149): n is a, c, g, or t
  misc_feature (184)..(184): n is a, c, g, or t
  misc_feature (605)..(621): n is a, c, g, or t
agccaagttgatgccttggagcatcacatgacccgtccagnaacttctgcactaccgtacagcctgcaggggccacgcaaaggtnccagatggccaacagcagccgtgaaaagatcgtcatccctgtgttnaacctcttcgttaagganatctacttcctgccacaaaatccataccaacccanctctccaacgggcacattaactttaagacattctgggagatctccagacagatccatgagttcatgacatggacacaggtagagtgtcctttcgagaaggacaagaagattcagagttacctgctcacggcgcccatctacagcgaggaagctctcttcgtcgcctcctttgaaagtgagggtcccgagaaccacatggaaaaagacagctggaagaccctcaggaccacccttctgaacagagcctgaggcggatgcagcccgcgacgccagaggaagcacgtgcactaactgggtttaaattttgactgatgtgggttgagatgaggaggcctcactggttggggtccattttgtatataacttttatgagaaaaaaatggtaattatttcacgcatcaacctttggcacttacaaagnnnnnnnnnnnnnnnnnaaataacagggcagggccctgctttggggagggggaggggagagtatcatgggagatggtatccatgataacatcttattctaatgaaatgccccttttattttctacttttgattatttactcttatg

SEQ ID NO: 365176 - DNA, 472 bp, Homo Sapiens
atcacatcacaggccgaaaaggccagatgacccaccagggacattgaatccgtgtcccgagaggggtggggcgggggtgtggattcctgcggggagcttcgggactggaaaaaacagagggtgctctgaccgagtgtttaccaaaacatgtattaggcaagacccgggccgaatgtgggtggcaccgcccctgtgctgggccaggagaatgtgcccgcaccggtcccagatcctgtttccccagtgggttgtacaagacaccttgaacttctgcatgaactgggacattcagaattccctggagcaaccccctccctccaccctgtgccttgatatctcctattaaagcttgtgtttgaatgtctgttaatagacatgatttaattattgatattaattcaaatgtattaatttgaattattaacttattaatcatttgatgtcgattaaagcaatgatcttgatccaaaaa

SEQ ID NO: 365177 - DNA, 581 bp, Homo Sapiens
tctcatgcagagagctgggatcttcttggccattaaagtatattgttcacccccaccccgcgagaaccaagctcaggagttgcctgcctctgcacacatgctgagtgtgctgtttgtgtatatggcaggaccgtccctatggggcatgtgtgagctccgcagctgggtcaggctcctcggtccaggtttacttcatcccgcctggacgtgatttggctttgaactgtctcgcatgcagccacaaagcaacttccatccctgtggtatgctgatagctgtactcattgaaacagtggcctctccaagatttaaggatattgaacaaagaaactgggactgagtgacttgttacatgaacaagttcagaagggcagagaggcacatcatgtacagacttgtggagcacctttcgtttcacctgcgatgcatgcttactcagcataacgtccctccctcattggatgtgatgtactcaggccttacagggcttatccaccagattatattacacctgtacttcccaaccgcacactcgcttggcgtttaagtgtggatattagaaatataatatttcttaaaca

SEQ ID NO: 365178 - DNA, 540 bp, Homo Sapiens
  misc_feature (486)..(486): n is a, c, g, or t
  misc_feature (512)..(512): n is a, c, g, or t
tttgcactgaagtttttctgtgaaggagccccagagttgggaatgtgccagaatcaggccaacaccagccacacctgtccacagtgccccttcctgctccagttgatccagagagctcctccctctaccctcatgatgccagggagcgtgattgtgggtgtgtctctgactgggacacccaggatagggtgtgcaatgaggccaggaccctcctaaaccctaacagcatcctaacgaggcccattgcagctttcgatttccttcgtaacagagctcgcaggccctcagttgcagagctctcaccttctggagtgactccatcgttactccagtctttctaggtggtggaacactccaccacacatgccatttagaaagacgccagcttggcctttccaaaaagttaaccagtcgtctccccaccacaaaccctgtgggagcaggttactcttaggatgcacacccgtcaacgaggccattgcattnttttgcaggcatgaacggctcccatntaggcactaacccaggagccaaacaact

SEQ ID NO: 365179 - DNA, 495 bp, Homo Sapiens
ttaactcgcccctcggggctcccccagagactgtgccccgggcgggccgcgcgcgctgtgtccagagtcctcgggcctcctgggtctgggacgtgcctctcctactgtgtaggagcctccgcttcccaatacagccgtgtctgcagccactgcctgacttcactcgggcgggggagggcggcagtcggtcggctcgctctgggcgccctcgctctctgccttcatctgggccctgggctctcccgggtaatgggatggctgcggtcccgccggggggcagtctggaaaggtttcctaaaggagacgagcgaattaacggtgtcgaggtgagccagggccagggggaccccggtaaagtttagttgaggctggggaaggccctcggagctcgtttccagatcgaggtaagagggactttcttaaaggcctagtctatgggatggggcggcggagggaatttcttgagaaataaaatgaagctgcagagtacgttaa

SEQ ID NO: 365180 - DNA, 550 bp, Homo Sapiens
caatttttgtattattatggaaataagaaaaaaatagatacttttcaaagtgctctgaattaagacagggcttgagcctcctgacttcctcctcccttcaacttgggagaaacaggcctgacactacccccgaccccactgccatccacactgtccctgccaccgaccagaaaaggtctccagttccatgttgaataaaattcaacatgagtcctttcctcacctcctcctctgacctcatgacctcaaccctccccctccctctccaagcctctgccaaccaggcctcctttcagatgccagagtagtaccacagagaagaaacctgttgccctgttgatttttcagggggactcaacccaggaattctcctctgtcttgttcaacaggaagtgtctagaaatggatctgaaatacaacaaaggaagaaagggaagcaacttgaaaaatccctctttcacgtggatgtcaggttaaaaacgactggccttgttaaaaccgcaccttaatgaggcgccttcccagcctaattgtcaccatggcaatgacc

SEQ ID NO: 365181 - DNA, 154 bp, Homo Sapiens
aatatctactatatttgctactgttttctacttattgctcttgttctttctgcctatttttctcttcaactcatttttctgccagttgtgtttttaattgagcatttttaatgatttcattttctcttttcttagtgtagcaataatacttaaa

SEQ ID NO: 365182 - DNA, 502 bp, Homo Sapiens
agttcgacggagactctcaaatcttccctggcataggaggaagataatgagggagtggaataaggctacaacaacgaatatagggaggaagggacagatttgagagacgaggtagaattaataggactcgatggctggtgggaggagaagacaggagtagaggttagctcccaggtttctccttgaccataggagtgtgttgggacattctgccagtcaagatgggggtgacggggagactgtagaaggaaggtggggagtttttgaagaaacagaatgttgtatagactgagttttgaggtgtttgtggggcagtaagggtaaggtgtccagtaaacacaggttggtgctcaggtaagactgtaaaactgcatttatagatacaggagtcttatagatggtagttaaagccataggcatgaatgagatagcttagaaaaagagaagagaaactagtatacagccccctaagaaactcaatttaaaggttcgggagagtctc

SEQ ID NO: 365183 - DNA, 484 bp, Homo Sapiens
  misc_feature (26)..(26): n is a, c, g, or t
  misc_feature (34)..(34): n is a, c, g, or t
  misc_feature (52)..(52): n is a, c, g, or t
  misc_feature (58)..(58): n is a, c, g, or t
  misc_feature (71)..(71): n is a, c, g, or t
  misc_feature (80)..(80): n is a, c, g, or t
  misc_feature (86)..(86): n is a, c, g, or t
  misc_feature (156)..(156): n is a, c, g, or t
  misc_feature (178)..(178): n is a, c, g, or t
accccttcatacattgctggtgggantgtaaaantggtttagccacttcggnaaaccngacggtcagtccntcaaaaggnggaaancagctgctgtatggagttagcacttcttacccccatgccccatagcccattattttggccacttaaaaangaaaccgaaggactttattatnatacttaaaccatgggataaacccttgaaaaccgtttaagtgaaagaagccgggtcacaaaagatcacatgatgatcccattcatacgaaatgtcccagaatagccagaaagataagtggttgcctagcctggctgtagatggaatggagtaactgctaatgggtgtagggttccttttcagggtgatgaaaatatcctacagttagcttgtggtgtaggctgcacaactcttgaatatattcaaatccactgaactgtacattttaaatgtaaggtatgaattgtatctcaataaagctgttatt

SEQ ID NO: 365184 - DNA, 1153 bp, Homo Sapiens
  misc_feature (789)..(789): n is a, c, g, or t
ggggccgcagtgcgactgcgcacagtctaatccgcggggagagagaattgcgcatgcgcgcctgtctcccgggacgctagagcaggcggttcctgggctgctccggtaggtttggcgtgcgcgggtttctgcagatctagggcgagcttgcacgttacatcaccgatgcatctcttcttgcttgcttaatttgccaccacttaggcctttcttgcagaattcgccatatactccttaagggccgcggaatcggagcgaccttggtgactggcaaactctcggcagatgtgcgtgcactggtttgatgcagacgtggttgtaggcgatttaatttttcccagctttgcagcgactgttggcttcccagaacggatctccccagcctcgactggaagctgagggacaaaaattcataaaagcaattactctttcccggcgaggcttctagaagagcaagaagagcgatatgattacacctgcagccctataaagattgatctgtccgtctttcccttacagtcgtggcctgttaaacgttcctgtgttgttcagtgccagaatgagtgaccgctatttagaacaaaggattagtatcaaattttgcgtgaaattgaacaagtctgcaagtgagacccaccatcttttaaaagaagcttatggggatgaagtcatgtcaagggccagagtttttgactggcacaaaaggtttaaagaaggacgggaagatgttcgagatgatgccccgaagtgggcgtcccagtcaaccaccgaacagatgacaatatccangaaagtcaaggacttggtttgttcaaacaggcagttaaccgtgaggatgatggctgaagagttaaatttagacaaagaaactgttaggctcattttgaaagaaaacttgaacatgaggaagatttctgcaaaagttatttcgggtgttttgaagggtgagcctaaaccacgaaaacttgactttcggtccgatctttcaaaggaaactaggaaaaatagctcatgtttgaggaaaaaggatgtttttcttctctactagcccaggacctcctaaaagccaagcccacatctgattgttccatgttccctgcatccagaataaaccttgcgtggaactgctcaataaatgttagatagatgaatg

SEQ ID NO: 365185 - DNA, 1085 bp, Homo Sapiens
ccatcatgtctgagagggcagagatctagacaagtgtgggaaagatgactttggatcaaaattttcttgtgaatataatgtgcttatgcgtaatttaaagctgactgtattaaagatacattttttgtcaaccagatgattgttaaatacatgtgaagtatgtgtggcccggtcctatttcctcacctgttacaagtgaatcagacgtcccaatagatgtggagacggtcacatcaacgcctatgccactctatgacaatcagaaggcacgcagcgtgatgaatgagtgtgaacggcatgtcatctttgccaggactgatgcagaagcccctcctccaccagaggactgggaggagcatgtcaacaggactggctggacaatggcccagaacaagctattcaacaagatcctcaaagccctgcagtctgaccggcttgcccgcttggccaacgaaggggcttgtaatgagccagtgctgcgccgtgttgctgtggacaagtgtgcaaggagagtgcggcaggctctggcaagtgtgagctgggataccaagctgatccagtggctgcacaccacccttgtggagaccttgagtctgcccatgctggcagcctacctggatgctttgcagacgctgaaggggaagatcccaaccttgattgaccggatgcttgtgtcatccaacacaaagactggggctgcaggagctgaggccttgtctctcctactgaagaggccctgggaccctgctgtgggtgtgctttctcataacaaaccaagcaaactccctggctctccgctgattctcatcgcctcctctggtccctccagctctgtgtttcccatttcacgccgccaccgcttctggcaatctcagctgtcctgcttggggcaagtcattccctgtagccacccatctgctgaacaatggcagtggggtagggagttctacagtgtcctcgagcatatgatttgggggcagtgaaaaagccaaggggctgggagaattcccaggcccattttcccaccacaaaaccccaattaatccttgaattggggcttgggaaaacccaaggggaaacctttt

SEQ ID NO: 365186 - DNA, 540 bp, Homo Sapiens
cagaggggctgtcttccaagttactcggactccgaagttgtggcaattatcacacttaagtgacaaagtgtctcacatcaagtagctcttgtttctgttaggcgtgagagcttgctccagaatatacacgaagcatgtttagtaacaaattctttcagcagctcctcttaggagaggtaactgtttcgaaatacttctggggcgttctgtgtttgaaagtcctgtttgcaaagacaagacgaaggataaggagaataattttttgtagggtgtcctctattgcgagcaattaatctgatgaacataaagcttaatcagtgaaaactgaatcaccttccttgcaggcggatctgccattggatcgtatttcagttttttgggtcaatatatgaacaatgtgtgaaccagaacgtatggtatttgacatcaaagctatgtcttggcatatgtttatgttgatatacttgaattcatttaaaatggaatgttaattacatcgacttcttactataaaaaataaaaagttattgtccagtgcaa

SEQ ID NO: 365187 - DNA, 1237 bp, Homo Sapiens
  misc_feature (680)..(707): n is a, c, g, or t
  misc_feature (1173)..(1173): n is a, c, g, or t
tgtttttgtggttggatttatatatgtacattttattagaattcttcagaacggtcaacaattggacaacatacaggaataaaacacgtggaacaccaacatcctttaaacttacgccgcttatgtatttacacataaagttactgtatatataaaaaatattttcaaggactcatgggcttgggaatattcaaaagacattattgctacatttcaatatttacaaaaaaagccacaaaataatttcaaacattaagccactgcaaagaaacatctgatgtaagaaaaaattataaaaatataaactttcaagaatatccaagacaaaactctcaatgaagtgcccctgaagtacctagacatctataactaacaaccacttttcttactatcattgaagtcaatagaaacacaaaggaatttttcagacaaagtatggcaaacaacaatctcttgggtgacaacacaaccccaaaatctgttaactttggaaaggtgcgagagcatagaactccagtgcaaatggttacttccagataacggccacagttctctaaatgtagtctaagaaatgtagaagggggaaaccataaaggcaacatacctgaatctttcaagacaacacacaaactctgccatgtacacatttgccttttatattgggcagtgaggaaggggannnnnnnnnnnnnnnnnnnnnnnnnnnnaaagaggtaaactacaagaataatatccaggctacagtctaaagggtaaaatttaaatgtttcagtgagacagtagcattatggaaggtctaaggaacaggtacagtaagatgagtcctaaataacagagtgcccttaagtgcaggtgaactgcaaatacatagggactgatgcccttccacttcctctgcaccactatggaagcttctggtaagctactctagacagctatgtgaaaagaaacaagagcagtactaataatgaaagccaagttacttttcaggtactaaaggaccctcttggactcagggcaaaaatacccctccaaatatttgtctacacacatacaaacgtacatacacatatatagatactggcccggtgtccaggacatgcctgcgaaggaggctaaacctatactttatttcctgctacataagaatccaaactaagatggcagtgtttntcccactcctgtgggagccatgcagtgaatcagtaactttgtcaaacagcatcaaatccattga

SEQ ID NO: 365188 - DNA, 471 bp, Homo Sapiens
agttgggaatggccacgtgcagccccccgccaccgccacccccaccgccgccgccctgcggggacagggaagtgctcagagctggggggcttggtcatgctgtagggggactcgttcctggagatctcccggttgggcgggtagttccagatgctgctgtcattgtcgaaattgatgggttctgagatctccgtcttgatcttgagcaccgaggcactgttgggggaggacagcagccgcgggggctccaccaaggcccgcgtccaggccgcctgggctcgacgcgcttggacaaggcgccggcggctggcgcttgccgccattttgccgtttccgccttttcttgcgcttctggtgcttgctggaggcctgcgcgcccgcctcgcctgcgctgtccgagtccttggcgctgtcggacgtgagtgactcgcagttctgcagccgcaggtccgactcgctctccacgtagcg

SEQ ID NO: 365189 - DNA, 874 bp, Homo Sapiens
ggtaccggtccggaattcccgggatggctgctaaacccaaccgcagttgactagcacctgctaccgcgcctttgcttcctggcgcacgcggagcctcctggagcctgccaccatcctgcctactacgtgctgccctgcgcccgcagccatgtgccgcaccctggccgccttccccaccacctgcctggagagagccaaagagttcaagacacgtctggggatctttcttcacaaatcagagctgggctgcgatactgggagtactggcaagttcgagtggggcagtaaacacagcaaagagaatagaaacttctcagaagatgtgctggggtggagagagtcgttcgacctgctgctgagcagtaaaaatggagtggctgccttccacgctttcctgaagacagagttcagtgaggagaacctggagttctggctggcctgtgaggagttcaagaagatccgatcagctaccaagctggcctccagggcacaccagatctttgaggagttcatttgcagtgaggcccctaaagaggtcaacattgaccatgagacccgcgagctgacgaggatgaacctgcagactgccacagccacatgctttgatgcggctcaggggaagacacgtaccctgatggagaaggactcctacccacgcttcctgaagtcgcctgcttaccgggacctggctgcccaagcctcagccgcctctgccactctgtccagctgcagcctggacgagccctcacacacctgagtctccacggcagtgaggaagccagccgggaagagaggttgagtcacccatccccgaggtggctgcccctgtgtgggaggcaggttctgcaaagcaagtgcaagaggacaaaaaaaa

SEQ ID NO: 365190 - DNA, 737 bp, Homo Sapiens
  misc_feature (154)..(176): n is a, c, g, or t
agcggagcggaagccatgttggagtttcaccccgagcgaggggctgcgagggttctcctctccttgtgggtgtgaccaggttcggcgcggcggcgggccgcggggggcggggacgattggccgcttgtcgtcgtccgcagcggcgtgaggggannnnnnnnnnnnnnnnnnnnnnncgcagcgtggagccgggtgattgtgaccgccgggggagccgggagccggccgcggcgccctctctccgtgtggccccctgagcggaccccctcccctgacccgggagggaggcggggggcacctggggcaccgccatgaaccccggcattcgattttgtcaccgacggaaaccgcaggaggacttcgagctgattcagcgcatcggcagcggcacctacggcgacgtctacaaggcacggaatgttaacaactggtgaattagcagcaattaaagtaatacaacatgggaaacaggagaagactttgcagtggtgcagcagaaaatgatcatgatgaaagagtgtaagaacccaaatataggtggcataatatgtggaagctatctcaggcgagataaagacttgggatatgcatggagatataagaggagagaggtaactcaacaaggatatttatcaacgtaactgggaacctctgaaaagaaactggcgaaataggcataatgttcagccagagaaacaactggagggaatgatataatacgataaaagtaaaaggaa

SEQ ID NO: 365191 - DNA, 1388 bp, Homo Sapiens
  misc_feature (350)..(383): n is a, c, g, or t
  misc_feature (396)..(441): n is a, c, g, or t
ggcagcgtacggccggaattaagggatgctcgagttctgcgcgggacttgacaaggcacgacacgggccggaaggctgccaggcccgagttgggcaagtcgaagaaatgaaccatcgacaatgcgggtcgcattcggggcggggccgagtgcgaaccgtgagtccccaagatcccgacccacggcaggggcggggcccgggagctggggccgttggcaggccagcccgcgcggcgacgtctccgctgtgcggtcacggcaccgaagtgacggcctaccacaccagtggccgcagaccagcgcccgaaggccgacaccgctggccctgaggcaacggctcatcaggtaccnnnnnnnnnnnnnnnnnnnnnnnnnnnnnnnnnnctgcgcggagagnnnnnnnnnnnnnnnnnnnnnnnnnnnnnnnnnnnnnnnnnnnnnnctcggctaggaagccgctgctacccatcccgtccggccgctgccccggccccgtttggagcttctagggcccgaggcgggcggcgccgttgggcagtcccggcgggtggtctccggggccgcctccccgacatgcgccgtctccaggccgcccagttcaggagacggccccgccctcaccgctgttcggctgtgtcagcctcgcttgtgcagccttttactccggagaagaccttcaccctggcgcctgagtaggacctcacccagggtggcccgtcagcagcacctgggcctggctcgagagtgacctggtgagggggctgaaagtggcagacaagggagagtcgggggagtcggttcacaggcagcacacttgacctgtgagggggccctcggtgggacggtgggtgaggtcgcctcccactggagcttagggctggcacccagcgaggggcagcaggaccacgtggctggcaaggagctgtttagggctgagagccaggcacctaaggttggtgccctgtcccatcccatcgaagacacgcggccttatggagtccccatgggacggggcagccaccttttctcaggatccgggagacttgacgcggacacattgcagaaatgagcaaggaggccacagaggctgaaaatgctttcagaaacaatccgaagtttcagcgacttgttaccccaatctgcttcctgctttgcaaccacctgtggagtggagcagacaagctcttcctgcaggactcttttttcccgagggatcctgttaagattgtccgggccccagggcagtacatgttacgatgaacagggggcagaatacatcgattgcatcagccatgtggcgcacgttgggcactgccacctctcgtggtccaagcaggcacatgagcagaaaccaggtggctcaaaccaacacagcgggacctgttgaca

SEQ ID NO: 365192 - DNA, 1093 bp, Homo Sapiens
  misc_feature (178)..(229): n is a, c, g, or t
tggaccggtccggaattcccgggatcagcgctcgagttcctgtgcgggactgccaaggcacgaccacgggccggaaggctgccaggcccagtgggcaagcgaagaaatgaaccaccgcaacgcgggcgcttcggggcggggccgagtgcgaacctgagccccaaatcccgacccaggnnnnnnnnnnnnnnnnnnnnnnnnnnnnnnnnnnnnnnnnnnnnnnnnnnnnctccgcgtggcgtcacggcaccgactgacggccacccaccatggccgcagaccagcgcccgaaggccgacacgctggccctgaggcaacggctcatcagctcttcctgcagactctttttttcccgaggatcctgttaagattgtccgggcccaagggcagtacatgtacgatgaacagggggcagaatacatcgattgcatcagcaatgtggcgcacgttgggcactgccaccctctcgtggtccaagcagcacatgagcagaaccaggtgctcaacaccaacagccggtacctgcatgacaacatcgtggactatgcgcagaggctgtcagagaccctgccggagcagctctgtgtgttctatttcctgaattctgggtcagaagccaatgacctggccctgaggctggctcgccactacacgggacaccaggacgtggtggtattagatcatgcgtatcacggccacctgagctccctgattgacatcagtccctacaagttccgcaacctggatggccagaaggagtgggtccacgtggcacctctcccagacacctaccgggggcccctaccgggaggaccaccccaacccagctatggcctatgccaacgagggtgaaacgtgtggtcagcagtgcacagggaaaagggccaggaagattgcagccttccttcgctgagtctctgccccagtgtgggagggccagatcattccccctggctggctactttctccaagtgggcagagcaccatccgcacaggccggaaggggggtctttggttgcaaatggaaataccagggttgggcttttggcccgggtaaggccaaaacactttctgggggcccttcccaacctcc

SEQ ID NO: 365193 - DNA, 1168 bp, Homo Sapiens
tttcctggtgcccttcattggggttggtatatctagtacctgcttctcccaccctgaggcccctactgtgtacaggcccggtaaggtaccagtcacatactcgcacttagccctcacagttcatcccattttatgcacaaggcgactcaaagactgagtctggcccagagaaggcctgcaggagtctccgagccccgcctgggcgccgggagcagggcggggtcgtccgggaccctttcccggaagggagcacgcaggggcctcggggcggggcctgcggggcgagcccggggcgcgtcccggaaccagagacggggcagcgctcgagttcctgcgcgggactgccaaggcacgaccacgggccggaaggctgccaggcccagtgggcaagcgaagaaatgaaccaccgcaacgcgggcgcttcggggccgggccgagtgcgaacctgagccacaaatcccgacccaggcaggagcggggcccggagcggggccttggaggcccagcccgcgcggcgacgtctccgcgtggcgtcacggcaccgactgacggccacccaccatggccgcagaccagcgcccgaaccccgacacgctggccctgaggcaacggctcatcagctcttcctgcagactcttttttcccgaggatcctgttaagattgtccgggcccaagggcagtacatgtacgatgaacagggggcagaatacatcgattgcatcagcaatgtggcgcacgttgggcactgccaccctctcgtggtccaagcagcacatgagcagaaccaggtgctcaacaccaacagccggtacctgcatgacaacatcgtggactatgcgcagaggctgtcagagaccctgccggagcagctctgtgtgttctatttcctgaattctgggtcagaagccaatgacctggccctgaggctggctcgccactacacgggacaccaggacgtggtggtattagatcatgcgttatcacggccacctgagctccctgattgacatcagtccctacaaagttccgcaacctggattggcccaaaaggagtgggtccacgtggtatgcactgcccaattcaacaacagattgcagccttcttcgctgaagtctctgcccagtgtgggagggcaaatccattcccctgttggttacttctcccaa

SEQ ID NO: 365194 - DNA, 551 bp, Homo Sapiens
  misc_feature (177)..(185): n is a, c, g, or t
tatgttgaaatcggtgtagtatcctgaggtttttttccccccagaagataaagaggatagacaacctcttaaaatatttttacaatttaatgagaaaaagtttaaaattctcaatacaaatcaaacaatttaaatattttaagaaaaaaggaaaagtagatagtgatactgagggtnnnnnnnnnttgattcaattttatggtaaaggaaacccatgcaattttacctagacagtcttaaatatgtctggttttccatctgttagcatttcagacattttatgttcctcttactcaattgataccaacagaaatatcaacttctggagtctattaaatgtgttgtcacctttctaaagctttttttcattgtgtgtatttcccaagaaagtatcctttgtaaaaacttgcttgttttccttatttctgaaatctgttttaatatttttgtatacatgtaaatatttctgtattttttatatgtcaaagaatatgtctcttgtatgtacatataaaaataaattttgctcaataaaattgtaagcttaatgt

SEQ ID NO: 365195 - DNA, 822 bp, Homo Sapiens
gagcgaggcctgggtggcgaattcggcacgaggagcggttggagcaggggctctgctgcgacctttacggtagtgaggttagggacgatgggagagcagctttgttcctgaagtgccgtcgaggattaggatcgagtttcttcgatcgtgagggcaattattagtggcctctagccccccagatggcatcttgaggagagagaatccacgctacgagaactaacatagtggacatcgcagttgtccgtagccgatttgcgggttacggagttgttgcaagtaaagaaggggaaatccgagcgttctcgcgttggatttcctccacgtgtgaagtgggaatggtagtgatatctcgtgctatctctgtcaagggcaagaaggagaaggaatttatttgaggccctacgacgtggtaggttcaccctcagcctttgttcttatttcatcttatttgtggagaaggtcttttcgttcctattttacaggtgagaaaaggggcccaatatatagttatttgcggccataaaatagaagccagttgcctgatactgaagattcaatgaaatcttgtgattgacttcccctctttaattttgtactttgggtaacatcggatccggtagaaacgctcgtcagaaagagtttttaatgtgcattctacaatttccagacatagtttccttcttgaaaaatgggttaatactaccctatagggatcttgtgatgccccacgaaaacgttggtaggttgtggaccacttataacaaccgtatggagactcctccatggtcctttgagggggaacctggtagggtttaggaa

SEQ ID NO: 365196 - DNA, 530 bp, Homo Sapiens
gcacctaaactgaccagccctgtgatcctgcaccccacaggagtaactcatcaggacttaccagactgctgcttttgggcatcatctgctgggttgatgatttggtttggccaagagtcttgccaagactttaatctatgcctcttgttctacatgaattcttgggaattactcacgttccataggaagagtgcatccccaggtgatggtttttggttatggtatgatcctttcacaccgaggatttcattgtttaaaacgtgtttctttaaaagaagccttgataacgagagtgggggaaggaggcagcagactttgaagactgtggcctttggtgttctggagtagggggagggaaggagaaacatgttttccacatcatcgcaagtgtgtgccctttgccccttttcaggatccttagagttgcctccctccctccaccccgacagttttgcaataatgtgccttatcagttgtgagtttacaggtgaagcaatttcccaaataaatggatgtaagtgttcaaaaaa

SEQ ID NO: 365197 - DNA, 444 bp, Homo Sapiens
  misc_feature (19)..(19): n is a, c, g, or t
  misc_feature (35)..(35): n is a, c, g, or t
  misc_feature (259)..(259): n is a, c, g, or t
ccccaaaaaaacctgcccnaaaactttaaacctanggcccccctggtccctaacatgaaaaccctggggaaatttacctcaccgttccccataggaaagaagtgccatccccccggtgatggtttttggttaatggtatggatccctttccacacccgaggatttccattgtttaaaacgtgtttctttaaaagaagccttgataacgagagtgggggaaggaggcagcagactttgaagactgtggcctttggtgttnctggagtagggggagggaaggagaaacatgttttccacatcatcgcaagtgtgtgccctttgccccttttcaggatccttagagttgcctccctccctccaccccgacagttttgcaataatgtgccttatcagttgtgagtttacaggtgaagcaatttcccaaataaatggatgtaagtgttc

SEQ ID NO: 365198 - DNA, 869 bp, Homo Sapiens
aagggggagctggctgtccctccacctcccatctgccattccgaggcatcatctaacgtccccggcgtcccctctcattctggtgtcccctgtgttctagaggaagcatggactgtgtctccaggatgggctgtgggagctgtggggctcccaggggggcaggagccctcaggggagaggggtggggcacgtgggtgcgcaggtaggccgtcctggagcagagcagtgtagggccaagccctgtgtcttctgctgcttctcactggctctggggcaggtggcttcctcacctgcacgatgggaatgaccctggagttctggggaacttggtgagatcaggaccttcccccagcagtgccccccaggtgcctgacgtactgttgtgctgttggtggtattattaccacctcgggccatgcgatgacccttttgcttatctgcaaaataaagcgggtttggcagcaagaaaatcaaagtgaaactggcgaagaaagggccggcctcacgagaccccggggactcagacccagtgagcgcacctcttgctgctcctgcatccacacagcaccccgcgggaaggcaggacgagctgcttgccaggtgacctcccgtgcctcagtttcccccatgaccacgaggcggtgagagctccgccgagctgcccaggataactgagctgggcttggtgcggtgcggcagtacgctggtcctgccctcttgttggtcaaatctccaagcagacttgtcccaggaccctgggtcctgtgtgtggcagcatggtcctccctgctgccccggccccgcttccccatgggctacggccaggactggaggacttgcccaagctaggttggcctctggcaggggac

SEQ ID NO: 365199 - DNA, 707 bp, Homo Sapiens
  misc_feature (47)..(47): n is a, c, g, or t
  misc_feature (64)..(64): n is a, c, g, or t
  misc_feature (66)..(66): n is a, c, g, or t
cagtggcgacgggcagcagcgcttcgtgatcctgatttcttccaccncaggcaagaagtgcccncnatgggtaccaccaccacccctcccccgaggactaaatgagcagcagggagtgacaaacagtcaggtgcacctaagttccagccaagctctaccatcgacactctatgacttggggagagctgaagcccgtgagaagaacctaacaggctcatggtctggccctcatggacaccccggggaccaccaggtgaagtggagtcaaggcctgctctcaaccctgggcatgggtggagacatgagtcagcatgagtggcctgagggggagggtcagcagccctgtccgaggcaatgggaaaagcactgaattttaaggcaaatggcccaggttgagtcctggctcctccctctgccttcactagttttgtaatgttgaacaagtcaatacatgaatttcataatctataaaacagggacagtaatgcttgtttggtgatctagtgtcttcacaggacagccatgaggctcaaatgtgaaagctcatggcactagaaacgggaagatggcacgtctgtgtgtccagtgtacacacatgcacctccacacacctacacacagactgctgtttagactgaagcagagcagtggggggcactgcgcgacgcgtgggtcgacgatatcccatagttccggaccggaccagc

SEQ ID NO: 365200 - DNA, 459 bp, Homo Sapiens
atccttccactccaccctcctctttgtgtaatactgccaaggggctacaccaagagatatggaaaataaaactgaccagataggtctccggctatttttatctctaattactgtggcaactctggggaaaccccaattgcctggagaggtctactgtgttcaccataaaccatgaagaatttagctaacagtttaattttttacttttcctagaaaatgtgatttttaaccggctcgaaactctgtttccatgatggagtttcacgtttcagacacagcaagcatggagggagatttctgagggccatggactcttgtcatgaaatcacaccacacacataaatagtggtctacaccaccaacacgtaagcaaagtcctggtttgaaactattaggatttggaataataagccaaatcttctgcaaacatataattaaacattagctatgtttcaaaga

SEQ ID NO: 365201 - DNA, 603 bp, Homo Sapiens
  misc_feature (482)..(494): n is a, c, g, or t
  misc_feature (496)..(502): n is a, c, g, or t
  misc_feature (516)..(517): n is a, c, g, or t
  misc_feature (553)..(554): n is a, c, g, or t
gggaatcctattgattattcaaaaattcaggctgatttgtcttttatcagaggtaggattctgttttatagtatagaatctactttatccttcctttgaatagttcctttagacctgtgaaatttcttcactacatttaatagttctcctatttcccgctcccccatatcaattttccttttgtctccggggctgagtaaataaacatgttctgtcacaaatagcagcaccactttggattgattttgctctccaggacatcagcacatggccctgatcagcactaccacatccaaacataagtcactgaaaaacacttaatatttatgagttggtaatgacaagggacattgtataaagtactatttgctagattcatgcctcaaaagttattataaacagacctttattaaacacatcttgaaagatgtagaagtccctctatagtctagtatagtttacaatagagttgtaagaccctnnnnnnnnnnnnngnnnnnnnaacatgggtcggcnncgcctcggccccttcgaagaaagcttttctagaacnncattcggtttgggcgccgcggggccccagtagggtaaagtggaacatgg

SEQ ID NO: 365202 - DNA, 756 bp, Homo Sapiens
  misc_feature (686)..(686): n is a, c, g, or t
  misc_feature (693)..(693): n is a, c, g, or t
  misc_feature (727)..(727): n is a, c, g, or t
cctattcagttcacttcatctcggaaatacctgacccctgccttggatccagcggccctcctgagagctgaggaaggaggaaatcctatgtgtctgctcccggagctgccacaacccatcttcccacaactcggaacttggaaaaaggaacccaggacacgactttgcttttcttttggacctagttggtgattatactctgtctcccatggagaccacgtcttgcatccttccttctatatgggatttaggatagaaattaaaaagaaaacatattattttgagtcttgatttggagaaaggtagtattcaggaggaagtaggctatgatacacatagaaaatttgaggacagtgttacttaacaaggacatttctgtctctgcagaagtcacagcttggaggaaaccagtttgcactatttgatgaggaatttggccaccaaaccactgatactttcccaaaggtttggcagaaattgttttttgagtggctcaccagagtacccagaagaatcagtatggaattagaggacagtggcctaccctaaataaagacatgagtgatgtataaagtctagtgtcaatttattcagaaaatatcaaaattattctgggagctatgggtcaaagttgataggcacaaacaaacaaaaacgaaaggtatttttaaattcacagcttgggnttaagtnaaaaggggaggatgttgtccttttcttcttcttncaatcccaacttttaggattttccaagcc

SEQ ID NO: 365203 - DNA, 523 bp, Homo Sapiens
  misc_feature (125)..(141): n is a, c, g, or t
gcttttgccttagtagaggttttatgtcaacaccttcaggagggaagcccttatttctgggttgaactccccttccatgatattatgctagcaattgccatcacttagttcctggcgaaggcagnnnnnnnnnnnnnnnnntcagcattgtcattgacaaaactggatgctgaagataaagtaaaattgtcttttcccttgtcccacatttttgggattaaagccagaattgaataggaaatacagtactatttctgaagttgatagccgatctttaagaagaccctgtctttaaaatgaaactagcaggcaaacacctaaataatcgaaaattaccaaagaacaacaacgaaacaagaaaacctaaagatttttacttcctattcttattcctttccttattactgtgacaccccttgcattgctcagttgcctgtgtgtcaaaataacttgtggacgttggaaattatttgaaaatgtattgtgtggaatgtaataaaatgaaaatatttttatacaaaaa

SEQ ID NO: 365204 - DNA, 543 bp, Homo Sapiens
  misc_feature (79)..(79): n is a, c, g, or t
  misc_feature (216)..(216): n is a, c, g, or t
agataatgcaatgtaagtgtttgctactaaaaattattattcaagcacacaggataatgaaaattgcttgtacttgaanagtcgagtcaggaagaaaactgtgtaggcagttcttcaagggagaaagaaagggacaagataaaatgataactaaaaattggacataagagagacagtgtccaggaaagtacatttgcattaaaaagtgcaacggancagaaagattagcaacacattcagtgaagtggacataaaacaaggcaagtggcaggcatcctaccaagggaacaaacagagaactaaagcagttcagcacagtatgctggaaagaagaaataccgaaagggactgagcagtgaatggcgaacagaaggaggtgcctgacagcaagatcttagtgaatacacaggagtgacacacagtgtatgggtggttaacaatgtgctcttccaaggcagaaaaagaaaaacaacagaataaagggaaaaggcatttaaaatttaccttaggatgggaaaagtcatgcgaggaaaaaaacctaaa

SEQ ID NO: 365205 - DNA, 358 bp, Homo Sapiens
gaaaagggagggtgggtgggtgaggacacggcagaggtgggatatgcattcttgcaatctagatccgcagccctgttagtcccctagtggccttgtgggcttctctgataaccggctcagttgggggatgagggctcgggggtagattcccggcttccgaagaggcgtgagaattctgttccaccacatcaccgcgtcctttcttctgcccgatttccccggaaagtgtagcagaggcgctgtgtttggaagtcccgctatcacggccccccagatggggcctggacgatgcctcctgacggccttgttgcttctggccctggcgccaccgccggaagcctcccagtactgcggccgc

SEQ ID NO: 365206 - DNA, 556 bp, Homo Sapiens
  misc_feature (374)..(374): n is a, c, g, or t
tgaagaagaaaaggcaaaagcggaactgattatggatgatgacagaacagttgatccactactatctaaatctcagagtatcttaatatctaccagtgcaacagcatcttcaaagaaaacaattgaagatagaaatataaagaataaaaagtcaacaaataatagagcatccagtgcatctgccagattaatgacctctgagtttttgaagaaatctagttctaaaaggagaactccatcgacaactacctcttctcactatttagggactttaaaagtcttggaccaaaaacctttcacagaaacagaggcataggaacctgatagagcagataacataaggggcagctgtttattcaggagtggttagaaanaggaaaaatgtatatttacatgaaatgcacagaataaaaagaattgaaagtgaaaacttaaggatccaaaatgaacagaaaaaagctgctaaaagagaagaagcattagcatcatttgaggcctggaaggctaaaaagccaagcaagcaaagaaaatagctgccaaaaaagaacttgaagaa

SEQ ID NO: 365207 - DNA, 1311 bp, Homo Sapiens
  misc_feature (55)..(73): n is a, c, g, or t
  misc_feature (323)..(392): n is a, c, g, or t
  misc_feature (735)..(743): n is a, c, g, or t
  misc_feature (745)..(745): n is a, c, g, or t
  misc_feature (887)..(887): n is a, c, g, or t
  misc_feature (949)..(958): n is a, c, g, or t
  misc_feature (1100)..(1100): n is a, c, g, or t
gggactcccctacctggcgcccagccccaaccagctggccgctcctgcccatgcnnnnnnnnnnnnnnnnnnnaacttttataattggagcccctggtgaggttacgcgtgccatgagaacccactctacaccaccacgctggtgcctcactgttggccaaactccggagtcactgactggcttgactttcataccgcgaatatgcatcctggtctgtactgaccatggaataaacacatatctatttttttatccaccaacgtgccgtagcccctaaaaaaacatctatctcctatccgcctctctcccccctactactccnnnnnnnnnnnnnnnnnnnnnnnnnnnnnnnnnnnnnnnnnnnnnnnnnnnnnnnnnnnnnnnnnnnnnngaataataattcctatcccaacaacactacccctcccggggccccgcctccacaatttgttgtacccctcacccccccgtggccccttaatgttgtttttacccccataagatgataccccactatgttgcccttttagataacccaccccgtctctttgttatctcccctcccgccgtaacgaattataaattaaactcccccgcccacgtgcggcgggtttattattctactctgtcacggcttctcaatgtgattatccacccagccttttcttcatcctcacacccgtgattttgtccccccctttccacttgagagagaaattttaatgttccctttnnnnnnnnnanacccgccggggagtgcttcgtccccacttcctccctccaccccccctttctccggggaccaccatctctttccccctatcacccccctatacccacaaaacaccccacccaataagataaatcttcttcccgcctgcagctnaacgttttttccttgggccccttccactgagagcccccccactcctttacgaaaatatactnnnnnnnnnntgccgtaacgtgcgcagccaccttatctcggcgggtgcggtttgtgcgggtttgtaaaaacgcgatgtccccccccacatgatcatattttttctataatcttcttaccatttccacacttttccccggtaaaaccatattnatacccccatctccccaacccctcgtttcttcacctcgctagacatttctttttcctccccccgccgggataaaacactacaccccatagtgtgcttcacctctttcccaccccacccagcacacaccagcttctttcccgtttatctccggcgccccacccaccactacatgtttttcccctccccgcacgcaccccccacctgtccttt

SEQ ID NO: 365208 - DNA, 453 bp, Homo Sapiens
tctaagaagttgctgtatttaatgcttcccctcccaccatcccacaccctctcctacccaagacatttctctagggagtaggggccttgcccggcccttcctcttaaggcagatggtgtggaggtaacatcaaacgcaaggcactggcccagggcgcaggggtgtgggcagggcaagaggctgggctggctcctagtcattggaagtgaagcaggtgggcagtttgggctggttccagccttccagtgcaatgcccgaggacgagagtggtcccagaaagaaactggcagccccactggccaactgcagccctagcctatgccccaccatccttctccaggggccagtcggcctcagcagggaccagaaaaagccacagcccagggagcaggtatggccttcctaagccacaatctcaaaagtctctgtccttcatgattccttaaagggagg

SEQ ID NO: 365209 - DNA, 612 bp, Homo Sapiens
ctgagcttttcaaagtcccgaaatgaaggcggagaggtggaccgcgtggactatgacagacagtccgggagtgcagtcatcacgtttgtggagattggagtggctgacaagattttgaaaaagaaagaataccctctttatataaatcaaacctgccatagagttactgtttctccatacacagaaatacacttgaaaaagtatcagatattttcaggaacatctaagaggacagtgcttctgacaggaatggaaggcattcaaatggatgaagaaattgtggaggatttaattaacattcactttcaacgggcaaagaatggaggtggagaagtagatgtggtcaagtgttctctaggtcaacctcacatagcatactttgaagaatagacttaacagaatcatgaaaactatagctttttaacccggattactgtaaatgtttgacaaaaatgaatatgcttttccttaaaaaatgaaaactttaatttttaccatccatttatgtttagatacaaaacttatttccatgtttctgaatcttctttgtttcaaatggtgctgcatgttttcaactacaataagcgcactgtaataaaaaattttgtttat

SEQ ID NO: 365210 - DNA, 435 bp, Homo Sapiens
ctcccactctgccaggtgctggctgtggagcaaaggctcacctttgtggagaggataaaacctgcccaacctacctcaccatggtttttcacattgcaaagggtaataacatgggcagtgcggacttaggctaccccctccagtttgctttccgtaaatgcaaattgtccttactgcaagtcaggaatgattgctgactcacagtagggctgctatgcctgtgtgtaaacttggggatggctgagggaacatagactcactcttccacattcccaagttggtctagtgtgctgcccagtagcaaaccatggcagactcaccacctattctgagttccagggctgctgtagggcagggtgggcttcctcccagacttgccttaccctgggctgatctttgcccctggtatgcattaatggactccactgaatcctg

SEQ ID NO: 365211 - DNA, 519 bp, Homo Sapiens
ggagcaacggttattcagactcctagtgaagatcagagattcagatgaggtatagccatggatgcatggatgtttccactgggtgatgaagtatattccagaattcctcagcccctctcttttatcaactctgaatatttccaatatcctgctaatatcataaaaatgaaaaaatgctactcacctgataaagaaagaaagatgattacaatcaggggttcagtccaccagaattttgctgacttcacttttgcaacaggcaaaataattggacacatgctcaaattaaagggagacatagattcaaatgcagctattgatcttagcaacaaagcttcattagcattcttacaaaagcatttaggacttcataaagattttgatcagtgggactgcttgattgaaggagatgatgagaatcttattccagggaccaacattaacacaaccaatcaacacatcatgttacagaactcttcaggaatagagaaatacaattaggattaaaataggtttttt

SEQ ID NO: 365212 - DNA, 524 bp, Homo Sapiens
ggtgttgtctgaaatgcaagagggaaggtgattggtagtgagttaaaagaaaaagagaggaaaagagagtagttttgtcttcaagtaaaatgtctggttgtgccagacatttcacaagtgtgaaaggagataggagaagctcaacttgagggcgtgtagtaagttgtagaaggctcgaggggacgtggacttatttgccttggtttgcaatacctgcaaataatgagtttgaaaagaaacaatgaaatgtgttaaaaatttgaccatattagataaattttggtggatttagtcataagatggaaaaagactggtgaatcttttattacaaaatgtttctgttaaaatgggatcatcatctttgaaaggggggaggaggagtaaaagcccgattataatggtgatcaattcaagtcagtgttgactattctgtgaaatatatttggccagtggaaatgataatcagaaaagactgtaaatagatccatccaaatgatttctctgtacaaatgaatgatactatt

SEQ ID NO: 365213 - DNA, 572 bp, Homo Sapiens
  misc_feature (425)..(450): n is a, c, g, or t
gcggccgcggcggtccagccaggggctcctaccccggggagctccctccgaggggatgttagacacaggtctgtctacacattatttcgggttctggaggcgcctcgacatacgggaatgacacatccagaaatgcaggtgttccgatctgccggatgagtcagaagcagcggaacgaatcgtattcactctcgcctcatggtcctcccttcacagacattagttgcggcttcttcctaacgctttctctgactcagtctatagaaagaaaaaccagattcatgtttttggggaaaaagaaaatgcaagagaaaaggatggagggaagaaggtgaagctgaatctagcagcacttttactctacctctttctgccggagtccgaggttctggaaaacaaggcgtctgctttgctaggtgtattgnnnnnnnnnnnnnnnnnnnnnnnnnnaaacctttcctcttggttaggcgagaggtaccccgaaatttttcagagtcttggaaaaggaaaaacaaaatcaggtttccagtaattgttcccagcttagcctcgcatcatagttcaagatt

SEQ ID NO: 365214 - DNA, 631 bp, Homo Sapiens
gatcaaccaagatctgtgtgtagtagcggaggagcgttgcagaggggaggtgactcccctatctgggacgctggagccggacggttttgcggtgagcgtgagtgggctggggttaaagggaggccaagaaggacgatgctgttcggaaggcctataagtatctagctgctctgcacgagaactgcagccagctcatccagaccatcgaggacacaggcaccatcatgcgggaggttcgagacctcgaggagcagatcgagacagagctgggcaagaagaccctcagcaacctggagaagatccgggaggactaccgagccctccgccaggagaacgctggcctcctaggccgggtccgggaggcctgaggagccgccggcagaggtctctccccagcctcaggcagggatttggggtgctggaggcagtggccaagcacatgccctagctacttcctccgctgtccagttcctcctgctgcggccttggacccagacccctgcccactgaccgcaacccttatatggggtgatagtccagcatgtggggagctcggctgcagtttattggggacggtactgtgggttgggggccttggatcccaaataaatgagtagttcctctgcagtct

SEQ ID NO: 365215 - DNA, 849 bp, Homo Sapiens
gtcgagctcgtaccattaggcgcgtctgcgtcgtggctacctttaccagcgcccagacagtgtgggtgttagtgggcacagtggggatgcctcacttgcctgtcactgcctgtggcctcgaccctgtggagcagaggggtggcatgaagatggccgtcctgcggctgctgcaggagtgtctgaccctgcaccacttggtggtggagatcaaggggttgcttggactgcagcacctgggccgagatcacagtgatggcatctgtttgaatgtgctggtgaccgtggcttttcggagcccagggatccaggatgaacccccaaaagttcggggtgagaacttctcttggtggaaggtgatggaggaagacctgcaaagccagctcctccagcggcttcagggatcctctgttgtcccagtgaacagatagagaggtggaggaggtgacagggagctaggcagccgtgctccctccagtgcggacttgtctccctctgagggaggcaagaggctggcgatcagggatcttgttgcattgggagcaggggcggctctcctggtccccaggagagatgctttgaggagcattcctctagattgcacaagggacagtgccttaaaccaagcgaggagtccaaagctcaggacctgactaccctgagggcacgctgacgcctcttcccagggggatggggagctttctgcacccccagtggcatctcctcatcacgttttgtgccgtccttgggaaaggcctgcattctgatccttccaggcccttcgagcatggaggggcactggggaaggtcccccgagggaggagcccgttgctgagtaaagaggtgttactc

SEQ ID NO: 365216 - DNA, 659 bp, Homo Sapiens
catccaatttgaaacatttcttttattgaagaagttgaacttacagcagacagtgaaaggagttacagcactccaggacaaacacagacataaaataatacataaaacaagtagcgggaaactggaagatgccagggagtcctcttataaaagcagggttcaccaaaaccagaaggccaactggctccaggacagcgaaaggcacagtggctcctctgctcctctgccttctgccccatttgaaatgggggacttacaaatccagacttcagggcaggcctagacttgatgcagccactgcaatcttggtccatggtgcaatttggcagacaagttggtgaaaggtaagttgtctccagagatttcaatcagggacgtggcttccagatgttaaaagatacccagctaagtcacaaggaagtggatgttttcaaatgctaagtgaccaccaaacaaaacattctccctgggccttcaccactcagagaacaccaacatacaaaaacaaaagtctgttcccatttcatcaataatggagttttaaggattttgtcatagtgtagaatattaagaatggatgaataaaaagtcaaaaaaggtgcagaggtcctataacatcagcgtttattagactagatattaataaataagaagggttt

SEQ ID NO: 365217 - DNA, 680 bp, Homo Sapiens
  misc_feature (536)..(536): n is a, c, g, or t
ggggacggtcctgccttgaggaggcggaggcaggacagggtggggttgcgggcccggcgccgcccctcccggctcctggctcccctcgcctggtgccccgcgcctggccgggaggcggcgggtctcgatcgcgcgggcctccctggaggggcgcgggctctggcggcggggaggcccctgctcagcgcaatggcgggcttgcatccttgggtgattttttcgggccccttgtggcctttgctcacgcctagagagcaaaccacccgcaccacccaggagcagataaaatcgagaccacagcctgcaagggagcgcgcctccatcctgtttgcccctcgggtcgccgtctgagggcgggcccgtgcccgctcagagcctacatccgagtcgtataaagcgctgacagcagagaaagctgcggctttgctccgtgcagatgagcaggggctgagggaggacgctgtgctctcagtagccgcgcttggcccggggaccctgcaggcttagaaacgtgagtcacgcctgcagcgggcganggaaacgccgttgatgtggcatcctcagcctggggttgtggctttaagcagaaggtcaaaaaaagaagtcttcctgagctgagactgccctgagtcgctttaggggcgaaattccgagcatccggttgcatttcctgaggatga

SEQ ID NO: 365218 - DNA, 739 bp, Homo Sapiens
  misc_feature (255)..(255): n is a, c, g, or t
caaatatcttctccagtgtatcaactgtctttcgattttgtttatttattttcttttttaaactctgcctggttttccctttcccatagaaaccccaataaaagcgatggcctaggctttaccctcagtcctgcttctgcctgaccaaactgtatctctcctgtggctctgtgtgatgtgacttgtcctcttctccaaggaagtattagtcataaattcttctttcagtggcactgatctgtgtcatcactcagncaaccgcataaattaagacctaggcacagaaccaactctgtttctatttctataaaattctagaaaatgcaaactaaaccataatgaccagagaatattagtggtttcctagggatgggatgtgggcaaagagagacgaaggaaggagggattaccaaggaggacagggaaacttcggggatgagggatatgctcattatcttgactggtgatggttttacaggtgggccaaaactaatcaaactttacacttcatctatatgaccagctatcatatgtcaattatacctcaataaagctgttttaaaaacatttagggtatatctactggaaagtaaaactgcttttaattacagactatatcatcatgtacatagaaaaatccaaaggattctgcaaaaaagctactagaaccactgacttcatcaagatgcaagtacaccccccatattcaaaatcaactatatttctattcgagagcaac

SEQ ID NO: 365219 - DNA, 139 bp, Homo Sapiens
gaaagactttttaaggtcaggcaccatgggtcatgcctatcatctcaacgctttgaggactgaagtgggaggatcatttgaggccaagatttcaagatcagcttgggcaacatagtgagactctgtctctaaaaaatta

SEQ ID NO: 365220 - DNA, 594 bp, Homo Sapiens
  misc_feature (122)..(122): n is a, c, g, or t
agcggaggcccctgggagggggaggggaaagaaccaggctgagctgtggagtgaaggggagccatttctctccaccgactgcaacctccgtgctcacagctcacggttcaccagaatccagnggcttggtcggcctaggaatccacaatgctggatattttcatcctgatgttctttgccatcataggcctggtcattctgtcctacattatctatctgctctagtggcctggagctgcggccggagcctgctggagaacagctcagaaggaaggatggagctgaatggccgagtgccctgcttgctgacgcaccggtggatttttgcttctgctgttatctcggctcctggtctctccagtccaacaagaggcctctcatccacagaagcagtcctactgcccagcagacctctttcagagccttccagacatggctgacccctggcaagcaaggggctttttgagctgagaggcacttggctgggacttcaggaattcatggacagggctggcagatactgcatatgtttgagctgtagatgggattgagaacagaaagttgaaatggagacttattaaagttaccgtggag

SEQ ID NO: 365221 - DNA, 828 bp, Homo Sapiens
ctcggtcctcgctcagcggcccggcaggccgcacagactgtaaccgctgccccggccgccgcccgctccttctcgggccggcgggcacagtagcgcagcgcggcggggccggcggcatggctgtgtcctggaggagctggctcgccaacgaaggggttaaacacctctgccatgttcatctggctctccatgaagtgtcctgcttttctggaaaaccttcttgctgtataaccaagggccagagtatcactacctccaccagatgttggggctaggattgtgtctaagcagagcctcagcatctgttcttagacctcaacgtgcagtccttatccgttttacccatgtgccgaacactgctgggcttacctccgaggatcacagaaggttccaagcaggagaaccaggagattgctggataaatagcagaacattccgatattacctgtggtgttactatctgtattttctcaggcgtgcatgtggctgcccatctggtgaatgcccatcaacttctcagtgaattacagtgaagactttgttgaactgacatgcagcaagataccgagatgaggatcctagaaaacttctcttcacaactgtgcctggcctgacaggggtctgcatggtggtggtgctattcctcatgatcacagcctctacatatgcaataagagtttctaactatgatatcttcgtggtatactcataacctcttctgtgtcttctacatgctgctgacgttgcatgtttcaggtgtccaactgaaaccaaagcaacatttgggggttcatccttaaaataagtagggagactgggacaggaacg

SEQ ID NO: 365222 - DNA, 1332 bp, Homo Sapiens
  misc_feature (108)..(138): n is a, c, g, or t
  misc_feature (827)..(900): n is a, c, g, or t
gtgaaaattgagtttaaactcttgcttttttttaatggtttggtgtctgttttttccaccccccgcctgggcgcccggcagctgcgcctgttttgtggattcctttgnnnnnnnnnnnnnnnnnnnnnnnnnnnnnnnaaattctgaagccagaccgtctttcctcacagctccacggctgcatctccgtgggcacgcaagcttcccctggttacctgagctgctcctgccgtctcccgcctgggcttcgccgtggtgcacccgatcccggaatcgtgcgtctgcgccctgcgaaagaaggacctgctggcggagtccggccggggtctcctgcctcgcagctgggcgaggggacttggaggacagggtgaagctgcagaagacctggggtgggatggctagagaggacgccaaggactggggaaggggaagttaggaataccttacatccaatgcccacccgtgctccgcagggcaagggcagccgtcgcctcggccgcgtgcacccagctcaggctgttcccagggatttagtctggggggacaacccatggcgagatgtggtggcattttacctcagagtggagctgaagatggataaacaaggtatctgatgtatctgcctgagaaggcagagctggagaaaggcggagcgagggagcgcgtgaaaagaaagagatgccgaatgccgggtgattgtctgccgcttgctgtgcattctcattctagggaggatggcataatttataacccagcacatggatagaggaactgtaaattgtagtctggatgtccccggcgctgtcgacgaaggaactgatgggctnnnnnnnnnnnnnnnnnnnnnnnnnnnnnnnnnnnnnnnnnnnnnnnnnnnnnnnnnnnnnnnnnnnnnnnnnngaccagaaggccaaaatcaaaagtatgggcaggcttgatttctttagaagactccagcggagaactgtgtctccttgcttctgattctacatctccatccatgggccactgtttcagcaacctcagccagtgcaacacaacctcagccaagaagagtatgcagagaaaggagtcccctacctgccacaaaactgttgtctgaaaactgtctcatattgtctcaagttgtcattcattgtgaattagacctgtttaacatgtaatctgcaacatgcttcactgtctaattttccagagcccctcatataaggaactgtattattggtataatcatcatggtgaagaagttggtatgtgggggagagatgacagaaacagagagtaagtcagagctggctgcctgacagataaaaaggaaatgaccaaaaaaaa

SEQ ID NO: 365223 - DNA, 531 bp, Homo Sapiens
tctgccgtgactacaggagctcaggcagctcccaaagcaggacgctgactccagctttcagattctttgattcagggctgtgagctcctcccgtcacaagtgagcctggctcctggctgacttgacatgacagaacagtgactctctgataaccttaactgtgaaagtcaagccggctactggcatgccaagactatagacggatttaaaaaggaaagagccagtttgcaacaagctcactaaaaagctgtggagagatactggggactctcagacctgcgaataagaaagcaggcggtgggctcgttgttttcatcaatggctctgtgcaggagcgtctgaaggcacccaccaggtcccggaccccagcatgtggcatcacagccatgtctgacctgcagaaaaacataggttattcacaaacactgctgagcaaaggcaaacagttttattaccaagtctgagctctatgtatagcattaaatccactttcagataagatacggttgataaaaaataaataattacttt

SEQ ID NO: 365224 - DNA, 806 bp, Homo Sapiens
  misc_feature (195)..(203): n is a, c, g, or t
  misc_feature (269)..(302): n is a, c, g, or t
  misc_feature (623)..(714): n is a, c, g, or t
gctgattcagcattttttatcaggcaggaccaggtggcacttccacctccagcctctggtcctaccaatggattcatggagtagcctggactgtttcatagttttctaaatgtacaaattcttataggctagacttagattcattaactcaaattcaatgcttctatcagactcagttttttgtaactaatagannnnnnnnnccacttttgttctactccttccctaatagctttttaaaaaaatctccccagtagagaaacatttgnnnnnnnnnnnnnnnnnnnnnnnnnnnnnnnnnntccctattagatacacttcttaaatacaatcacattaacattttgagctatttccttccagcctttttagggcagattttggttggtttttacatagttgagattgtactgttcatacagttttataccctttttcatttaactttataacttaaatattgctctatgttagtataagcttttcacaaacattagtatagtctcccttttataattaatgtttgtgggtatttcttggcatgcatctttaattccttatcctagcctttgggcacaattcctgtgctcaaaaatgagagtgacggctggcgtggtggctcnnnnnnnnnnnnnnnnnnnnnnnnnnnnnnnnnnnnnnnnnnnnnnnnnnnnnnnnnnnnnnnnnnnnnnnnnnnnnnnnnnnnnnnnnnnnatctatacaaaaaatttttaaaaattagcatggcggcacacatctgtaatcctagctacttggcaggctgaggtgagaagatcattggagtt

SEQ ID NO: 365225 - DNA, 586 bp, Homo Sapiens
  misc_feature (13)..(13): n is a, c, g, or t
  misc_feature (440)..(515): n is a, c, g, or t
gttcaactgaaancctcaagatccccaaatatatgaagagacagtgctgtagccttgagactaatgaacaaagaaacctgctctagttttacaggaccatattttagggtctgtcctcatacctgtcacattggtgatctcacagaggagggcccatgccgctgaaaagggaaggagattgaaacatttgattgccttatcacatggtcaagtaccttgccaaataaaggaaagcaaatgatttgggtctcaactgaagatgaagctcaactcaggaagagatttatctgtatatacacataactgaaaaccaagtttaagcccaccaatgcactgctgatgcatgccatataattaatgggtaacttttattctttatgatgtctacataacaagtgtgatttggaaggcacatgtgagcatatgcattatgatccaannnnnnnnnnnnnnnnnnnnnnnnnnnnnnnnnnnnnnnnnnnnnnnnnnnnnnnnnnnnnnnnnnnnnnnnnnnncctgaccttaaaacagcttttctactaaaaaatggtgagcaatgaagacaataaatttttcatttatccat

SEQ ID NO: 365226 - DNA, 536 bp, Homo Sapiens
  misc_feature (53)..(86): n is a, c, g, or t
gcggccgcgctgagcccctatcccgtcgggagcgccaggccggccaggcctgnnnnnnnnnnnnnnnnnnnnnnnnnnnnnnnnnnaccatgtcggcagccaaggagaacccgtgcaggaaattccaggccaacatcttcaacaagagcaagtgtcagaactgcttcaagccccgcgagtcgcatctgctcaacgacgaggacctgacgcaggcaaaacccatttatggcggttggctgctcctggctccagatgggaccgactatgacaacccagtgcaccggtctcggaaatggcagcgacggttcttcatcctttacgagcacggcctcttgcgctacgccctggatgagatgcccacgacccttcctcagggcaccatcaacatgaaccagtgcacagatgtggtggatggggagggccgcacgggccagaagttctacctgtgtattctgacgcctgagaaggagcatttcatccgggcggagaccaaggagatcgtcagtgggtggctggagatgctcatggtctattcc

SEQ ID NO: 365227 - DNA, 635 bp, Homo Sapiens
ctcccgcccctcccggtacttggtctcaatcatcttgatggcatacggctgccgggttgcccggtgctctacacgtaccactcggctgaagctgcctcggccaattagggccttgatgtcatacttagctgtaacacgtgggtcaaacttggccctgtacttagctaccctggccctgcgtggtggttctgagggaggctccgtgtggccagcagtcgggggaccggggcaggggtgtgcatactgacttgctgctgggaacccggctttgacagggccaacactgtccacctctgtgatgaagtgcttgtacacgtcactcttagtgccactgaagggccccaccttcttgaccagatccagctggacatccttgggtggctcgggaaggaccttgcttgtcccacagcccatcacggacacgagggcatcctctccagcgaggctggcaggacctgctctgaaggcagtgccccgtctacacctcgcgctcggtgaaggagcccttggcaatgatgcggtcaaagcgctctccaccagtggccagctccatcaccatgtacacccgctcctgtgtctcgaacacctccaccagctggatgtatgttggcatgacgcaccctacgcaaacgcgg

SEQ ID NO: 365228 - DNA, 1051 bp, Homo Sapiens
gggagctatccgcaaatactgggattagcaattagaacagcggggaaaggagaagcctggtggccacctcctggtgaccagccaccatgcacaaatagcaaaggagattaaacttggctcaggaggtccccgagctcttctcactggagtcgatctgcgagcacacttgttacaaaaagtcattccaatcttggtctttcagaaattataacttatccactgaaaatgctggtagatgcaatatttttggatcaaatttaaccgatgggggttgtttcattatcaattctttcttgttgaggtgaaatagaaggtgttctgttaggtttaaatttatttagtgctccactaacaaaatctcctacacgttgtcttctctttctcttatattcaccaggagtttcatattcaccttcttcaaagccttccagtgatggagtagcacagagaccatcaatacccaacatggctggtatcttttccaggataaagtctggtacacgcccttcttttctgcgttagaagacatcttttcatgtccttcacttgtctgaagaagatttggtgcaaatattactgcaagattgctgctatccatcttattctcactggatctaagagaaacattcctgagaaagttaaagaagtatcttaatacatgaactgtgtggtcagccagaagacaggagagcaacagtatagctttattcttttcctctgtgcctaactgttgagctttcaaaagtgcttcatgcaaatcagctgggagaatgggctctggcagttccctaaaaaactgcttaagaagtcccgcaatatcacaaggaggtgcagaagataggcaaccttcaccatgatccactttattctttagtgcttttaggcgaatcacagatcctgatttccgaaaaagcccttcggtatgaatatgttcttctaaagatgtgcaagcatcgacaagaaagcttggaatgtgtccatattctgatacagcagactggggcagagcataaaaaggacctccaaatattttaccccctatttccgtggc

SEQ ID NO: 365229 - DNA, 505 bp, Homo Sapiens
gggattctggggaatgggatgcaacttaagacttctgcctgagaagcctcctccctgctgcctccagggggcaccaaggcacaagcctgtgcagtaggggcgggatgggggtgtggaagagcaggtccaggctcctagcacaactggcctggggccttggcacctctgtaggccctgcctgtgcctgtccgctggcctggggggcctgggcttatctgggccttctcactcagggactctcttgacgctgacttccccccgcagcggtggccagtgctgcctctgctccaagctgcccctgcgctgggaggggtgggggcggtgccattggtctggtgcagcatagccctggccagtggcctcatccccagcaggcctcccgtgcctctgccagcaaggaggggccggccagctctgcttgcacagggggccccatgtggggtcagcgcacgctcatgtcactgagttccagccgcttttagagtaaagtcgtttatcatcaaaa

SEQ ID NO: 365230 - DNA, 484 bp, Homo Sapiens
  misc_feature (44)..(44): n is a, c, g, or t
  misc_feature (78)..(78): n is a, c, g, or t
  misc_feature (111)..(111): n is a, c, g, or t
aaaaaaacttcctcccctgctgcctcccaaggggcaaccaaaancacaaacctgtgcaataagggcgggaaaggggtntggaaaaaacagatcccaagctccctaaacaanaaactgccctggggccttggcacctctgtaaacccctgccctgtgcctgtccgctgccctggggggccctgggcttatctgggccttctcactcagggactctcttgacgctgacttgcccccgcaacggtggccagtgctgcctctgctcccaagctgcccctgcgctgggaggggtggggccggtgccattggtctggtgcagcatagcccctgccagtggcctcatccccagcaggcctcccgtgcctctgccagcaaggaggggccggccagctctgcttgcacagggggccccatgtggggtcagcgcacgctcatgtcactgagttccagccgcttttagagtaaagtcgtttatcatcaaaaaaaa

SEQ ID NO: 365231 - DNA, 529 bp, Homo Sapiens
tttgttttgacttctttaatgtttgaatgtttcactctgttgtaaagtcagcataagccatcatgtgggctttcttcattcttcagcatattatccgcttcgctttctgtttatcacttttcctgctgaaatgtacatgtttgggctcctactccttggttatttttaggcttaaaagcatgcagtcggtttttcagccacttttagatactcatgcaacatagcctacttttataaaatcaaaatgaaggtcttcatacgctgtacttgctaaaaatcaactgtgcgcttgaaagacctcttcatagttgagtaatcacctcagtacttaagcacttctgaacttgggtttcatgcctgccccccacaaattatgtttagaagcagcactgcatcttagcacatgctgccttatttctttcttcggcaggtgttcatgggaagtaggtggatcagtgaaggcataatgggctgtggagaccttcacttctagattattgattcaaaataaaaagaagccacaaagagt

SEQ ID NO: 365232 - DNA, 377 bp, Homo Sapiens
  misc_feature (63)..(188): n is a, c, g, or t
aaaccctcttgtcccttaaatatttgtcaattaaagattttctggctgggcacagtggctcannnnnnnnnnnnnnnnnnnnnnnnnnnnnnnnnnnnnnnnnnnnnnnnnnnnnnnnnnnnnnnnnnnnnnnnnnnnnnnnnnnnnnnnnnnnnnnnnnnnnnnnnnnnnnnnnnnnnnnnnnnnnngggattaaaatattcaaacatgttgtgtgtacccagatatgctgttaatttaggaaaaacagtacaatttctatgaagtggttgtgactattttctgtagtcaatacagttgggatatctgatctatttctctgtctactttggaaatgattgcataataaataaaattttactgtttttttaaaaggg

SEQ ID NO: 365233 - DNA, 1586 bp, Homo Sapiens
  misc_feature (107)..(290): n is a, c, g, or t
  misc_feature (1416)..(1420): n is a, c, g, or t
  misc_feature (1423)..(1425): n is a, c, g, or t
gggaagaatgtttgatggagaaaatttgtggccaatgaagtctgaaatacttcctgtcatctgcccctttccagaaaaacttggccgacccttggtctacagcacgnnnnnnnnnnnnnnnnnnnnnnnnnnnnnnnnnnnnnnnnnnnnnnnnnnnnnnnnnnnnnnnnnnnnnnnnnnnnnnnnnnnnnnnnnnnnnnnnnnnnnnnnnnnnnnnnnnnnnnnnnnnnnnnnnnnnnnnnnnnnnnnnnnnnnnnnnnnnnnnnnnnnnnnnnnnnnnnnnnnnnnnnactgttgctgaggttgaaaataatcatgcagtcattcctcaattactgcctgcagcaattcctccatttttatgaatcttgtgagcacttacgctaggagaaatttcttttacaaaacttttaaaatacaattagtgctgataattcctatgtggaaatgattccagccatggtcccctcacttgagcatgtgaatattctcacggagagaagccccagcgagattttccggtgaatacgggattgcacttactctttcatcacggaaacagacccccgagagaagccccaacgagattttcccgtgaatacgggactgcacgtactctatcatcatgaaaacagagccccgttcataaattttttcatcttttatttttaaggttatacttcctctaaataacccttaaaccctcatcaagaaaggtttggttaaaaggatttttactatagcctcatccttgataacgtcctaatttccttctggacaacctccttgaccaatggcatattgagatctatgtgacatgaggatatttctcagtaccactttgttactggtacctgatgcacacggattgcgaccagagcatgatgcctccatcaagtggtaatatgtttgcagcctgctgtccagccaagagtgacagatacttctagtgacttccccggtatccactctcatcttcttccaatatcaagagaatccaggttctgtcagattagtaaggtgtgctaatctaaattttaaaaaatctcttacaggttttcttgcagctggtaccatccatgtctcacagccctggccactgacagatcagcagatgtcaccacatgggcttctgagaaagctcttgaatggggatcgttcttaaacatgaattcctccctgtatgttttgttctttgctttacttttcaccttgcaaagagatccagtacctagtattggaagatccaccttaacgaccgtgcatatgaaaaccacagtctaaggaagtgactgcagaaagctcacagcgaccctggcctcccctgtggcctctttgagtgtctgcagcagccctggacttccagacttctatcacatgagaaaaaataaaactgattattggtttagccccccnnnnnccnnngaaaacgaaaaaacaccttggcggcccccctcggcccctcaaaaagttttctaaaaccattcgctttggccgggggggccccagtaagtcaaatggacatgtgggcccagccgtgctcccctaaaaccaccgcggggcctagggaccagggccctgggaat

SEQ ID NO: 365234 - DNA, 1105 bp, Homo Sapiens
gacattcaacttgaggctcctgttagttaagctatcttctttcacttgaagcaggtttgagaggcctaggccagaatttaaattccttttatgaatagatttccctttcttcctgaccccaaggtcagaggagactatatattccatggctgcctctaagactaggaataggaatatctgaaaacagcatttctaagggtggtaaccacaggtcgattttaatacgagtcctttttcttgtagaggtaagtaaaatcttcctgacaaggtagtcctcttttcacggcacagacaatgggctttctgtttatgaggggtgagaagtgatgtttgttactatgttctccagcaagtaaacattcctctgctcacctcccaacaagactaacagtctttttagaagtaaatatattcaagacaaacgagaaaatcctggctacccaagtcgagtatatacaggaatacaaatcggtaaaccagcagctgttcctcaggttgtgactcactgagcaccacttgtcctggaagctggatgatggaagacatctggttataggtactgtagcagggataggtgccacaggaggataggaactacagcagatcgctgtttccagaacggggaggagtatctcattgtgaaacagactctagagtggttctatttggtcttcagtgttttagcctcattagttcatatttggcatgcagcttgtggtgagtactgttctaggactggccaaaaatgggcaaaatgtatcactccaaacactactgattcagcattgttttcatgtcttaaaattgccacctgcactttgtttctgcactattatgtagtgcattttaacttaaattttttccagcaacatgttacttatttaagatacattactgatatttcattataattagttcaccttccctgtgaaacaagagaattgtaaaatgttgtggaaaatgatacatatgtggatgctaatgaaatcatagtattttgtgtagcttctctgaagaccttagagacctgcagctttggtttataagtgtttgggccttatcagcccatctgatccagatcaatatttttttgaaaactgcctgt

SEQ ID NO: 365235 - DNA, 534 bp, Homo Sapiens
  misc_feature (239)..(263): n is a, c, g, or t
ccatgctggctatccgggtgttagctgaccaaaaatgtcattcctaatgtggctaatgtcacttgctattaccagccagccccctatgtagcagatgccaactttagcaattactacattgcacaggttcagccagtattcacgtgccagcaacagacctactccacttggctaccctgcaattaagaatcatttaaaaatgtcctgtggggaagccatttcagacaagacaggagagnnnnnnnnnnnnnnnnnnnnnnnnngagtgatccagcccttattagggatgtgttttgtgcaatgatgatatgctcctggttttaagtttggcaaagcttatgtatcttttaatagatgtgggagcatgatctcgaaaggatccttttcccttctcttattctcctacccaattggattctatcctgcaaaaaaagagagacctgtcattagaagcaaccaggttctcctgatacaagagaagaaatgtgtgatgacaatatgggtttgctgtatctgctcccatagctttgccat

SEQ ID NO: 365236 - DNA, 136 bp, Homo Sapiens
aacattcacatatttcttggaattataagaaattaactttgtgcttctgaagtgggtttgccttaatataacactgatgtatttgtaaggggcatttttaaagctgtactttaaaaaacaataattcttacattca

SEQ ID NO: 365237 - DNA, 341 bp, Homo Sapiens
cagtcatatctggctccggcttgccctgcttctctgctctctagactcagcactgaagagaagccatctttgtcctcactttgcttgggtgattgcatgttctttatatttcctctaaccatataggaggggcctgggaaatagggaatttaggacagggtctaacaggaaggcatggaacactttcttttcaaatgaagcaatctttaagaggggacacatgttgaacacaggtagtatcatttataaatattatttcttgaggagttagctgttatatgtcattgttatgcagaggacgttaaaatagagacatttgagctgagcacagtggtacgcac

SEQ ID NO: 365238 - DNA, 1278 bp, Homo Sapiens
  misc_feature (241)..(241): n is a, c, g, or t
  misc_feature (395)..(395): n is a, c, g, or t
caggtttacaatgttagaattttaaccgcccccaataggatttggccctgagccaaaaaattggggcgagggggttttcccccacccccgaggtgctccaaaggaaaagggtcccccgcagcccagtttgtgggggtccccccggccccacaaaattctgagcacccccccaagagggacagagtggagttggggccccaaaacgcggccccccctttctctcataggggccgctcgggcnaaaatcttaaaaaagacacctccccggggaacttggggaacaaaccggccttggagtttgccaggggcctttcccccggccataaagcagatcaaacgtgtgtgtcatcgggtccggtgtcaagcgaaagtccaagagagctgcggccctcgancggtgagacgtccacgagcagtattcaagcgccacctggacatgctgtcccgaattaagagcctgcagtccaggcaagagccccgcctgcctgtccagcaggggacaagaacggggtgggcttctgggacaaagcccactgtggcccatggtgggagtgcagggggtgtgtgggcggggcctcctccccacccacgtcggcctctgtcagcttctgttgtgtcttcacaaagtctgttttaatatttctgctgtctctcccacacatgtgcagcctcaggcacatacaaacaaggatatacacacgagtgggtgtttatgttgcctgtaatggggacacacggctgttgagagtctctcctgcagtaggggacatgctcctgcctatcagggtcccctccctctcccaggccccccaaccaaggctgtaccagtttctcagccctggaagcgaggctgggcccctgttacagggagaaggctgggatggtcagggacagcctgggggtcacagcccaactccgggccctccagtgggagtgaagctctcatctgaggaagtcgagagccccaccctggggctcctgcccagtcctgcttcagggggccaggaaggggcgcctccaggccttagcccactcctgctgtgcaggggccactgagccatccccttcaccccgctgggctccagctgtgaggcctctttcccagcgtcctctctggagcagcggccaaccctggctgcgtgtgcgtgtgcgtgtgtgtgcggaacgccctcctgtcttgacttctgtgctttgtctccacatctctctcacttcagctgtttttgttcaccaggatctcttgtcctagattttccctttccttccctctctctctgg

SEQ ID NO: 365239 - DNA, 533 bp, Homo Sapiens
  misc_feature (458)..(458): n is a, c, g, or t
cgtaacgccttcacagacaggtaggaagtgcatacccagaaaagacaggacatgctcaggcagtcctactcactccaagttcagctcatcctaacaaagacaacttgccaaattagacgggcaactcacattcttctcaatccctccccaccggaggaacaagcacctaaactgaaacatgccccagtcaccacccacgtccccaagtcagcaccttgacctggtttccacatctccatcactagcacggaactcttgttggggtcataaagcttacttcttttgctttttgtcttacttcttacctatgtttcacagtttagaaagaacatttcttactaagacaaaaactgtattgtacagacacttggaccctgttgacatgagtcacgttttacaacaaaatgcacatgccttagaaatctggcacataagggcttccaagaccatcaagcagntgttctcaaacttcagtgtgctaaagactgactgagggcttatttaaaatgcaaaattgggggccccaaccagag

SEQ ID NO: 365240 - DNA, 389 bp, Homo Sapiens
  misc_feature (86)..(86): n is a, c, g, or t
  misc_feature (149)..(149): n is a, c, g, or t
cagacaatcagtcattcacccaacaaatatttgagtatctgcttcaagccaggggcagtgctaagccctggaagtggtatcttctnccttatccgggagtggggctacagtgttcattccagaagactcaagaaaatagcagatcatcnacaaaagtaggttttacataaatgaggaggaatccacagggttgtgtatatgtgtgtgtattttaaattctgacataagttggagctttagggtagactgtgacataagagtagtttgttttccaactcatataattgccggctgatttttgtcttgaattatgataatggtaacttctcttgaaacaattctgtattcatcttagcttggttgggatgcaataaaagttttgtactggt

SEQ ID NO: 365241 - DNA, 426 bp, Homo Sapiens
ctttctccttgatatagcataaggtttgaaagagaatcgaaaagggaagtgctgtttttactttgcgagtcagtgttagttaaatgccatgtctgtgaaccacctcaaatgctgtcagtcagcttcccttgatttgagaaaattgtcttgaccagactaggcaggctgttctggagaagacgcctgtactctccaagcatcatccaagaccttcccagtaccctcttatatctatagagcacaaaatcccagaatcacaggacgacactgcagtgaatcaactaagaaacagcaggagctgagaagccaagacgagaagccccacatccctattcccttgcctacctcatgcattccctgctcggcacccagacttttgcccccattcctgctacttgtgaacaaataaagattcatatactcaaa

SEQ ID NO: 365242 - DNA, 1034 bp, Homo Sapiens
  misc_feature (781)..(860): n is a, c, g, or t
ggagaaatcaagcagtaatggaggatgctgccattgttcagctgcgctttgtgtgcttatgggcatgggaaaggataaatgttacaggcgaaaaacatccttctgtcagttctatccgtcaaggacctaaagaaccatatattgattttattgctcagctccaagaggctgtgtataaagccattactaataaaacggctcaggatgttgtaatacagcttcctgcatacgaaaatgctagtgcagtgtcaaactgctattagacccctgagagggacggctcatttagctaaatatattaaggattgcgatggcattggaggtaacttacataaggcaactcttttagctcaggctatggctggattaagagtaggaaagaatataccccatttctcaggcccttgcttttaattgtggccaatttggacaccaaagaaaggaatgtagaaaaggaaatcaaaaggcaaacattactaccatcagtcaacagaaaagtcccggtatatgtctccagtgtaagaaaagcaaacactgggcaagtcagtgtcattctaaatttaacaaggatggacaacctctttcaggaaacgggaagagaggcctgcctcgagcccctcaacaaaccaaggcacagccatgcccttacaaacgtgcaacaattgtcccccacttcagcaggcagtgctgccatagacctctacagcacaattaccatctccttaggagaggtgaagccgactgggcttctgggtcgggtggggacttgggtaacttttcnnnnnnnnnnnnnnnnnnnnnnnnnnnnnnnnnnnnnnnnnnnnnnnnnnnnnnnnnnnnnnnnnnnnnnnnnnnnnnnnaaaaacggaccaatcacctctctgtaaaatggaccaatcagcaggatgtgggtggggccaagtaagggaataaaagctggccacccaagccgcagtggcaatccgctggggtgctgtttcatgctgtggaagctttgttcttttgctcttcacaataaattttgctgctgcttc

SEQ ID NO: 365243 - DNA, 593 bp, Homo Sapiens
gggcacactaaccctgtaaaagtgtccagggctgtccacttgtaagatagtttcctattcccttcagtaatgtgtccacagtaccctgtatttcgagttccattatactgaagtaccccatgttttaatagtgcctctccaaaggcctcaccttggacagaggtcaatccttgatgctccagcacaggtgacgtcactaattgtcactttccagtttgtttttctctattaaggaagacattttctaattgcatctccatgggctgtgagactgtgtgaagccgtttgtgtggtctccatgtaggtgctgtgttcccggcaccgccttgctctgaacactggtaattccaggtgctgcgcttggcagaggggtctcgccaaagcgcatgtgtgtgcatgtgtgaacgtgtgtgtcctttgcatggttgggcgtgggtgccttgctagggcatcagcaggacattgtgtgtatagttacaatgcttccaaactggaactctacattttgtatcttttaaagctcctataagtaaaataactattggctttattaaaaatatacatttaataatactttgtatccttgtttaaaa

SEQ ID NO: 365244 - DNA, 471 bp, Homo Sapiens
  misc_feature (16)..(16): n is a, c, g, or t
  misc_feature (419)..(419): n is a, c, g, or t
tgccgagccccctctncccagcgcagcacctggaattaccagtgttcagagcaaggcgtgccgggaacacagcacctacatggagaccacacaaacggcttcacacagtctcacagcccatggagatgcaattagaaaatgtcttccttaatagagaaaaacaaactggaaagtgacaattagtgacgtcacctgtgctggagcatcaaggattgacctctgtccaaggtgaggcctttggagaggcactattaaaacatgagtacttcagtataatggaactcgaaatacagggtactgtggacacattactgaaggaaatagaaaactatcttacaagtagaacagccatagacaactttaacagagattagtgtgcacaccgtgacagctaacacagacaagagccacgcagggtntgtgcaaagaacgtgcctgaaaatgtctatatacaaaacagttctttgtaga

SEQ ID NO: 365245 - DNA, 460 bp, Homo Sapiens
cctttaaagtggttcttcccttaatatttatctgacggtaatttttgagcagtgaattactttatatatcttaatagtttatttgggaccaaacacttaaacaaaaagttctttaagtcatataagccttttcaggaagcttgtctcatattcactcccgagacattcacctgccaagtggcctgaggatcaatccagtcctaggtttattttgcagacttacattctcccaagttattcagcctcatatgactccacggtcggctttaccaaaacagttcagagtgcactttggcacacaattgggaacagaacaatctaatgtgtggtttggtattccaagtggggtctttttcagaatctctgcactagtgtgagatgcaaacatgtttcctcatctttctggcttatccagtatgtagctatttgtgacataataaatatatacatatatgaaaat

SEQ ID NO: 365246 - DNA, 717 bp, Homo Sapiens
  misc_feature (184)..(184): n is a, c, g, or t
  misc_feature (681)..(681): n is a, c, g, or t
  misc_feature (687)..(687): n is a, c, g, or t
tggggtaaagatcacttctggggctgggctaggataggtttcttgcttctggtgtggctgtttgaaagtaaaactggttggcgttaggtcggtatctccctggagaagcaccagcaattctctttcttttactgttatagaatagcctgaggtcccctcgtcccatccagctaccacacggccnccactgcagccaggggctggccttctcctacttagggaagaaaaagcaagtgttcactgctccttgctgcattgatccaggagataattgtttcattcatcctgaccaagactgagccagcttagcaactgctggggagacaaatctcagaaccttgtcccagccagtgaggatgacagtgacacccagagggagtagaatacgcagaactaccaggtggcaaagtacttgtcatagactcctttgctaatgctatacaaaaaattctttagagattataacaaatttttcaaatcattccttagataccttgaaaggcaggaagggaagcgtatatacttaagaatacacaggatattttggggggcagagaataaaacgttagttaatccctttgtctgtcaatcacagtctcagttctcttgctttcacattgtacttaaacctcctgctgtgcctcgcatcctacgcttaataaaagaacatgcttgaatacnccccancaaaccccccaaagaaattacaacatggtc

SEQ ID NO: 365247 - DNA, 1054 bp, Homo Sapiens
gggtttaaagttcccaaggggaaagccaagaggaactggaggccggggtttggccagcccaaggggattaacctaactttttattctttgccccccaaaaatatccccgggaattcttagagtatatacggcttccctttcctgccttccaaggtatttaaggaaatgattgaaaaaattggttataatctctaaagaatttttgcataggcattagcaaagggagtctatgacaagtactttgcccacctggtagttctgcgtattctactccctctgggtgtcactgtcatcctcactggctgggacaaggttctgagatttgtctccccagcagttgctaagctggctcagtcttggtcaggatgaatgaaacaattatctcctggatcaatgcagcaaggagcagtgaacacttgctttttcttccctaagtaggagaaggccagcccccggctgcagtggtggccgtggtggtagctggatgggacgaggggacctcaggctattctataacagtaaaagaaagagaattgctggtgcttctccagggagatacggaacctacacaccaagcaggtttttactttcaaacaggccaccaccagaaagcaaagagacctatgcctagcccagccccagaaaagtgatactttaccccaggaattccctgcttcccattggtacttaagatttttcactctgttgtgactgctcttatttcctttactcttgcggatctgtgttggagggacatttggaaggggcccagccctggcacttgcgtgaggggacacacacagggcgggtgtgtgtgcccatccgctctgagctccacttagccggactggctgccaagccgttcttggatcagcctctcgctgagcgcccacagggtccgggccgtctcttcgctctgagcttctggtgagggcatgcagcggcagcagttgttgaagtacatccctcccagaccctccagttctgggacagcagcacagtacacggtggtggcagctccctgttgcctcgtgccgaattcgccacccaggcc

SEQ ID NO: 365248 - DNA, 812 bp, Homo Sapiens
  misc_feature (64)..(90): n is a, c, g, or t
ggtgcagcccagccaccagcttagggcctcgggtgccttggaagaggactcagtctgctgtgtnnnnnnnnnnnnnnnnnnnnnnnnnnnagcagtggtgacagaagacagggatgcagccttgggaggccccagggagcatgccctggactgggactctggcttctcggaggtgtcaggcagcacatggcgagaggaagaactgcctgtatcccagcgcccagcaccctcagcacagccccttcgtaggcagtgcctctcagtcagtggcctccccatgcccagcagggcccctgtagccagtgtaccacctgtccaccatccacggcccaagtccaccccagacgcctgcctggagcactggcagggactggaagcagaggactggacagcagccctactgaacaggggtcgcagtcgccagcccctggtactaggggacaattgctttgctgacttggtgcacaactggatggagctgcctgagacagggagtgaagggggtgacggaggtgggcaccgtgcccggtgctcgcccccctcagttcctgcttggcctctctgagcagcttcggcgccggctggccagggctcggcggacagctatggcaggaaagcggctgtcatgcccagctcgcccagaacctgaactgcctgcggatgtctcacgctttgcagctctcatgagctgtcgtagccgccagcccatcatctgcaatgatgtcagctacctctgaccctgccctccagcctgggacagtcacaagccttattcctaaaactaaccataacaacactccagagctccaggg

SEQ ID NO: 365249 - DNA, 814 bp, Homo Sapiens
ggctatgggcagaagccatatcgagggatgaaaggaagtgaagtcaccgctatgttagagaaaggagagcggatggggtgccctgcagggtgtccaagagagatgtacgatctcatgaatctgtgctggacatacgatgtggaaaacaggcccggattcgcagcagtggaactgcggctgcgcaattactactatgacgtggtgaactaaccgctcccgcaccggtcggtggctgcctttgatcacaggagcaatcacaggaaaatgtatccagaggaattgattgtcagccaccttccctctgccagtcgggagagccaggcttggatggaacatgcccacaacttgtcacccaaagcctgtcccaggactcaccctccacaaagcaaaggcagtcccgggagaaaagacggatggcaggatccaaggggctagctggatttgtttgttttcttgtctgtgtgattttcatacaggttatttttacgatctgtttccaaatccctttcatgtctttccacttctctgggtcccggggtgcatttgttactcatcgggcccagggacattgcagagtggcctagagcactctcaccccaagcggccttttccaaatgcccaaggatgccttagcatgtgactcctgaagggaaggcaaaggcagaggaatttggctgcttctacggccatgagactgatccctggccactgaaaagctttcctgacaataaaaatgttttgaggctttaaaaagaaaatcaagtttgaccagtgcagtttctaagcatgtagccagttaaggaaagaaagaaag

SEQ ID NO: 365250 - DNA, 212 bp, Homo Sapiens
gttcaagcaattctcctgccccagcaagcagccagttcctcatgaacagatccttctccaactcccatgccccagccagggctgggcatcacaagcccccatctgcacctcccaaatgcctgtgcaggtcctggcctgggtcagggctgccctcaagggaccacaggcgaccaaacaggaacctggagatagataccctgagaatatttttc

SEQ ID NO: 365251 - DNA, 326 bp, Homo Sapiens
atatgcctgtgtgggtgatggaaacagaagactgaaacggaagctgactgagatgtgctgaaaatacacagcagttccttcagccggttccgccctccgcactgcagctaacacagtccagagcaaacggaatctgtctttttatttattcgcaaaatctgtaaaacagaatctcagctaagcttcactgtcttttaaaatccaaacgtaacactgacatgctctctcaaagactgttttgtgggctttttgtgcaaaaagttagctctataatctgcatttaccatgagcatcttcagactctaaataataaaagtaaagaatgc

SEQ ID NO: 365252 - DNA, 578 bp, Homo Sapiens
aaagaaagatcctgaatgttaagggcttagcacagtggctgcaagaaataacaactcaatagatgttagtcattattattgagtgtattaaaagtcataaaagtaaataagacaaatgtctaataataacataatgttatgtaagctattgagacagtgaagtaaaaagggctccctggagaatctccaacctgcctgtgcattgggaggatgtggtggagccttggggagttagcacccattgcaggaaggaggagcctgccctctcctgttcctgggtggtaaaaggggattcaatctgtgaagcgcaaagcctgctagcaggactctcacctttgctgagagtccctgtttcccttttattccttttcacacaataaatgctgcccttctcaccctacaatgtatccgcatgcctaaattatcttggtcgtgtgacaagaacccgggttttcctacaacactacgacatagacatttgtatgtctctatctgtaacaatgaggctgccctcatgtccttatcaattaggctattatgcagactaattacataataattacaaagtgctttgaatt

SEQ ID NO: 365253 - DNA, 299 bp, Homo Sapiens
tttcaaaaagaaagtcaacagcaactttattcgtgatcgccaatagccagacacagctccaagtgtccatgaatacagcagataaacacaccggtgtgtttacactggactgcttggcaatcaaaagaacaaactcctgagacatgaaacaacacagaagaatctccagaaacatgacgctaagggaaagacgccttacacaaggacatgtacccaatgatccattagtatgaactcttaaaacaggcgggaagcatagtggagaaatcagcacaggtggcatggtagcagtggacata

SEQ ID NO: 365254 - DNA, 518 bp, Homo Sapiens
  misc_feature (278)..(352): n is a, c, g, or t
aaggagaacggaggagagggaaagagaagcccaagcgtctgtgatcatatgacgggccaaggctgagcagggtatcacagagaccctttgaaatgcatttgtctctcatcctagactagtatacaccgacttctcctgttgggttgaaacacgcatgtcaaccttgcgggagagtcagagctaggatgtacaagaactgattctaaccagaagtccgcaagtactgtggacaagaatgcttaaccatgctgcttcagccttgagagacctaggttctnnnnnnnnnnnnnnnnnnnnnnnnnnnnnnnnnnnnnnnnnnnnnnnnnnnnnnnnnnnnnnnnnnnnnnnnnnncaatttatgtttttattaagtgccttgaaaaaatgaagaaaaatgtattttccctttatgtaaaaattagtgaatatcttatgaattaaggcattcctctttccctaaccccgatggctccattcccaagtaccccaactcactgctgatcctattaaaggaatga

SEQ ID NO: 365255 - DNA, 521 bp, Homo Sapiens
  misc_feature (14)..(14): n is a, c, g, or t
taagccaagggagntcgaggaaaggacatctccaaaggggagcataagattagccatatatacaggggctgaaaaagtgctcatgagtccatcttttctggaaagcaaagaccagcctgaagcagtgggagctgctgcccaagcggtagtgaactggagagaaacaggccctggattttcagtgaggatgtggatctgaagagtcccccaaatgcctctgaagtctgacatctctgcttagccctaggagtctggttccctgccttcagttgcagagtgatgtgtttgtgtcattgttgatgtcacctcctaaaaagaccttcactttctggctgccacaaagccatatgtgttgctccccatatacagcctgacagagtaaatggagaggaagtgctggatttgtgtatcactggctatcagttcctcatgttgttaagcctcacacaggtgtgctagcattgaactgtagagtgtcacatacctgagtttgaaaataaaagcacatttccaaacctcaa

SEQ ID NO: 365256 - DNA, 431 bp, Homo Sapiens
  misc_feature (91)..(121): n is a, c, g, or t
gctcactgcagcctccggggaggcaggacatttctgaggtccacagtgcagggcttggtactcagtaggtgcccaataaatacctgttgcnnnnnnnnnnnnnnnnnnnnnnnnnnnnnnnttttcggttgagaggcgggactttggtcttcccgagcctccatttctccgccaacataaaataaaaaacataatggcactttcctcagagacatcgatgtaccttagtccgacacctggtatacagtaggtgccaaataagtgctgctgtgcttatggttgttgctaaactagtaattgcattgaacaccccagaggcattttccagtttccctcccttccctctgtgtgtatttgcgcagcgtaagcccagctttgggctgggtgacaaggacagtggtgacctggaaaggcccaggctcagacccctc

SEQ ID NO: 365257 - DNA, 620 bp, Homo Sapiens
  misc_feature (398)..(398): n is a, c, g, or t
  misc_feature (457)..(457): n is a, c, g, or t
  misc_feature (534)..(534): n is a, c, g, or t
  misc_feature (559)..(559): n is a, c, g, or t
gagggtaggaggggcctccctggattgaaccgggacagaaacacggtgagggcccccaccacacctccctggttgaatcaggaatggagggagccaggcagggccctacctggggtcctgtgcccctcgttctggtctcctttgcaggcacgagataccagaaagagcatgcctttctgatagcctttggtgatgtcactgctgggaggtggctatcctgtggaccacctggcctccagacccacactcacagtctgtgaaaaactgaaaatcccctggtgggcactccctggagcccaagcagctcccctagggactgaccggacctgacctcccctccctgtgtctgggtcttcaggttttagtttggtctttgttcatctgagttgtgctggggnaacgcaggtaagtgccctgggtaacctctgctgtgcgctccttcccaggtggcgccatngattcctctgggggctggcgcatgccagggaaagcctgggccacacgggacactctcttctttatcgaggacacttngaaaggtgactgatatgggtgcttnggttttctggtcccagcttgccctccgggagcaggggttctgtcttgttcccagatgagct

SEQ ID NO: 365258 - DNA, 350 bp, Homo Sapiens
tccaagagcagagaagccaagacaaatcccctacacatgggaactgcaagttggatcattccctctaggaagtctacaggtgaagccaaagatgaaaggtcaggtcctgccctaggtttaaatgccggaatgtgtgaaatagggggctttggaactctgtcacttgccactctgttgctcattaactgtgaccttagactggactgtgagctttccaaggctcagtttcctcatctgcaaggttgggataattttgcctgtcctattgtctaatgcctgtcctactgtctaacaaggttatcatgagtaaccaataaaatcaccaatgggaagtgttttttgcatcctgt

SEQ ID NO: 365259 - DNA, 536 bp, Homo Sapiens
gcggccgcggtggccgcaggcctgggcctggaggcgggttccaaggaggaggcgggcatcatccggatgctggagttcggcagccacctggacctggagcgcatgcaggcttccctcccgctggacaacatctcctaccgcagggagtctgccatctgacctccaggcccggccctcaccactgcccacaagagcctctgccgggggtgggatgccaggacaccccctcccacactcaggacagagccaaccctggctccgtggaccttctggaggaaggtgggggtttcaaagactgggggaccccttcctcctgactccagcacccaggcctgggaagagctcggccccgatcagcctgagttccgccagcgcctacttctggtggctctaggtccccggatccaccacccttcccccactgactcttcaaggacgtgccctctttgctctcagaaccttggggaaggtggctgtcgggctagtcgggggggctagtcgggggataacacgttggcgagctgtcgggctcgggg

SEQ ID NO: 365260 - DNA, 564 bp, Homo Sapiens
gcaagcacccccatccgagcagttgcaaaccctgggcctcagctcaaggctgtgaagtctaagacaggtccagggagcatctccggacctccccttggccaacggggacacccaatgaccaggtcaggctgctgtggaaggactccagggaatgtgggctggaaggacaaggtgtcctaccgctggttcctacagcacaggccccaggtgggctacatcagggtacgattttatgaaggctctgagttggtggctgactctggcgtcaccatagacaccacaatgcgtggaggccgacttggcgttttctgcttctctcaagaaaacatcatctggtccaacctcaagtatcgctgcaatgacaccatccctgaggacttccaagagtttcaaacccagaatttcgaccgcttcgataattaaaccaaggaagcaatctgtaactgcttttcggaacactaaaaccatatatattttaacttcaattttctttagcttttaccaacccaaatatatcaaaacgttttatgtgaatgtggcaataaaggagaagagatcattttt

SEQ ID NO: 365261 - DNA, 740 bp, Homo Sapiens
ggcagtacacacagctagctcctcatcctacctggtttctgcatatgagaatgcagagggctgagagagggcaaaattgttgtcatttagaaaaggcatttaggaaagaggctgctattagaggggaacacaaagtgaaggtttttttaaaaaagaggacttgcatcagctgcctccagaacaattttaagaaaataacaaagatgtttagaagaaatcttacggagtttgccatgggatgtgtgatatcagcagtcttcagctccttacaaattaccaaaagtggttctaatatgctagtttgtttgattttttcttttatattataaagcaattgcatcgataaaagcttggactccattttagtgtgacactcttccctcatgatacccagtgaaatgtattgattgtgtcccccagttgttacataatttgaaataaaaatataacttcttgatttattgttttttaagatgtgatatggtactgtggttatgttgttttaaaaaatgattatcttttagagaagtatactgaaaaatgtacaggtgaaatgatatgttactggtattcgcttcaaaatcatctgagtgtggggtaattgagtacatagatgaaacaagattggccataaattggtaattgttgaagctgtgtgatggatgtttgagagttcattatactattctctatacttttgtatatgtttgaaattttccataataaaaattgaaaaaagt

SEQ ID NO: 365262 - DNA, 479 bp, Homo Sapiens
  misc_feature (35)..(35): n is a, c, g, or t
ccccctttttttaaaaaaaccccttccactttggngttcccccccctaatagcagccctcttcccctaaaggcccttttcctaaaggaacaacaattttgcccccccctcagcccctctgcattcctcatatgcagaaacccaggtaggatgaggagctagctgtgtgtactggaaaagggatgaaaactacagccaaatggatcagtgagagaggcaaaagaaatctagacaaactaaatggcataattaagtttggaaactgcctatgatatagcctgttggctctggcatcaaataatacagtatgttaaatctgtaaaatgaggaaacagtgtttcctcaaagagatgttaagatgacatgtaagaagtggttagggcaggcattgcaaaaaaatgtcttatatatcattttaaaatttatttttataaaaactcacaacattattttgcgtccactgtatttatttttacaatt

SEQ ID NO: 365263 - DNA, 452 bp, Homo Sapiens
cccacttcttaccccagatagcctcggcgctgcctgtagtcatgctgacagctgtacagtagccgccaagactgctgacagctggagacggttctggtttcaactacggtatattgatatcggaagtattctagacagatcctcggttgggttttctagctacatgtttgtattgcacagatccccacctgccatcctatagtgttgtcttcctgtgtgttccggggcttctgggcagctgggcctgcccggggaagtccttgcaggtgggaggccatacaaagacccactgtgtgccactgagcgtcccactgctgctgggcaactggaggactgcagggggcgccaggtgactctctccttttatatcacagcagctcctgtgctgaccttcaagttacgttttggaactgtaatactaaaggaagaaataaactactaatttgtataat

SEQ ID NO: 365264 - DNA, 826 bp, Homo Sapiens
  misc_feature (418)..(430): n is a, c, g, or t
tgttcttcgcttctcggctcgaggccccagtctcgaccgccgaccgcctcggaaccgggctgcatccgagctgccacgcggcgtgtgaaccttgaagcgcggccggggaatccgcaaggcgccgactctcttcctccttgcaagcccttcgaaagtgagatttctcaccccacccttgcagggtggagagaacacgtttcaaaaaggggatgcctagaactcagccgtgggaagtgcctgtctaaagccttgtgctggtgccagtagcaaacccgtgcgcgtgctcggctttgagcgatcatggagctctgcaaatagctcaactgcagagcgtgccccttagagctcctgtgctgctgggaggcctcataaaggtgccaaaaccaggtgtccccagcggttggcctctttaaaaagnnnnnnnnnnnnnggcggagtgggatgtccttgacgtgctgaaagaccggagtagaatgagacgttggttttcattggctggccattaagcacgcactgcgcaactgttttccagatacgggtttatagcccattatttatatcggagccataaacttgaacaatagattggaatatcttatttttgcctgttgagaatatctcccatttaacttcttttgaaagttcagatgagtatataaataatacattgacccagtagaatctattgtgtgcgttccagcgtcatttcaaagagctattgtttttctgatttcaaaagaaatatttaaatggtgagtcttgtgtttttatggtaaccttggttggttcgaaattcaacaaagcccaggaaattccaggaggaaaa

SEQ ID NO: 365265 - DNA, 1056 bp, Homo Sapiens
gccggaactcgcctgcttgtcggcccagaacggggagtcgtccccctcgtcgtcgtcgtccgcgggggacctggcccacgcacaatgggctcctgccttcctgcccctccgccgccagcaacaatagcaacatgcctgaatagtcaataactggtggttccctggctgtgggctggcagcactgcatcctcatgccacctgtctgcagctgccatcctgccaccacctgcctgcctcctctttccttggcacacccccagaactggggcatgcagccttcacagaagaaagacagcggctctccccatgtcagatgacggatgtcattaggcgctaatacggacagcacttgaatggcttagggctcaaccagactgtagatctcctcatgcaagaagtcacggatgtcgtttagaacatccttctgctaccaaattccgaaatcattgtcctgcacacggagactgggataaggccagaaaatgaccctgaatgaactaaagccttatagtgcaattctacctcatgctattgtgaggatgaaggttttagggctgctgccagaagaaggtacccttagaatacctggaggatggccaaggtcctggagggcacttcaagttctaacgctgtggaactttgcacgcccgctgaaatacaatacagaagcgcattcatgctctaagtgggtatctggatgtgtaccccatgcatcaagacccttacgtgccaaaaagcagacacatggcaaggcaacagggacagtgcccgatctaaactaattggataaaatttcagacctaattcaccagcaatcagtgatgctttcccccacgggggtttaacaagagtctacttgcgcaagtgcgtgtgaactagaaaagggaatcgagtgcctattatataagaagtagccaaagttgaatagtactctaaaatcatggggtatctgcgttttagagcatgtttgtagatagaggcaggttcccaatgaggaataggcagaaatattaagagacattgtatgaggtgggcatggaaaacatcaaatgatgc

SEQ ID NO: 365266 - DNA, 403 bp, Homo Sapiens
gcagagaaaaaggtccccccccacccgcccatctgccagccccaggtgtgtgccacacggcagcccttccccgaaacatagtatggattttaaaaatgtgtttatttttgtttctcaaccactttataacgtattttttaatttattttgtaatgtcttgttttgaagtattgctgctatccttgttatccttcccactgtttttatcactgatttattttgtgaaagttgtacactaatgttctatgtcaaaatcaaaagtatttaatgaaatactagttctatttaatgtggttatggaaccagctggaaacacaaaacaaacagtgattgtacagcaggctgggcccaggaggtcaggttcattttgttacatatgcaataaactcacgactttacattt

SEQ ID NO: 365267 - DNA, 1102 bp, Homo Sapiens
  misc_feature (837)..(837): n is a, c, g, or t
gcggccgctggcttggcctgcccgcccgactacagcctggtggtgcgggcggccgagcgcgctcgggcgcatgaccagaacctggcaaacctggccctgcaggcgctgcgcgacggggcagcggctggggaccgcgaccgggacagttcgccgtgcgtcggcctccctgcggcctcccgggggccccccagagcaggcgcccccgcgtcccggacgggcagtgctacctctgcgggcactgtcggggagcagggccggcccggcacccacgagcggccaggagccaagcccagggctggctccgagaagggcagtgccagcagcagggacgggaagaccaccgtgtggatctgagggcgctggcttgcgagctgggccagggaggaggagggttggggggctccggtggaaacctgcgaccccttctcctcagccttctccttagccgatggcctcaggcagactctgcccagaggggcagccaggctgctcagggaaggggctgaaagcggcagaggagtgccctggcttggtcaccactggggccaaggtggggtggagagaggcctaggagccagaaagggccctctgctgtggtctgaaccccagggggagtggggcattgactccacccctgtcctgagctggaataggtcctctgggatgccagctctcccctttgtgcttccctgcagcaacccatggagggcccagggtgcctggtatgggcatcagttggtgggggtgcgggggtgcgtgtccccattccctgcaacagcaaatggggctccttcttcagccctccccttcccagccccaaactgagacagactgggnagctgggagcctggggtggacaggaccataccctctttgagcttctgcgatgccggccttccgttcctctgggaggcttgaagttctgcagagatgttgatatgccttgcagcttggacccaatgggtggtggtcagggcctgggggcttggccatgctgggggaatggggctctgggttcctgcctgtggcctgtctgtcctcctccctaattcagacccagcctcaagaggaaagggagtaaaataaaactaacttgtttata

SEQ ID NO: 365268 - DNA, 623 bp, Homo Sapiens
  misc_feature (604)..(604): n is a, c, g, or t
gcggccgcccccttcgcccacccactggggaccgcctcccttggggtcccgcccccatccccctcttccctgccagccgtcggaggaaaaagtggccgacggtcggctggaaaaaacccggcgatgcgaaggggaggggacccttgggctgggggctccgtgcttcctctgagtgacagccggacccagtggcagctgcggctggggcccctggggctatttcggggcgtgagctcacggcagctgcccgggcgcagggaccggcgtgccccccctcagctgcagcagccgctacccttaatttagaagtttcctgcaaatccccccggattaaatgtctctcgggaggcggagctcctcggcagtttgagtgcctcagtttaccctgagtccctctaggtttccgttatcgacgtggtggtagtagcggagtctcatcgggagcttggggaaactgaagcaggaagcgagcccagagccccggtcgcggtggggagtgtggccgggcttgctgcccccaggaccggcctgacctctcatcccctcgcctcccctcccagcccctgcccctggagccaggcccttcctgcgagcacccggcggnctcaggacccagctccccg

SEQ ID NO: 365269 - DNA, 971 bp, Homo Sapiens
gggacttccggtcgcgccagccgcccgtggccagttctgcgcgtgtgagtctctttcgccttgctccgggctttcttcgctcgcagcgcggcagggttatcaccagatctgggctttccccttcttgccgtcaggtgctacggccacgtggcccgcggcttcccgctcgcgcagtctggcagcccggagccttccgcggtcccccgcccgcccggggcccaacgacgccctactgggcgagcacgatttccgaggacagggggtccgggcccagcgctttcgattctcggaggagccgggtccgggggccgacggggctgtcctggaggtccacgtcccgcaggtgcgtgcagcagcacccgccaggaggcgcctgaggtcctgcatctccagtatggaatgtatgtttggccctgtgctgtggtcctggcccagtacctttggtttcacagaagatctctgccaggcaaggccatcttagagattggagctggagtgagccttccaggaattttggctgccaaatgtggtgcagaagtaatactgtcagacagctcagaactgcctcactgtctggaagtctgtcggcaaagctgccaaatgaataacctgccacatctgcaggtggtaggactaacatggggtcatatatcttgggatcttctggctctaccaccacaagatattatccttgcatctgatgtgttctttgaaccagaagattttgaagacattttggctacatatatattttgatgcacaagaatcccaaggtccaattgtggtctacttatcaagttaggagtgctgactggtcacttgaagctttactctacaaatgggataatgccatgtgtccacattcctcttgagtcttgatgcaaacaaagaagatatagcagagtctaccttccaggagacaatccgttgaaatgccggtcattccttgcaaggacactctgatataccaa

SEQ ID NO: 365270 - DNA, 1180 bp, Homo Sapiens
cggggcccaacgacgccctactgggcgagcacgatttccgaggacagggggtccgggcccagcgctttcgattctcggaggagccgggtccgggggccgacggggctgtcctggaggtccacgtcccgcaggtgcgtgcagcagcacccgccaggaggcgcctgaggtcaggagcggatgtcggctgacttggctgggttcctgagggaccgggggtgcggacgctcagctgcgcagcttcctgctttaggttgacccccggagcaaaaacgtcggatatgaagcccttcggtgcattaaatgtctctcaattggagctggagtgagccttccaggaattttggctgccaaatgtggtgcagaagtaatactgtcagacagctcagaactgcctcactgtctggaagtctgtcggcaaagctgccaaatgaataacctgccacatctgcaggtggtaggactaacatggggtcatatatcttgggatcttctggctctaccaccacaagatattatccttgcatctgatgtgttctttgaaccagaagattttgaagacattttggctacaatatattttttgatgcacaagaatcccaaggtccaattgtggtctacttatcaaggtaggagtgctgactggtcacttgaagctttactctacaaatgggatatgaaatgtgtccacattcctcttgagtcttttgatgcagacaaagaagatatagcagaatctacccttccaggaagacatacagttgaaatgctggtcatttcctttgcaaaggacagtctctgaattatacctacaacctgttctgggacagtatcaatactgatgagcaacctggcacacaaactatgagcagaccacttcagcttgagaatgcagtgggtctgaagatggtcaagtctgtttgccttagattttgatgtcacctagacaacacttaaactcatatgaaacaaaaattaaaatacgtattacaaggaaccaaatgcagattcgaacgtaattactggctgtctggccgccgtcggccactcaaaaagcttttccaaaacattccgtttggcggggcggccccacagcaggtaaagggtaacatgggacataagcggttttcctaggaagaagcctgggtccgtgaccaagggcattgtgattccccccccattt

SEQ ID NO: 365271 - DNA, 460 bp, Homo Sapiens
ggccctttaatattgaaattgaaggttaagcttttaccttttagcagagtagattcataaggaatgtacttttgtcatgtttatagtaatgttcagttacggtacattttatacaaatccagaaagactgactctatgcttatttaaaaatgcaagaatataatgaaaaagtactaagattcccaattatttgcagttccaagtataattgtgaaatgccatctttcataacttattagattggagctggagtgagccttccagggaattttggctgccaaatgtggtgcagaagtaatactgtcagacagctcagaactgcctcactgtctgggaagtctgtcgggcaaagctgccaaatggaataacctgccacatctggcaggtgggtagggacttaacatgggggtccattatatcttgggggttcttctgggcttttaccaccacaaggtattat

SEQ ID NO: 365272 - DNA, 557 bp, Homo Sapiens
  misc_feature (47)..(223): n is a, c, g, or t
agaagggagctggaacctggtgatggagagaagtcatagcatgatgnnnnnnnnnnnnnnnnnnnnnnnnnnnnnnnnnnnnnnnnnnnnnnnnnnnnnnnnnnnnnnnnnnnnnnnnnnnnnnnnnnnnnnnnnnnnnnnnnnnnnnnnnnnnnnnnnnnnnnnnnnnnnnnnnnnnnnnnnnnnnnnnnnnnnnnnnnnnnnnnnnnnnnnnnnnnnnnnngatgggctatggaaccaggattcaaccacaaacacagtgacttagcatcatctactgcaaacatccactgcagttaaaatgcctggagtgggtggcctggtcactggaggtgagggtcggggctgggtcgtctgagagccaggcgggtcttcggggtgaggggagtgttggggtgaggaaacatgtgaacatgcctcagtctttggagaacttagttactgttaacctgaatgtcaccacccctgactcggagactggcaccaaatggattatgggttcaataaatgtttgttgaatgaataaacgagccccatttgcagaagggtaaaaaaaa

SEQ ID NO: 365273 - DNA, 1098 bp, Homo Sapiens
tttcccccttcccgcttccagaccgcggggatgccgccctaatgagccaggcctgggtggggaattccgcacgagggcctgctgttgccccagcaacaaccacggaaaccaagacgagcgcggtcgcggaagtatcgcggcttacatatctcgcagccaggcgggtcctgggagaggcgcgagccaggcctggtcggcgcccgcggagaaaagaagcagtcaagcccatgaactacaaccccggttgccgctttctcctctcctaaccgttaagtgcgctaagggccatggctgaggtgcacgtgatcgggcagatcataggggccagcggtttctcggaaagtagcctcttctgcaagtggggcattcacacaggggcggcatggaagctcctgtcaggcgtgcgggagggccaaacgcaagtggacaccccgcagataggggacatggcttactggtcccaccccatcgacctgcacttcgccaccaaaggtcttcaaggctggccccggctccatttccaggtgtggtcccaggacagctttggccgctgccagcttgcaggctatggattttgccatgtgcccagtagcccgggcacccaccagctggcctgccccacgtggcggcccctgggcagttggcgagaacagttggcacgggctttcgtgggtggtgggccgcagctgctgcatggggacaccatctacagtggggccgaccgctatcgcctgcacacagctgctggtggcaccgtgcacctggagatcggcctgctgctccgcaacttcgaccgctacggcgtggagtgctgagggactctgcctccaacgtcaccaccatccaaacccggacacccagtgatgggggcaggatggcacagtggtcaagagcacagactttagagactgtcagagctgaccccagctaaggcatggcaccgcttctgtcctttttaggacctcggggtccctctgggcccagtttccctatctgtaaattggggacagtaaatgtatggggtcgcagggtgttgagtgacaggaggctgcttagccacatgggaggtgctcagtaaaggagagcaattcctccagg

SEQ ID NO: 365274 - DNA, 666 bp, Homo Sapiens
  misc_feature (651)..(651): n is a, c, g, or t
gcggccgccccattcccagaccggccgccagcccatctggttagctcccgccgctccgcgccgcccgggagtcgggagccgcggggaaccgggcacctgcacccgcctctgggagtgagtggctccagctggtgcctggcctgtgtctcttggatgccctgtggcttcagtccgtctcctgttgcccaccacctcgtccctgggccgcctgataccccagcccaacagctaaggtgtggatggacagtagggggctggcttctctcactggtcaggggtcttctcccctgtctgcctcccggagctaggactgcagaggggcctatcatggtgcttgcaggccccctggctgtctcgctgttgctgcccagcctcacactgctggtgtcccacctctccagctcccaggatgtctccagtgagcccagcagtgagcagcagctgtgcgcccttagcaagcaccccaccgtggcctttgaagacctgcagccgtgggtctctaacttcacctaccctggagcccgggatttctcccagctggctttggacccctccggggaccagctcatcgtgggagccaggaactacctcttcagactcagcctttcccatgtcttctctcttcaagccacagagtgggcctccagtgangacacgcgccgtcca

SEQ ID NO: 365275 - DNA, 1154 bp, Homo Sapiens
  misc_feature (17)..(17): n is a, c, g, or t
  misc_feature (1021)..(1021): n is a, c, g, or t
  misc_feature (1055)..(1055): n is a, c, g, or t
  misc_feature (1134)..(1134): n is a, c, g, or t
acatttgcttctccctnaaaaggcgttccgaactaagaagctatgcgttacctctgaaatctggaaacagaatagcagcccactcattctgcattccccatttttctctcccacgtgttctggtggaatgagatgctccttggcactatagcctgatgtcccacattgacccactgaccacacaggaaaagcagcgaaacctgcaccctctcttctgagtcacgcctgtggctcatcggcttccctcttaacctttagtgccctgaagactgctgccgctgtcaccgttgcgctgaaaccccatgggcccgttctgattgaaggtgaagcccaccagattatttttcaaagtcttaggtttcggtgtatctaacctgctcagtaaatatggacgcaattaaagatgctctaggaaatttggggactgtatttaatttttctttccttccatctgaggagcaaggaaatcctactgctgaatagctgttagtatctattttacaagatttactcattttcaggtacctaatgtagctgctagcatgcatgcacaacaatacaatttatatggtaaatggaaccaaataatggcttcactgaatgttatggctgcactgaagggaaatgtcacggtaaatagctgccaaattatggatcatgccgaagtgtcacaactgcactaaagacaaatagcactagaggctattgccactgtgacgcttttgagttatgaagaagggtagcggcctgatgcgaggctctttgtgtcctcattatagcaaagggttactggtgcaggggactaggaaaaacccgtccagtgtggtgcttagttattcatccatccctttcagacctaacgagccacagccacacggaaagagactttgcctcacttttacattcacaaacaaacaaaggaggggggagcaggttttatgaatgtaactgtgcacaggaaatgactggtaatggaaaaaatgttgtaataaaataatctaatcaaagaatattattaaanttaacatagtctatgtccaaaaggcttagttgcntcttatgcagatagatgtgtgaaatctaagcagtaatgtactttctccctttgtaaagacttggggagtaaggacattnccaactaaattgcttcttcg

SEQ ID NO: 365276 - DNA, 2161 bp, Homo Sapiens
ctgctacaagcctggtctcattttcctctacctaaggatcttcctccatgcaatttcggcctaggaggcccttcccgccccttttcgcctagctaactctttcggtactcaaccaccaactcctaatcctccctggtcccccaagtgggctaggggcttctgggagtccctcgcactgctctaagcatccaggcagagtcattattccgggctgccaggttgctctttttccagcagccttcaggggactcctggctgggcggagtctgtagaggcgcgcggagtcctgggagagcgtcagatgtatttcctttcccttttttcgctcgtgtcccgccgggtggcgctcaccacctccccggaacacgcgagtctcctgtcgcggttccggtcggaattaccccgtggagcacgccgatatggctgcgctgacactgaggggtgtccgggagctgctgaagcgtgtggacctcgcgacggtcccgcggagacatcgatataagaagaaatgggctgccacagagcccaaattccctgctgttcgactggctttgcagaattttgacatgacttacagtgtgcagtttggagatctttggccatcaatccgtgtcagtctcctctcagagcagaagtatggtgcactggtcaataactttgctgcctgggatcatgtaagtgctaagctggagcagctgagtgccaaggattttgtgaatgaagccatctcccactgggaactgcagtctgagggtggccaatctgcagccccatcccctgcctcctgggcctgcagtccgaaccttcgatgcttcacttttgacagaggggatatcagtcgcttccctcctgccagacctggcagcctgggtgtcatggagtactacctgatggatgctgcctccttgctgcctgttctggccctcggcctgcagcctggggacatcgtgcttgacctatgtgcagctcctgggggaaagacactagcgttgcttcagactggctgttgccgcaatcttgctgccaatgatctctccccgtcccgaatagccagactacagaagatccttcacagctatgtgcctgaagagatcagggcatggaaatcaagttcgagttacctcatgggatggcaggaaatggggagaactggagggggacacctatgaccgggtgctggtggatgtgccctgtaccacagaccgccactcccttcatgaggaggagaacaacatctttaagcggtcaaggaagaaggagcgacagatattgcctgtgctgcaagtgcagcttcttgcggctggactccttgccaccaaaccaggaggccatgttgtctattctacctgctcactctcacacttacagaacgagtatgtggtgcaaggtgccattgagctcctggccaatcaatacagcatccaggtacaggtggaagatctgactcacttccgaagggttttcatggacacattttgtttcttctcatcctgtcaggttggggagctggtaataccaaacctcatggccaattttggccccatgtacttctgcaaaatgcgtaggctgacatagtatcacccaatccctgaagcaagaatacaaagggtatactctgttggatgcaccagaaactggaaactgggaccagtggcagagatgcactctcggtcctgtctccatcctgttcgtgtctttctgcagttttcggcaataagaagtagaagatttgctgtcctgctgtccaattgtggagcatcagcaggtttccaactcactcattaacccctaccccatctccaggcctgtactaaagtttgctgcccgcttaggggcttagaaggagaagccagtgagcaggctcacactaagttgtaaacataggagaagcatttggccaataaagttgttgaaactctatagacctggggctgcagttggggacttcatgtcagtgcaaatgccattagttccatttgtaccagccagttactgagcccctgtcacccttgaagtgagttccacctgaccagtcttgagcagccaacaggctcaattaagcccgcctggtttttccatatggctcatgatctaatttaaggaacaagtaactaaaaatgttaagccagtgcaaaataatctgcttacctactcacattgg

SEQ ID NO: 365277 - DNA, 675 bp, Homo Sapiens
gggccttcttctttgttttgtgataaacataacttgccaacagtctctatgcttatttacatcttctactgttcaaactaagagatttttaaattctgaaaaactgcttacaattcatgttttctagccactccacaaaccactaaaattttagttttagcctatcactcatgtcaatcatatctatgagacaaatgtctccgatgctcttctgcgtaaattaaattgtgtactgaagggaaaagtttgatcataccaaacatttcctaaactctctagttagatatctgacttgggagtattaaaaattgggtctatgacatattgtccaaaaggaatgctgttcttaaagcattatttacagtaggaactggggagtaaatctgttccctacagtttgctgctgagctggaagctgtgggggaaggagttgacaggtgggcccagtgaacttttccagtaaatgaagcaagcactgaataaaaacctcctgaactgggaacaaagatctacaggcaagcaagatgcccacacaacaggcttattttctgtgaaggaaccaactgatctcccccacccttggattagagttcctgctctaccttacccacagataacacatgttgtttctacttgtaaatgtaaagtctttaaaataaactattacagatacat

SEQ ID NO: 365278 - DNA, 439 bp, Homo Sapiens
ttaggtggaaatagtcagccttgcataaaaacaaggatgcgtgaaagccttaaattccagctcccttttactggagtctgtggttgtgtacaggtatggggcccaagtgtaaaatccccatccaattttaaagaaacactcgggaaatgaagtaaagaaaatgtaaaattgcctgcctagtcaaatccttttggaaagaatttcctggaagtggtcactttaaaaattattttcccacccttgcaaaattgcccacatttaaattgttttactggcagttctatagtagtccagactttagaaaccaaacacaacaaaatggcttgttgccaatatggccacaacattgccagcaaatactgccttggcatcactcagcagaggtttttgtttataaagatgaagtcttgaatactgttcaataaacttgtcaaaaaat

SEQ ID NO: 365279 - DNA, 469 bp, Homo Sapiens
ccagaggctctagcacatttattgggagagtaagcctgggaaagactaagggagtggtggcagggagaaaggctgtggggaatcagagcgggtgctcagttgggtcttgaaggagaagaggaggagggtgggaggtgggttgccgaggatatctggttgaagacttgggggtcaagacaaagggacttagggggatggggtctggttagagttggggagggggcctaggacatccgtgcagagtctggggaggttggggtgggagagtctgtacagtttggtgttgggtgttctagttggcctggtgtccaagagttggggcagtcgaaaaagggttccagagtctggtgtggctggctggggtttcacggcagaaaatgggctggagggggcagttgtagactgtctggttgcaggggaaggatcgggtcttgggaaccaggccgtggatggtctggagtggagactg

SEQ ID NO: 365280 - DNA, 552 bp, Homo Sapiens
tatcatgtgttataacatgtcgagatgtgcatatataacattagacagtccactttataaatgctcaggacttttatatctatcatcttaacagtccacaactgcataccgtagctgaaaattatttccaatcatccatttttaatagcaataaagaattcataaatgatatctgaactgtagagcactgtaaagaattcatagcacaatttatttatttgtctttttgtggccaaatatcctactgtgatcacttcagtcatatcctggaccgtctttggtttactgtgactaaaatcatagcaccaaactccttttgtccatgagatttatatataatcttgtataatttggtcctatctgcttctaccatcccaacttttttcatcaaagtgtctaagaacgtattccctttacacgctgatctcctagtggagaaggatttatattaaatgctaagtaatagtaaactttcaggaactgaatcctattgggtcatggattctgcatagacaagggcaataaagcaatacctttgtaatatgcataaaa

SEQ ID NO: 365281 - DNA, 482 bp, Homo Sapiens
  misc_feature (50)..(50): n is a, c, g, or t
ggtgaacatgaccgtgttttcaactgtgtccacagttcagatccctttcnagattgcaacctggcctgcatccaagctccttcctgctcgtgtcttaacctaagtgctttcttgtttgaaacgcctacaaacctccatgtggtagctcctttggcaaatgtcctgctgtggcgttttatgtgttgcttggagtctgtggggtcgtactccctcccctcccgtccccagggcagatttgattgaatgtttgctgaagttttgtctcttggtccacagtatttggaaaggtcactgaaaatgggtctttcagtcttggcatttcatttaggatctccatgagaaatgggcttcttgagccctgaaaatgtatattgtgtgtctcatctgtgaactgctttctgctatatagaactagctcaaaagactgtacatatttacaagaaactttatattagtaacaccaaaaaagagggaattgaaag

SEQ ID NO: 365282 - DNA, 768 bp, Homo Sapiens
  misc_feature (14)..(14): n is a, c, g, or t
  misc_feature (39)..(39): n is a, c, g, or t
  misc_feature (406)..(416): n is a, c, g, or t
cccccagctccctncccggctcgtgtcctaaaccctaantgcctttccttgtttgaaaacgccctacaaaccctcccatgtggtagcctccctttggcaaatgtccctgcctgtggcgttttaatgtgttgccttggagtctgtggggtcgtactccctcccctcccgtccccagggcagatttgattgaatgtttgtctgaagttttgtctcttggtcccacagtatttggaaaggtcactgaaaatgggtctttcagtcttggcatttcatttaggatctccatgagaaatgggcttcttgagccctgaaaatgtatattgtgtgtctcatctgtgaactgctttctgctatatagaactagctcaaaagactgtacatatttacaagaaactttatattcgtnnnnnnnnnnngaggaaattgaattggtttctacttttttattgtaaaaggtgcatttttcaacacttacttttggtttcaatggtggtagttgtggacagccatcttcactggagggtggggagctccgtgtgaccaccaagatgccagcaggatataccgtaacacgaaattgctgtcaaaagcttattagcatcaatcaagattctaggtctccaaaagtacaggctttttcttcattaccttttttattcagaacgaggaagagaacacaaggaatgattcaagatccacctttgagaggaatgaactttgttgttgaacaattagtgaaataaagcaatgatctaaacttaaaaaaaa

SEQ ID NO: 365283 - DNA, 232 bp, Homo Sapiens
gcttaatcaaactccattcccaaatgcactccatctctggctctgagggcgctccctcctctcagccgggcagcctggcctctcctgcccacacctgcggtcccagcatcccccagagccagggaacaggcccagcgggagggggttttatgttttgtttcaaacagaaaacacaaccttatttttctttacaaaagcaaaaaaggaaacccaaaaagatacagcctttgaa

SEQ ID NO: 365284 - DNA, 404 bp, Homo Sapiens
cccgcgggcctcccaaggcagccccctgttagcccgaccggcttcgaagcccgcgccggttgcggatcactccgccgcgcccacctgtcagcgcatcggccggccggggctcccgccgcatgcaagcagcgaggcgaggtcgcgctgaggcctggccatgccacggacggccgggcctcaccctgccgctctctcgccgtccagaggcccctgctccacacctgggtaccctgggtcctgactcagggcagctgggtgagaagctaacggcttgaaggaacagggctacaaggggagtttgtgctgggcctggcgtcccaggctgtggactggaactggacatgagaaccccccctacaccctcccaagtcaaagacactccaaaaagacagtttctccacttt

SEQ ID NO: 365285 - DNA, 635 bp, Homo Sapiens
  misc_feature (86)..(86): n is a, c, g, or t
cactcagagaccagcagtgctcgtcttcgaaactccaccccagatgatggtctacactgcgacatgtgttgcaacatggggctctnatcacatccacctgaattgactcaagcaatgctgtggtccggtacagctccaaggaggaggctgccaaggcccagaagtctctgcacatgtgcgtcctgggaaaacacttaccatcctgggccgaagttcgctggtgaagaagaagtgaatcgcttcttaacccaaggccaagcgctgccacccacttccaagctggcagtccagcagcgcgtccagccagccgcggctcagcgcagcgggcagcttcccatggcctggtacgcagcgacgctggccactggaacgccccgtgcctgggtggcaaggggagcagtgagctgctgtggggcgggtgccccagtactccagcagcctgtggggcccgcccagcgccgacgacagcagggtgataggcagccccacgccgctaaccaccctgctgcctggggacctgctcagcggggagtccctgtagctctgccatcatcagcaccaggagagccgacccctcccgggacccctcccggctgggcggccccacagacccgctggaacccagcagcggtcgc

SEQ ID NO: 365286 - DNA, 323 bp, Homo Sapiens
gctgtaagaaagtgcctggtaggcatccttcccccaggttgaacttggagaggacctcttagagaaacctggcctgggcatagccactgcacacagttgatttcggacccactccctctctgtggagagggctgggtgggactccctggctcagaactgtcaggtcacagacttttttagagtctgaagggagtcattgttgtcagattccagagctcttgcagatttagagatcatctggccaacccaggaacccactggcaaatgcatgctctagacagaatatgcaaatcaggccggggcacatgtcgctcttgtactgc

SEQ ID NO: 365287 - DNA, 491 bp, Homo Sapiens
ctggtccctaagcccttccagcccaggagccagacctgtgagcaaacaagtctttagtgattccaggctctggctggaaccttgagtcttctcagcttggggcatgcacctcagggggagccagcatcagtgtccagccccaagagcttccctgtacgtctcagtgagtcttcacatgcctccaactgcctggacaaccacacgtgatacctgtcctgccaaacgtgtcctgaacccataaaatccagagaaaagaaaatcgttttaaactgctgaggtttggggtctttcctgtgctgttttcgtgatagtgaatgagtgtcacgagatccgatggttttaaaaacgggagtttcctgcataagctctctctctgcctgctgccatccatgtaagatgtgactcgctcctccctaccttccgccgtgattgtgaggcgtccccagccatgtggaactgtaagtccattaaacctttttcctgtgtccatt

SEQ ID NO: 365288 - DNA, 178 bp, Homo Sapiens
cttgcacccaaggtgtcgccgctgctgtcagagggggagcttccagtgttctcgcagctctgaatcccgccgctttgggggtgggccatgggatgtgggtagttttgtcatttggagggggctgcagggaaggggggctggggtggaacaataaagcaaggcgccatgagccaaaaaa

SEQ ID NO: 365289 - DNA, 685 bp, Homo Sapiens
  misc_feature (446)..(446): n is a, c, g, or t
gcctctggaggcctgggctggtgtaggaggtgttagccagaccagcgctgagcagggctccgcagcaggacagcagcaacaaggtctcagggacgctctggcaagtccagatgcactatgagatgctcttcaactccttccagggattttttgtcgcaatcatatactgtttctgcaacggcgaggtacaagctgagatcaagaaatcttggagccgctggacactggcactggacttcaagcaaaaggcacgcagcgggagcagcagctatagctacggccccatggtgtcccacacaagtgtgaccaatgtcggcccccgtgtgggactcgggcctgcccctcagcccccgcctactgcccactgccaccacccaacggccaccctcagctgcctggccatgccaagccagggaccccagccctggagaccctcgagaccacanccacctgccatggctgctcccaaggacgatgggttcctcaacgggctcctgctcaggcctggacgaggaggcctctgggcctgagcggccacctgccctgctacaggaagagtgggagacagtcatgtgaccaggcgctgggggctggacctgctgacatagtggatggacagatggaccaaaagatgggtggttgaatgatttcccactcagggctggggccaagaggaaaaacaggg

SEQ ID NO: 365290 - DNA, 646 bp, Homo Sapiens
  misc_feature (117)..(126): n is a, c, g, or t
  misc_feature (562)..(562): n is a, c, g, or t
  misc_feature (577)..(577): n is a, c, g, or t
  misc_feature (587)..(587): n is a, c, g, or t
  misc_feature (593)..(593): n is a, c, g, or t
  misc_feature (613)..(613): n is a, c, g, or t
gttactttcacatgtattgattaaagaaaaataaaggggagggggagttttcaacgtcattcaggataactattttcctggtataaaaagacattattctcaaacaataactttctnnnnnnnnnntacatcatgcaatcaaagttttaaaaagtttcactgaatgtttcaaacctctgggaacaaatcatgtagtaaccattttgaccagtttttgcctgaataaacgcaaaatcttgcaagtcaacacagatgcaggctttgctgcaaaaagaaccgctgatcagagccaaaaccagtttccaaggagggcacctgccagaaaacaggggcctcagcagagagccagaatgactccgtgtgttggcacaaacttctacgcctttggagtctgtggcagctgcacacccagcagcaccacctctgcccaagcaaaagccagtcctttactggagaaacagggaacatcacggttctttctcctcaattacttttaaagtcccattaaactaaaaagcaacaaaaaatccgaatccctgcatctgcgcgtattagacttgcnaatttcagtctctancccttaagcnggctgnttctgcctaataatggagcncgtttgaaccttgagggtcctcctgctaacagc

SEQ ID NO: 365291 - DNA, 123 bp, Homo Sapiens
tctagtcattctggttttattaagatttattagacctgaggcatgaaaaatagcatactggatgggacttcagcatcgatgagttgccttagtaatactgtcaataaaaagcactaaatatga

SEQ ID NO: 365292 - DNA, 756 bp, Homo Sapiens
  misc_feature (48)..(48): n is a, c, g, or t
  misc_feature (79)..(79): n is a, c, g, or t
  misc_feature (178)..(178): n is a, c, g, or t
ttccccaatagtctggtgcctcaggccacgcgggggacctacaggtgntcggcttcacgcagctccaaaccccttctgnctgtctcacccccagtgagcccctggagctcgtggtctcaggagcaactgagaccctcaatccagcacaaaagaagtccagattcccaagactgccccnacacctcccaggattacacagtggagaatctcgatccgcatgggtgtggctggcttggtcctgctgttcctcgggattctgttatttgaggctcagcacagccagagaagccccccaaggtgcaaccaggaggcaaacagcagaaaggacaatgcacccttcagagtggtggagccttgggaacagatctgatgatctgaggaggttctggaagactggggcagcagttggggaagtgtctgctgagaatatcaaggggaagaagcatgggtcaggtgcaggaagatgtctgggtgtctgtagaagatgcttcctccattaaactgtggtgctttcctcctcattgtcgactctccttgactgccccttccttcgtttttcttccctatgatgtaaggcttcacccctatggtgggtttgggtccgcccctctgtgacctcatgctctgctccactttcaggtaatacacctttctttatttctaactactgcattttctaatgtgtattactgggactatctcttcagctcataacatggaatttgcttttgataattaaatccatgggcaaaaatc

SEQ ID NO: 365293 - DNA, 386 bp, Homo Sapiens
gcggccgccggccggggtcccattcagagggcgggcgtgaggggcggcggggctgggccgggcgccccaccctttgttcttggcccgggacctccttcgtcccagggctgcgtgtcccgggctgggatcccccgagccacccggaccgggttgcgctttggagagggaagggggtattctcccggactttcagtccacaaccctgctaaggcccgggcggccggagaggggacttggagcaccggggagggatgcgccccgctcttctagtagctttgttcctcctcgcctggggccgtcaccccactcctacccctcctctgactccgggacctcctgagaaacttcgcctcccggttcagcccttcgtcttgtgaaggtctcgc

SEQ ID NO: 365294 - DNA, 360 bp, Homo Sapiens
agcagtcatacatggaggtggaaaaagagaaggaaaatattttatcaaaattcgggcccctaccgtaattttaatcttgagggtgtttttaattttatgagggaggcttcagcaggagtcagcaagctacacccataggccagatagacttgcctcctgcaatacagtagttttattggaacacacatgccctgaaataagatttgatttcatggaatagccaagaccttgttttaatgagacagtagacttctgccttcgaagtctcatcccaggctcttttatatcagattgcgttaggtttaaaaaagggtgcagggagtttaaaaatttccgggtattagggtttttttcccaccc

SEQ ID NO: 365295 - DNA, 196 bp, Homo Sapiens
cctaatattcacagggttattgtttgtaaaaaatctatttatttgctttattccatcaagtaatttattttcatgagatttcttggaaatgtggctctacatatcgttagtacaagtaatacattttgattgttgtttcctggaataacttgtattatttgatgagttaaataaaatgcctaattctaaagtcggc

SEQ ID NO: 365296 - DNA, 423 bp, Homo Sapiens
  misc_feature (375)..(375): n is a, c, g, or t
agttgatcagactaatgtagatatttagattagcaagtattgaacatttgatttcttagactgaggttttaaatgaatttcattatttctcccggtaatacacagagcatcgggattaggaaattagccattttggattctgtctgccacaaacagacctattctaaacagtgctattaaattttagactgttggtcaaatattttattttctcctaaactactttttatggtgatgaataattaagaccatttaaaacacgggagtacaagtatttttttgaattaaattaacttgcaaaaaccaaatttgcagtggttgggttgtttctagacagactttggtatcaatttaaaaccaagataatttttatantctttccaatagaatttcatgacaactcctgcagttttcttaacctac

SEQ ID NO: 365297 - DNA, 568 bp, Homo Sapiens
aaataaatgaattgggataggaaggagaaaaaaagggttaaggaaaagggctctaaaacctaactctaaccctgcaggaaaataggccctaggaagaaacccctcattgccgaagaagggggaaagaactccgagtccactgtggaggccacctctgtaccctctagtaggtgcctagagcttgcacactggttcccccgtggcaggagagtggggcctccttggcctttgactttgttctcagataaacaaacaaagagctatgggtgagatctggtttgactttaatggaattttgctttggtcatccacgctctgggctacctggacccaggacagtgtgcatgccttcacccaggcctggagcagcttgagcgtgcagttatgcaaacggtggggccgagcgtgggtttggcctgcacgctctgcacccaaacgctgcatttacatgagctgtgccttccccagggcagaggagaaaaggggctctcatcaagttctctcaggtccagctaaaaaaaactctcctttggacaactaagcccatgggctgggttgcggcacaagg

SEQ ID NO: 365298 - DNA, 415 bp, Homo Sapiens
cttatagaccatgtgccattttaaaagcttctttatagccaagatttcttctcgatatcaaattaagaaatttaacagctatgctttctgaagactgtttccatagagcttccaagtggtagtaaacttttaaatcaggatttggctatgtgctcaactcagaagactgtcattagcaatagcagtaggtaccactgagtgccactgcggactcaagtagacaaaaaaagaagaaagaaaagcaatcaagggggaaaggtagatatagtgaagtggtagaatcttgctatatgttgcctctaggtataaatctagaactaactactcctgaaaatggaggtagtaggaggtgggaaataatttttccattccgcttgggaaatagggttcgtaaacctaaaatagcccttatttc

SEQ ID NO: 365299 - DNA, 895 bp, Homo Sapiens
  misc_feature (609)..(659): n is a, c, g, or t
  misc_feature (797)..(797): n is a, c, g, or t
accaaaaacaccaaaaaaacactaagctgaacctcccctgtggggtggagtcagtttgactcacctcagagttgtttgaagagagaggttcccaaacagttttaccataaccttagttcactgaatgttttgtggtagaaacactgactagtaagttcagtaacaatgcatggctcagattgtggaatatttctgatttaaatgtaatctgtagtacttcacacttcagatttttgaaccttttaacctacaatactgggcttcatttctgttatgccctaatctagtcatgctgaatatccatactgtataatggtagatgcaaaccatgtttactaaattagaactacatatgaattacagtttacttcaagtgttttgttttggtaatatagctttgccaccaagcttttacagttttccttgaatgtacacagactttttattctaataacccaattacgagttatactgcgactaaagcgtcaacacacattaaataaagataacaaggatgaagatgaaataaaggaaattctacaatggagttggcttgagatatcgataaagaataaaaataaattgagaggtcataagcacctacgaaannnnnnnnnnnnnnnnnnnnnnnnnnnnnnnnnnnnnnnnnnnnnnnnnnntccgacattgcaggacctaaatatggtggtcctgagcaccacctaagaccaccaatgcaattgcgcgaccgggacgggaaatacatataaacgctacgtttcactgtctgtcaaatgaatacagaacgagcaaggctnctatgaatatgaaggccacaacagctacgaaatgatgtcggataatacaccccccactgttgacgcgccccttttacattaagatatatatttctcac

SEQ ID NO: 365300 - DNA, 451 bp, Homo Sapiens
  misc_feature (29)..(29): n is a, c, g, or t
  misc_feature (44)..(44): n is a, c, g, or t
  misc_feature (262)..(262): n is a, c, g, or t
ctggaaatgggtgggtgggtttgattganaaacactttggggcncccgccagtgatggtggggaaagaaaaattcctttccccaaagctgcacttccccttaataattcctctcccctcaaaagaaagattatgataaagaataatttggagtaataagtaacaagatagaattagaaaaatgttgaatttcctgaatgaccattccagaggtgtggctttttcccacgtctttttctcctgcaatgaactgctcccacgtncctgcactgcaataccagtctaatgaacactttgtgaaacaaatcgtaagtatgtacgcacgcatatcaaactatgctctgaggataaagcaagttctaatttgtggaaaaaggattaaatatttctgttttctgaaaagagttattttgtattttgttttctattaaaatgtatttagtttcaaaaaa

SEQ ID NO: 365301 - DNA, 1664 bp, Homo Sapiens
gacaagctgcaattcacgtagggaaggaaaggggaaagaaagggacagccaagagatgcagggcagggggaccccccgtctttaatttttcaaagaaaactgctttgtcgttgtgagtttgtgatcaaaagaaacgtgcaatttgcttcagattttacatgttctcagtaattatatagttctgtctcatttgaagggttatctaatgattgccttttagaagcttgtatgatctgtcagttctgttcatgttgatgtcggagggatacaatttattcacctcagaaatgggcagcaattatttgatgtattactacaatgggaaaacggtatatgcaccatccccaaattcagatgatttcaaccgtgaatctcctagttatccatctcctaagccaccaaccagtatgttcgctagcactttctttatgcaagatgggacccacaattcttctgacctttggagttcatcaaatgggatgagccagcctggttttggtggaattctggggacctccacttcccacatgtctcaatccagtagttatggcaaccttcattcacatgaccgcttgagttatcctccacactcagtttcaccaacagacataaacacgagtcttccaccaatgtccagctttcatcgcggcagtaccagcagttcaccttacgttgctgcctcacacactcctcccatcaatggatcagacagcattctaggaaccagagggaatgctgctggaagctcacagacaggtgatgcacttggaaaggctttggcatctatttattctcctgaccataccagcagtagttttccgtcaaatccatcaacaccagttgggatcaccttcaactctccacaggtaccagtcagtggccaagacctggagggcaagcaccttcatccccaagctatgaaaactcactccactccctgaaaaatcgagttgagcagcaacttcacgagcatttgcaagatgcaatgtccttcttaaaggatgtctgtgagcagtctcgaatggaggatcgtttagacagactggatgatgcaatccatgtgctgcggaaccatgctgtgggaccttccaccagtttgcctgctggtcacagtgatatacatagtttattgggaccatcccataatgcaccaattggaagcctcaattcaaactatggaggatcaagccttgttgcaagcagtcgatcagcttcaatggttggaactcatcgggaagactctgtcagtctcaatggcaatcattcagtcctgtctagtacagtcactacttcaagcacagacctgaaccataaaacacaagaaaattatagaggtggcttgcaaagtcagtctggaactgttgttacaacagaaatcaagactgaaaacaaagaaaaggatgaaaaccttcatgaacctccttcatcagatgacatgaagtcagatgatgaatcctcccaaaaagatatcaaggtttcatctagaggcagaacaagtactaatgaagatgaggatttgaaccctgaacagaagatagaaagggagaaggagaggcggatggctaacaatgccagagaacgcttacgcgtgcgggatataaatgaaggcattcaaagagcttgggcgaatgtgtcagcttcacttgaagagtgaaaaaacccaa

SEQ ID NO: 365302 - DNA, 680 bp, Homo Sapiens
gctctgcagcactgtgacatgctcatgatggccataacgcccacgctggaaggttgtgggtttaccggaacgaaggcaaggaacacctggcccacccagggcagaaaaccacttaaaggcattcctaaaccacaaacaatagcataagcgatctgtgcctaaacgacatgttcctgctgcagataactagccagacccacccctttatttcagcccatccctttatttcccataagaaatgcttttagttaatctataatctatagaaataatgcttatcactggcttgctgtcaataaatatgtgggtaaatctctgttcgaggctctcagctctgaaggctgtgagacccctgatttcccacttcacacctctatatttctgtgtgtgtgtctttaattcctctagcaccactgggttagggtctccccgaccgagctggtctcggcacaccaccactcctggctaaaaactggcctcaaaactggccataaacaaaatctctgcagcactgtaacatgttcataatggccctagtgccccactggaaggttgtgggttcacgggaggaacacctggcccgcccagggcagaaaaccgcttaaaggcattcttaagccacaaacaatagcatgagcgatctgtgccttaaggacatgctcctgctgcagttaactagc

SEQ ID NO: 365303 - DNA, 709 bp, Homo Sapiens
  misc_feature (362)..(397): n is a, c, g, or t
ttgaattcagccaggatttattgagttggcatcacggacgctgacagcctccaagtgaaaacccttctcttgaatatgtacaggtttcccatccacataccaagctgatgaggatcccatcgttcttccccagtcctgaggagcccccctcgccatctgcaccttccatagccaaatcagggtcattggactcagaactttcagtgtccccaaaaaggaacagcatctctcggacacacaaagataaggggccttttcacatactgagttcaaccagccagacaaacaaaggaccagaagggcagagccaggcccctgcgtccacctctgcctctacccgcctgtttgggttaacaaagccnnnnnnnnnnnnnnnnnnnnnnnnnnnnnnnnnnnncagccgctctcagcccggtggtgagtcacgcacacctgctctccctgtggccatagtgtctgtgcattctgagagagggtagattttagtggcatggggcggggttgaaaaggggacagttcagatgctcaaaagccaaactgccatccttttcaccagctccgcttgctaagagcactcatgcagcgaacattaagaacccacctctgtgtggcacgtgtgcagaagcagagagcatgggtttcattttcaaggcattatccgatcgaggaactggagctcacccctcaatgaagtaattcaagtcctctg

SEQ ID NO: 365304 - DNA, 423 bp, Homo Sapiens
  misc_feature (328)..(363): n is a, c, g, or t
ctctctccagaaaaggcagaggacttgaattacttcattgaggggtgagctccagttcctcgatcggataatgccttgaaaatgaaacccatgctctctgcttctgcacacgtgccacacagagtgggttcttaatgttcgctgcatgagtgctcttagcaagcggagctggtgaaaaggatggcagtttggcttttgagcatctgaactgtccccttttcaaccccgccccatgccactaaaatctaccctctctcagaatgcacagacactatggccacagggagagcaggtgtgcgtgactcaccaccgggctgagagcggctgnnnnnnnnnnnnnnnnnnnnnnnnnnnnnnnnnnnnggctttgttaacccaaacaggcgggtagaggcagaggtggacgcaggggcctggctctgc

SEQ ID NO: 365305 - DNA, 390 bp, Homo Sapiens
  misc_feature (178)..(190): n is a, c, g, or t
  misc_feature (194)..(194): n is a, c, g, or t
  misc_feature (200)..(200): n is a, c, g, or t
  misc_feature (206)..(206): n is a, c, g, or t
  misc_feature (219)..(219): n is a, c, g, or t
  misc_feature (223)..(223): n is a, c, g, or t
  misc_feature (231)..(231): n is a, c, g, or t
gcggcaggtgcccccgggcacaaccagggtctccggcaccagagacgtcgccgagtaagagccgacttccccaatcttcctcccgccccccggaaacggagcgggaagtgcaagaggaagcgcaggggaaacccctccctcggacacagcccgggcaggacacccgcggcaggaactnnnnnnnnnnnnncggnggtgtnccttcnaaaacagacctgncttntgccccancccgcacaggcaccgccctccaagcacctaattttaaaaggggcggtgcctcttgaaattcaccccacaaggcgcacaccctccacacacacccccagcttcgatggtggcgggtggggggagagaccataggggaaagctgggctgttcgtggggttg

SEQ ID NO: 365306 - DNA, 744 bp, Homo Sapiens
gcggccgccagtctgcggttgaagccgtgggcgcagatgtcaggcactgccggtgccgtcgtgccgtggtacagcacctgctccaccgggcgccgctcgcatcgctgcagcaggcgctcccggtacagctcatactgctgctgcagcagcgggtgcgacacgcgctccacacgaacgacgcggatgctgctgcgggcagcgtccagggtgtcgtagaaggcccgcaccacctcctggaactccccggtgttctctgccagacgctccaggttgttccagggccccttcagcgtctgccccgccaaggtagggcctgaagctgccaagggaaaggccaaactctgatcccaggggccagccagaagtgccaccaagtggcgggcagccacgggcagggtgggccccgaagccaccggaggatggtgcagtcaccacgcaggccaacaactcacaccatggcaccgctccaggcggagcacgcagctctgcaggcagtgtgcggcgccaggccccacccgtctcctccttgggactgttgacctccaaggcatgcctgagcgcccggtccagctcctccacatcttgctcaaaggccgagtgcccaccagcttggccttgccatcagtccccccattctgggggctcttctgcctcccaagggggctgctccagcgggagagggtaagggcttgccgcaggtcagagcctcctcctggcaggcacttacctgaggcccagtaccgg

SEQ ID NO: 365307 - DNA, 1044 bp, Homo Sapiens
tttgggtttaccacctcatagatgttgaattggctctgcccacgggccagctcccggtaactggtggtgaactccccaatgaagtcatggctgccgtcccgatcccagtcatacacctccaccttgatggtccgatcgtagtcgccgttgcagagggctctcacgggaatggagaaagtttgccagactggatttagggtgttcttcatgacctcggtcttgtggcaaatggtgaacgttccatcctcgttgcttctgtagaataccaagaaggggtcagatttcccaaagaaatctttcttgtccagcttgttggcacaagaactgcatggtggcgacatccctacagttgctgagctcctcagcggacaggatgatggtgccacatttctttcctgggacaccaccggaggcttccagaccagtggttctcaaactttccatccaaagaccaccgttggacacagctggcatgggtttgcccgttcctggaattcaggcctgaatgcgcctatcgtgaggggctttttccaggcggctcccaggggaccccacaatctctccaagggtgcagaaggcctggcccaggaaatcgtgtttggataaatcaggactcttagagtcaacgtcgtatagatcaaaacggaggttctgcttctcctcgaaaaagtaatccacaatgaacttgcgcacgaagtcaggattgagcgtgttgtcgatgacttcggtgcgcccaaactcccgccactgcttgttctccatcccttgggtatacatgacgcacagtgggtcggacttggaaaacatgtctttgtccaggaggttcctgcaggacacggtgatctccaccttggtggccgggatgctgcccgccaaggagtcgaactcgctcagcgacgccatgtcctcaggctgctccatcgcccaccgcaccccccaccccaaattagtcaatccctgcgcgattcacgcatcccaggaattccggaccggtaccacccatactggttgttgtggtgcggctagtgcggtcacgggaacggc

SEQ ID NO: 365308 - DNA, 265 bp, Homo Sapiens
ttaagtttgagtctgttgcctctttccatctccactactgagctgaatatgttgtactctccaccctttcccaccagtcccaaggtccaccctatatcaatagatctccttcttccagcttgtggctgggttgtcaggagaaatccctggctggagacaaagtcaggagagggagggtagggcttttattcccttgtaagatggccttgggctggctgtcacccttgatagatcatttcaaggtgggtggctctacacacccttt

SEQ ID NO: 365309 - DNA, 588 bp, Homo Sapiens
ctgtgcccctctgggtatgctcacatgcacatatatggacatacagtttcgtagcagaacgtggctgcccaggggctgcctatctgggcgagtagaccgcctggctcagcccacaggcctgcagcatcccatagcacaccgcccttgccccatcaccctgtgggctacatgcaggacacggcatgggcctgctccccagaggcacctgtttggggtcttcttgaggcttgtgctttcacagctctctttgaagcagatgtcttggtgaactcggtagactcttttataccctgttgtcacaagaaagctttgtaaaaccagacagtgaagcaaaatgttgccaactgcttaacctaggctatgtgaacccacagtaaacctgaaggtgtttgagggaaaaactgctattttctgaatgaaacgtgacctcctattgatgtattaaaatgtctaacataaaggtcatgtgatttgtaataaatttattgtggtacagtaatatgcataaaataaacccattttaatgtgcattctgatgagcactgacaaaggatatggtactaaaaataaaatgtgaaatgtcaaaaa

SEQ ID NO: 365310 - DNA, 441 bp, Homo Sapiens
agcaatgggtttgtgcttgcagtccttctgctcattctttattccctctttatttcctttttttgtcactcatgcctagttccctgaaccccttacttacctggccttacctacatctctgagccccagcctgcagggctccttctttgactattcacctggtggcttttactcctccttcaagacccaactcacagatgacttctctggagtcttccctgaatgctctaggcaggtataaatgagaaaattgttcctctcttcccctctttattcctctcactgtgcctccaaagtactttgtccatacctcggtgatagtacttattctactgtgattttattgtagctttgtgattgtctgcccctctgcactgagcatctaagaacagggggccaagccttattcatttctgcgttaataaatatttgttaaatgtg

SEQ ID NO: 365311 - DNA, 459 bp, Homo Sapiens
ccgagcccttgtccctcctctccgttagggtgccggaggggggtacacttggggcttgcctggccccaggttcccagtccttaatgctccttaacccactgtgatgacttcctaggccttgaggaaagggaaggagaggggaggctgccggtggcttaccaagatgccggaaaccccggaatcctcagggtgagcctcttggggtcatgtccccaagctcctgtccttggggtcaggagatgccaccccccccgggggacatgaaacagctctccctcctcacccctcacctcagggccacctgatgaccctggggcgatggtggaccccctgactcataagccccccagtcccctgggaaagggggttcattgaccctttgggggtccttgaactcactgatgcccccttggggcccagcgggttcaacaatgacactgcaaaaaggtttctttttac

SEQ ID NO: 365312 - DNA, 272 bp, Homo Sapiens
  misc_feature (59)..(77): n is a, c, g, or t
gcctccatgtccacgcccttcctggcccatcaggtcctggtggcatctcagggtcctgnnnnnnnnnnnnnnnnnnnggctcctgcaggccgaccttattgctgtgctctgggcttgggggcggctgaggtgcccctctgtcctccagcagggcacgagtgacctgagaggcccactcaggcagaagagacgcaagctgggccgtccaactggtttcaactgccagctttaccaatgcagcatttattttaaaattaaattaaattaaaaaa

SEQ ID NO: 365313 - DNA, 650 bp, Homo Sapiens
ggattctcaaatcagtagatgctgtgtcttcatttctagtgctgatgtgaaaacacatggtcagttgttgctgcgtcagagatatgagaaattcttttctcttaggtgtgcatcactgatatacttgtccgtgaaaggtgaaagacactgaaatgtaagatgcgtgagtaaaatcttggtagagaggctctttgtggttgttttatatacttgtaagtgatttatgagataggtgtttagaataatactcttctgttagggtcaccctgatcagaccgttcccttcccctcccacaggacttacaatacggtcccttgtgctctccgcacagctaccacagggcaaaaaacaaaccccccttcactgatccctccagtaactgtgcagacagttacaggatgcggttaacatgtctgttcacctcgcataacaaagctggcaaaaaacatctccaggatgcagacaagacacctgcaccctcgactaagctcccccaccccaacccagttctcctgcacccccaactcagctcccacaccccgacctagttctggccctataaaaacctgctatagtctgtaagcagggctgcctcctctaactgtggtggagcagccaagcagctcaataaagcttgcttgcctgacaa

SEQ ID NO: 365314 - DNA, 807 bp, Homo Sapiens
agcgggtatgcacgccggaccggagagcgcggaggcagccatggtgcggttcaagcacaggtacctgctctgcgaactggtgtctgacgacccccgctgccgcctaagcctcgatgaccgagttctgagcagcctcgtacgggacacgatcgccagggtgcacggaactttcggcgcagccgcctgctccatcggcttcgcggttcgatatctcaatgcctatactggaatagtgctacttcgatgcagaaaagaattctatcagcttgtgtggtcagctcttcccttcatcacatacttggagaacaaaggacaccgttacccatgctttttcaacacattacatgtgggaggtacaataagaacatgtcagaagttcctaattcagtacaacaggagacagctgttgatcttgttgcagaactgcactgatgaaggagagcgggaagctatccagaagtctgtgacaagaagctgcttactagaggaggaggaggagtcaggtgaggaggctgcagaagcaatggagtgaacctctgctccccacacagctggctacactgctcaggcttcaggcccacttgttgaacagaacaatctgggtagcaacagcatcttccacagttttccaaactggatagctgccaaccagcagacattacccacttgaaatggagtactcagttaaactgaagttgcctttacctagcattcctggtgaagtgttgcaggttgtgaactctgtagacatctttattgcttggctaagagtagatttaataaatgtatctggtttccgtggcaaaa

SEQ ID NO: 365315 - DNA, 822 bp, Homo Sapiens
  misc_feature (738)..(738): n is a, c, g, or t
atcaggccaaatcggccgagctcgaattcgtcgagagcggggttgcacgccggaccggagagcgcggaggcagccatggtgcggttcaagcacaggtacctgctctgcgaactggtgtctgacgacccccgctgccgcctaagcctcgatgaccgagttctgagcagcctcgtacgggacacgatcgccagggtgcacggaactttcggcgcagccgcctgctccatcggcttcgcgggtgcaagggcgctgggggaagaggggaacccgggaggatggcgggatgtggagggggcaggcgccggaggaagaaagaaggggcacgagtggccaagcccgtgcaccgttttttgtaaggtatctctttaagcgcctgggaccccaagcgagagtccgaaattagcagagcgctaaaaggaggggcccgaaggcagtggggctttgagctagaagcctctttttacctgcttgacaggtaatttctgtaattggttgtgattgaatttgatagggtagagaattaaatgagggaagctgtgtatacttcctagtaagagctattatatgaccgattacattaacatcatatggaaaaaaatggtcaaaagtactccgggaaagcccttaaatagttggtaaagtacagaacacatgattgtcaatatatgtaaatacaggatgagctaggacagaggggcccttctttcacaccacttaaattagttcccacttttaccnttgtttgagattgacttctggagagttaaatgcagatagacttaactctcctaagtcagtgagactgagagtctccgtcgaact

SEQ ID NO: 365316 - DNA, 548 bp, Homo Sapiens
  misc_feature (13)..(13): n is a, c, g, or t
  misc_feature (349)..(357): n is a, c, g, or t
agttcgacggagnactctcagtctcacctgataggagagttaagtctatctgcatttaactctccagaagtcaatctcaaacaaggttaaagtgggaactaatttaagtgatgtgatatgcccctctctctcccaatcagagcctgttgatattacaacagggacagatgtgttagttgctcactagagtttatgtcttatattaaattgtatacagtttttattctaaccactaactaggtagtgtatgccccttcagaacatgcagagtgtatctttttttaaatttctccttccgtttcttaagtattgcgcagatttgttcaactttgtaaatatggacatcacnnnnnnnnnctttgagaaaacacttgtatcagctttgtgggtgttttcagggagacagctgtctggcattccctgtaggaaacccagcaatggattatggcacgttgaggacatgtgctttttatttcttaggcaaggatattttatctctggtacataaagtaggaaacccaaaaggctagggggaaacaggatactct

SEQ ID NO: 365317 - DNA, 528 bp, Homo Sapiens
catcccagagagacggaagcaggtgcgatactaagcctcagcccaagaataaaagagagttcaactgttactcttttctttcatcaatcccctatcagttagaactgcaggccagttccaaagagtgtttgcttaagattcaaaagtgggtaagtaaaaggatcagtgggaaggataaggtgtccaacagaaagtgtggaggagaaactcttggcctatcaagtgctcctgagagaaaccatgcaatttaacacttcagttaaagaaatacatgagaactgcttgtcatgaccagacaagataggaaaggggaaaccccagaaacgtgctcttcatctgtcagccttttggaccaagaagctgtcactatcacacataagcaccattcccttagagtggatccaggtgttgactataaccagatttactctttgcttactaggttttccattgtcaccattggatgaacctctggtttagccacagttgtgaaaataaatggaagttggttgattgtctagaaagtgc

SEQ ID NO: 365318 - DNA, 711 bp, Homo Sapiens
  misc_feature (30)..(30): n is a, c, g, or t
  misc_feature (66)..(66): n is a, c, g, or t
  misc_feature (448)..(467): n is a, c, g, or t
aaaaacccaaaagtgcccctgaacccctcntccctcccaaagaggtcccccctcaagcatcaaagncagcccccaacccaaggcgtgccatcgaagccttgcaccctcaacaaaaggcctcccctggatggcctgtgaagcaaaacccaggagcccctggctgaagcaagcagtcagtacttgccccactgacagtcaatatctgtcacctagtaagcaaccaagagaccctcccttcatggcttccgatcagatggcaagggtctttgcagatgtgcattccagagccagccgggattccagtgagatgggtgctgttcttgagcagcttgaccaccccaacagggatctgggcagagagtctgtggatgcagaggaagttgtgagagaaattgataagcttttgcaagactgccggggaaacgaccctgtggctgtgagaaagtgnnnnnnnnnnnnnnnnnnnnggcattggcattttcttgtctcttctcttgatttaaaaatgatccctcctggtgataacccattttacagggatgaagaaagaccaatgctgctttaaggcttttagtgaacatctgaagtgcccacaagtatgttctttccactgctgatttctttttcagagataacaatggtttcgttttgaccaaacttgtattaggacagaattaatgatgcttaaagagaaaagaaaaaaagaactag

SEQ ID NO: 365319 - DNA, 560 bp, Homo Sapiens
aaaaggcctgagaatatacagcagaccctggctggtcacgccactacacgccatcagaacacaggagccatactggccgccctgctcagcctcagcctctgcattcagccacctggtactgtgggtcctaccacgtggacgctctctgacacctgcccttctgcattcctgctgcccctgcctatgtgcaaacattcatctcttttctgttttattgctacagttgcccaacagctctttctacctacgttctcaccttccccctcctccctattttactccattgccagagttacatggctggagaaagaacctcaaatgtagagtggcatgaatctcactcctcagttcatgactgccatcatcatcatcaccatcatcaaacgtgtcctttgattttttttacctgatttcctctatcattctaaccacccttccttcccacacacataagctatagccacttcaatgtgtttaacaaatgtccttagatatggatggatccgcgaagaacatgcagcataatgtccttgaactcctgacctcaggtgatccgccca

SEQ ID NO: 365320 - DNA, 273 bp, Homo Sapiens
  misc_feature (11)..(11): n is a, c, g, or t
  misc_feature (36)..(36): n is a, c, g, or t
  misc_feature (48)..(48): n is a, c, g, or t
  misc_feature (98)..(98): n is a, c, g, or t
cacccaccggntacagaaacctcctcggcaaatggntccttagccccnggggtgacctttgaccttcaccccctcggcctaccctctcccagcagctncccacagctcccccccgggacaggtagaggatgctcttcgtttcactgggatccgggttcagagtgacgtttttccctcacaagcagaaggtaacaaatttcatgctctccccaaattctgtctgattttgccttgtggtgatagattgtcatgaacacaatgtcctctggagaa

SEQ ID NO: 365321 - DNA, 515 bp, Homo Sapiens
  misc_feature (73)..(73): n is a, c, g, or t
ggaccggtccggaattcttgggatgcctgagcatgtggcgaggctgggctgctgagcctcctcctccacagcncaatgtttccctcaaactgcttgggggtggggggagggactcatcctcatcccattagcctggctgggtattccctacctttctggtctctgagagacttacctcttccaagaagtcctcccgaatgagtagaagggagagagctggattggaacttaagtgacatctgggagaagcctgaagcccctccggttggggctgagactcctataccctaggtctggtgtctgggttccacctgggtcctctaccttggcctggattcctgctttcgttttgccagtctctcccaggatgggggtgcatggctggttcgtggctcagagcaacatctgcctctgtgtccccccatcatctgtccgccccctaacacctcttgccatattagaattgctattgccctgtcctttcattcatgtatccaacaaatatatattatctg

SEQ ID NO: 365322 - DNA, 294 bp, Homo Sapiens
ggggtttaaatgaggaacaatcagtaaatcagattctgtcctcttctctgcataccgtgaatttatagttaaggatccctttgctgtgagggtagaaaacctcaccaactgcaccagtgaggaagaagactgcgtggattcatggggagcctcacagcagccacgcagcaggctctgggtggggctgccgttaaggcacgttctttccttactggtgctgataacaacagggaaccgtgcagtgtgcattttaagacctggcctggaataaatacgttttgtctttccctcccc

SEQ ID NO: 365323 - DNA, 615 bp, Homo Sapiens
  misc_feature (12)..(12): n is a, c, g, or t
  misc_feature (29)..(29): n is a, c, g, or t
  misc_feature (52)..(52): n is a, c, g, or t
  misc_feature (76)..(76): n is a, c, g, or t
tttcctcttccncccagtgcgcttgtgcnaggcatggatggagcgggtctgncagtctgtccagtacagagtgtcnccggagagcgtcagggcgaaggggtgcgtcaggctgccctccaccaccttctgccggaacgagccgtccaggttggcacggtgaatgaagctgagcttggcgtcagcccagtagagcttctgctcctccaggtcgatggtcagtccattgggccagtaaatgtccgagtccacaatgatcttccgggtgctgccatccatccctgcccgctcaatccggggcgtctcaccccagtctgtccagtacatgtacccgtgagcggggtccaaggcgatggccctcggctggtcaaggtcctgccagaagagcaccttccgggatgtgccattgaggttggccacctcgatgcggttggtctctgagtccgtccagtacagcttcttgcccacccagtcgcaggcgaggccgtcgggagagaccaggccggagatgaccacgttctgcacggcggcccccgtctggttcaggtaggtctgcttgatggcctcctagctcacgtctgtccagtacacggctcccttggaaaactggaagtccac

SEQ ID NO: 365324 - DNA, 768 bp, Homo Sapiens
ttttttttatgatcagtaacactccatgtctccagaattatatccctaggaggtggaatgccaaaaaacatttctgttttgaacaccatgatacacagcagaaggaggggggaaaaacacgtagatattgcccttcggcttaaaatccagtcctgctcaaatgacatcacttaaaatacccttgatggagctcaaagctggtcctttcttccaagatggatgcctggaacaatgattccttcccaataatcctagtgcagtgtcatttgtacagtggtttccttaagaggtcctggtgcagagatgtcagcagtatttctgatcaggacccataggcatgccagacatgggcatggggttcatgttcatctgtcccatgtgaccactgctgccattcatgtgcaccatactatacactgcaggattcccctggtgggcaaactgctgctgggaaaaggagctgttcctggccaaatttcctgatggccagcccttcatttctgaggactgatagatggatgcagcctgcgggtgttgcatcatgggattctgggagggacccattcttgacgacatcattggcattgggaggactagacactcgaccaaaaggggctggatatggttgttgtcccagttccataatttggttgatatggaaacttgttgcggaggagcttcgatcgcatttgtgggtctctgccaataagtccatgccatgctgggggaagcagtcacattaggaggtgggctgaagcctgggtttct

SEQ ID NO: 365325 - DNA, 352 bp, Homo Sapiens
ggctttaaaaactccccagtgttgagaaacaaatttagagagttgagaagtaggtatattaaattacagaatcttactgagttttggtagactgataatacaatttgctttgcttttcttaaatttgcattgagatgggatttgaagcatattgtgctcttgtgaatgttgaagttgcattgtagaagtttagaagctctggctatgggttgcctaaattgatgttttgaggaagcatattaatgttataaacttcgctgactttgaaggttgtgttgtagcatgaggaacacaaataaaacaattctaaatcatgccgtgaagaaagctttagagagatatggaactgtgt

SEQ ID NO: 365326 - DNA, 400 bp, Homo Sapiens
atggatttctttaaggaatactggtttgcagttttgttttctggactatatcagcagatggtagacagtgtttatgtagatgtgttgttgtttttatcattggattttaacttggcccgagtgaaataatcagatttttgtcattcacactctcccccagttttggaataacttggaagtaaggttcattcccttaagacgatggattctgttgaactatggggtcccacactgcactattaattccacccactgtaagggcaaggacaccattccttctacatataagaaaaaagtctctccccaagggcagcctttgttacttttaaatattttctgttattacaagtgctctaattgtgaacttttaaataaaatactattaagaggtaatgcaaaa

SEQ ID NO: 365327 - DNA, 1171 bp, Homo Sapiens
gggctgttttgcaacatacgaagttgatggggaggaaggacccttaaatcctgagtgggtatcgagtattccaagcaactggagagaggctttgtgcctcaacaggtcttcaacgccaaggagatgacccatcttttgcagtgcatgccttcctacttttggggcaaaagacaaaaatctggaaagcttagaggaagctaaggacaggatttccctcatttttttgtggcagtgcctcaggtgacaaaatgataaaaccactgctgctttacaaagactctaacaccccacttgtcttttagagataaacgccttcctgttttcttgtaatcacacccagaatcaccactgccactttttggattagttttacaatttttttatccatcaaatccgaagtcatttaacaaaaaaaatctggaaatcagaatgttgctaactgtggacagaggtcccaatcacccagattcattattctttgttcattctaatgttgatactgtgtttctccctcaggaaggccctagctttcttcagcccttgggtcagggtataactgaagcatttgaacataatcaagcatatgttatgaccactttgctgactgtattgaaaaaaccctcaccttactctgaaagaagcatggcaacagtacaatattgccgatgctttggtagtgataaaagaggtgatgggtgatataaaatcagccactcttaagcttgctggaaactgtgggaggatgtgtgaatgatgcatatttccctagagctaatgaagaagttaaaaaaaatcttagtgtctgcaaaacaggtgggtttaagatttattgatattagggaaagtgaaattaatgagctactcaagtttctgtctttggtcatcactgagagtctatttccataggaagaagtctttgcagaggaaattgaatgctgtctgatgctacaattcatatggatcctttcctggattgaagcctgacttttaaaaaaggtttcaataaattgcttatacctatgaagagatgcaaaagaaccttcaaaataaagcaaaggacttgaagaaagagaaggaagacatgaagaagaggatgtcatttaggtgaaggtgatggatacagaatctgagtctgaggggagcctggttgacagagagacaaaaaaagaaa

SEQ ID NO: 365328 - DNA, 556 bp, Homo Sapiens
taggataaactcctaaaagtagaattacaggatcaactacactaaggcagaatggttggcggtcctcttattcttttccctgctcttgcttagtaacagaagcctggaattttggttgggtccatgactatctagaataaggaccccatttcccagactcccccatgtggctaggtgggtaatatctggctaacaggagtgagaattcctgcaaatctacttgcaggaggtggataactctttcctcaatcctttctgccggctagaaatataaacatgaaagccagcactgcaccactagctgggaatcatgtattaagaacggcacagcagcaagatggaagaaagttgggttcctgatgactatagagcctccacaccaacccaggaccacttgagagcaaattaaactcatatcttgcttgggtaactgtagttttggtattttaacatgaccaatctaatcttatatgatataaaaggggataacatttttaaaagatataccagtttgcattcctgccatcagtgctgactgctaaaccaatgaactctt

SEQ ID NO: 365329 - DNA, 621 bp, Homo Sapiens
gggccaggctgcacccctgaggactcagtaactcactctcaaccagaatattctgtgcaggctctccaggctctgggcgtccagggtgcaaggggcagcttggaactgtacggtccgtcctgcactcacccgatgcagaccttgactttgatgttgaaatgaacacacttgttttacccaagtctggtggaacaaatgcccaatcatgtgaccttaaagtgtactgcaaagctgtagctttaagtaattgctgttctgccactgcttactctgaaatctaccatcaaagaaagatagagaaaaggggctgagccttggaatatatggttataagcagatctttctttggtcagagaccagggtttgagccaaggctgtaaatgtgaacaatagctgtgcaaagccttttaacctgacttcttcattttgtaaattattatgcattaagtagcagcccaataatctgatttctagttttattttcaaagtaagtagcttcttttgggaaaaacctaagttaaactagtagttttaccataataactgatgatttatgtatttgctaaaggtacttttgtatcccctgtgtattataacaataaaattaaaaaattgttagaa

SEQ ID NO: 365330 - DNA, 544 bp, Homo Sapiens
cctcagcttatcagctatcgttattgtattttatgtggggcccaagacaatttatcttcttccaatgtggctcagggaagccaaaacattggacacccctggtttagatacacaagcacttaatactgtgttacaactgcctacggtactcagtaaagtaacatgctatatgagtttgtagcctaagaacaataggctatcccacataacctaggtgtgtagtagactataccatctaggcttgtgtaaatacactctctgatgttcccacaagcatgaaatcgcctaacaatgcatttctcagaacatatccccgtcattaagcaacacatgactgtattgtgtagggttctgatttttattaactattcttttacacatttttagtcaccttcccttctcatacacctcagtagacattcccaacttctgtttagacttcctgtataaaagctaccactcctatcacttacccgcagcaaatgaactcacctcctaattcatgacaatcattcttacaaacttacctatattaacgacttgt

SEQ ID NO: 365331 - DNA, 558 bp, Homo Sapiens
gcaaccatcggtctcacccctcagtttctgccagagaaaaaggaaaagtcaccgagaggcctgaccctgacgggtgggggagatgcgcgtgcggagtagcgggaagcgactgaggagcggggaatgggcagcatttgaatggatgcgggtgccgctggcacccgggaagacgctgggggccggcgctgtagagccgggcatgggctgggatgtgtttggattccaatccgggcctgacaccagttcagtgacctcgggaagttccccaaccctgcgggcctgtttcctccctctgaagtggcgacagtaatagaaccgacctcgtaggctcatcgggaggtcctgatgggagaacccatgcaacttgccaccacagagccaggcccgcggcgactggctcctggtgggtattaaagacgagtcgggaaagaagagcaggctcaatcaaaccttcaatggccccgaaagacatcttgattgaaacctcatgagagactctgagccagaaaacccagcaacttagaacccagagacctgaccatgagccgacttcaccag

SEQ ID NO: 365332 - DNA, 585 bp, Homo Sapiens
agctcggtacccgccgttgtcagtgggaccctggaggacgagtggcaggccatctcggagattgcctctacttgcaaacaccattctggagtcgctgtcccgagacggacagccatatcccagagagtggagaccctaagggaactccaaaatctgatgctgagccagagcctgggaacctctcagagaaggtctctcacttggagtccatgctcaggaagctgcaggaggacctgcagaaggagaaggcggacagggcggccctggaggaggaggtgcggagcctgagacacaacaaccggcggctgcaggcggagtctgagagtgcagccacacgcctcctcctggcctccaagcagctgggctcacccaccgccgacctggcctgagccgtctggaaccacctgggcccctgagggcactgtggtcacactgggccctcctcaggaactctccctgcgcagaggcgtgtcttagcactgcccccctccctagccccttatttggtggcggaagtggcctccaccccttccctgtttgtaaatattctgtggagaaaagaggacttcagggagtaaaaaagcc

SEQ ID NO: 365333 - DNA, 869 bp, Homo Sapiens
  misc_feature (71)..(121): n is a, c, g, or t
gcccctccggccgcgagtcccacgcgccacccccgggcgccctcgacggtggatctagcggcggcgaggannnnnnnnnnnnnnnnnnnnnnnnnnnnnnnnnnnnnnnnnnnnnnnnnnnagcttcggcatggatgtgaggttctaccccgcggcggccggggaccctgccagcctggacttcgcgcagtgcctggggtactacggctacagcaaggtttggaaataataataactatatgaatatggctgaggcgaacaatgcgttcttcgctgccagtgagcagacattccacacaccaagccttggggacgaggaattcgaaattccaccaatcacgcctcctccagagtcagaccctgccctaggcatgccggatgtactgctaccctttcaagccctcagcgatccattgccttcccagggaagtgaattcacaccccagtttccccctcaaagcctggacctcccttccattacaatctcaagaaatctcgtggaacaagatggcgtgcttcatagcagtgggttgcatatggatcagagccacacacaagtgtcccagtaccggcaggatccctccctgatcatgcggtccatcgtccacatgaccgatgctgcgcgttctggggtcatgcctcctgcccagctcaccaccatcaaccagtctcagctcagcgcccagttggggttgaatttgggaggtgccagtatgcctcacacatctccttcacctccagcaagcaaatcagccactccctccccttccagctccatcaatgaagaggatgctgatgaagccaacagagccattggagagaaaagagctgctccagactctggcaagaagcccaagactccaaaaaaa

SEQ ID NO: 365334 - DNA, 494 bp, Homo Sapiens
  misc_feature (419)..(427): n is a, c, g, or t
cagcaaaaatctggcatcttcactacattttaagattttaggtagaactaagagggatcagatatagaggaataaggaatgtgagaaggaaaaagatatagtagtttagctaaatttttcttagagtttcttggtggggctggccatgaagtaactagtctgactcatttcttctgggaaggctaaaagagacacagatagcttctcttttaccttggctttaaggaaaagccatttttattaacaaaagtattagacacgactgcataagaaatttgctgtgtgagaataaagaacaagggagtaggagggtgggacagagaagggtgagaagttggcttcgtgagggccacctgtcagttgtctttgtgccttgtgacatcaaaactgaaatgtttgtattactgttgtccatgacnnnnnnnnnctgtgtcagacatacaaattgaatttggttgtaatgttttaaacgtaataaaaaattcttacctaca

SEQ ID NO: 365335 - DNA, 894 bp, Homo Sapiens
tatgactggccccggtaatgtcatccattagggcaggtcgctcttcttccagacttaggagataacgtctttcatagtcctccacatcaaggagtaagctgtaggttttctcaattataacaagggtttttctcctcttgtctcgaacttgtttttcttttgtctcatcatcctcactccgagatgtcacaacagcatcaatcatttttcggggattattcacactagaaacggtaagctttcccaaagagccctcaaattgcactggcttataggcgtgctccagtttggccacctgaggggtgataagcttggtgcgctccttcttagggccatcaccttgtatttcttcagcagctgacagtttctccagtttttcaaagtaattctggtaataaaaatcatccaggtagggatcagtgctttgcagttgcatcatctggattttagagacccaatccttttcccgctgcaacatgagattggcatatggatcctttcggagatgatcttgatgactgctccggtgacttcctctatctcccgcaccattgagattccgatgctgacttctattctgttgctgtctctgatgcaagagtcgacggtgctgtggatggaggtgagttgtgtccggtctaaacattggggcctgagatcttaggttttgcaggtggggtcctgggccaggagggtgctgctgtggaggtggtgtagcggagggtggagcactaaagaaggcacggaagcctggtgctgggggaagcatctgcccaactcgcccttgtagcaacttgggattcatggcagcaagtggactaccaacaaatccagggacccgtgcaaactggctgggagacatccgtccaggctgtagctgtgctcctccaagaa

SEQ ID NO: 365336 - DNA, 899 bp, Homo Sapiens
  misc_feature (16)..(16): n is a, c, g, or t
  misc_feature (91)..(91): n is a, c, g, or t
  misc_feature (108)..(108): n is a, c, g, or t
  misc_feature (116)..(116): n is a, c, g, or t
tagttaaactgtcttncgcatagtgcaagtttttgaacaactggaaatattttggcttacgcaaggttaatagcaggtcattttgtggaangcgtgggacaatcctanccctttgncttttttttattaggttgctgaggcctattgtaagacgtggtcctaccgagaggatgcactgcttgccttgtctaagaagttaatggaaatgcctgttggaaccccaaaagaagatttaaagaacacactgagagcatccgtctttctcgttagaagagccataaaggacattgtgacctccgtttttcaggcttctttgaaattgttgaaaatgatcattacacaatatattcctaaacataaactgagtaaacttgaaacagctcactgtgtggagaggaccattcccgttttgctcaccagaactggagattcttctgcccgcctccgcgtcacagctgcaaattttattcaggaaatggccttgtttaaagaagttaagtctctccaaattattccatcctacctggtgcagccattgaaagcaaactcttcagttcacctggcaatgagtcagatgggcctcctggcccggctgctgaaagacctgggcactggcagctcgggcttcaccattggcaaccgtgatgaagttttcagtgagtgccctggagcatagagtgtatgaggtccgcgagacggcggttcgaattattttggacatgtacagacagcaccaggcttccatcctggagtaccttcctccagacgacagcaacacacgcaggaacattctctacaaaacaatttttgagggatttgctaaaatagatggcagagctacagatgctgagatgagggcacggagaaaagcggctacagaagaagcagaaaaacaaaaa

SEQ ID NO: 365337 - DNA, 1177 bp, Homo Sapiens
  misc_feature (912)..(912): n is a, c, g, or t
aaagatggcggcgcgagggtctccgccctctgctccgggctgaagcgctctgagagaggcggcagcggcaactcgagccccaacagtaatttagtgttggtagttttggcagcagctgccgaggccggagcaatggcggaactggagcacctaggagggaagcgggcagagtcggcgcgaatgcggcgggcagagcagcttcggcgctggcggggctcgctgacagagcaggagcctgcggagcgacgaggcgcggggcggcagccgctgaccaggcgcgggagccccaggtccgcttcgaggacggtgctgtctttctggccgcctgctctagcggggacaccgacgaggtgagaaagcttctggcaagaggtgctgatatcaacacggtcaacgtggacggcttgacagccctgcaccaggcatgtattgatgaacaatttggacatggtgaagtttctggtggagaacagagccaatgtaaaccagcaagacaacgagggctggacaccccttcatgcagcagcttcctgtggctatctcaacatagcagagtatttcattaatcacggagccagtgtaggtattgtcaatagtgaaggtgaagttccctctgaccttgcagaagagccagccatgaaggatcttcttctggagcaagtaaagaagcaaggagttgatctagagcagtcaagaaaagaagaagagcagcagatgttgcaggatgcccgccagtggctcaccagtgggaaaatagaggatgtgaggcagggctcgctcaggggctacagccttccatgtggctgctgcccaaggctaactctaaagttcctcagacttttaatcagggctggctatgaactcaatgttcaggattatgatggctggactcccctccatgttgctgcacantgggaagtgaaggaggcttgctccatcctggcagaagcactttgtgacatggatattagaaataaactgggccagacaccatttgatgtggctgatgagggtctcgtggagcatttggagttgctccagaagaagcagaatgtgcttcgaagtgaaaaggagacacggaataaactcattgagtcagatctgaacagcaagattcagagtgggttctttaagaacaaagagaagatgctctatgaggaggagacacctaagtccc

SEQ ID NO: 365338 - DNA, 554 bp, Homo Sapiens
  misc_feature (20)..(20): n is a, c, g, or t
agtgcttaataagattactntgaggattaaatgaggtgatacacattaagtgattaacacagtctaaactggagcaaactctcactaaatgctagccattagtattcatccacttcatcttagtagaactctttaaagctagcctggggatattttgatttcacagcatttgtgaaagtgttgcttttttaaaaacgcctgaactttttctgtcttccctgaaacatacaaatcaatgatcaaggggcttttgaaccgagatagaagctggaatgaagctaaataaaaatatagactattaagattcctggaattgcgagtaagagaagtgttggagagagagctcctctgtcttaggagaaagggaatagggccactgcacagaccctgtttgtgaaaggcatagagggcacgagaatcttagtctcaagtggccccagatgagcaaacaaggacataccccttaaagagacctagctatctttatgtagagttatggacttgagagagaagaaatatatatatatcatttagagaatgggaacatcatgttt

SEQ ID NO: 365339 - DNA, 1504 bp, Homo Sapiens
  misc_feature (177)..(217): n is a, c, g, or t
cgctgccgcagctccgccgctccagccccggctcggcagcgcgtccctccccgcctcgccgctccgctcgcgggctcgcgggctccctcgctctctcccttcccccgccgctgccggcgccgcgccgagcggagcccggccggccacgggctgcctctcccgaggtccctttcccgnnnnnnnnnnnnnnnnnnnnnnnnnnnnnnnnnnnnnnnnnaggagaggagagtccgggggaggcggcaaggctgcgccctcggctcccctccgatccccgcgggcccagcggccccaggccgggccggagagcgccgagccgccaggcagtggaggaagagaggaggaggacccggagtctcgccgcgggagggtgcccagggcgagggcgtgcgagggggagtgactccgcgcgcgaagggcagcagcacctgcttgagaccaagcccggcgacctggcaaggtggggccccctaccgcgcaatctttgcggctggcccccggctctcagctccgagtgcagaggctgaagaggtacccgggggacacactgcctctaaccccacctatgagccgctctcctctcggaggacgaaggcaccatcagaaggtcgagattcgccctcctctcccgccacgtctacccactacctagaccgggagtctggacttgggagcgtgaactctcacccgagccggtccccttacaacttggagcccgccagccactcagtccctccctgaagcccatgggtccccactgctccgtgcctcgtcgacccaggatggggagtgggaaggtcagcatgtgcccacagggccaggtgtccggcccagattcccaccctcagggcggcggcgcgcaaagggcgcagtccccgccgctgggcggacccgcggctccggctttcccggtgtctccagcctcggtgcccggaatcctggatctcggcctggcgctccggaagcgaggcagctccgtgccccagcagggacggggaacgcttggcttgagagatcacatttctgggtgtggagagaatgtcaatcacatatccagaatatcacctccttgggcacagccagggcatggtccattgaaaatgttcctgattgctggaagctgacggctcaccataaaagccaaaatggggacctgtcaaaaatgttttagccaaactatggcttggctcaggaagatgccaagaccaaaggctgctgaactttaagtataaacttgcatgaaaagcacattgcaggtctgagacagtggaggcttagtggtgagaacatgagctctggatagacctggcttcaagtcttggctctgtcattcaccagctgtgtgaatttgggcaaaccacttttcttctctgatgctcagttccctcacctagcaaagtgggttataatgatggcatcaactcataaggttcatgaggactgagctagataatgcaaacaacatgtttcatatacaataataaataaaaatgttggctgttaa

SEQ ID NO: 365340 - DNA, 712 bp, Homo Sapiens
  misc_feature (547)..(547): n is a, c, g, or t
ggggcagcaacttccttgatccctgccacgcacgactgaacacagacagcagccgcctcgccatgaagctgctgatggtcctcatgctggcggccctcctcctgcactgctatgcagattctggctgcaaactcctggaggacatggttgaaaagaccatcaattccgacatatctatacctgaatacaaagagcttcttcaagagttcatagacagtgatgccgctgcagaggctatggggaaattcaagcagtgtttcctcaaccagtcacatagaactctgaaaaactttggactgatgatgcatacagtgtacgacagcatttggtgtaatatgaagagtaattaactttacccaaggcgtttggctcagagggctacagactatggccagaactcatctgttgattgctagaaaccacttttctttcttgtgttgtctttttatgtggaaactgctagacaactgttgaaacctcaaattcatttccatttcaataaactaactgcaaatcactgaaaacaccccttctggccagaaattancccttgtcgggccgcctcgggcccctcgaaaaactttcctaaaccattcccttttggccccccggggcccccgtagggtaaagtggaaacatggggccaatagcctgtttcccctaaggaaaattccgggtccatggaccaaggggcctgggaaattcccctccc

SEQ ID NO: 365341 - DNA, 485 bp, Homo Sapiens
tcccgcagtaagctttcccgccagagcgccacagagatcccgctgcccatgctgcctctggcggacaccgagaagctgatccgcgagaaagacgaagagctgcgccgcatgcaagagatgctggagaagatgcaggcccaaatgcagcagagccaggcccagggcgagcagtcagacgccctctgaggccacgccccgcccggccttacctcggctccgccttcagtcggcctcttgtccaatccccgcgccccacactgcccagcgccccccgggacctccgcgggtgccgccctcgcgcgggctagggggaggttctcccagcctgagtccgtagccccgccccggcgctggtcccgcccacccagacaccgcccacttcccggcccggggcctgcacaatctccgaccgcatcactgtcttccggagtcccccattcttctcccagactctgtcttcaataaaaactgagcttcccgcggcc

SEQ ID NO: 365342 - DNA, 355 bp, Homo Sapiens
  misc_feature (345)..(345): n is a, c, g, or t
cactttcctttttttctttctcagaagtacttctggggctttgattgcattatttctcttttaatgtatcatttcagtgttggaaagaaaaatctggatctttatgtggggacctattttacatgtagatagttattcagtagatagtaaattatttctcttaagagatatttccttttatttctgtacaataatatgtatgaactcagttactaggggactgtattgtgacattatcaacctttattgctatttaaaaatgatagtttgtagaactgaagatttccattgatgtgaagcacaatttaatgaataagttaaaatattaaactgttgtgatgtcanagaaaaaaaa

SEQ ID NO: 365343 - DNA, 516 bp, Homo Sapiens
gagaagccaagcaaagagcctggcttccacccgaggtcaagtgctgtcttcggatggcgtccactcacacgcctgcccccttaggagcccactggggagagacgtgaacagatcactgcttccaaaaatagagaagcagagtcccttacaccctttgcactgcagagaagcagagtccgttactccctttgcagtgcagctttgaatagcgcccctcctgggcctcagcaaactgcagagaaatcttccattcccaaggtaggaactgcctctcccgttctcacaggaccttgatgacagggttatcacaagtctccaaagaagctaccaacctggagtgaagcgcttcccaaaactaacctcagcaggcaaagcaatcatctcgccaaagaagcccaggcaccccccaggggacagtcccaccccaggtttcacggaggggaaggtgcgcctcgaaggcccagctgctgcccctagccctgtgtcagctgccttcacagccagggaggaagtcac

SEQ ID NO: 365344 - DNA, 1121 bp, Homo Sapiens
ccgacctcacccggcttggggccctcaaacgacagaacctttcagagatcgtggccctgcagacgcgccttaagcacctgcaggctgtgaaggaggggcgctacgtgttcctgttccgctccaagcagtccctagtgctggagcgccagcgcctggacaagcgactggctctcatcgccaccatcctggaccgcgtgcgggacgagtacccccagttccaggaggccctgcacaaggtcagccagatgatcgccaacaagctcgagtcaccggggccctcctagggagcagcctggaccccgccttgcaaggcctccaggaagagagccggaattgtgtttgtcatgagggacttggaatcttttgtgttcctaaaaaccacatgtaccctcagaagggcatcgtttaagagaaataagccagccccacccacaggaatctttttagccactcagcaatttaataaaccagggtaaaatcctagcggtttcccatggcatcccatcgcaaagacagagcctgtgactgcagacccacacacccacactcccacactgggcttactcgtccaggtaacactttggtttgcagcactcccaaatctgcacgtgcctctcacaacacaacgctgccacaggtccacaagctggtgggctgagcagaggtgggaaagttaaggcagctccagccagcctggcccgggaggctggtccccccagcacttccctctactaggtgcatctgaaaacccacaaaacaacttctttaccagttttcccatccccaccccttagaactctcaggtcccttttcctgcccccatgtccccatttgagttaaattcagatccacagcttgcaggagaaagtcagtggccccagacacacgtaacagggtgagcactgaaataagagcacgctgggggcgtccacaccaagggactacgccccagtctgcccacctatcttttctccatcattaacccagcgctctttctccctggacttccaaggaccaatgaccttggggctcctttgcagtttaaagggaaaatgctctacaaaataatttcactttcaaaccatttcagcagaagaatacccatcttttgctgaatatct

SEQ ID NO: 365345 - DNA, 1997 bp, Homo Sapiens
  misc_feature (1602)..(1610): n is a, c, g, or t
ctgtggctgcagagcagctcctcaggagaaactaagcgtcgagtcagacggcaccataatcgcctttaaaagtgcctccgccctgccggccgcgtatcccccggctacctgggccgccccgcggcggtgcgcgcgtgagagggagcgcgcgggcagccgagcgccggtgtgagccagcgctgctgccagtgtgagcggcggtgtgagcgcggtgggtgcggaggggcgtgtgtgccggcgcgcgcgccgtgaggtgcaaaccccgagcgtctacgctgccatgaggggcgcgaacgcctgggcgccactctgcctgctgctggctgccgccacccagctctcgcggcagcagtccccagagagacctgttttcacatgtggtggcattcttactggagagtctggatttattggcagtgaaggttttcctggagtgtaccctccaaatagcaaatgtacttggaaaatcacagttcccgaaggaaaagtagtcgttctcaatttccgattcatagacctcgagagtgacaacctgtgccgctatgactttgtggatgtgtacaatggccatgccaatggccagcgcattggccgcttctgtggcactttccggcctggagcccttgtgtccagtggcaacaagatgatggtgcagatgatttctgatgccaacacagctggcaatggcttcatggccatgttctccgctgctgaaccaaacgaaagaggggatcagtattgtggaggactccttgacagaccttccggctcttttaaaacccccaactggccagaccgggattaccctgcaggagtcacttgtgtgtggcacattgtagccccaaagaatcagcttatagaattaaagtttgagaagtttgatgtggagcgagataactactgccgatatgattatgtggctgtgtttaatggcggggaagtcaacgatgctagaagaattggaaagtattgtggtgatagtccacctgcgccaattgtgtctgagagaaatgaacttcttattcagtttttatcagacttaagtttaactgcagatgggtttattggtcactacatattcaggccaaaaaaactgcctacaactacagaacagcctgtcaccaccacatttcctgtaaccacgggttttaaaacccaccgtggccttgtgtcacactaaaagtgttagacggacggggactctggaggtgcaattatttgttcaagtgactttgtattagccggcactgttatcacaaccatcactcgcgatgggagtttgcacgccacagtctcgatcatcaacatctacaaagagggaaatttggcgattcagcaggcgggcaagaacatgagtgccaggctgactgtcgtctgcaagcagtgccctctcctcagaagaggtctaaattacattattatgggccaagtaggtgaagatgggcgaggcaaaatcatgccaaacagctttatcatgatgttcaagaccaagaatcagaagctcctggatgccttaaaaaataagcaatgttaacagtgaactgtgtccatttaagctgtattctgccattgcctttgaaagatctatgttctctcagtagnnnnnnnnntacttataaaattacatattctgaaagagcattccgaaagatgggactggttgactcttcacatgatggaggtatgaggcctccgagatagctgagggaagttctttgcctgctgtcagaggagcagctatctgattggaaacctgccgacttagtgcggtgataggaagctaaaagtgtcaagcgttgacagcttggaagcgtttatttatacatctctgtaaaaggatattttagaattgagttgtgtgaagatgtcaaaaaaagattttagaagtgcaatatttatagtgttatttgtttcaccttcaagcctttgccctgaggtgttacaatcttgtcttgcgttttctaaatcaatgcttaataaaatatttttaaaggaaa

SEQ ID NO: 365346 - DNA, 451 bp, Homo Sapiens
cctctgatttgcctaggttgtcaggcacagaaagtgagggtggtggggagtgaaagttacaggagatataaagctggcttgccctgcgctgtttgcaatcacccactcctggtggctgcaggtgctggggagagagctaggggaggtttccttgggctatgggagaatgaggtttgtctctctcaatcatgcccccacccccacacacttagattggccctcaggagatcctccgggaaggggcctcaaccggctgccagagctcagggtttctaggaggaagagcaggagctctcccaggcatgggatctgaaggaggcttggcggtggttgggctggtggctgagcctgactgcctcatcttctccgccagaaggctctcacctgtggctgcatcctccaggcctcagcagggccatttccacagctcctctgtaaaaatgccttcttc

SEQ ID NO: 365347 - DNA, 559 bp, Homo Sapiens
atttgatatagggttatctccctccaaaaattagtcatcttcatgtccaaagttcaatgttaatttacccatagtcatgagggcagggatcagcagcatcacggtctgatgaacattttcagcactgtacccagtgctccatggatctcaggttatcttttattattaaacccatttaataagagagatggcagttgaaaaattgaaggatttagagctagaaggcatcactggagcagaaagaaacagcatagccttcaggtcaacttgatactcttcccccatctcattccttctcactagaatagccacattcataattggaagcctagccagctcaggccaaagttatcattagtccaaggaaaaatgaccaaaaaggacagcatagtgagttttgtataaaagctcatttaaagatcgtcttatttggagatggtgtgccctcattttagtgttacaatgtatttgagagctgatgctgataataaatggctattttattaaatgctctagtttggcaaaattaaaagttgacagttttgttgttcttcacaag

SEQ ID NO: 365348 - DNA, 856 bp, Homo Sapiens
ggctgggccatcttctcctggacacctgctgtgtaccaggaacttcgtcacctccttgaatgctggcggttcatttcatgatcagtgttaagcattttcctccatgggaaggaagcatgggatatagaaaagcgaagggctgtcctttacaaattctggttctgcaacttcctagcgtgactttgggcttgggcaagtttcttagccgttctgagccttcatttcctcatctgtacaatgagattaatagtacctatcatctaccttcaggattgctgacagacagaatttgaaataaaatatgcaagttagctaatacaaaaagtagatgatccaaaaatggtagccactcacccttcacaaactgaagtccatggaccacggaagtcgagaattaatgtacacctgtatcatgtgtaggaaaccagaaatgtgttccttatttcttgttcccaaacaggattaactgtgaagactaatttataaatgtgaacctaagaaaactccacctctgaaggaaatcatttgaattttgtttttgtacgtaaagttaaccttccaattgtctgagctgtcgtcactgacttcatgacagtctggccctccagacaagagcagcgctggcatcgggcaggtgattcctgacacctgcctgcctgcaggcattcactgaccaggcctttcctggaggaaacacccagggccgggcggctgctgtttccacacgtggactcggatctgctgtgacaccgtcagcccgacagtctctccatatgcagcctttcctctgtacttttctccatggttgaaataaaacagggtgactgggagttacttagaattcatgaagatttta

SEQ ID NO: 365349 - DNA, 1010 bp, Homo Sapiens
  misc_feature (767)..(778): n is a, c, g, or t
tttgagacagagtctcactctgtcaccaaggctggagtgggggactccatcttggcagggggcgggggatgtggaccttcaagtctcagaaatatgtgtttgtcttttggatctgctgatttggtgtaaacgtgattggcctcattcattcccagtgtacgtacttgctgtaaatttatatacagaattaaaatagcccatttattaatttataaaccataataaaaccagacagtcattccccgtcaccagcagatcttgcattggaaaaggaaaataatatacaaatttcagcaacttcagagatttcaggaagcctgaatggaggtcgaattcattttggagttcaataatatgttcaaagaatcaggtactatatataatcatatagacaactcccgtaatatctccgcagtgcaaaattatccctgtttcttgtcattcaccagtgagaaaaatccaactgcagacttgactgccttcggtgaaggcacacggcaaattcttctgaaaaataacacccttcaagattgactcttcacgttttacacagccaattgtctcagcttgggaccaaagtatttacaaagcaagccaacaacagacgaagcgaacagggacacttctgaagccggtgatgcagaaacccaccgccaaacagggtggggggccagtcacctctccaggaatgtcccatatgtaagctgacacaacttaacattttaaatacagagattcccatccaaaggaaagccaaccaaagaccnnnnnnnnnnnncagcagtcaagcataagcagtgttacttcctctctgaacagggaagcatcttgctcactgggagataaagggtgaacctcttatctgctgctgtctcctcgcaaatgccagcaagaagctgggtgtggtgatgaagaaagatggcagtcatcaccaagaccccacaagccaagccatggtcccctcctgagggcacagtcctttcatgaagccataaaagactgagaccgct

SEQ ID NO: 365350 - DNA, 502 bp, Homo Sapiens
  misc_feature (395)..(395): n is a, c, g, or t
  misc_feature (407)..(407): n is a, c, g, or t
gcggccgcacctgggctcggcgggccacacggtcggcggtgcttggtccatggggctggccgggcttgcatccccaggtgctgtgtgtgctgcgcctgacccagcatttctggtgcaaggtgaaaggactcagccactttagaaatccgaagccgcctctgctccaggggacacctaacccagcagtcccacagcagctgcgtgccctagagtgtcctgggcccggccttaacttacaagggagcctgagtgacaactccggaggccagccattgagagattaccacgcttcctgagaggagggccacgtcgccccaggccgggccacacgggaagcacccaggccggtccggaggcagaaggggctgggaagccctggccagggccttcactgnggcctcccctgngaaggagggggcaggatggcgcaagcagccgcagaggggccggcgccccggcaggcttcgagctgcagcagtgtctcccgctgcctggtgcctgg

SEQ ID NO: 365351 - DNA, 541 bp, Homo Sapiens
agaccatggtgtttctctatgtttctctaagttggggggtgagcgtgtgtgacagtctactggatttctttactactgatcctttcgctgtgttaaaaatcaagtcacagagacctctcttctggatttgtcccatggggaccctgagactactaaagctgctttcttctgaaggtccagttggacagtctgggaatgtccagaaataaccagtgagaggggcagttctctggccacacccacttatgtactttaactactgtgactttgtctgcagaagagctggaaaattctcgaagctgcaccgtgtcctctgtgtgctagaataagggacaaatgggttccctgtgcttctcagctcactgtttttccttgagttctcctacaggaagcagatgagaactgcccagtcttcaggtttaggccattggtctttgatgtcatagattccaggcctgggaggtgttatgtctcttcagctgggaaaactagctcttcagagaagcctcgggtaacactgcccaccaaaacaaagcaaaac

SEQ ID NO: 365352 - DNA, 1084 bp, Homo Sapiens
  misc_feature (24)..(24): n is a, c, g, or t
  misc_feature (42)..(42): n is a, c, g, or t
  misc_feature (54)..(54): n is a, c, g, or t
  misc_feature (70)..(70): n is a, c, g, or t
  misc_feature (412)..(442): n is a, c, g, or t
  misc_feature (1024)..(1034): n is a, c, g, or t
ccacactccattttccctcctctnaagctcccaacaactctnacagggtcaganctctttaaagcatctncaggaggcggttgccacggagactggatattggtcccagggacaggctgtgctacctactgggtggtggggagggaagcttctggccatgcttggacattcagaccaaccatcattaatgttaatagaggaaatgcagcaacgtcaaaagcaaggcaggttggttaattagatctggggcccgatgacctccctttcccactgctacagcccttttgacttcccccagcaggaagcgctgtctgtgcggctgagtctgggccacttgcttaattgcatttctggcagggaaggagaggagggatggagaagctctgctcgctgcttccacctcaccatgtgnnnnnnnnnnnnnnnnnnnnnnnnnnnnnnnacaggcggaattgctttcttctgagccgggtgggctctcctgcagggagaatgcaggggtctgtgcttggctcttagcaaagcaggtggcccacagtgacctccaggaggtggctgattttcctttgtgccttcttatttctcagtaggaacttggaagggaagagctctgaaggagccagaggggcagtcaccttacatgagggtgaggaaggagaagcccagccagcctctacccatccctccctcccaattaggctgcactggggccgaacgcttccctgggctcccactgccttctaaggagccaaggagaattccctgcccactttctgttcctccatgcccaaactggcagatgcttctctgggagcaaggccacatgggctgatgcagctttgagtgctcaggttctgttttctggaagttgctggagaagggctgtcagggtgcttctatgaatatgggcttcagctgtagcacttggcagaaacgtgatgtgtcccacaaactgctggtggaggaagaagatgttcgtcagccaattcaacctccagccagcttcttgagcctatttggtttnnnnnnnnnnngtcttctaatcagaagccactgattttataataaataacacttgttttga

SEQ ID NO: 365353 - DNA, 840 bp, Homo Sapiens
  misc_feature (27)..(27): n is a, c, g, or t
  misc_feature (90)..(90): n is a, c, g, or t
  misc_feature (624)..(624): n is a, c, g, or t
ccccacccaaatttaaaagacctgaantttaatttaaaccctggaaaatgaccttgcccctaacctttggtataaagaccagcctagagncccatggagccccggccccgggttggccgtgagtgggtcagagttactcagttactgcgtggatctcctgtcgctagttttactgagtaggcatactgtagtacaagagctagtagtagtttttgtaatataccttaaagatcttcaacagttgatcttttttcagaatgttggaaaatcctgtaaatgcaaatagtcaatactgtattaaatacgtgcacttggagtgtcttcgcttgtacagttgtaaataatcagaacatatgaaaaaggtaccctacagagaaaattctgatacagattattgatatattataaatgttgctgttgagcgggatgtagataaactaaatgttgtggtttgaatattattttgatttgttgagattttcttttttctcttacatcggtgtgttgaactgattctgcctctttgctgcaaaagggaattggaaagtcttattaaaagcctccagatgttttcatactcttttaaaatgtatgtaaatgcatactaatcatatctaatgtganagagttttaaagtatatagagagcaaaaactggcaggatcgtaagtgaaggtgactagtaatctaatttaaatcacctgcagctaagcatgattgaccctgccagaggaaaacatgcctatttgaccatttcctttaaagcagttgccattattcaaatacagagaaatagccacagggctagtgtttttcaaatgcattttaaagaacatgggga

SEQ ID NO: 365354 - DNA, 891 bp, Homo Sapiens
gatgtccctgcccctccgttccctccagagtctcagctctgaacatcttcccgcacctctgaggagccaggcctggaaaccctctaaaatagatttttctgcctcaagacagaagatgggcgttccaggcagagaagagctgcccagtcacgtgctctgctccacctggtcagagacccttgacctttagaagactggacctgagggcgtggctggtggacctgagggcgtggatggtggacctggccacccagctgtagctttttgggttcctgtggtcccatttcttgggtcaatctcacacctggcagctcccaggaagacacccccaggcccctcacactcctgggggcagctggaattggcttcagtggcgggaccaggggccccatgggtgtttggaatccctgatctgggtcaggcactggcagcaggattccagcctggcctggactctggtgtgtcccgtttgaagaaaccccgccctgtgaaagttcaagtttagcatccaatgacccatttaagaggtttgctgagccacgtcacaggagggtctgggtgcaaacggaggtggcaacacacagagcgagccttgagcacccaggttacccccaggacctccagtctggctggggggctcctgctgtcctgtggagcagccccctgggatcagggacggggctgagctggagagtgtgcaggattgattaatgatgtctgccacggtcaggccaactgctgctgtaactggggcccactaagctaaaaatggttggaaaaaaatcaaaacattaatatacgtgacatatgagaatgctatgaaaagtcaactttgctatccattaactaagtttaattgacgctagccatggcttcactcttaaacaaaaa

SEQ ID NO: 365355 - DNA, 491 bp, Homo Sapiens
cctcacctcctgtattcccagaaagcctcgcgttgaggtgtgttggccagctccctagtttgtgcttactatacctggccacgcctccctacctaaggccgctggcttaaccctaggggcaggcagtgttagatcagacccagaccttctcatcccaccctcatcacatcggggagaggggactccaggggcgggaaggcaggcgtccctccatttggccagggtgggcggcgagagagggggtcactctgcaggaacactgagctctgaacacctctcgcctgctgcctgcctcacaccctctgcattcgctgtttcctctgttgggggagggggtttgtgaagggaaaattaaattacaccttgtcatttggaaagccccgtgtctccggcggccacaaccaggttgggggggtggtgaaggaagtccatggattggccaaaactgggggaaaaacaaaaagaaatgagagaaagagagagcgggtacc

SEQ ID NO: 365356 - DNA, 528 bp, Homo Sapiens
  misc_feature (114)..(114): n is a, c, g, or t
gaggcatcaggaagtcaggagtgctggggaggggctggtaacagtcatggtattaaagaggagggcaggcaggccttactgtgaaggtggtatttgagatgaagtagttggtcnagagtccctgtttgacacatggagaccaccttgacagcaaaggccctaagggggagcggtgcaaagcaaggtgggctggtgagtgagaggagagggatggcatagagctgggtgggggcacaggagcccgtggggaaggtgttcgcctctgaatgaagtggggttgtatcagataccacgggtgaagcatcgggaagaggatcctgcctgtaaaccctgctcaaggactgcaccatcatcatgcccagtgtgtgcgtgtattaggtttgtatgaatataatgttgccaattgtatctgtttttatgaaatgtttgctatgtgccaatgattattcgatccatggggagaccatagaagaatgatccaaggagttgggaggggaatcaaataataaatcagcgattctgcaatat

SEQ ID NO: 365357 - DNA, 1364 bp, Homo Sapiens
ttagaggatgtagggccctacgtattagggcttcttagttgtagcgaagagcaattggtctggtacgtttagctttttcacatttagttttgaattctgactctagaaatgtacaaccccatcttttgaattacaggttttaagatgttatttgctcttaatacgtcttaaggtaacagccttgatcactgcttttactttcgatgaaataacttaatgagctgtgaagaaaaaattatcagattttaagggagagaattttatgaaaatgtctttgaggttcctgtcacctttatgagaatgtcttcaaagtttccatcaccacctctaccaatttttcttccaccggagccagtggacttaggttccataacaagctcctcttgttcactgaatgagctagacaatatttcccaccttttaaggaaaatatcagctgatatcaatgaaattaaaggaatgaaagcagctattttgacagtggaagcaaatctttttgatctaacatgttagagtgtccaagaatgaagcaaaaatttcatctttggaggttacaaatgaatgaatattcaacaacatatgaatgcaacagacagttttgacagatcaagaagaagatactgaatcacagtcaagaactactgatgtaaaacaataatcggcttccttagaaacgttgagaaagattactatgacatggaatccatggtccatgcagacacaagatcatttattctgaagaagccaaagctgtctgaggaagtagtagtggcaccaaaccaagagtcggggatgaagactgcagattcccttcgggtactttcaggacaccttatgcagacacgagatcttgtacaaccagataaacctgcaagtcccaagtttatagtgacgctggatggtgtccccagccccccaggatacatgtcagatcaagaggaggacatgtgctgtgaaagaatgaaacccgcaaaccaaactgcagcctcaaacaagggactcagaggtctcctccacccacagcagtcgcactggccgagcaggcagcttgaggacccaaatggtagcttttcctaacgctgagatgagtgaactgagcgggggcacagaaacccgaaaaaacttttggagcgcctcaaagtactgggccctgctttgcaaaaaatgggggctaaattggtgccctaccaatccaccccaatccgccacccctggcgaaaggcccgttcccccacaatgtggaagaaattgggcccgaaagaaatgggctgcgggtgtgggtccccacccccaagatggataacaattgctggcgcgcgccgaagggcggtgtcaccctgaaaacccaccacaccttcgaccat

SEQ ID NO: 365358 - DNA, 1924 bp, Homo Sapiens
agaggatgtagggccctacgtattagggcttcttagcttgtagcgatagagcaatcggtctggtacgtgtagcgttatatcacagtttagtttagaagttctgactctagaaatgtacaaccccatcttttgaattacaggtttgaagatgttatttgctcttaatacgtcttaaggtaacacgccttgatcactgcttttagctttcgatgaaataacttaatgagctgtgaagaacaaaattatcagattgtaagggagagaattttatgaaaatgtctttgaggttcctgtcacctttatgagaatgtcttcaaagtttccatcaccacctctaccaatttttcttccaccggagccagtggacttaggttccataacaagctcctcttgttcactgaatgagctagacaatatttcccaccttttaaggaaaatatcagctgatatcaatgaaattaaaggaatgaaagcagctattttgacagtggaagcaaatctttttgatctaaatgttagagtgtccaagaatgaagcaaaaatttcatctttggaggttaaaatgaatgaatattcaacaacatatgacatgcacagacagtttgacgatcaagaagaagatactgaatcacagtcaagaactactgatgtaaacaatcaatcggcttccttagaaacgttggagaaagctgagatgagtgaactgagtgtggcacagaaaccagaaaaacttttggagcgctgcaagtactggcctgcttgtaaaaatggggatgagtgtgcctaccatcaccccatctcaccctgcaaagccttccccaattgtaaatttgctgaaaaatgtttgtttgttcacccaaattgtaaatatgatgcaaagtgtactaaaccagattgtcccttcactcatgtgagtagaagaattccagtactgtctccaaaaccagcagttgcaccaccagcaccaccttccagtagtcagctctgccgttacttccctgcttgtaagaagatggaatgtcccttctatcatccaaaacattgtaggtttaacactcaatgtacaagaccggactgcacattctaccatcccaccattaatgtcccaccacgacatgccttgaaatggattcgacctcaaaccagcgaatagcacccagtcctgcctggcagaagatcatgcagtttggaagttttcatgtactgatgaaagatactctacagaacttgtcaaatctttgaaacttggaatatattgctttcataatatgaagttttattgcctatctatctgaagtgtctaatttttcaagtttgtaagtttattatgtggttttaacattgggtgtttttgttttgtttttactatgaaaagacagcttaaggaagagctaaattctgttaaaatatttggggcatgtttgtgcactgctgttgtgaggatcagcatatgaaattgacatcatggttagtcatggtactgcagcttagggggctacacggttgctgtgtgagtggagagatgcagtgaggcagttgtcattattctaaaaattgtactactttcacttttcccaaagattatataatgttcataatccaccatgaaaacagcattggccaaaggtactgaggctgcttaaaatattcaattctgctttttaatttttaagtgaatttagtttgaaagcatgattatacaggccccctcaggctgaagtgctacttttggtaaaagttccccagttttccctgcccttctgtggacagggatgaattgaaggtggggtattgggacagtggggagagcaaaccgggggaaggggcaaggtgccaaaataaaattgggaaccaggttttctattaaccagggggcccgcctccctttttacctcaattaaacctttaatgggcccctttcctc

SEQ ID NO: 365359 - DNA, 1016 bp, Homo Sapiens
  misc_feature (677)..(677): n is a, c, g, or t
tggaggatgaaaactttcggaagagaaagttgcctgtggtaagttcagttgttaaagtaaagagaattcaatcatgatggagaagaggaggaagaagatgatgattacgggtctcgaacaggaagcatctccagcagtgtgtctgtgcctgcaaagcctgaaaggagaccttctcttccaccttctaaacaagctaacaagaatctgattttgaaggctatatctgaagctcaagaatccgtaacaaaaacaactaactactctacagttccacagaaacagacacttccagttgctcccagaactcgaacttctcaagaagaattgctagcagaagtggtccagggacaaagtaggacccccagaataagtccccccattaaagaagaggaaacaaaaggagattctgtagaaaaaaatcaagctgagatgagtgaactgagtgtggcacagaaaccagaaaaacttttggagcgctgcaagtactggcctgcttgtaaaaatggggatgagtgtgcctaccatcaccccatctcaccctgcaaagccttccccaattgtaaatttgctgaaaaatgtttgtttgttcacccaaattgtaaatatgatgcaaagtgtactaaaccagatgtcccttcactcatgtgagtagaagaattccagtactgtctccaaanacagcagttgcaccaccagcaccaccttccagtagtcagctctgccgttacttccctgctggtaagacgatggatgtcccttctatcatccaaaaacattgtaggtttaaccactccaatgtaccagaacggactggccattctaccatcccaacattattgtcccaccacgacattgccttgaaatgggattccgacctcaaaccagcgaattagacccagtcctgcctggagaagatcctgcagtggaagtttcactgttctggatgaaagatctctaagaattggcaatcttgaaactgggaatatttgctcatatttgaaagaaaagagactcac

SEQ ID NO: 365360 - DNA, 1459 bp, Homo Sapiens
  misc_feature (236)..(250): n is a, c, g, or t
  misc_feature (765)..(790): n is a, c, g, or t
  misc_feature (792)..(792): n is a, c, g, or t
  misc_feature (795)..(796): n is a, c, g, or t
  misc_feature (801)..(801): n is a, c, g, or t
  misc_feature (839)..(852): n is a, c, g, or t
  misc_feature (882)..(883): n is a, c, g, or t
  misc_feature (893)..(912): n is a, c, g, or t
  misc_feature (919)..(940): n is a, c, g, or t
  misc_feature (1036)..(1047): n is a, c, g, or t
  misc_feature (1171)..(1183): n is a, c, g, or t
ggatctatctgaagtgtctaatttttcaagtttgtaagtttattatgtggttttaacattgggtgtttttgttttgtttttactatgaaaagacagcttaaggaagagctaaattctgttaaaatatttggggcatgtttgtgcactgctgttgtgaggatcagcatatgaaattgacatcatggttagtcatggtactgcagcttagggggctacaggaccaaattaaactgctnnnnnnnnnnnnnnngttcattgacttgcttagtcgtatactcaaatgatgataaacctacatgtgcaaaggctcacgtttaagattgtcaagccagcagtctactgttgtgttgccattgcttttccattgggagaagaaagaattaaccagtcattaaaccatttggtaagttgcactttgctgtgctgatcccacaggaaaggcttgaaacacgagaagcagcaaagacagagcacacaagtgcataaggctgttgtcttcggcttgggtgaaatgacagttcctcttcattctaaaggtttactccattgaatttaaggcatttgttcattccagtgttgagatgctttgcatctctgcagaagaaatttattttaaattgtttaaatatctggaaatacttttagctatcatttataaagatagttttgttctcagtttcactataaattatagaacaaatgggaaacaagggtttaatttagttcagccattttacaaggaaataataaaatactaaaatctgnnnnnnnnnnnnnnnnnnnnnnnnnnanccnnccccncacccaccaaccaccaccaccacccaaacccaaacaannnnnnnnnnnnnnacaaacaacccaaccccaaaccacccaaannaaacaatctnnnnnnnnnnnnnnnnnnnnaaaaaannnnnnnnnnnnnnnnnnnnnngggcccccgcccccccaaagttatcgaaaaccttgctttttcctcttctcccaacaaaaaacccgggcaaccaaaaagggtctggttattcccacnnnnnnnnnnnncccccccggttaaaccccggtgcttttccaccaaaattcccaaaacgctctctctcgagggccctcttggggggactcatcaccccagggtcttccgtcccgcccccccaatcaccagcatatnnnnnnnnnnnnngggggcgctaatgcgccacaaaaaaattcggtacaaaactctctcccaccacatttctcccccccaagacacggagacccttctcttcccccaccaacttttgccatatgaacccccccaataatcgtaccagggcgattctattcacacacccacttttcgcccatccctcccatatatacaattatcttcccctatccgaaaaaaacacgcggcacggcgcctaacaaacaagccccttccctcttgctctgccgcgggtactattttttgggg

SEQ ID NO: 365361 - DNA, 513 bp, Homo Sapiens
cgtggcctatggcccaggacagcctggcaggtggcctcgctgcccccagttcccctctctgcccccaaaatcgtcttagttgcttcaaactggtcactggccctgcacactgggctattgctttatccctatcctgagagcagcccctccccaccatccctccacatgctgcaaggacagactgaagggctgtgagcaggtgtaagggctcccaaatccgtgagcctgtgtccgcagctgctgccactctgggctgctccagcctgcaacttagtggaaggaattacttcctcctgaggctacaggcgagaaaggtagggatgggccagcctcccgtctcagctgttgggagacagtaggcaggctgagtggcccagagcactcctggaagtgggactcccctgccttgcaaatgtgcctctccagactgctcctgcacttaccccctccccgcagcaccttctctgcccgttcttgtccacacatctattaaatgcttctgttttcatttgc

SEQ ID NO: 365362 - DNA, 712 bp, Homo Sapiens
gcaccggtcgggtggcagcagagtgtcgctcgacatgggggaggccggggctggcgctggcgcctcgggagggccggaggcaagcccggaggcagaggtggtgaagctgctgcccttcctggcgccgggcgcgcgggcggacctgcaggcggcggcggtgcggcacgtgctggcgctgactggctgcggacccggccgcgcgctgttggcggggcaggcggcgctgctgcaggcgctgatggagctggcgccggcctctgccccggcccgggacgccgcccgcgcgctcgtgaacttggccgccgaccccggcctgcacgagacattgctggcggccgaccccgggctgccagcgcgcctgatgggccgcgcgttggacccgcagtggccctgggccgaggaggcggccgccgcgctagccaacctcagtcgcgagccggcgccgtgtgcagcgctcatggcggcgctggcggccgcggagccggcagactcgggccttggagcggctggtgcgcgcgctgtgcacgcccggctacaacgcccgcgcgcccctggcactacctagcgccgctgctctccaacctcagccaacgctctgcggctgcgggccttcctactggacccgacaggacatcacgagtggttgcttggacctgacggtggacattctcccctttttgctcctgccctttggtgggctgaggatttctcc

SEQ ID NO: 365363 - DNA, 522 bp, Homo Sapiens
cacaaatcataacaagagcctgagtgtagaactaatatctatgaggagagatgggtttccccaaggggaaagagtgaagaacacatgatgaagggaaatgtgggtaaagtccatgacgttgaggagaaaaaatgcagtgttcttttaggacacctccttttcaaagacctaagacttcccactacattaaagttatcatctttatacttcccatgtacatcactgtcctttagaaagactttctgatttaaataactacatgttccctcccaataatctatttatgtgatctttaacagagtggggacacagtagatattcaggggagaagcagtaaatataccacattatgctgcaaggactctggtgtgaacagagcccaaaatggaaatatgatagattgttgaaagtggagaaaagacattaaaatgagtggagaagaaacctgaaagcgccgcagagaataagactaaaatttccaaaggcctctcagggaacagcaggtgacatatatcaagaaag

SEQ ID NO: 365364 - DNA, 141 bp, Homo Sapiens
agctttgaattggccagagtttatcctagattattttattttaaattggtagaattctttgcgaactgtcacagagaaattccttttcatgactttatttctgacctattaaaacatgaacaggccaggcatggtggctca

SEQ ID NO: 365365 - DNA, 1796 bp, Homo Sapiens
ggaacacaggagctttggtggcctgtcatgtgtcagtaatggagtatgtcactgcagttgtctgccttgggtttcctctgcttactgtggatggccccagaggggatgtagatgatcccctcttggatatgaagactccagtcctctttgtcattggtcagaattcccttcaatgtcaccctgaagccatggaggacttccgggagaagattcgagctgagaacagcttggtggtggttgggggagctgatgacaatctcagaataagcaaagcaaagaagaaatcagaagggttgactcagagcatggtggacagatgtattcaggatgagattgtggactttctgactggattgctcactcgtgctgagggtcacatgggctctgaacctcgggatcaggatgctgagaagaagaagaagccccgcgatgtggcccgcagagacttggcctttgaagtccctgagcggggcagtcgacctgcctccccagctgccaagctgcccgcctcaccctcaggctcagaggatctctccagtgtgtccagcagacccacctccagtcccaagaccaaagtgaccacagtgacctctgcccagaagtccagtcagattggaagttctcagctgctgaagagacatgtgcagcggacagaagctgtgctgacccacaaacaagctcaagcacagtttgctgcttttctgaaacaaaatatgctggtgaggaaagctcttcctcctggcacctcctcctgtctctttgttcccatttcatcagaaccaccagaggaaggagagaaagaggatcttagggttcagctgaagcgacaccatccctcgagtccccttcctggcagtaagacctccaaacgaccgaagatcaaggtgtcccttatctcccaaggggacacagctggagggccttgtgctccttcccaaggaagtgctccagaagctgcaggtgggaagcccatcaccatgacactggggcaggcttcagcaggggccaaggagctcacaggacttctcaccacagccaagtccagttcttctgaaggtggagtctcagccagcccagtcccttcagtggtctccagcagcactgcacccagtgccttgcacacactgcagagccgcctggtggccacatctcctggcagctccctcccaggggccacatcagccagcagcctcctccaaggcctcagcttcagcttgcaggatatcagcagcaagacctctggccttccagcaaatccctccccaggagcagccccacaggccaccagtgtgaagttgcccaaccccatgcagagcctgggtgccatcaccacgggcaccagcaccattgtccgtaccattcctgtggccaccactctctcctccttgggtgccactcctggtgggaagcccacagccatccaccagctgctgaccaatgggggcctcgctaagtgtggaaagcagcctccctggcctggctcagatctctaaccaagcatcaggcttgaaggtccccaccaccattactctgacacttcgtggccagccgagcaggatcactaaactgagccctatgggctcaggagcacacccatccgaagagtcctcttcccaagtgctgccctccagctcacaacgcctgcgctccagaaccctgaagatgctgtgtgatatgtcctccttaaccaagtggttgatgcttgctcatggtgggcctggacaggtgttttgtcctgtgaactgtccagtgtggagactggttagaaagcatttggcttcgcaatggttcgagaa

SEQ ID NO: 365366 - DNA, 1431 bp, Homo Sapiens
  misc_feature (114)..(306): n is a, c, g, or t
caacggccaaaaaaaaggaaagtgaacccttccataaaagatgctttcctgtcacccaaagcttttctgtggaagcgccaaatcacgggcaaactgggtttcaagacccctccnnnnnnnnnnnnnnnnnnnnnnnnnnnnnnnnnnnnnnnnnnnnnnnnnnnnnnnnnnnnnnnnnnnnnnnnnnnnnnnnnnnnnnnnnnnnnnnnnnnnnnnnnnnnnnnnnnnnnnnnnnnnnnnnnnnnnnnnnnnnnnnnnnnnnnnnnnnnnnnnnnnnnnnnnnnnnnnnnnnnnnnnnnnnnnnnncacctggggggtgtactcaccttcttcgatgatgcttttcagcatttctgtgtacatgtccttgttgctgggagctgcgctgttcatcttgaagtggggcaaacagtggcactccttgaatctcacaagccacccttgacttgcatgaaacctctccgtttgagaaccttcgccatgttcacgctgtaagtcatcaaactcagccttctcctgaacgatggcggcgctcaaggtcgcatttggctggctctggtcttccagccacaagctcagcagctgctccatgctctccatcactgcacttcgatggcgagtccaaccgagaggctctcagaggagtagctatttgtgaactcgctttgattttttctttactatctcgaatggtcgccactgtagagatagcaagatctaaggcctttgcgatctgactgagcttctcacccgcttcaaatcgtcgtaacacttccaatttgaggtcaagggtaatcgctttccgttcccttttggcactagggatgacagttgcatctgtgggcctttccccaggcatttctgcctccaaaatgtcagaaaatcacagcggtctcaagcgcaagaacgctgtggttcctctacgtccccttgcagaactcggtcaacagaaaacgaggctgcgaagaggctcaggctgatgtcctggagacgtggacgggtccccatgggcaggcccagccccactgcctagcccagctgctgcttcactgtccactccgaggaggccgcgcgggtctcccggtaccgctcgaagtccgcgtgttggggccgtgcggccgcaggcacatacaagcggcctgggtcctggggctccagagaacaaccgaccaagcagacaaacggaactccgtgagggggacactgcggcagaaacgtccaggggcggttttccagtgcagcggagggcggaccgggcgggtgttgtttcgggagctgctttccatggaggaccccagaaataagtgttgatgcagatgcccgatttaagataagtctaaaggcgctggctatccccttagggcccagctgtctgggcagggcgaggctgcgatggcgatcaaaccctccctcgttcggaaacgccaccca

SEQ ID NO: 365367 - DNA, 525 bp, Homo Sapiens
ttattatttcattgaaaagaactgtcaagtgaaatactttttagcacagtaactggctttgtgggctctagagaagagttaatgaggcagtgcatgttcttggcccagagtaagtgcttagtgaatgctttctaactccgaaccccagccacatccagggactgggtgttgagcaaaaggggccttcaagatgttcaaggcacttggattttctcctgtctctcatcggcttttcttaacgggcctcagtgggtgcatgtgattatccacgtttcacctatgaaacatgaacagaggagactgacttatcagtgattcttccgcgggttcggacagggcctcgattctgttttaaactccagtagtccctagaaattgtagctccctctagttgtggcaataggtgtgggtccttgtgcttgcttttggcaagtttctgagctacacagggcctccattaccgtcactggtgaaatgcggctcacctcccagatttgttgtaaagattaaatgaactggtcagca

SEQ ID NO: 365368 - DNA, 523 bp, Homo Sapiens
  misc_feature (373)..(373): n is a, c, g, or t
  misc_feature (513)..(513): n is a, c, g, or t
cttaaaaaataaactcagacaatagtttgggcagcaagcaccgactgccatggtttggaacaagtgtgacctgtgctctgactgctggcactgtcccaaatgactgactcctgtagcttggtgttccccagtggcatcaagtaaccagcattaccacaacccctgcagtgagtgacagtgcttttcccatctgatttccaaggcatctcaaggtcccgggagggaggtaagaaaagatagacaagatagataaaggaaaccagcccagggaaggtaatttgcttcagtcacactggcaacacaacctgtctttctttcctgtccctggctctgagatgcctaaggggctgcactcccaagtcggggttcttcnctgggcccccggccaccgggtttgacaccggtggcttattaaacagctgctcatcatcccctggtcatgaggagggggagtcagtgacttgaggcactcacaacatccagataccttttggcaaacaggaccccaggccnaggagttctg

SEQ ID NO: 365369 - DNA, 357 bp, Homo Sapiens
ggaaatgcccagtcactgggtttctggaactttgtggaataaaacgctaggtatattcactctctacctcttcactaagtggctctttaggttgttggttgacttagtgcctcgtcaggggccagtgaaagggaaggaggtgagggcgccctgacctgggaaggggtaggaccccatgtttagggaagggttctagcagtaactctgccacgggcacttccttttttaggcctcaatcttcccagccctaaaacaggggtctggagagtatcagcacattcccatcacaggcagattccccgggccgggaaagtttctggagaaggcttttgcaataaacctctaaaaagcttttct

SEQ ID NO: 365370 - DNA, 934 bp, Homo Sapiens
  misc_feature (587)..(587): n is a, c, g, or t
  misc_feature (606)..(606): n is a, c, g, or t
gtataaggaagctctatgcagaactgtgccaaggcatcgtggaacatagccatttccagtgtcttcccacccccagatgtggagcaacctcagacccagccagctgccttcatcaagctgtgacagagggcactccctgctgccttggaaaaagcacggggtcctgctccaggaatggtgaaatgactggattgctctttatccagcccacagcaggggaaagaaaggcaactcgcaaagatgagatggaagaaggcacgtgagcagaggaggcagctcccaaagagagggctgctcagtgggggcttcccaggtgtagctctcagcagtgctgttgagacttttgaaaacaactttggtacacaaaggcagctttgtgagcagagctccttcccctctccccgggaacggcagggcactgggacctctggtcggtgcctcccacccactgcagccctagtgccttagctccatgcccggctgcagccccactgctctggactatggattggacgtcaagagcatattggaggttgcctgtgtgttcccccacccatccccttcggtaacacttcctgccacactanagctctgtacaagcatgcnaccaacagttccttagttttgtgctgtgcactggcctctcggcaaaggtggtttccctcatcaccttcctgatggtgtttggtcagtcacctgtcagggtttgtgcgggttgggccccaaaacagcatatgctgctctaagtctgctctctgcatggttttagaaacaaagtggcaagtctgccctgaacctgtaagcatcaaataagcatgagagagaaaaaaacatgatatattgctttacttaataggttgaatatggtaggtctttgaaaatatgatgattcaattttctcaattttctttgctttaaccaaaattctaaatgc

SEQ ID NO: 365371 - DNA, 249 bp, Homo Sapiens
aggctgttgtgaagattatgtgaactaaaatatgtaaggtggttggaatgggctctagcacacaagctgttctgtgtttagctctatgacggtggggcagaaattttggtagttgggcccagcactttaaatacttggagcgttttagacaaggtgggaagggacttggacctgtttcttggactctgtttcttagtggaggaagaaacttgagtcaaaagaaaagggatggctgggtgcggtcgctca

SEQ ID NO: 365372 - DNA, 905 bp, Homo Sapiens
acaggctcctgaggaggattgagggtgaaagtctcccacgagtacactaaacctaggtctggtcaccaataggggtttggagagcaaagggccacaactcatcagctgcctgtctcttagatgcactttctttttccaccagcacatccttcaacacacagaatttcagggaagagttctccccaaaaccctagctctttacccttccattttagccttccacccagcttccacaaaagatttggctctaccttggatctgctagtaaataactaataggcaggcagttatttgggtaaggaaaaaaggggtgggagagacagaaaatttgcccatctgctgctcctcccccttggctctccacctgggatttgctattgaatctctaccctctcccaccacacagtactgattgctcactgaaagactcagcacccccaatggtgcgcggaagccaggcgggcgattacaatccaattacctattgtcgactcagcccacacaagcttttctcctcctcttgcagggcatgggaccaggctccactcccaaatgagactggccccccccatggttcagggtaacagaagggcctgtaggccctggtgaactgaatccagcacaggcctccccctgtaacacaacaggactgaacagaaccaaacaccttcttccaaactgactctgctccctgcccctcacaatctcaaaactcctgattcccattccattcttcgaagggtttcccctcaacttttttggacctggcctcccctaaggaagggcccaaaaaagaatttattcctggggaatgggaaaaactttgggtctaaaggccccccggccttggggaaggggccaaaaagcgggggggcccttttccccttttaacccccccctttggc

SEQ ID NO: 365373 - DNA, 721 bp, Homo Sapiens
  misc_feature (43)..(52): n is a, c, g, or t
  misc_feature (397)..(397): n is a, c, g, or t
ggtttatacccccccggccggcacccttgtccaagggggtgtnnnnnnnnnnacagtaagaggtggaagggttttaataagcgccccccaattctttgacttaagcggtggttctatctttctgcccttgacttggggtgggttctacccgttttacccaacagaggaccttccaaagaatgtctaggatttctgaggctgatcctttcaaggagccagctttccgctggcttgcgggacttcttggcatgggagccctggtggccatagaagaagtatgtctgccacaaagggatggacgcccaagctgcagaggccacaggtagacgctccacgttggtgtccttgtcttcaagtcatccacctccaggccagacacatgaaatgaggcacctcncagatcacttccagcctccagatttcaagtcctcccaggtgaggcccagacactgtggaactgttagaaccttgcagagctgctcaggtctctgggcctcagcagaagggctgggggtcaaggaccatttgcgcctgatcagatgttctcgtccactgaatgggccctgggagttgttgaggggctggattagcacctgctcctgcccaagctgaatgaggccaaccaggccgccggcggcgccgcaggcgctgagcgacacgagggagccggggtggccgagcacacggcccgagtagaagcacagctcggcggggcggccgc

SEQ ID NO: 365374 - DNA, 386 bp, Homo Sapiens
aaaatttcctttgtgtttgttttggtattgaattttacttgtaagtttattgctgctgtgtcgtcttatcctaccttagattataattgtgaaatagaggtgctgtccctaattatgttacaaggcaacattgtatttttgagacctaggaatgaaatcgatagggccactgttctttcagtggcctcagagagtctatggctaggacaacagtcaagattgcaccagggtgcacaaaagaataagtctcctggcttattcaggacactttggtttggaaggtgagagaaaattcttaagtatagcttagctgctgcctcacatctgttgcataatataacatttttaaaaaacatgctatgaataaagggatagagagtataaac

SEQ ID NO: 365375 - DNA, 1003 bp, Homo Sapiens
ccctccaaggcgacagttccgccccccggaccagagcagagggtgttgtgagcataaaacactggaggcggcactgccccggacccggctccgcgcaggcaggggcactgtggagggccatgcagtgcctggggatccggagccggagccgctccagggagctctacctgcaggagcggagccttaaggtggcggcgctcaatggacggaggctgggcctacaggatgatgaggatctacaggcgctgctgaagggcagccagctcctgaaggtgaagtccagctcatggaggagagagcgcttctacaagttgcaggaggactgcaagaccatctggcaggagtcccgcaaggtcatgcggaccccggagtcccagctgttctccatcgaggacattcaggaggtgcgaatggggcaccgcacggagggtctggagaagttcgcccgtgatgtgcccgaggaccgctgcttctccattgtcttcaaggaccagcgcaatacactagacctcatcgccccatcgccagctgatgcccagcactgggtgctggggctgcacaagatcatccaccactcaggctccatggaccagcgtcagaagctacagcactggattcactcctgcttgcgaaaagcttgacaaaaacaaggacaaccaagatgagcttcaaggaggctgcagaacttcctagaaggagctcaacatccaggtggacgacagctatgcccggaagatcttcagggagttgtgaccactcccagacagactccctggaggacgaggacgattgaggccttctacaaagatgctgacccagcggggtggagatcgaccggaccttcgccgaggccgcgggctcaagggagactctgtcggtggatcagttagtgacgttcctgcggcaccagcagcgggaggcggcgggctgggcctgggctggccctttccctctttgggcgctagaagcccgtgggagatgccaacgccagcgggttgccacg

SEQ ID NO: 365376 - DNA, 1131 bp, Homo Sapiens
cgcgtcccagaagggggcggggagagacgagggttggcgggctcaggggctgggggcgcagggcagcgtggggcggggcggtgtcccgggaccacccccgtgcctcctcccaccgcggtccattcaggtccctgcaccgcactccgctcggaccccaggccgccggtgctgtcgctactcaagtgagtcccgcggtgcccctcccgccgcgccgcccgtcgggcatggactcgggccgggacttcctgaccctgcacggcctacaggatgatgaggatctacaggcgctgctgaagggcagccagctcctgaaggtgaagtccagctcatggaggagagagcgcttctacaagttgcaggaggactgcaagaccatctggcaggagtcccgcaaggtcatgcggaccccggagtcccagctgttctccatcgaggacattcaggaggtgcgaatggggcaccgcacggagggtctggagaagttcgcccgtgatgtgcccgaggaccgctgcttctccattgtcttcaaggaccagcgcaatacactagacctcatcgccccatcgccagctgatgcccagcactgggtgctggggctgcacaagatcatccaccactcaggctccatggaccagcgtcagaagctacagcactggattcactcctgcttgcgaaaagctgacaaaaacaaggacaacaagatgagcttcaaggagctgcagaacttcctgaaggagctcaacatccaggtggacgacagctatgcccggaagatcttcagggagtgtgaccactcccagacagactccctggaggacgaggagattgaggccttctacaagatgctgacccagcgggtggagatcgaccgcaccttcgccgaggccgcgggctcaggggagactctgtcggtggatcagttagtgacgttcctgcagcaccagcagcgggaggaggcggcagggcctgcgctggccctctccctcattgagcgctaccagccccagcgagactggccaaggcgcagcggcagatggaccaaaggacgggcttcctcatgaaccttaacttggccggctgacggccaaacgcccttcagccttgggaacaccggcccggggtctaacaagg

SEQ ID NO: 365377 - DNA, 1124 bp, Homo Sapiens
cggtccggaattcttccggataaacactgggaggcggcactgccccggacccggctccgcgcaggcaggggcactgtggagggccatgcagtgcctggggatccggagccggagccgctccagggagctctacctgcaggagcggagccttaaggtggcggcgctcaatggacggaggctgggcctacaggatgatgaggatctacaggcgctgctgaagggcagccagctcctgaaggtgaagtccagctcatggaggagagagcgcttctacaagttgcaggaggactgcaagaccatctggcaggagtcccgcaaggtcatgcggaccccggagtcccagctgttctccatcgaggacattcaggaggtgcgaatggggcaccgcacggagggtctggagaagttcgcccgtgatgtgcccgaggaccgctgcttctccattgtcttcaaggaccagcgcaatacactagacctcatcgccccatcgccagctgatgcccagcactgggtgctggggctgcacaagatcatccaccactcaggctccatggaccagcgtcagaagctacagcactggattcactcctgcttgcgaaaagctgacaaaaacaaggacaacaagatgagcttcaaggagctgcagaacttcctgaaggagctcaacatccaggtggacgacagctatgcccggaagatctttcagggagtgtgaccactcccagacagactccctgggaggacgaggagattgaggccttctacaagatgctgaccccagcgggttggagatcgaccgcaccttcgccgaggccgccgggctcacggggagaccctgtccgggggaatccgttagtgaacgtttctgccacacccaccattcgggaggtaggcgcccaaggtcctggcccttggccctcctcccctcatgtgaccgctacccaatcccagcgaaaactgccccagggcgccacacggcccatttaacccaggccacgcttttcccccccgcccttcaccgctacgcgctgaacccaaaaatgccttcacaacctggctacaatccgcgcgtcgtcaccccgcacttatggcccccagcccaccttctgcgtattccccgtccg

SEQ ID NO: 365378 - DNA, 436 bp, Homo Sapiens
  misc_feature (185)..(185): n is a, c, g, or t
actaacttttgtgctaatgcagctctgggtaggggggaagttttaaaaagtaggtaatgtactgaatcggatttcgtttcacccttagaagttaactctcttggtgctttttgggaaactttacacctaaccttaaaagatgtgagagagggcatgctacctaacaaatcactgctgtgcagtanaggcgaaaaacttcaaagttcgccgaacaaaaggattagctcactcttgcagccgctcttcattgaatgcatgagttttataaggcaaagactgcgagaacactgtaaatgtaaaggaagcagttacttaagacatatttgaatcaagtaacccttaaaagactctattacgtattcgccatgaccttagaaggtagaaaaacagttataaattattgaaaagaaaacgtgccaatcccacttcctgtagc

SEQ ID NO: 365379 - DNA, 1104 bp, Homo Sapiens
ctgcctctagctaggggctttggtgagaaccagatgagttgatgggtctcctctgggccctgcttccctggctgctgaggtgcaggaactgtgaggggagggcagcctgtcacggtgcccaacacagggcagggctggacaggtacaagtggaacaggcggataagctgggaagggcacagagaaaaggagctcctcgtgacagcactttcccacctttgattattcaacacatggaagggggtggagacacaaggatagggcaatggtgagtttcaataaataagagaaacaggatggacaggcagtgggcccatgcctgcacggccccacataaataaccaggttgctgagccagagtggaagtcagggctgggcctggcagccgcctgcactgcccagaagcactggcaccacagggacacagaaaccactgaggcccaaggtgtgctccagccccaccaagtcttctccctaaagctcctgagatcttggggctggctgggcaggctagggctctgtatcacagtcctgccgggatcaagtctattttttcagtttcattaaaaacagctgggggaggggcaggcacatgcattaagccccttccgtaggcagagccatagatggacagccccatgggggccttgaaggcagaggccctggaagcagcaaaaacggggctggataaagctactaatgggagggatggtagagcccagctccccagtcccccacaacccagcccagaacctacaaagagctgaagaggccctgggtactgagacgtctctccttacttcacagtcagaaaaatggacccagcgatggccacagatgtgcccaagattagaacccagggactcactctcctagcccaggactttctgctaccccttccctttatagacctgctggaagaggagggggacgcacatctgctctagggccctgtacagaggcaagggtgtggctaattaccaaggaatggggccaggggtgacgggcacaggcccctcccctctgccaagcccagcctctgatgatacagagaatcccgtgggctcctaggatccagcctcgtgccgaattcgccacccaggcc

SEQ ID NO: 365380 - DNA, 724 bp, Homo Sapiens
cattttccttctgttgctgcagtttggaagtagtttgttatcaggattatcaaagcatcattgctatttatgacaatgactttaagaaatgcaagaatatttggaacactgtagaaaaaatattttagcctggaaggcaaatactaatttcaggaactattgatctgttataaaacaggaccactcagacatttagctctaagactttcacatatccgttgttagaggcgtatagtggggggcatgactcagcttctgcttaagtacaaggtgttgtctgcagcgaaggaagaatttgattgtagtatcaacagaaccagacagaactctttgaatataattatatatcttggaaactgactcatcaaagctattagattacatagcatcatttaagcatcattgggctctgtacttttcattatctgtacttttcattatggagtataataggctttatttggtacagaaattgggtctaagatggaaaccaacttgtgatttttgaataaacttttggggattagttactttgatgttgtcaagatagcagcatagtaagtcctctgcctttccttttgatttatttataatttagaatcagtttatgatttaaaaaatgtgacagacacagtggcatgcaccagtaagtaccagccacatggggaaactgaggcagaggggatcactttgatcccagaaagatagagaccacccctggggc

SEQ ID NO: 365381 - DNA, 1087 bp, Homo Sapiens
ggctgtgaggtggtgactggctcaccgcggggggactcccagtcttcctggaagagtgtcggctcccagtgggcctccccggagaacccctgcctcatcaatgagtgtgtccgagtgaaggaggaggtctttatacaacaaaggaacgtctcctgcccccagctggaggtccctgtctgcccctcgggctttcagctgagctgtaagacctcagcgtgctgcccaagctgtcgctgtgagcgcatggaggcctgcatgctcaatggcactgtcattgggcccgggaagactgtgatgatcgatgtgtgcacgacctgccgctgcatggtgcaggtgggggtcatctctggattcaagctggagtgcaggaagaccacctgcaacccctgccccctgggttacaaggaagaaaataacacaggtgaatgttgtgggagatgtttgcctacggcttgcaccattcagctaagaggaggacagatcatgacactgaagcgtgatgagacgctccaggatggctgtgatactcacttctgcaaggtcaatgagagaggagagtacttctgggagaagagggtcacaggctgcccaccctttgatgaacacaagtgtctggctgagggaggtaaaattatgaaaattccaggcacctgctgtgacacatgtgaggagcctgagtgcaacgacatcactgccaggctgcagtatgtcaaggtgggaagctgtaagtctgaagtagaggtggatatccactactgccagggcaaatgtgccagcaaagccatgtactccattgacatcaacgatgtgcaggaccagtgctcctgctgctctccgacacggacggagcccatgcaggtggccctgcactgcaccaatggctctgttgtgtaccatgaggttctcaatgccatggagtgcaaatgctcccccaggaagtgcagcaagtgaggctgctgcagctgcatgggtgcctgctgctgcctgccttggcctgatggccaggccagagtgctgccagtcctctgcatgttctgctcttgtgcccttctgagcccacaataaaggctgagctcttatcttgcaa

SEQ ID NO: 365382 - DNA, 625 bp, Homo Sapiens
gaggctagagcagcagctgccagcttatagatggggcggatggcaggtgatagactgggaagcactgctgggtggtggaggtgggcagtggcaccatgacgggcccctagccacacagctgtcctcactacggggcagggagcagcctcggcaacaggcaaaggccagagtcagagtggtggggaggacagggggctgctgccccgctcctggaaagccactgcagaggggcagtggctggcagtgccaggcctgggggaagtggaagcgtcctgtctgggggcagattcccaagcaagggtgacccatggttaagggccactggaaagctggagagagcttgggatcccttccacctggggccaatggtgttgattgcagactggaggggtaacctccgctgagggtcattatgtgccaggcatggcattgggtactttctgcattgggaccaggcagccgggcctgccatttgaggcagcgagcctccgtgacctgtcctccctcatttgtaaagtggggtaacagctatgtcactggccagttgtggggattaaagtgctgagcttagtgcccagcccaaaatgctcaataaagctattcagtgatacctgtttcccacatc

SEQ ID NO: 365383 - DNA, 455 bp, Homo Sapiens
agatgtcaggatgatgttgtatcctaatttatactctcaagtataaatcttgtgatttacttaatctctttgattctcagtttcatgtaaaatgataacaagaatttctgctttacctgtttcagagagctatgagtgtcacgagatatatatgattatatgctctggtgtaagttatgtgtaaaatgtacaatagtgtaattgttaagtgctggtattttttatttcatatttatctctcaggcttataatgaatttctccctctttaatgccaagacaccaggggtaacattaactcacattatgcatattcagatataataaatataatatttttgcttgctattggggttttcatcatgcagttgaaattcatattatttttaattgtgaaatttctttgtgagaactgacaataaaaatcaaaataatttccccctcttcccaactgata

SEQ ID NO: 365384 - DNA, 468 bp, Homo Sapiens
  misc_feature (23)..(23): n is a, c, g, or t
agtggcctggccccctccccctntacctcagtagcccccagggcctgagatggctgagaagggaagggtatccttttcccacagttctgggacaaataaaggggcttcctttggtaccccacataatagtgctaggtacctttgacccatcatcttgggaggtggggaggaatgagagggtccaggcagggtgtaggggaatgtattagtccagtgagatttccctcttcatccgcagcagtgtatctattctatacctggctatgggagagaccccttgcatgggagggaccccttgctatggcccctttagccaggcagtgggatctacctgtggcccggcctccctaatgtcattcacattgaatggggatgaggtcggacagtggctcatagagccgagtatgagccctagctgtgggctagaaatgtccttaataaacatccttatttttcaaaaaaataaaa

SEQ ID NO: 365385 - DNA, 473 bp, Homo Sapiens
  misc_feature (36)..(36): n is a, c, g, or t
  misc_feature (46)..(46): n is a, c, g, or t
  misc_feature (51)..(51): n is a, c, g, or t
  misc_feature (79)..(79): n is a, c, g, or t
gcctggcccctccccttctaacctcaataacccccnaacctgaaanggctnaaaaaggaaagggtatcccttttccccnaaagttctgggaacaaaataaaggggcttccctttggtaccccccacataatagtgcctaggtacctttgaccccatcatcttgggaggtggggaggaatgagagggtcccaggcagggtgtaggggaatgtattagtcccagtgagatttccctcttcatcccgcagcagtgtatctattctatacctggctatgggagagaccccttgcatgggagggaccccttgctatggcccctttagccaggcagtgggatctacctgtggcccggcctccctaatgtcattcacattgaatggggatgaggtcggacaagtgctcatagagccgagtatgagccctagctgtgggctagaaatgtccttaataaacatccttatttttcaaaaaaaa

SEQ ID NO: 365386 - DNA, 610 bp, Homo Sapiens
  misc_feature (149)..(149): n is a, c, g, or t
cctggtttctggaagaggaaaatgtgacttggagctgatctttactgagctcgccgtggcagatgccatgctcaggacgttcatgtggatggtttcatgtcatcgtgctggcaaattgtcctccctgccttaaaaatgaggctcaaaanaaacgaccttagcaccccatagcctatgccatgagcactggctccaccctgaatcccagctcctccccttagtgaccccaagtctgtttccctcagctgcataaaggaggcgatatagtttgaatatttgtccccagccaaatctcatgttgaactgtaatccccagtgctggaggtggggcctggtacgaggtgtttggatcatggggacgggtatttcatggcttggtgctgttttcttgatggtgaattattgcaagatacggtcatttaaaattgtgtggcacctccccctgcccccttcttgctcctgctttcaccatgtgacatgtctgatcccccttcaccttttgccatggtcataagcttcctgaggcctccctggaagctgagcagatgccagcaccatgcttcctgtacatcctgcagaaccataagccaattaaacctttttaataata

SEQ ID NO: 365387 - DNA, 501 bp, Homo Sapiens
  misc_feature (193)..(193): n is a, c, g, or t
caaagttgagttctgggtcaaaaatctctcaagcgtcctccacagctgacttccacagtcccctgtgtgtctctgcaaggaacacaaaggaagtgagatagtgggaagtctggggccaatcttcggtcacgtgaagaattccctctcagttagccggggcgtgcagccgcacagaaggaaggcagccacgcangctccagtccaggctgggagagagctttgtagatcccatctcccactgagcaggcttccctcctgcaaggagagactctaccgataatgtgttaagatcagattaatgcaggaaatacacatgaaataaataataacagtgtaataacagtggctgtcattgcaatggttatttctgttaaaaatgtgagatctacactacggatttcttaggataattttgcccttacttaaaagaaactgacagatgtactttataaaaatgaaaataatttaacaaataaagaattggagaatattgactcacca

SEQ ID NO: 365388 - DNA, 1031 bp, Homo Sapiens
ggggctcagagactcccaccccagctcagagggagcaggggcccagccagggacggaccctcattcctcccagggaccccagacctctgtctctctcggcaggccttggctccttgaacttttggccgccatgtgcttcccgaaggtcctctctgatgacatgaagaagctgaaggcccgaatggtaatgctcctccctacttctgctcaggggttgggggcctgggtctcagcgtgtgacactgaggacactgtgggacacctgggaccctggagggacaaggatccggccctttggtgccaactctgcctctcttcacagcaccaggccatagaaagattttatgataaaatgcaaaatgcagaatcaggacgtggacaggtgatgtcgagcctggcagagctggaggacgacttcaaagagggctacctggagacagtggcggcttattatgaggagcagcacccagagctcactcctctacttgaaaaagaaagagatggattacggtgccgaggcaacagatcccctgtcccggatgttgaggatcccgcaaccgaggagcctggggagagcttttgtgacaaggtcatgagatggttccaggccatgctgcagcggctgcagacctggtggcacggggttctggcctgggtgaaggagaaggtggtggccctggtccatgcagtgcaggccctctggaaacagttccagagtttctgctgctctctgtcagagctcttcatgtcctctttccagtcctacggagccccacggggggacaaggaggagctgacaccccagaagtgctctgaaccccaatcctcaaaatgaagatactgacaccacctttgccctccccgtcaccgcgcacccaccctgacccctccctcagctgtcctgtgccccgccctctcccgcacactcagtccccctgcctggcgttcctgccgcagctctgacctggtgctgtcgccctggcatcttaataaaacctgcttatacttccctggcaggggagataccacga

SEQ ID NO: 365389 - DNA, 507 bp, Homo Sapiens
ctcccaggaatggcctatacaatcctgtaataactttcattcttagttctaagcctagatataacagacccctctgtcatcgcaatggtgttttccccaagatgagacattctttttaaggtatgtgactctaagaatgggaaagtgaggggaacaggtacagtcatgtgccacataatgacgttttggtcaataagagaccacatatacaacaggtagtcccataacattaataacacaaagctgaaaaatttctatcacctagtaatgtcacagtggaagcattactcacgtttgtagtgatgctggtgtaaacaaacctgcacagccagttgtataaaagtattgcacatacaatacatgaaatacataatacttgaaaatgataacaaatgaatatgttagtggtttattgtccacgaagacctttcagtgggacggcatggggaggggaaagccagtgataatgacgatcctaaccctccacaggcctagactaacatgtgt

SEQ ID NO: 365390 - DNA, 333 bp, Homo Sapiens
ccacccccccaccctcagcccggcaacttctgggttccgtgggttttagttccgttcttcgttttcttcctccgttattgatatatccttactcccgaagcccccattatgcttccacgcccttttcctctttgaagagtcaagtacaattcagacaaactgctttctcctgtccaaaagcaaaaaggcaaaggaaagaaagaaagcttcagaccgctagtaaggctcaaagaagaagaaaaacaccaaaaccacaagggaaaagaaaaacccagtttcttaggaaacgcaaacgatttattatccagattattaggataagtcctttttaag

SEQ ID NO: 365391 - DNA, 461 bp, Homo Sapiens
cctcactctcaggaaatgctgacccatgggcaggagactgtggagactgctcctgagcccccagcttccagcaggagggacagtctcaccatttccccagggcacgtggttgagtggggggaacgcccacttccatgggttagactgccagctcttcctagctggagaggagccctgcctctccgcccctgagcccactgtgcgtggggctcccgcctccaacccctcgcccagtcccagcagccagccaaacacacagaaggggactgccacctccccttgccagctgatgagccgcagagaagtgacggttcctacacaggacaggggttccttctgggcattacatcgcatagaaatcaataatttgtggtgatttggatctgtgttttaatgagtttcacagtgtgattttgattattaattgtgcaagcttttcctaataaacgtggagaatctcc

SEQ ID NO: 365392 - DNA, 867 bp, Homo Sapiens
catctcacttaccatggctagagatgggggtgagactggggaagtacaaaagcagggaacagataagggatggaaatcagaagggaatatagaaagaactctggatgtggagaaatgccggtacctgagcattttgtatcaatgggagtaccctctgtaactgctcagtaggttacaaatgaagagtccaccagtattagaaacaatttaaacttgccagtaccaactgggatgtgtgccttcaatttgaaaattgtatgttttattttttaaatttgttaacagcattaatttatagagtattgatgtcatttatgtttctgaggtgtttcaacacaattttggatcagctgcctgtttgcaaaaacataatatatttctgttaaacagttcttcacctaacagcatattgctcttataactggtagagctgtttcaaaggaagttggtttctggtccaagttttgacctaaaccatgtccatcttctattaccagcacttacaagcactgtgaaaactgatcatgacaaataagtaaaatttgctacattaaacatattgcctcagccattactaagcgtccacttgtaaagctggacacagtttttactttatgcttcattttgattttttatccgtaagacataaattagaaggcatgaggtggccctttaaggataatctgcaaatatacacattttaatagtcatccatctgaaatcgatccacattccagagaagattcagtattgtgctgtgtgaaataagcattcccagaaaaaaacatttatgctaataatacaacataacctctgcgttaaagaaaaagatgcttttaggccaggcgccgtggctcacacctgtaa

SEQ ID NO: 365393 - DNA, 377 bp, Homo Sapiens
cctcctcgggaaatttgtgcccaaagataacacaggggatatgccatatgaagatgaaggcagaattttccaagcccagggatgccaaagattgccagcaaacccccagaagctaggagagaagtgtggattagatttttcctcacagccctcaaaaaggaaccaaccctgccaagaacttgatctcagacttctagtctccagaactgtgagacagtgcattttgttttgtaagtcagccacatggtttgtggcactttgttatggcagccctaggagatgaagacaatatgcaacatggtatgtccattataggacactgtgggccataaatgtgttctttggcctgaaaaaataaaacttggtggtcccagttg

SEQ ID NO: 365394 - DNA, 514 bp, Homo Sapiens
tcttctgccaagtgtctgaccccatggggttgttctgtgtttgcatttaagcaagtgacttctgggaagtccccggccgcccggggttctatgatatttgtagtgccggggctcgcacactgctgcccccagcctgtagaggactttcttcagggcccgtagctgctgggcgtacccctggcaggcgggctgtgccgcgggcacatttgccttttgtgaaggccgaactcgagctgtatcctcataggaaacagtgatcaccccggacgggcgtccaggaccctgagggccatggccaaaaggctcctgagtgtgcctggtggtctggctggggctcacggtgggctgtctggggagggtgggtgcctccactatgatccttaaaggattcctctgtgtgggtggatgcgtgtgggcacgactttgtactcagaaattgaactctcagtcacgtggaagccacgggactgctccgaagccgccataataaaatctgattgttcagcccccaaaa

SEQ ID NO: 365395 - DNA, 923 bp, Homo Sapiens
gcctgggtggcgaattcggcacgaggcttaggcaaggggtccaggtcagagtttagagctttcaaatcccaacttgcccctggggattgcgcggctgatgtttagaacgcctagtcaagccaaccggctcgctcttgtttcagcaaaccctgacttacgtctcctatttgacttgaggcggcacagtggccaagtcgattggccgtggcaagtgaccctccctgtggctgaagtgttctgaggactggcgagagaggcgcgccatgcttgccccctgctcaggttgggagcttggctgcttccgtctctgtctccgtcaggtccgactgtgggctggcgctgggcgctgggcttgctgggcttgccaagccaggccgtacagctcaggtgggagcgagcgctggcccggatcggagactgaggtccctccgcctggcccggcgcgccgaactctgaaggagtggacactgcaggtgagcccgtttggtcggctgcgggcgcggctcccgtgccacctggccgtgaggcccctggaccccctcacctacccggatggcgaccgcgtgctggtcgcggtgtgcggcgtggagggcggcgtgcggggcctggacggcctgcaggtgaagtacgacgaggatctggaggagatggccattgtgtctgatactatccacccccaggcgtccgtggaggtttagatatcaagtcatcagggtctggctgtgtagaagttcaaagtattgagggtgataattgcaaaattgaaacagagcatgggactagcatcttgcagtctgttaagggtcaaaaattgcatgtaaaaacaaaaggaggcaaagtgatctgtctgggaacagttaaaggaaatatagatattcatgcatcagataaaagtgctgtgaccatagataaactgcagggaa

SEQ ID NO: 365396 - DNA, 385 bp, Homo Sapiens
ggtctattgtgagtttatcagttcatagtttttttagtaaagaagcaaaattaaaaggcttttaaaaatgtacaacttcagaattataatctgttggtcaaatatttgttattaaacatttctgtaatatgaagttgtaatcctggccgtgagcttggaagcttacttttgattcttaaagcctatgttttctaaaatgagacaaatacggatgtctatttgccttttattgtaacttttaaatgaaataatttcatgtcaatttctattagatatatcacttaaaatatttggttttaaatcacaagaatatgtattctttaataaagataatttatgatcatggtataattaattgaaatttattaaaatctgtttttataaa

SEQ ID NO: 365397 - DNA, 482 bp, Homo Sapiens
cattgggcaggtgatggggagaatcatataattatatctgtactattgaaagataattgcgtgatggacataaacctgtcagaagtcctgaatatgacagaagatttatctgactttaaataataattttattgagcactttatatgcaccagacactattctaactgctttgtatatacttacacatgtaatcattgcagcacctgctgagcttggtactaacattagttctttttacaggtgaaaaactttgggacaaaaaagatgacatgtaagatggagcccagattagaaggaaagagtaggactgtctctggagcttgtattcccatcagacaaactaacaaaagaatccccactacaacctgcttcattaaaatacatccaagtccatagtctttatctcactatgaactccccagaactatgtgtgacaatgttgattaatcctatcaacttgaagctgtacccctcttggagt

SEQ ID NO: 365398 - DNA, 765 bp, Homo Sapiens
  misc_feature (265)..(265): n is a, c, g, or t
tctcttctgaaagagcagcagcttcgtgaggacgggccagccgcggggccgagggtcgcctttgttcgagtggccggatgtccgttcccagacatctcgcctggagcacgaagccagtatgtttgcagactttatcgtagtgacagcgacagttcaacgctgccccggaagtccccttttgtccgaaatactttggaaagacgaacccttcgctataagcagtcatgcaggtcttccctggctgagctcatggcccgcacctccntggacttggagctggatctccaggcgtcgagaacacggcagaggcagctgaatgaggagctctgcgccctccgtgagctgcggcagcggttggaggacgcccagctccgtggccagactgaccctcccaacctgggtgcttcgggacgagcggctccgtggcctgctgcgggaggccgagcggcagacaagacagaccaaacttttgactaccgtcatgagcaggcggctgagaagatgctgaagaaggcctccaaggagatctaccagctgcgtgggcagagccacaaagagcccatccaagtgcagacctttagggagaagatagcattcttcacaaggccaaggatcaacatacctcctctcccagccgacgacgtctgatggagtgcattgtgcacatgaagtatttatccacctgttttattttcatgaagttcttagactagctgaatttgtctttaaaatatttgtgcaaagctattaatatacacattttgt

SEQ ID NO: 365399 - DNA, 465 bp, Homo Sapiens
  misc_feature (449)..(449): n is a, c, g, or t
acaaaatgtgtatattaatagctttgcacaaatattttaaagacaaattcagctagtctaagaacttcatgaaaataaaacaggtggataaatacttcatgtgcacaatgcactccatcagacgtcgtcggctgggagaggaggtatgttgatccttggccttgtgaagaatgctatcttctccctgggaccggagacaattacaggtcagaagctgatatgaagacacggaaagctggtggctctcatatcaatcatggcttttcttattcatacaacaaactgaatttaagtccccaacaacacatgtgcttgtatagagtctccaaatgttaattatgaaggaaccgtaagagcaggggtttcttcatctccagtacctaggaacagtgcctgggggttatattagggtgctcagggaaatacctgtcggtatttaaccaaatggnatggaaaaggtggaaa

SEQ ID NO: 365400 - DNA, 221 bp, Homo Sapiens
tactcattttggaaggaagtcattctaaaatgttacacttgtcttcagcatatctgcaatataataattttctgcataactgaggatcattcacagaaaccaatggcttttctccagcagtgtcttctgaagttgtaacagtaggggcacggggagctatttgcttttatgctaaatgaccttagaccacttataaaatgcatatgagtgctttaaatgtt

SEQ ID NO: 365401 - DNA, 406 bp, Homo Sapiens
  misc_feature (11)..(11): n is a, c, g, or t
tttttccctcnttttaactgcaacatacaaaaactttaattatttttgcaaaaagaaagccaactattcgccttggaaataataatgaagtacaaatagctctgactctgcatttggacaaggatgaaccatgatagatatttagaaagggttttaaatcatgtgtatgttggctacagagtaaaaggaacagagaagactcaagctattgtcaggtgtgtatgtgtcatcagcacacactgggggaggagagtcctcactaagtgccacaacccctgatagctgtcagtctctcatgaagcaccatgatctggcatggactcccaaatgccacttgagagaaggtcttcacagcagactgtgcatctgtgtcacaaaacacggctgcaatgaacaacagtgttcc

SEQ ID NO: 365402 - DNA, 1608 bp, Homo Sapiens
  misc_feature (722)..(827): n is a, c, g, or t
  misc_feature (835)..(896): n is a, c, g, or t
  misc_feature (953)..(961): n is a, c, g, or t
  misc_feature (1005)..(1015): n is a, c, g, or t
  misc_feature (1028)..(1053): n is a, c, g, or t
  misc_feature (1062)..(1122): n is a, c, g, or t
  misc_feature (1140)..(1160): n is a, c, g, or t
tatgataggtcaggggctaggtgttgaacttagttaatggaagactgagagcagaacaggtttgtcatctccgcaaggccagaaagtgatcacaaaaagaggcagatgatagacactggggtagggtcataccacagggaaatacctttcctgggcttgttttctagcatatcactgacctgggatctttgggtaatcaagggtgtggtcaatggaggccctgtgctgcacgtatgcagtatcctaactctttctacatcagatcaaaacactaagttggggtactgcctcgaccttttttcagctcatcctggaacatatacagagttgagagttttagacaatctctaggtagaggagacaagatgtagacccagacagaagaaatctgcttccctaccatggctattccagcaccccaacctgtaattgccaagtcctctaaggtactaatttgtagctgctctgaagtaaggatttcggattcagctggtagggaaagactctgcacctgctgtcttagggaagaaatggttcaaatccatgtggtgacattgcattagtctccctttcactgttttcttattctgtaattgtttgttatatttcccaaaaacgtcttgatcactaagcaaagctgctagtgggattctatatttcgtgtcatcttttttattataatttattgcaaatttttttctgaataaatatatgttgtgtgnnnnnnnnnnnnnnnnnnnnnnnnnnnnnnnnnnnnnnnnnnnnnnnnnnnnnnnnnnnnnnnnnnnnnnnnnnnnnnnnnnnnnnnnnnnnnnnnnnnnnnnnnngggggggnnnnnnnnnnnnnnnnnnnnnnnnnnnnnnnnnnnnnnnnnnnnnnnnnnnnnnnnnnnnnngggcccccaaaaggggcctttataaaaaagggggcgggggcccctttttaaaccgcnnnnnnnnnaaaaaagctctcttggggattttttgaaaaaaacccattttttnnnnnnnnnnnatttttggcaaannnnnnnnnnnnnnnnnnnnnnnnnnggggaaatnnnnnnnnnnnnnnnnnnnnnnnnnnnnnnnnnnnnnnnnnnnnnnnnnnnnnnnnnnnnntttctattcccggagtannnnnnnnnnnnnnnnnnnnnccccacggcgctgagggttgcttatgctgtttcgacttctaaaaccacctcaagaaccggtggctttctctcttgctccctctgtctcaccttactgtcgttgcacgaatattcacaaaccaacaacccacgcttctttaaaataacctaataatacccacaaaaacaacccatccactattctcgtccgctactccatgacagccgatatatacgggcgccggattcccgtgttgcaagcctccctaagtcccgtccccatcgtattatctatcatcccccatccatactcaataataccgtgcacgccacctattgccccacacaccaccgcagtctacattctctattctcctccctacatctcacttgtccgcgccgtttattctcatttactacctgcattcgtgcctatatttcaattgtcgcacatgaatgcgtcactggg

SEQ ID NO: 365403 - DNA, 326 bp, Homo Sapiens
ccatccccaccccccacccaccgcctgccagctcctcactaatagatgattcttaattgcccaaatgtgttagagtttgtatatccctactcctgggccttacatgtcgcctgttggggcttaagaccaggttgataagtaggaactgaaagtcttccagattcacagtagaaaattttatagacatttctgttaaagaaatatatcgattttatgtttttcaattatgttactgtaaataccttgtacctgttcatggattattttattctaaaatattttgtcaaatgtgtatcaaccaaattaaaaagaaaggttttcatgtc

SEQ ID NO: 365404 - DNA, 467 bp, Homo Sapiens
cctatcttggtctagaggggtcaaagaattcctgaagcttatgtaagggccggctggtcagctccctagaaccacgggctccacagaggtggcaaaacccagtgattttgccagtatccctgcagggacctgcggtacaggcaggttgaagatctgagactcaggaaccttggcccctttatcacttacaactgtgtgtgaaacaggactaacagtttggactgagagcactgaagctgctgtgtgttgtgcatataacttaatgctgtgtgttgtggcttgcactgctgtgggggcggggagggcagtggtggggaatggctggcatgaagcttgcttgagccaatgctatgcttgctgggctttggctgactggctttgggccaccaactgtatttgcatagtgatggcttggaagtgtccatagaagggattgcaataaaggtgtgtcttccttctgactcggg

SEQ ID NO: 365405 - DNA, 525 bp, Homo Sapiens
tgcggccgccgcttcagcgaccgctcggacctcaccaagcaccggcgcacgcacacgggcgagaagccctaccgctgcgaactgtgcggcaagcggttcacgtgcgtgtccaatctcaacgtgcatcggcgcaaccatgccggccacaagccacacaaatgccccgagtgcagcaaggccttcagcgtcgcctccaagcttgcactgcaccgcaagacgcacctgggcgaacggccagcggagtgcgcagagtgcggcaagtgcttcagccacagccgctcgctgtcacagcatcagcgggcccacacgcgcgcccgcaccgctgccgccgttgccatccagtccgcagtgggcactgccctcgtctttgaggggccggctgaacaggaaaagccagggttctctgtgtcctagttgagggaggcttgctgaggcttctctaaaggtggttgggcaagcacctatatagtatcacggagacagttgaggcaactcgtagatggagatttgggaaaagacgatgtg

SEQ ID NO: 365406 - DNA, 1609 bp, Homo Sapiens
  misc_feature (77)..(77): n is a, c, g, or t
  misc_feature (476)..(669): n is a, c, g, or t
  misc_feature (867)..(940): n is a, c, g, or t
  misc_feature (1186)..(1186): n is a, c, g, or t
cgagagctttctgctcccttcccatcagcagctgcttctgggaaaccttttatctgccttactcccccttaaacacnttgcgcatcgtcacatggcttgtattaccgttttatctcccttgctcccctttaaaacacctgcggccttgtcacttggcttgtgattaccatttcgtctttaaagcaggtttgttaacagttttaacactcggagtatttaaagccagccaggtgtgggcgtgcctgcacccagatgtggaggtttattttaaggctgtgccccaaggggacccagtttgggggtggctgtgcccgccctggtcctagcatagccctggcccagagcactgctcccacaccctcgggcctcggagctcggctgtgttcatctacagggatctgtcacctgtccctccaggaaagctccttacgcctttgctctcctgagacacaaaacttgctctgaatcctcctccnnnnnnnnnnnnnnnnnnnnnnnnnnnnnnnnnnnnnnnnnnnnnnnnnnnnnnnnnnnnnnnnnnnnnnnnnnnnnnnnnnnnnnnnnnnnnnnnnnnnnnnnnnnnnnnnnnnnnnnnnnnnnnnnnnnnnnnnnnnnnnnnnnnnnnnnnnnnnnnnnnnnnnnnnnnnnnnnnnnnnnnnnnnnnnnnnntaagggcgggtttttaaacaaggggccggggcgcgttttttcaacccctcgtgggggaaaaaagcgctattggggatccctgtgagccacaccccttcccgggggcggccatccctgtgccaaaccccttacccgctcttcgcgcgcctccgggacacaccccacatttttaagccgcctgagcgtccctaccaaacnnnnnnnnnnnnnnnnnnnnnnnnnnnnnnnnnnnnnnnnnnnnnnnnnnnnnnnnnnnnnnnnnnnnnnnnnnaaggcgtcccgtgccacccttcacccctgccttggtgttccttttcgctttcccacccgtccccgtcgctggtgtttcccccgcgccgccccgttcccaatcccactctttcccgcccccccttataacgcctgttccgcccgccgcgtaattttctccccttatgtatgcccgccgccgcttattcccgttccggtataacccgtaacccagccgccgcccccgttaccgcacccttttatcccngcgccacagcttctatcgcattacccacacccgcccacgtatatccccgccattatccatgacacggcccccatatagaccaccgacttgccgcgagccgcattaccgcgccctaacgccgcgccgacattcctcgcgccgtataccaccctacatgtgcggtcgacaattagtcgccgctgaccccaaaaaatataaccgcgcgataaacaggcgagacagatgcgcgtaattacagtataagccccagatacgatatatcccccgcgccgccccccaataatagtatgcctagcgcaatttcacaccccgcacggtgcaaacagtgaaaaccgaagctcgcggcgccaacattctctcgagatctgcccgctctgcaacacttagccccccgcgtcgcaatcactatcacgccaaatttaa

SEQ ID NO: 365407 - DNA, 752 bp, Homo Sapiens
  misc_feature (372)..(372): n is a, c, g, or t
  misc_feature (378)..(378): n is a, c, g, or t
  misc_feature (382)..(385): n is a, c, g, or t
  misc_feature (387)..(387): n is a, c, g, or t
  misc_feature (404)..(405): n is a, c, g, or t
  misc_feature (636)..(636): n is a, c, g, or t
  misc_feature (682)..(682): n is a, c, g, or t
  misc_feature (725)..(725): n is a, c, g, or t
  misc_feature (739)..(739): n is a, c, g, or t
tggcaataaaataaggtagattcagcacaatacctaataactaaaaaatctgtttttaattgggtggggcagacagcaagtgtgtcatcctggaagatactatttgggattttatgtaggtacataagagaaaaaagtgaacaaaagcaaggggctaccaggacgccgcagtatgcttaacatgtattttctaagtttgtattatgcctttatcttggtacttttatcttctgttctcacttgatctttttgaaatgtattttaaatcctaataaaaatatataaagtctggaattaataaaggattaaatgaaacttttgtatatctcactgaaattctcagaaaaaaggggggtgtggggagggggaatngcctgnggtnnnnantgaaaattgtaaccagnntcttactaaggaatatggcaactgcataatcaaatgtcagtggttaccaatcttatgagtcacctgatgtgtggtcattagatggctatccttgcctctcgcccccagtgttgagaatagtggaactatgtgggggtttagaaatatgcaatatatatttgtatatatttgtgtgtctcgacagcttgcaggttaaagtagatcaaactggtgagggaaccctattggttnaggtatgcagtctcaaagacaagggcctttaaacgtgacttaattnttcgtgcaattttgccaggaaaatggtgaagtcgccaagcatnagggtgggaaatgnttgtcagacttga

SEQ ID NO: 365408 - DNA, 609 bp, Homo Sapiens
tgacgttcttgaaaacatgatttatcacataatatatacattgactttgcttgtcacttgaaatgcctaagaaaacacaaaatcaatcttaaactagaaacttctattgaatatgacatgaagagagcacatattccgacaatttcaagttcttttcatagccttccagtcctaataactcagcgttaacatcttattctgttcagcactatttgataatttctttcatcctcatgggctctagtattgatgtttcatcagtctcaattttataaaaccatcctttactttgtaataaagcaatgctgagagacattttccataatgcagggggaaaaatgtggatcaatcacaaactcaaagaacgttacagttataatgctttcgacattttttttctacttctgtgatgctttttcaagataagcttccccctccccctttttttcccctccacctgtgcactgtcttatcgcgatatactcttgacttctgaaaatcaagttgcaggattggtatgactggaatgcagaggttctcttgaagtagtgtcaccacataactattctctattgataaacttatcgcaaccaagttcttctatcagag

SEQ ID NO: 365409 - DNA, 1497 bp, Homo Sapiens
ggggagacacaagcgagaggatcatggcggatggccccaggtgtaagcgcagaaagcaggcgaacccgcggcgcaataacgttacaaattataatactgtggtagaaacaaattcagattcagatgatgaagacaaactgcatattgtggaagaagaaagtgttacagatgcagctgactgtgaaggtgtaccagaggatgacctgccaacagaccagacagtgttaccagggaggagcagtgaaagagaagggaatgctaagaactgctgggaggatgacagaaaggaagggcaagaaatcctggggcctgaagctcaggcagatgaagcaggatgtacagtaaaagatgatgaatgcgagtcagatgcagaaaatgagcaaaaccatgatcctaatgttgaagagtttctacaacaacaagacactgctgtcatttttcctgaggcacctgaagaggaccagaggcagggcacaccagaagccagtggtcatgatgaaaatggaacaccagatgcattttcacaattactcacctgtccatattgtgatagaggctataaacgctttacctctctgaaagaacacattaaatatcgtcatgaaaagaatgaagataactttagttgctccctgtgcagttacacctttgcatacagaacccaaacttgaacgtcacatgacatcacataaatcaggaagagatcaaagacatgtgacgcagtctgggtgtaatcgtaaatttcaaatgcactgagtgtggaaaagctttcaaatacaaacatcacctaaaagagcacttaagcaattcacagtggagagaagccatatgaatgcccaaactgcaagaaacgctttccccattctggctcctatagctcacacataagcagtaagaacatgtatcagcttgatacctgtgaattgggcgaccaagaacaggactcaagacatctcagtggtcttcaccgtcttctttcagcatcaccaggcagtcccacacgaccacagatacggcaaaagatagagaataaaccccttcaagaacaactttctgttaaccaaattaaaactgaacctgtggattatgaattcaaacccatagtggttgcttcaggaatcaactgttcaacccctttacaaaatggggttttcactggtggtggcccattacaggcaaccagttctcctcagggcatggtgcaagctgttgttctgccaacagttggtttggtgtctcccataagtatcaatttaagtgatattcagaatgtacttaaagtggcggtagatggtaatgtaataaggcaagtgttggagaataatcaagccaatcttgcatccaaagaacaagaaacaatcaatgcttcacccatacaacaaggtggccattctgttatttcagccatcagtcttcctttggttgatcaagatggaacaaccaaaattatcatcaactacagtcttgagcagcctagccaacttcaagttgttcctc

SEQ ID NO: 365410 - DNA, 683 bp, Homo Sapiens
cctttctgttggtccgagtcagggcccaggtgcagctctccggtgtacacacaaccagcaatgttgagggcagccggacccaaggccttgagaaagccttcagcccggcttctccatgtgcctggaacgtgtgggtcaccagaaagggcccccctgatgccctctgacagtagctcctatgggggctcccacagcaaggatggcgaccagaaaggcagcgagtgccatggatgcggtgagcaggggtcccggccgggaggcccccccgctgcccacagtggccaggacagaggaggcggtcggcagggtcgggtgtgctgacagccggctgttaagccctgcctgccccgcgccaaaggaagtgactgctgccccagccgtggctgtgccccccgaggctactgtggccatcaccacagcactgagcaaggctggccccgccatacccaccccagcagtctcttctgcactggccgtggcggtccccctagggcccatcatggcagtcacagcagccccagccatggtggccaccctggggacagtgacaaaggacgggaagacagatgccccgccagaaggagctgccttaaatggcccagtgtgatgctgctgccgcccggccacggcccaccctggtcaggctgcctccttaatcgagaaaactacctggtgatgcaatc

SEQ ID NO: 365411 - DNA, 503 bp, Homo Sapiens
cttttcacacaatgtgctctgttcagggcaggtgacaggctgtgttgtaagcatgttggtttccgatgaactcatactggctgcacagaatcatagttggtcttgcaccctgaaatattacacataggaaaacacgcagcattttcaaatggtattcctaggagagacccagagagtctggttgttcgaagtcgttttggaaggcagctgttgtgtgttgcacgctgtgccccttcttccctgagcggaggtggagctgtgtggctgtgtgagtggcacatgagtgctctccccttgagctttgggtacagcctgatgctggcagttccctggcaggtctttccattacattcggagcatttgccagtaagctctgaggaagaacttgagtggcccatggtccctgcttgtttggaaggcctggagggtgggtatatgtgttgaccagtctctcaagcaggcatatatggggaagtaacatattagagttgactaaaccaaac

SEQ ID NO: 365412 - DNA, 504 bp, Homo Sapiens
  misc_feature (161)..(199): n is a, c, g, or t
gccagctggccagccagtgtgacccacactccatgggcagccacctgtttatatctggtttcagttataacccagtttttaaagaaatgctgcaaaaatttaagttttctcatgtttattttaaacaattcctcttccatcagaccaccagacaaaaaaannnnnnnnnnnnnnnnnnnnnnnnnnnnnnnnnnnnnnntacacatctagaaaacttcacctttttagagtccccccaaaacaacacaaaagttattgtgggtgctactggttttatgctgtactgtggggcgagggggaagacctgtctgtacgctggaaacactcataaccattcctttagattcgtttgccttatggttatttgtcataaacgcgatttgcaaaaacaaggagccttagtgaatgtacagtacctagacttctgtgttctcaggacgcagaagggagcaactttgctatttggtccagtaagtggacaccttgtgatataaatgtggaaat

SEQ ID NO: 365413 - DNA, 556 bp, Homo Sapiens
ccgggcgcgtgcgcgagctcgcccgggcgggggccgcggggcgctaacggtcgcagacgagttcgccgccctgggccgggaggcggctcaacaccgtgactgccgacctccgagaccgtttacctcactgcggcgtgtgctggcggcagcccgcgccgcctccgagcaataaccgcgccgccaccgctgctgccgccggccctgagggagccggccccggccctcccgcgccccgagtccccattgccctccgcatgtcaacggcgcccgccccgctgccgccccatccacgttgagacgcgaacaaaacccagacggccaggtccaagcttcccaagctttatttattgccaaatttgggcggcctcgcccgcacggcaccctccgagtccccgccgcgtctgcaccatcccgcgatggcgtttctcgtgtttttcttttctggatgatataaatattgaccgcacactcctgcttgctccgggttttctctggggtcccaagagcgcagtggccttgggggagaggtgagggtcctgccctccggccggaccgc

SEQ ID NO: 365414 - DNA, 524 bp, Homo Sapiens
  misc_feature (276)..(276): n is a, c, g, or t
aaatgaggtctaaaaaataattactagtcgagactattattctttaaacagaactgcctttttctactctttatgtaaactctttctattgtgttggtctaacgaggcactattttaaaattttttaatttttcccatagcacttaaaagagatttggtaaagacctggctgtaaagattttgtaaataaaagggtccaagggctctttttcccaacattacccatttttaaaaaatgttttaaaagcctagaagacaacttatgtatattccccnatatgtatagcagcacatttcatttatggaaatatgttctcagaatatttatttactaatatatttatcttaagccatgtcttatgttgagagtgtgacattgttggaataatcattgaaaatgactaacacaagaccctgtaaatacatgataattgcacacagattttacatatttgcagaccaaaaatgatttaaaacaagttgtagtcttctatggttttgtaacaaattgtacacatgactgt

SEQ ID NO: 365415 - DNA, 889 bp, Homo Sapiens
  misc_feature (749)..(762): n is a, c, g, or t
ggaacttagggtcctaagattttgccaagactgtcatcattacctggagtataatgggactaactatacctccctttaaggacaatggaaacattctattgaaaccatcctcacagggttaacaagaattagatgctgggttctggacagaaatatagttgtaattaagcattaatcaggctgcactttggcccacttcttcgtaaccaaaagtcccagagcaccagatgctaaccatttgcctcctcattgttcctacagagaagatttctgatgttagaatcataaggcctttgtttgtttaaaaatggcttaagatgtttttcagatcctgaattccagcaaaagagctattgccaaccagtttgaagaccgcccccccgcctctccccaagaggaactgaatcagcatgaaaatgcagtttcttcatctcaccttcctgtattcttcaaccagtgatccccccaccctcgggtcacctccaaactcccctttaaaaatacctaaggaacctaaaaccgggcttcaaaaacaagggcccagaattttggaaggggtttttccccccccttggttcttccccttttatttccggagccaggcccctcttaattggaatttaaaaacactttccccatttcctccccgtgccttggccctttttctaactccccccctccctttcccaatcgtttcctcgaagaacagacgactcagaactcaccacaatcccacccaatgatctagnnnnnnnnnnnnnnaccggataagacaccttttttcagtatgtatgtctttttttacaccgagaacacatattctttgtgttttggggagacgggctctccatgggggagcccctctttggaaaagagagaaaacctcttt

SEQ ID NO: 365416 - DNA, 466 bp, Homo Sapiens
tatgggtgcgggcagcactagaccgtgaggcccaggaatagtacatactgaaggtaatggcagtgtctgggtccaaagctgagttggggcagcagacaggcacagccaccgtgagggtcagcatcctcaaccagaatgaacacagtccccgcttgtctgaggatcccaccttcctggctgtggctgagaaccagcccccagggaccagcgtgggccgagtctttgccactgaccgagactcaggacccaatggacgtctgacctacagcctgcaacagctgtctgaagacagcaaggccttccgcatccacccccagactggagaagtgaccacactccaaaccctggaccgtgagcagcagagcagctatcagctccgtggtgcaggtgcaggatggagggagcccaccccgcagcaccacaggcactgtgcatgttgcagtgcttgacctcaacgacaacacat

SEQ ID NO: 365417 - DNA, 356 bp, Homo Sapiens
tcctgaacttgcaccaggagatgatagctgctatgcagctcacggtccagggtttggagtgtggtaacttctccagtcagggggatggatgcggaaggccttgactgtcgtcagacaggtgttgcaggctgaaggtcagacgtacattgggtcctgagtctcggtcagtggcaaagactcggcccacgctggtacatgggggctgggtctgactggcctggtgttggtacaggagtgcctgggtctgataatgctgggtttcctctagccccgaagagcttgctgggagtgtcctcgctgtcatttgattccacaggcgcaagcaggggctcattcagctcgctgtctggggaaaa

SEQ ID NO: 365418 - DNA, 1114 bp, Homo Sapiens
ctgggggcgtggctgcgcgatgttatcggtctctggacgctgcgcggcgctcctaggagcaggcgttcccgactccggcaagagggtggcgcctggactctcgccctcagagggaggcccgtcccacggtctgtggctacggatcccaggaccctcttcgcgggcgattcgcgtagcctcaggtaactgcatcctgcccagcatgacggccccctgcccgccgccacctccagacccccagtttgtcctccgaggcacccagtcaccggtgcatgcgctgcacttctgcgaaggagcccaggctcaggggcacccgctcctcttctcagggtctcagagtggcctggtacacatctggagcctgcagacgcggagagcggttaccaccctggatggccacggcggccagtgtgtgacctggctgcagacgctgccccaggggcgccagctcctcagtcagggccgggacctgaagctgtgcctgtgggacctcgcggagggcaggagcgctgtcgtggactccgtgtgcttggagagtgtgggcttctgccggagcagcatcctggccgggggccagccacgctggacgcttgccgggccagggaggggcaagcgacgaggttcagattctggagatgccctccaagaccgcagtggggcgcccttgaagccgaaggcagaatgcccaagctgggcatgcccatgtgccttgcgggttggggaaggcccaattggaggtttcccgccacttccttttgggccgggtattgagggttggttccgcgggctctggtgggacccctcctgggcagtaaaggtgatgaagccgcatccgcttggccggtggggacttcctctattgaacacttgtcttttgacccccctcactgccccagggaattcccacccgttccgcaccgcaaagggggcctttcactagttccgttgacctttgcggtgccccctcctgtcccgtatcaatactgtcggcgagaactccacataattctctccccctgtgatgtactacataactcaaagtctactcatgcctttctctacatctcccacctcccgctgtcgcacgtcacgtcctgccgcctgggcccgtctc

SEQ ID NO: 365419 - DNA, 447 bp, Homo Sapiens
  misc_feature (14)..(14): n is a, c, g, or t
tggactccagcccntgaattaaagagagctggagccctaggtccgactaaaatgtgggagaagcagagcttggagcttggagcttggaacctggatcctcccgtacccgcactcccacttcccaggcaccctggagcctgccactactggagaggtctccaaatgacatcccaaggacctacctctgtcctctgtgagcacaaacagagatgcagggtgcctagggctcagaggaccagacgggggcaggacccagcctgcctagttccctgtcgtttgttcccttgctgtggccattgctgccatctcctccactgcttgaaggcctcaccccatgccctctgccactcccatagtgctctgtaaatattatcaggaggaaaaggcctctcagagtgcgtgttgctgtgtacaaaggaatttccatcaataaaagctgatctcttc

SEQ ID NO: 365420 - DNA, 1086 bp, Homo Sapiens
  misc_feature (579)..(605): n is a, c, g, or t
ctcacttgtggtcagtatatcagttatgacgcccattgcccagcttcagtccatccatgttagatggacagaaattatggccagttgaaaataccagctttggttggacaactgtggacacacaaggtgaagaggactccgaagtcctttgtcagggctgacaacctcgtaagcccttgcttagaaatacagtattagtctaattgagtaattagtgcaatttcctgcttacttttcattctcatgactgaactgtgattaggaagttgtgattatagattctggttttggccggaattttgaatcagcattaattgaattgctaaatgactgacattcattccatttaattgggggaacaaaaggcctcaggtaaggatgaggaactctgaaatcagatggaaaagagcggtgttaatttttatggtctgtgatcgtagctgtgataagggactgaggaataaattgtgctctttgtcatggcaaccagcttctgaaaagcccactgaaaattgcctgtcctgctggtaactgctacggggtaagatttgccttaacagtactattttctcgccaccnnnnnnnnnnnnnnnnnnnnnnnnnnntgcaccacagtatttctagcatgggggctgtgtttgtatgagaaataaacgtaataaatatctcatagagacatatggaaaaataactttcagattcagcccagttctgttttaaagtgtgtttattcttctctacttgatttccaaagtgcaacattttccgatgctttagaaatcaaacaaaccagggacattgttcagatgtcaagccatgcccaattttccacaagattcaagaatcttgtataaaattcagccaacgtacacatagctttaatgaggagcctgccatgtttccccataaaatttattgcctgagaacttagttcagcctttgctaatgccaaaatgctctggctttgtattttctttaaaccataaatagaaaaatgcacattttttccacactcaagctttccccctaatcatgggaaaaaatttttcagcccattttttgccaaaataaaacattttttaaagg

SEQ ID NO: 365421 - DNA, 985 bp, Homo Sapiens
  misc_feature (803)..(821): n is a, c, g, or t
  misc_feature (823)..(828): n is a, c, g, or t
  misc_feature (935)..(935): n is a, c, g, or t
agcgggccggcaggtgctccgcagccgtctgtgccacccagagccggcgggccgctaggtccccggagaccctgctatggtgcgtgcgggcgccgtgggggctcatctccccgcgtccggcttggatatcttcggggacctgaagaagatgaacaagcgccagctctattaccaggttttaaacttcgccatgatcgtgtcttctgcactcatgatatggaaaggcttgatcgtgctcacaggcagtgagagccccatcgtggtggtgctgagtggcagtatggagccggcctttcacagaggagacctcctgttcctcacaaatttccgggaagacccaatcagagctggtgaaatagttgtttttaaagttgaaggacgagacattccaatagttcacagagtaatcaaagttcatgaaaaagataatggagacatcaaatttctgactaaaggagataataatgaagttgatgatagaggcttgtacaaagaaggccagaactggctggaaaagaaggacgtggtgggaagagcaagagggtttttaccatatgttggtatggtcaccataataatgaatgactatccaaaattcaagtatgctcttttggctgtaatgggtgcatatgtgttactaaaacgtgaatcctaaaatgagaagcagttcctgggaccagattgaaatgaattctgttgaaaaagagaaaaactaatatatttgagatgttccattttctgtataaaagggaacagtgtggagatgtttttgtcttgtccaaataaaagattcaccagcaaannnnnnnnnnnnnnnnnnnannnnnnacatgtcggccggccctcggcccctcgaagaagcttttctagaccattttcctttttgggcgccgccggggcccccaggtaaggggtaaagtggaaaacatggggcnccaataaggcctggttttcccccttaagggaagaattccccctggggacc

SEQ ID NO: 365422 - DNA, 457 bp, Homo Sapiens
atgctaccaagttacctgccactctgaagaaggaaacactgcctatatcttcaggaagatgaccctatttaaccaagagaaaaatgaaagtcgtccactcactcagatccagtacatagcctggcctgaccatggagtccctgatgattcgagtgactttctagattttgtttgtcatgtacgaaacaagagggctggcaaggaagaacccgttgttgtccattgcagtgctggaatcggaagaactggggttcttattactatggaaacagccatgtgtctcattgaatgcaatcagccagtttatccactagatattgtaagaacaatgagagatcagcgagccatgatgatccaaacacctagtcaatacagatttgtatgtgaagctattttgaaagtttatgaagaaggctttgttaaacccttaacaacatcaacaaataaataagaaagc

SEQ ID NO: 365423 - DNA, 558 bp, Homo Sapiens
tgctgtggtgacggggggtggaggaagcgtggtggaaccccaacacctagtgaggggtggctgattaataccacggctcacaacataacagagcggctcattccatgaacaaccccggggggatttcgaattctatcatctgggcaaaagatgtgatgagtgtaacttcctgttttctccaaactaaaacactacgcagattcctgtaccgctctgggacagaaatcctcagccagagcagaggccgtccccagagtccacactgtttcctgcataaagtgggttatctcagaagaaacatcccactggtctgtgtgatccctctattgaaatgtggtcatttatctacatctaagtatctctagaagtaatgcgtttgtatgtacttgtcactcagatatgtaatcccttaatttgtgcggggttttggggtgtgaaaaattcttggtttatatcctacacttttaaataacctcgtcaaaacttacatgtatttaacacctttttttgtgagcacatggtaaggttggaagtaaaaatggaaggtttatccctgtg

SEQ ID NO: 365424 - DNA, 1138 bp, Homo Sapiens
  misc_feature (898)..(915): n is a, c, g, or t
ggtccatctggtgatccaaaccctcagagccagtctctagcccatgaccagcactcaccccttccaccagcaacatgtgattaattttctcattagtggtatcacactataccagccatttgagccagcaaccttttctgttggctaactcactggccagctctcaccagcggtgtctggggaagtagttctctttgtatgaagcatacctgtgccagagctgtggttgaggaggagccagttttaggttcgaagaagccattggctcctcacttagccattagacttgaataggatttccttggggtgggttggtctgtcattacccagccttctctgagcatcctaggaaatcacagattgttaaaggaaatgccgcttcactgctgaagacaccatctggcgacagcaaatgcaaaagaggggactctagggtcttcacttttctggggaaatgttcacgacttctcaaggtacgcttagaccatatgtgcattcaggggactcttgtctttgccagcactcctcaggtgagcccgggatggctatctgaaatgtctggaaaatagagtcccttccccaaacatctgacatggccactaaatctttagacttgccttatagatccttccatatcatccccaagtgccccttctgcctcagtcctgttcctctgggcaatagctctagggaaaagtaggtattagactgctgtgcaaaattcagagcaactacttaaaatgctctagaggattcttagccagtctgtgaaagtgggcctcctctgtggtggggctgtttggcttaggagatgctgtagtagtagagataatcaggttctattttaagcaatcagcagagatcaatattgtacagatacaagcaaaggtttaataannnnnnnnnnnnnnnnnnttatttctgtagttgtgccagggacagactggccaaagaccaaacactgcagggtccccaagaaatttgtccttatatcattgtgtctgagggccagatatgattatgaagctttttccaaagatccagggatgggaatgggagtgggtaggaggggtaatgcggtcattggagtcgggggctggaacattatgagtgctcaataaatataaactaatgagaa

SEQ ID NO: 365425 - DNA, 473 bp, Homo Sapiens
  misc_feature (19)..(19): n is a, c, g, or t
  misc_feature (38)..(38): n is a, c, g, or t
  misc_feature (227)..(242): n is a, c, g, or t
ggaaaaagtgggtattaanactgctgtgccaaaattcnagagccaactacttaaaatgcctcctagaggattcccttagcccagtcctgtgaaaagtgggccctccctctgtggtggggcctgtttggccttaggagatgcctgtagtagtagagataatcaggttcctattttaagcaatcagccagagatcaatattgtacagatacaagcaaaggtttaataannnnnnnnnnnnnnnnttatttctgtagttgtgcccagggacagactggccaaagaccaaacactgccagggtccccaagaaatttgtccttatatcattgtgtctgagggccagatatgattatgaagctttttccaaagatccagggatgggaatgggagtgggtaggaggggtaatgcggtcattggagtcgggggctggaacattatgagtgctcaataaatataaactaatgagaaaaaaaa

SEQ ID NO: 365426 - DNA, 635 bp, Homo Sapiens
atatgccccatcctcagccatctcaccagccccctggtgccatgggaatcggacagaggaatatgggccccagaaacatgcagcagtctcgtccatttataggcatgtcctcggcaccaaagggaattgactgggcacatgaggccaaatggttgtcctggtgttggccttggagacccacaagcaatccaggaacgactgatacctggccaacaacatcctggtcaacagccatcttttcagcagttgccaacctgtcctccactgcagcctcacccgggcttgcaccaccagtcttcacctccacaccctcatcaccagccttgggcacagctccacccatcaccccagaacaccccgcagaaagtgcctgtgcatcagcattccccgtcggagccctttctagagaaaccagtgccggatatgactcaggttagtggaccgaatgctcagctagtgaagagtgatgattacctgccatcaatagaacagcagccacaacaaaagaagaagaaaaagaaaaacaaccacattgtagcagaggatcccagtaaaggttttggtaaagatgacttccctggtggggtagataaccaagaactaaataggaactcactggatgggtcccaagaaga

SEQ ID NO: 365427 - DNA, 435 bp, Homo Sapiens
cgaggggattaggtttggggtcagaggttctgttttccaggggaggggtgagataggcctggatcatgccctctgccatgccctccagctaggaggatcttgagtcagagaggattggaagtgctttctcctccacccaggtgaggtccaggggagcttaggtcttagggaagatggcaagttgaggtatgaagggaagctggggcttttggagctgccgaacaactgagggacccagtgcgccttccatcccgcactagtgaatagcgccccctcttcccccgaaaacgaggtgcgagaggaacaattcccacgctggggaaggacttgtctccttttctgtgaaaatgctttgtaaaaagttgttattgtttgcatagagcagattcttgagaaaaactgttttggaccataaaagttttgtttgttttaaaa

SEQ ID NO: 365428 - DNA, 857 bp, Homo Sapiens
  misc_feature (678)..(730): n is a, c, g, or t
caggcctgggtggcgaattcggacgagggttcccctactcttctgaagatgaaaatttgtttggggccttggtaaccgatagcggtacaaactccaaggcactgtggacttgagtccattcctatctgacctctttttgtccccctcaagcctcaggggcctcaagcccctccttagtagcccttggctgactgggccctgagccccaatgcatccttctttcccaacaaccctccttccccatccttcccccacccttacctacacccaaagtggagcacactgcagtcagattctccaggagggagatccaagcctcctcccaggggtggagtccactctgggcttactttgaggcctgttctgtggattggtgagccaagctggcactccttgccctggtcttacccaggctctctgtccccctctcacttcctgtggggccggaatctgtatttatccatccccctttcccttctttatagaagtccctgtcctaaactccctccctagcccaagagagccccagaactggggaagcctgacccatacagaatggggagggcactctaggcaggagagacattaatgagcctggctgcagagtggccctggaaaggcaggccagagtggctgagaggctgggagtaggggagcctgttctctcagcgatagtgnnnnnnnnnnnnnnnnnnnnnnnnnnnnnnnnnnnnnnnnnnnnnnnnnnnnntagatagggtacattttaggagggttttcctccatttcttttttctaactgcctggattcaccattggattttgtaaatggaaaaactgaaatgaacaatggctatactggatggttctcttctgaa

SEQ ID NO: 365429 - DNA, 394 bp, Homo Sapiens
  misc_feature (369)..(369): n is a, c, g, or t
  misc_feature (382)..(382): n is a, c, g, or t
caatgcattgtttattgagtactaactagctttgggcccaggctctgggttagcagcatgcgtgaaacaatcagaaacaatcatgagcgcctgcccacatggggcatacagtctggcagggcaagactgtagacacagaaataaatatccgattataagctgtgattagaggcatgatggaaaagagcaaggcttcctgagagaaacagggcgagcacaggaaaacctctctgagacagtgacatgaacttgaaacttgaagggtaaacaggagtgggcaagacaaaaggggaaagaaggaatcttccaggcagagagaaagagaaaaagacccagggcacggttattagaagccgaggacattttganggaaagaaaaggngccgcccggggg

SEQ ID NO: 365430 - DNA, 954 bp, Homo Sapiens
gccaggtgcgggcctgcgcctccctcggctcctggcgcgggcctcggggagaggggtggaagatgtctatggatgtgacattcctggggacgggtgcagcatacccatctccaacccggggtgcctctgctgtggtccttcggtgtgaaggcgagtgctggctctttgactgtggggagggaacacagacacagcttatgaaaagccaacttaaagcagaattccctcatttgggttttcagtcgtggaaaagaaacgcccaggtaaactcaatgcacagaaacttaaagaccttggtgttccaccaggtcctgcctatgggaagctgaaaaatggaatttctgttgttctggaaaatggggttacaatttctccccaagatgtcttaaaaaagcctattgttggaagaaaaatctgcatattgggtgactgctctggggttgtgggtgatggaggagtaaaactgtgctttgaagcagacctgttgatccacgaagcaaccctggatgatgcccagatggacaaagcaaaggagcatggccacagcacaccacagatggcagcaacatttgcaaagttgtgccgtgcaaagaggctggttctgactcacttcagtcagaggtacaaaccagttgccttggccagagaaggagaaacagatggcattgcagaactaaaaaagcaagctgaatcagtgttagatctccaagaagtgactctagcagaagattttatggtgataagcattccaatcaagaaatgaaaccagtgttcctgagtgcacactgacatgtctgtgaatatgttactgaacctatagtccagtttttttatttcttgttttagtctgaaattatttgggccctaataatcctaaaaagaatggagctgcattgatgaattggctcagtatttaaagggagcaaactttttgataataaatcttttttagag

SEQ ID NO: 365431 - DNA, 899 bp, Homo Sapiens
  misc_feature (339)..(339): n is a, c, g, or t
gtcagaggtgcgaggggaggtagggcgggcagggccggggtgtgagaccaggtgtcacgactgttgtgtctccctcacagtgccctagagtccatccagagtgcccgtgctgcccaggccccgcactggaagagcctccagcagcaagatgtgaccgctgtgccgatgagccccagcagccactccccagaggggaggcctccacctctgctgcctgggggtccagtgtgtaaggcagctgcatctgcaccgagctccctcctggaccagccgtgcctctgccccgcaccctctgtccgcaccgctgttgcccctgaccaacgccggattatcacattnggttctgccccctgaacgtcatccaacaggaaagcgtcagccctgaagggaggagacagaagcctggccaggtgaacagtggtatagcagccactccagcctctgctgcagcagccaccctggatgtggctgttcggagaggcctgtcccacggagcccagaggtaagcctcacttggccatcctgagcctctgacggcaggacctgtgggcacccctatcctggctggccaagcacagagagttctgggaatggactctggacaacatgaacacctgtcctgaggccagctcttcttccaggctgctgtgcgtggccctggtgacagctggaccgggctccagacctcgcccatgacgggagggagtctgtgggcctgaacatcaggggcaagggaggcggctgccctatccatgttccatgtctccaaggccactgccaggtgatgacgggggttccctgagctgcatcttgggcttggtgctggccctgggcctatggcttccaggcctgacctggttgctggtgggcctgggcctggccatgggctgaagggcccc

SEQ ID NO: 365432 - DNA, 1061 bp, Homo Sapiens
agcggatgggaccgctgtgccgatgagccccagcagccactccccagaggggaggcctccacctctgctgcctgggggtccagtgtgtaacggcagctgcatctgcaccgagctccctcctggcaccagccgatgcctctgccccgtcaccctctgtccgcaccgctgttgccctgacaacgccggatatcacattggttctgccccctgacgtcatccaacaggaagcgtcaaccctgagggtaggtagacagaaacctggggccaggcccacacgagtccctggcccgggacggcagcccctcactgcacttgggaagctcctgtacctcttagatgggatgctggatgggcaggtgaacagtggtatagcaagccactccagcctctgctgcagcagccaccctggatgtggctgttcggagaggcctgtcccacggagcccagaggctgctgtgcgtggccctgggacagctggaccggcctccagacctcgcccatgacgggaggagtctgtggctgaacatcaggggcaaggaggcggctgccctatccatgttccatgtctccacgccactgccagtgatgaccggtggtttcctgagctgcatcttgggcttggtgctgcccctggcctatggcttccagcctgacctggtgctggtggcgctggggccttggccatggcctgcagggcccccacgctgcactcctggctgcaatgcttcgggggctggcagggggccgagtcctggccctcctggaggagaactccacaccccagctagcagggatcctggcccgggtgctgaatggagaggcacctcctagcctaggcccttcctctgtggcctccccagaggacgtccaggccctgatgtacctgagagggcagctggagcctcagtggaagatgttgcagtgccatcctcacctggtggcttgaaatcggccaaggtgggagcatttacaccgcagaaatgacaccgcacgccagcgccccgcggccgcgatccggaccccaagcccacggctccctcgactctggggcacggaacccc

SEQ ID NO: 365433 - DNA, 1245 bp, Homo Sapiens
  misc_feature (1195)..(1195): n is a, c, g, or t
gatttagctagtaatttaatgaaattcatcagttgattgtaagaagtccgcttacatacaccagtcattctctcagcaaatactcatggaaaataaaaacaatgttctccccataaataaatcctacttctttcttgcaactcaaggcgggctgtcagatcggttgcataatagatattggggagctcactggccgggagccttaagaggagagcagctatctcagtctttctcacttaatcttggcttcacgtcagaagctgtgcagcagtgcagtagaatagggcctggcaaaacctttgctagcaaagcgccttttgtgccgggctgtggctcgctatcgacatctcgtccgttaccaaggctgggtttcctactgatttccctcctcctctgctttcacaggctcgcgcggccggacattgtgggtgtgcgtgctggatttctcccggatgctctccgactaacatggatgtcccaccattccttgcagtggaaggttgttccttggcgcagtgagtgaagaacatgcagcgattgctaatgggtttgggaagcggagactccttcctctctctatgaccatgccgtgatcgtgtctgcggtcaccactcgacgcatcctcatttctacccgaacccaggagccgaacgctagatcggggaagtgggtgccgtgcgtgtgggcacagaaacaccatgaagattattttcccgattctaagtaatccagtcttcaggcgcaccgttaaactcctgctctgtttactgtggattggatattctcaaggaaccacacatgtattaagatttggtggtatttttgaatatgtggaatctggcccaatgggagctgaggaacttgcattcagatttgctgtgaacacaattaacagaaacagaacattgctacccaatactacccttacctatgatacccagaagataaacctttatgatagttttgaagcatccaagaaagcctgtgatcagctgtctcttggggtggctgccatcttcgggccttcacacagctcatcagcaaacgcagtgcagtccatctgcaattgctctgggaattccccacatacagaccccgctggaagcacccaggtttcagaccacaaagattcccttctatgtcaggcctctacccagacttctcttcactcagccgtgccatttttaaacccggntgcaggttttttcaagtgggaaaacccctccccggttggggaaatgaaga

SEQ ID NO: 365434 - DNA, 427 bp, Homo Sapiens
  misc_feature (391)..(391): n is a, c, g, or t
  misc_feature (405)..(405): n is a, c, g, or t
ttaatatccatggcacacaactaggccaagaaaaataccacaaggtcaagtcgaaaacacgacatgttaaaacacttccttgaccctggagaacgaggatggtggtgaacagcccctcagcgacgtctgatcttggccagtagctgctgtgaccgagtcaccaagatgaccacagcaggacccttcacatgtggcctcaagctcggccaggtccagcagtcacgtcgtgaaggcagtgtgtgcctctcggccggcacaggaggggcccatcgagttcatggatgggatttcactgcatcccaggaaaaggctgggctgggcttcttgaggcaggccctgggcagatgttaatggagcttggttgaggatgacacagtcctcttaacaaccntgccttcagtgtcnccattccctccattttccctgg

SEQ ID NO: 365435 - DNA, 701 bp, Homo Sapiens
  misc_feature (14)..(14): n is a, c, g, or t
  misc_feature (49)..(153): n is a, c, g, or t
gctaggtacgaggntgggtggctgaatcggcacgaggctgtgtctaatnnnnnnnnnnnnnnnnnnnnnnnnnnnnnnnnnnnnnnnnnnnnnnnnnnnnnnnnnnnnnnnnnnnnnnnnnnnnnnnnnnnnnnnnnnnnnnnnnnnnnnnnntaatgggaactggccacgtgcctctaagggttggtgccaggctgtcattcagaacacagccactgtgaaagtgctttggcaactgtgagcagtcatggtgactgaggacagagacccagagtgacccctgccccacccctgtgcatttccacggactggagagatgttcccgtctggtttctgagcagtgggacctctcattgaacagggctttctctccctccaccccttgcagcctgggctgtgtatgcctgcggatgcagtgtcccacacaaggacacttcctctaggatgccatcctgagcctcctgtagcagcagtgtcattctgcacttccacattctgtctgtcttccccgcctgccaactaggagttcacgtggggcttgtttaaacagtaccattgcttgtgtcccacctggaccagttcagtcagccccagtggtggcatgttttaaagctccccaggtgattataacttcctagtgtgcggccaggctgtgggccctgtgcttgggcttttttgagatgggtgttgcctgttgccag

SEQ ID NO: 365436 - DNA, 733 bp, Homo Sapiens
tttttttaataatcacggaacattggccatttattgacagactgatctgtgctaggtgcttgacttacatcacgtagaattctgacaacagcccttcaaggtacatcatactgtccccgttttacagatggtggggggggccctgtccagggtcacagctgtctgacatcaagcccatgctcctttcacgtcccaggtgaagtctctcctcagaacatcctagctcttgtcctccctttgcccggatagataagttgacagaaagctgtgatattgacctccacctggcctgagcgtgtaccgatggggttggtggcctcacagatgtaggtccctgccaggctgtagttgatgggtcccttgaagaagagggttctgttctgggcctccacacccttggggagagagccatttagcgtggtccagtggtactcagtggctggggggttagcatcagctttgcaggtgagcttcacgtccatccgctgcaggtaccagttgccatcaaacccctcaatggttacctcaggctcatactgcacgttgagagtgaggctttccttgaagcggtccatgtggtagttgacgatgcaggccaaggactgctggtgggcttccctgctgggcaccagcggtagcaggtgattacccgcacttggcccattggggttcggaactcctgtacttttgcttaacctttaaccaatttccaagaatccacacttggaggctt

SEQ ID NO: 365437 - DNA, 477 bp, Homo Sapiens
taattgttagatgttaggggccacaatgctaactgtgctttgaacagaaacacagatttctgccacaatttatatctcaaatgcatagttccctataatttagactaaaagattataaatgacttggctttcaaatatacatggtgacattaagctatgtgacagacacaaactatactccaattgtgaagtcagagtgaccatgacagtctaaaaaggagccaatccagagacctaaaagtaacatttttaacaaaaaaattcaattaaatttgcactttacttttatagattctgggtccattttttggagaaacaaaacccagcaattttaccttgatgttttttaactaaaatccaatcttcattcctgcttttatttagagggtgggaaatcaagtttatctgtggtaaaatctacctctgtgtagttgtgaaaaggatgcaggtatcaatttttttgttgcgattgtttga

SEQ ID NO: 365438 - DNA, 869 bp, Homo Sapiens
  misc_feature (787)..(811): n is a, c, g, or t
ggagcagatatgattttatatttataatgtgcatcaacatgtgaaagcaatctaggtcactagcacagaggaagttgccaggaaggtggcttcagcacctccaggttggttctgggtgtcctgctgtgaggggtagaacgggaggctgctgaagtgagtagctgagcagctggagccatccccagactttcctggagcatctgccctttgctcctagcagcctccccaggaagggactgcagaggcgggcaagccctctctatgtgtttttatccccaccttccccggaatctggggagggcttttgtttttacgttttcaagttcagcattgtattcggacagaagctgtgactgaagactcagtgccaaggaaaggggcttcttgtgtgtccctcgggtttggggctcttctcagagagcagcactccatatcccttactgtcaccttcactccccacacagctcatgagatgtgtgacccctgtttgagttttggtatttggtagtggagggtggggggatgggggccagcagctgtcatcctcctgggaagccgagcagtgtccctggtgggtaacaccctcaagtctctttgccagtgaggccccaccacatcggtgtgagttaggtttctcatctggagctgtttctcaggcattcttcccaaccctcttccttttccccttcggtgtgcctcagtggtctccttcatagagtgagagggcttgagaccctccctcaaccggactaattaaagaaagacacttgtgttcccaagtggtggnnnnnnnnnnnnnnnnnnnnnnnnngtatgggaaattgtggataaagtgaaaagaattgtaaataaatggtgtatttcctcct

SEQ ID NO: 365439 - DNA, 464 bp, Homo Sapiens
  misc_feature (333)..(333): n is a, c, g, or t
  misc_feature (381)..(381): n is a, c, g, or t
tgttgttgttggtgtttattgattcacctataaaccacatatcaggctatctcttaagaatacaacagactccaatcccattggaagtgagttcgcagcctgctctctgggctctctccctctttccggccttttctctttcacacggaagagcttacctataaaaggctcttgataagctctcttgacccccaagtttcctgggcagggttatttggatagtgctattactccaactttcttcttcctctttctgtcataaatcaaagccacctgacactttgcgcccgacttttaaaacaaacaggtctcctttctttcttcagccagggncacaagaactgcctatgggctaatcttgagagcatgtttttcttgggnctgaggcctggggagaaagagcagagtggatatctcaaagggcaactagagcccgagattgtcacttgaaaatgcgccagcct

SEQ ID NO: 365440 - DNA, 1480 bp, Homo Sapiens
  misc_feature (503)..(512): n is a, c, g, or t
caagcttcccagtgggccggctcacgcggatcagcgttccacacgggagagaagccctttgaatgcactgtgtgtgggaaagttttcagttcaaaatcttctgttattcaacatcaacggcgttacgccaaacagggaatagactgagttgggcaaaagcttgggtaggacaagaacttccatacaaatttgagatagatctcgcctgtcttaaagctgccatttgctcattctacccactctggctgccgttgtcctgtcctgcttctgcgccagagtgtttaataagcactcccttcctgctgtgttatagaactgtaggggaggccatggaaatgactctaaagatacaaaattttgaagaggtttgtcagacaataggatagatgttaggaggagacacacctcttgtctgagaacctaggccccaggtatcactgcactttaagaaactggaggctgcaacaggagggaaaggcagaatgatatcacagcagtactannnnnnnnnncagaacatttgttttgatggctgttagtccccctctcttggagcattttggggcactaatcttgttctcttgtgtcccagcttttagacctcttacttccactgctagtagctagcacttactgagcacctgcaatgaggtaaagactcagctaagggttttacaggaagtagattaattgatcctgtcaccaaccatatgaagtaggcactgttaccatctgcatctccagatgagcaccctggaggtttaaagagattaaatcacttgcccaaggtgaaccagctggtaaaaggtgattgccaggtcttgaagacaggtcccaccttcaaaaatctattctcctttaccattatggctcgatggtttggtttgttttataattttatgtatatgtattatccctcccaactagaattggaaagcaccttgggagggttgtgactttacagggtccttttgtaattctccacccaggtgcccttggctaaataggcggcttcaaataaaatattttataatgaggtggaaacacatcctacatacccacccccccaagccgagccgccacccctatatttcgccaccccgctcccttatgtatttcgcctctcagctgttctaacaaacatctcatataggccccggcttggggtccaccctccttcgttaccccgtagtaatctccgtgcggtcccggtgtgcggtgttcccctctcttgggtcgccgggcgtctcggtttatagctctttgcccccccgggggtgtcccgggcgctaatcgggagtagacccggtcgctcctgcggaatgacacaggcccaccggacgtccctcactcgaccttcttttcgcgggcgacgacccccgacaagtgaccctaacggggggggcgcggccataccttccatttagcgagagaacacatattacccctcgcgaggggcattttgtatttacggcttctt

SEQ ID NO: 365441 - DNA, 505 bp, Homo Sapiens
cgggtatacccttttctttagcactgctatcctttttgtcttcagcacaaataagatgttcaagtgagccagaagcaagaagagccattttagtcttcatagctattggctaagagagataatgagctgatggtctattttaacccttgaaagtaaaaatgtatattttttcactacaagtacattgaacagtaaaaagtgtaacagcaaagtatatatttgatgccttctgtcttttcatgataatgtgcttaacaagttgtgttaatattttactcagccagagtctcattcatttgctaagcattgggaacattatgtatattgaccttaaacataggtgtcctatatttggattgtgacttgtagactcaagctaaccttactgcctctttttcacacttgttgaaaggtctgtgaagaacatagttaaagatctccaactttggaaaatatacatgatgtgaaactggggtgctatgttaaaaataaatgtatgataact

SEQ ID NO: 365442 - DNA, 842 bp, Homo Sapiens
ctactcatggtcaacgggcaggtggagagcgcccagtttccagagtatgatgacctctactgcaagtactgctttgtgtacggccaggactgggcccccacagcgggtctggaggaggggatctcacagatcacatccaagagccaagatgtgcggcaagcactggtgtggaacttccccattgatgtcacctttaaaagcaccaacccctacggctggccacagatcgtgctcagcgtgtatggaccagatgtgttcgggaacgatgtggttcgaggctatggggccgtgcacgtgcccttctcacctggccggcacaaaaggaccatccccatgtttgtcccagaatctacgtctaaactgcagaagttttacaagatctgcaagctgctccacccactgaggacaaatagaaacaggtcccctgggagtcgctgagtcacggggctcccttcagccctgttccagcagcagaaggccgggcgattttaccctgtgccctgtgaaaaatctttgtgtctgagggagcagaggaaaaactcttgtcagatgggaaaaatgctcatgacataatgtgacattaaaaggtaagaaacaagaggatatagcagtatgagtcagacaccttggaacagtaatcatgataaatgcctttacatgtgggagtctctggccggagctgacatttgcgcagaggcttagtgtggagggaagagccggggaagaacatcaggcacagggaacagtgcctgccaggctgaggagagcgtgagcttagcatgctagagaagccaggacggtggtgtggccaggacggcagtgtggccagtaagtggtaagcc

SEQ ID NO: 365443 - DNA, 1169 bp, Homo Sapiens
gctgggtggcgaattcggcacgaggcttcgcgaaggtgtcgctgccaagaaacgtgtcctgcgcgctacgccgtctgtttctagggcaacgccggcgtctcttagcaaccgcgcgcggcctaggtgggtccccccggcacccccagacctgccatggcgaccgcgagtcctagcgtctttctactcatggtcaacgggcaggtggagagcgcccagtttccagagtatgatgacctctactgcaagtactgctttgtgtacggccaggactgggcccccacagcgggtctggaggaggggatctcacagatcacatccaagagccaagatgtgcggcaagcactggtgtggaacttccccattgatgtcacctttaaaagcaccaacccctacggctggccacagatcgtgctcagcgtgtatggaccagatgtgttcgggaacgatgtggttcgaggctatggggccgtgcacgtgcccttctcacctggccggcacaaaaggaccatccccatgtttgtcccagaatctacgtctaaactgcagaagtttacaagctggttcatggggcggcggcccgagtacacagaccccaaggtggtggctcagggtgaaggccgggaagtgacccgtgtccgttctcagggctttgtcaccctcctcttcaacgtggtgaccaaggacatgaggaaactgggctatgacactgggccttctaaccaggggggggtggtttgggggcccaccccacccccagagcttccccccattgaagggttccccgggctgcacagtctttgataaatgaaggggctcccttttcctaaaagcccgccggctgcccatcgggccctggaggggaagcccgggggggccacaaactggggggaccccaaaaaacaagtttggtcacgaataacagccctcccttttttttgaagcgcggatcccccgccccccgcattaggagcctcctcttcctatttctggggccctcccctcattgttgcccgccaaaacaacgggcaagaaaattggcccttccgccactaactggcgtgtcggaaacaccctttgctgggagaataaggtgtgccccctacatcgggtagccacgaaagaggcgagggtcatatatgcccgcgcaaaaagaatgggcctcagctcgc

SEQ ID NO: 365444 - DNA, 415 bp, Homo Sapiens
ccaaacctatgtcagtatgttttgacttcttgcttgattgctaggttgcatagaggacaaacatggaaattaatgaagtaccttaatatctggcttcagatcttagacaggatcagagggccagctcaaatttgcaaggaggggaggtagatcccaccattttatgggtgaatggcaaaatcaaacagaaattatgtgggatgggagatactgatgcagccatctttggaaacattctacttagctaattttatgctaggctttaggtcaagaaggagagagagagctgacatgctgtggtacacacttatagtcccagcgacttggagagctgaggcggggggattgcttgatcccaggagtttgaggtagtgtgcgatgatcgttcttgtgaatagccactagccactgaact

SEQ ID NO: 365445 - DNA, 1242 bp, Homo Sapiens
gcggccgccagtcctgggtctcccggctcaggtagtgccatggaagctgcgggcatggcggacagctgtcctcggtctggaggcgccatcctggctttcaaatctgctccagaggttatctggggaggggctgctccctcacagagggagcctctaagcccaccaggcgggcactttcagcccaaagcctccgggccacctcctcatcctcagcctcgggggccggggccttctgtttgagtccatcgaagtactttccggaaacatccgccagttcctccgccacggccaggtatgtgctgggctgggcggccagctcggggctcttgaccagcagccagaagatgggcccgagtgtggtgctggagaaggtggagccatggatgcccgtgtgtctgcccagctatgtcctggccacgccggggtgcagggcgttgacagtcacaccagagccttgcagccgccggctcagctccttggtgaagaggacgatggcgagcttgctctggcagtaggcggctttggtgttatacttcctcgtctgccagttcaagtcgtcaaaagtctatgtgcccagcaacatgggccagggacgagaggttgatgatccgcgaaagggctgaggctttcagcttgtccagcagcaagtttgtcaagagaaagtgacccaagtggttaaacgccaaactgcatctcgaagccgtcctcggtggtccagtgggggcaccgcatcacacccgcgttgttgattagaatgtccactcgctcctcctcttcaatgatctttgctgcaaactctcggatagacttgagggaagccaagtccaggtgccgggcgttgacatggtgattgagggtctccccgcggatgtcctttgctgccgcctcacacttctccatgtctcggcaggccaggatgatgttgcctcctctcctggccagttccaaggcggtctgcttcccgatgcctgtgttggcgcccgtcacgatgaccgtcttcccagggatggtggccttgctggggcaagccccaccggtgacatagtccttgagcagcacggcggcgcctgctaccgtgcccagcgccgacagcggcagcaggtagcggctcatgcggggccggggacaggcgtcaggcgtcaggcgtcaggcgtccggggtcggcgcggagcttgctgcacaccagccgcctgggtagctccgaggaagagcgcgcgacgcagccacaggcgagcggaggcg

SEQ ID NO: 365446 - DNA, 1100 bp, Homo Sapiens
  misc_feature (1045)..(1045): n is a, c, g, or t
gggggcttccgtcctggtagccaaggctaattctccctcgagttcttgggagatgggcatttggcgagaaggctggcgttagtgaagcgcgcccggcgtcacggaaagaagcacttgtaaggaaatatagcatccattgtgaaagtggaaaagtaaagataattcatcatgcctgctgtggcttcagttcctaaagaactctacctcagttcttcactaaaagaccttaataagaagacagaagttaaaccagagaaaataagcactaagagttatgtgcacagtgccctgaagatctttaagacagcagaagaatgcagattacatcgtgatgaggaaagggcctatgtactatatatgaaatacgtgactgtttataatcttatcaaaaaaagacctgatttcaagcaacagcaggattattttcccattccattacttggacccgcgaaaacatcaaaaaaagcctgttctgaagaaagcttgaaaagacctctcctgaaacagccttttaatttataaagaccaatggttgtcaaaaagaaatggaaaaaatggttgagaacccaaaaaaggaaaatggagccgaatcccccgcggcccgaggggaacttttcttccccacgatagggtatggaaccgggaaatgataagaaacaatctacaccctttcggagtatataataaatgtggcgactgaccctcccgaaagaaaaagagttaagcggatattttatcaagggaaggttccccatgcgctgcgtatgtaataaagatataacacagcgaagaaggatttccctcgttaaagaaaaatagcccgttctcgcgtgttcgtatacgtcgataggaccacctatcgctattacatcctgagatttatttttacagagtcgcacaaccctttcgcgctcaccaaaatgagaaattccctccctaagtgagcacaccacctggtagatctgataaataagacaggcgggggacaaaaactggctaggataaaaaatatgtgtgagtggagcatctgcatgttctagtgttnttattctaagtcttattccatctctctacttgccccacgtagctcgtaatttgaa

SEQ ID NO: 365447 - DNA, 587 bp, Homo Sapiens
cagatccacctcgtttggctccttcagtcgttcgccgtacaactttcctttccatagtgcgttactgtggcggacagagcacctgtgagaggtgcaggcgatgccgagcttaggggggtatggcctgtgccccagcactcgccggttgctggagggacgcagcgctgaggtcaccacagcctttagactgtctgcagccctcccaggttcgcgccggggcggaggttatgaggattcttgtattgatccggtcctcaaccctatttcccaagatccaatctatagtagagggtgtgaggtgtttttaaacgtgacatttttcaaggtaacaataatatcccaaaagctgaaacctaaacttaaaaactgtgttaagattagggactgtaacctaaatttagccttggctgagccatccttctttttgtaaataatcgtgaggaatgtgaagctggaggccttctatctcttgattagatcaaagaaactcgaaggaagaagctcaattgtaaagcataaaaatccacaatattgtaatgtgtagacatcttcattgtattaaaatgggaaataaaacttcataaggc

SEQ ID NO: 365448 - DNA, 531 bp, Homo Sapiens
aggacacaatcttactcacaattgtatctccaacatttgggcataatgcctaatacgtaagtattttatgaattaattaaacgagaacacaagcctaaattaaggccaatggcaatggagaagaagaaaccaacttgagaaatatttaaaggtcattgtcaatggaacttagtgactttaatggttaattttatctatcaacttggctaggcgatgctacccatgttactcagtttttggtcaaacactagtctagttgttgctatgaattgtatttgttagatgtgattaacatttaaatcagcagactttgattaaagtacattaccctctataatgagggtgggccgcatccggtcagttcaaattaaaacgagacccttaagaagaagcaattcagcctccagactgcagcgtcaaatctccctgggtctccaggctgtttgtctgccctgcagatttcagacttgccagctcccagaataatgtgagccaattccttaaaataaatctctttctgcatatacacat

SEQ ID NO: 365449 - DNA, 826 bp, Homo Sapiens
aggcccttctttatactgaccctgtttacattttgcccactatagtgttcccatcatgttatatggggctctttaacaatatactacgcacgatttaaatgctcttgttactggtaaattaccttgaatctcaatcgggcaagatgccagagaaatggactaaacaattaatgtgccccccattccttctttgggatctcaagaatggtggaaggacccttgtgaaggacagcaaggctagctctctccagctctcactcgtcactcctgatctgaggcccgggtctagttgtccagcaccaagttctggctgtcaatggggtagaaataaaccaacgaacttataattgtgacaccagatgcttcaggatcctgctgtctgggttagctgaagagtaatagacagaacttggaaaatactgcagacatttccgaagagtttataaagcacagtgaattcctggtcaatctctccactgaggcaatttggaatcaataagcaattgataatagtttggagtaagggacttcatatacctgattcctctagaaggctgtctaacataccacatgattacatgaactgtatggtatccatctatctctgttctattgaatgccttgttaacagccaacactgaaaacactgtgagaatttgttttcaggtctgacacctttcagtctctttttatagcaagaaatcaatatcctttttataaaaattcatgtctgtatttcaggagcaaactcttcaggctcctttttttataaactggtgatttttcttttgtctaaaaaacacatgaagaaaatttaccaaaaaaa

SEQ ID NO: 365450 - DNA, 391 bp, Homo Sapiens
  misc_feature (18)..(18): n is a, c, g, or t
  misc_feature (23)..(23): n is a, c, g, or t
ggaacgtgggtgggtccnagggntgtgtggggtcggggtgggctctaggagttagcccttatcccaactgacccgaggggagccgccaggcctgcaagttggccagtgcccaggagccatcctggcgtggggccaggagcttgtccaaaaccacaggcccacagcaccccctgccggcgggctccgtggggccctggagctgatgacgggggaggcccgtccgcctggcccaccaacccgcccaccttgactgcccccagaagtgtgtcttgagacctcctgggcgtgcttagaggggtgagttgtgtttggatttttagttattttctcttcagttttattagacttcttttttataaagcaataaatccactttcctccgggtaaaaaa

SEQ ID NO: 365451 - DNA, 474 bp, Homo Sapiens
accacctctgtgctgttcactgttgggtccctgggaacacaggcgagctcaatacctgtttggtgaaggaaggctcaaaggaaggagtggttgaagagggttaatcgtcatctctctggctttaggtgccctgcagccttggcaagggcattccacttcctgacctgtgttcattcaagcagccaccctgggaggtgcgctgggtggggacagttcttcctgttaagaacgcaagtggtggagggggcctttgtcaaggtcagagacaagcaccctgtgagccagaggccaaccagtccccaaggtcagctgcctgccaggccattctaaaagcaccagttcttccaggaagctgtccccagccttcccaaccgggaattaacctctgggcctcagttttctcatctgtgaaatggagatgtgaaaagtgagcgagccttgatgacagtcataataaagatggttaatatcgac

SEQ ID NO: 365452 - DNA, 414 bp, Homo Sapiens
  misc_feature (16)..(16): n is a, c, g, or t
  misc_feature (29)..(29): n is a, c, g, or t
  misc_feature (43)..(43): n is a, c, g, or t
tgctaagccctgaaantccataaccaacncctggggcactaanaacaaggactggtggcccaggcccagaggagcagagctcagggtgtgcacagaactcagaagtcagaaccactgaacagtgacagaacctttcagcccattggcaattgtaggccccaggcagccagaggccctggtcaaatctgaggtctgcagagatggagctgtcattctgtgtttcctttggcagtcccaacaccagcctcgttgcaccctcctcttagcttccctgggttctccagccctaagggtggtagcagcttcctgcaagtatccaactctgagattctgcaacatccacttttgtctctgagccttgcaaaacctgcacaatcagtccctaacttatatcccctctgtttgaaataaaaa

SEQ ID NO: 365453 - DNA, 821 bp, Homo Sapiens
aaagcaacccccaacggaacatccccccaaccaaaggaacaaactcccctgtgggccttgccaaatggtttggctcagatgtgctacagcaacccctgccctccatgcccgcccaaagttatcagtgtagatgaattggaataccgacagtgagcagggcaggcagactcaactaagcccggacctgtggtggcacactgggcaggaccctgcttcatctcgggttggtttatgggcttttactttggagcactctgtgtgaagctgtttggtggaacccatgcatctggtgtggtccgcattatgatggaaggatcttaaccagtcgagtggagtgtacattgtctgaatacaggatgcacaatgttgtcaatcctggaaatggtctttcttttttgtaagatatgtgaatgaagtgttggtgtcctcaccaagaggtggcacctaagggttctgaggaaataaatgtatagacccttatgtacagacctgtgtataaacaacttttgtatatacatataggatagcttttttgaactatacagctgtacataaaagtagctgatattagttaggcctgtgtcaacagtttggatttttttcacttgtacatttgggattttcttttggttgattaaaattgcatatgctaagtgtgtgaaatcccctcaccccccccttctaccataataccctgtccgcccgcctccgccccttaaaaaagctttctaaaaccatttcttttgggcgcgcgggccccccataggccaagcggaacatgggcccaaacctgttttcctcaaggaataacccggggcccg

SEQ ID NO: 365454 - DNA, 468 bp, Homo Sapiens
  misc_feature (69)..(151): n is a, c, g, or t
gtaagtactgtaatagaataacaaagtaatatcctatcacggggcagtcacgggggcagtgagagacannnnnnnnnnnnnnnnnnnnnnnnnnnnnnnnnnnnnnnnnnnnnnnnnnnnnnnnnnnnnnnnnnnnnnnnnnnnnnnnnnncattatctccaattcacagaaaagcaaacagtatggagtgtttaagcgtcctgtccgagatggcatagctagtggagctgaaatttgaacccaagtaatccaggtccagaatgccccggatgcagaaatgaccacacagattctaccaatgaactaacctgataaggttggaggtcatactcataacccctcacacaggtccacacagacacaggcaagcacacccatgtctattcagatacacaccaattcctgtctatgacgagcgctcagaaaatcctccacaacaccacaccaggaatgatgtgcattttgag

SEQ ID NO: 365455 - DNA, 1305 bp, Homo Sapiens
cggctgcagattctgtttgtcatctgctggaaatgtccacgatggatttaattttaaaaaacttttttctttcccaatttagggaatacccactctggtgtacagacacgactggaactatgaacatctctttatggacatcaagaacaaaatggcacaggtgatcccgataaacctgatcctgtgcacggggctttctgccttctcagtgtgtttccctccgtgttaggcctactccagccttgccccgggtgtttgctgtgagcccacagtttctgcggcctcccttacagagagcaagcaagacagcaaatcagcaagttttcttgtagagtaaaagcagattgacatcttgtgggtttgattcttaggaatgatgttgatgcatggccatgcctgctgaagcgggaagtccatggaaccgatttgttcctgctctccgcatgcgggtactgataggtagacctgtgtgtctccatggcctccaggaactgcctgcacaccgtgcgcccaagtgtcagctgttagagagttggccccccgcatgtggcttgggcagtgaaggggctcggctctcttaccaggtggtgagatgccagaaacccagcccacagacatccctctcctgcttttcatttcccaggactccctccccagctcggtcattagtgccatcagtggacagctgcagtcctacagcgatgcctgtgaagtgctgtctgtcgtagaagtcactctggggtttctgagcacagctggtggggatccaaaacatgcagctgaatgtgtatactcaagacatcctgcaaatgggtgatcagacgattcacgtgttaaaggccttaaacagatgccagttaaaacacaccattgccctctggcagttcctgtctgctcataagtctgaacagctgctgcggctgcacaaagagccatttggggaaatcagttcaaggtacaaagcggatctgagcccggaaaatgctaagctcctcagcacattcctaaatcagactggcctagacgccttcctgctagagctgcacgaaatgataatcttgaaactaaagaacccccaaacccaaaccgaggagcgcttccgccctcagtggagcctgagagacactctcgtaagttacatgcaaactaaagaaagtgaaattcttcctgaaatgggcatcttcagttcccagaagagatactgcttcgccagctgtgttttcagtgtgggaaaacagctgctgtgctgaaaatgggattcgagaaatgaggtaggattatttccccaggtatcttttgggatga

SEQ ID NO: 365456 - DNA, 454 bp, Homo Sapiens
  misc_feature (393)..(393): n is a, c, g, or t
agcccgctgagcctcaagggaatacccactctggtgtacagacacgactggaactatgaacatctctttatggacatcaagaacaaaatggcacaggactccctccccagctcggtcattagtgccatcagtggacagctgcagtcctacagcgatgcctgtgaagtgctgtctgtcgtagaagtcactctggggtttctgagcacagctggtggggatccaaacatgcagctgaatgtgtatactcaagacatcctgcaaatgggtgatcagacgattcacgtgttaaaggccttaaacagatgccagttaaaacacaccattgccctctggcagttcctgtctgctcataagtctgaacagctgctgcggctgcacagagagccatttggngaagtgaaattgatactgttacccattcacagatgttgggggttctgggatgctcatagaa

SEQ ID NO: 365457 - DNA, 736 bp, Homo Sapiens
  misc_feature (12)..(12): n is a, c, g, or t
  misc_feature (53)..(53): n is a, c, g, or t
  misc_feature (75)..(75): n is a, c, g, or t
taaaaaactagnatatattcaaatgtgctcactgcgtttgctttaaataattntgtggtgcttctttttagcatntgatgaatacagaaatatcagccaaaaaggtccttgtggtcagcataaaaggagaattatctgggcattttgaagacttactgttggccatagttaattgtgtgaggaacacgccggcctttttagccgaaagactgcatcgagccttgaagggtattggaactgatgagtttactctgaaccgaataatggtgtccagatcagaaattgaccttttggacattcgaacagagttcaagaagcattatggctattccctatattcagcaattaaatcggatacttctggagactatgaaatcacactcttaaaaatctgtggtggagatgactgaaccaagaagataatctccaaaggtccacgatgggctttcccaacagctccaccttacttcttctcatactatttaagagaacaagcaaatataaacagcaacttgtgttccgaacaggaattttcattgttctataacaacaacaacaaaagcgattattattttagagcatctcatttataatgtagcagctcataaatgaaattgaaaatggtattaaagatctgcaactactatccaacttatatttctgctttcaaagttaagaatctttatagttctaatccattaaatataaagcaagataataaaaattgttgcttttg

SEQ ID NO: 365458 - DNA, 720 bp, Homo Sapiens
caggagggcgggagtttaggctgcgctgaaccctctcagccccccctccaggagacgttcggagcccaggacatgtcgggaatgaggagatacgaggtggcgctggaggcggaggaggagatctactggggctgtttctactttttcccctggcttcgcatgtggcggagggagcggagctcggcgcaccccggggagcagaagctggagcctctgcgaggcctgatgagctgtctgtccagcggcctgggtcctactccccagcgctcgggtcgtggcttcccccgccgcagccccaccgccgctgcccagccagccagtgcattaaagatttaaaccgaagcccaccgtactgacctcctgactctgccgccgctgtcgccattcgagccgagcgcccctccccacacgggctctgttccgtactgacagggcgtccctccctggaagggtgcccttccacgtcaaagcccctcatcagtgtcaggcctcctgttactatcaatggctgtctcccccaatcccaagccccaaaaacccatactgtgagtcgcctatatgaagagaactaaataatcctgcctgttactcccttcctcggagaggaggacgtttgacagctgtctgaagaatcttctctgcatggaagtatatctaaaaacaattttaagcagaggtgtagggatgcagggctgtaaatgaataaagagggggaaattc

SEQ ID NO: 365459 - DNA, 511 bp, Homo Sapiens
gaatgtgactcaacaaattcatgagtgttctggacaccaacaaggactgcgaggtggactttgtggagtatgtgcgctcacttgcctgcctctgtctctactgccacgagtacttcaaggactgcccctcagagcccccctgctcccagtagcctctgctccagggggtgcgctggctgtcgggggctgggcatgtctcccacaccccctcctaccctctctcctgtacccctttcaatctggacttgcccaggtcttctgcgatcagttaacccattttacctaggaggcccagagatgtgagggctccttcctcaggatgcccagcgaatgaggggtagagccactctggggcccagcctgcctgccgcacccctgtggcctcccttgtggatgggaggaggcgggatctgctctgaggccctcgaggctcagcagagcgtgcaccaatgagaccacgatgggaaagggcctatttaactcctaataaaaaactggcatcaaaaaaaat

SEQ ID NO: 365460 - DNA, 443 bp, Homo Sapiens
tattcgagagagagttcaacaatagcccatatttccgaacataaatctagtgagccgcattaaagtttcttcatgtctggatggaatagtgtcacttgcataggtctgagggtttcattatttgcctgccccagatttggactccgtttttcaggtgaaagaatccttggataactgtttcattttcataggaaacctctttggtttcgggatccaaagtaatatgtaggttcaatattttgtaggttttataatcaaatgtctccctaaagagatgacatagggaagaaaagcctaatgtatcatcttaatggattcagtttttattatgcacaaataactgggcttgtaacctaggaatatgattagagcgtgatgctggcttaaaaaataggactggtgaatcacagtttgtgaataataaactactggttggaaataaa

SEQ ID NO: 365461 - DNA, 460 bp, Homo Sapiens
  misc_feature (440)..(440): n is a, c, g, or t
agttttggtttattattttattttgtttaccataaatgacagagcagagaggaatacaaaatattctaagaacatttttctcatttcaagacaaatgaaagttctttcttccagctggtgggaaaagaagtatcagaagtgatgtgactagagctcttgggggagcttgggaaagggctcccttcactacccccactcccttgagagccctgggagtcaagagggggcagaacaatggaaatctcggaataagaacaattggagggactcacagaacagacaggaccctggcctgactctggtgggtgcagtccctcatccagcttcatcacctgagtggagagtggcaatggctggagaagtctctgggagcaggtgaggaccacttacccaagaccctggcattcagcttggaggatgaacatgctcaaaaatttccngtgtggcaggaggaacacag

SEQ ID NO: 365462 - DNA, 371 bp, Homo Sapiens
catctggtggcttcccccgcccttcccatgtagcctgttctgtcatcatctgtgcgttcctgtgtagagaacatccaggccccggctgcctggtcttgccccacttgagtctggcctggactggatcccagctgttctaggcagggccgggcagagtggggcgcaggcccctgaagggcgagacccagtggctgggctgcccagggctgaggggccgcctcttgagggtacacgcctctggtcacatggccatggagccttgggtacccctgagttaagggaggacatttggccagctggtggctgggaggggagcctggctgccctgctgcttctcctgcctaataaacaggcttctcctgcaaaaaaaa

SEQ ID NO: 365463 - DNA, 893 bp, Homo Sapiens
  misc_feature (603)..(656): n is a, c, g, or t
gccagacagacagcacctgcagacgcaggtggactgcacaattccacctgcccaggacctgaccctggcgtgtgcttggccctcctcctcgcccacggcgcctcagatttcaggaccctcctcctcgcccacggcgcctcagacctcaggaccctgccgtctcacgcctttgtgaaccccaaatatctgagaccagtctcagtttattttgccaaggttaaggatgcacctgtgacagcctcaggaggtcctgacaacaggtgcccgaggtggctggggatacagtttgcctttatacatcttagggagacacaagatcagtatgtgtatggcgtacattggttcagtcagccttccactgaatacacgattgagtctggcccagtgaatccgcatttttatgtaaacagtaagggaacggggcaatcatataagcgtttgtctcaggggagccccagagggatgacttccagttccgtctgtcctttgtccacaaggaatttccctgggcgctaattatgagggaggcgtgtagcttcttatcattgtagctatgttatttagaaataaaacgggaggcaggtttgcctaattcccaggttnnnnnnnnnnnnnnnnnnnnnnnnnnnnnnnnnnnnnnnnnnnnnnnnnnnnnngcgagagagcaagaaccgacacacgcggcagcgcaagccgcgcagcacaccgggccccactggacccacaccaaggaaaccacacgaagaccaccgccaacacggaacacgaacgcgaccaagcaccccacggcacacaccaacagaccaacagcccacaacacaccgcccacacggaggacacaacgacacacaacagcggcggccacgcaagacgacacaaccgcgccaacacac

SEQ ID NO: 365464 - DNA, 1400 bp, Homo Sapiens
  misc_feature (757)..(767): n is a, c, g, or t
  misc_feature (781)..(1344): n is a, c, g, or t
gggagcctagcactctgacctagcagtcaacatgaaggctctcattgttctggggcttgtcctcctttctgttacggtccagggcaaggtctttgaaaggtgtgagttggccagaactctgaaaagattgggaatggatggctacaggggaatcagcctagcaaactggatgtgtttggccaaatgggagagtggttacaacacacgagctacaaactacaatgctggagacagaagcactgattatgggatatttcagatcaatagccgctactggtgtaatgatggcaaaaccccaggagcagttaatgcctgtcatttatcctgcagtgctttgctgcaagataacatcgctgatgctgtagcttgtgcaaagagggttgtccgtgatccacaaggcattagagcatgggtggcatggagaaatcgttgtcaaaacagagatgtccgtcagtatgttcaaggttgtggagtgtaactccagaattttccttcttcagctcattttgtctctctcacattaagggagtaggaattaagtgaaaggtcacactaccattatttccccttcaaacaaataatatttttacagaagcaggagcaaaatatggcctttcttctaagagatataatgttcactaatgtggttattttatattaagcctacaacatttttcagtttgcaaatagaactaatactggtgaaaatttacctaaaaccttggttatcaaatacatctccagtacattccgttcnnnnnnnnnnngagactccatctcnnnnnnnnnnnnnnnnnnnnnnnnnnnnnnnnnnnnnnnnnnnnnnnnnnnnnnnnnnnnnnnnnnnnnnnnnnnnnnnnnnnnnnnnnnnnnnnnnnnnnnnnnnnnnnnnnnnnnnnnnnnnnnnnnnnnnnnnnnnnnnnnnnnnnnnnnnnnnnnnnnnnnnnnnnnnnnnnnnnnnnnnnnnnnnnnnnnnnnnnnnnnnnnnnnnnnnnnnnnnnnnnnnnnnnnnnnnnnnnnnnnnnnnnnnnnnnnnnnnnnnnnnnnnnnnnnnnnnnnnnnnnnnnnnnnnnnnnnnnnnnnnnnnnnnnnnnnnnnnnnnnnnnnnnnnnnnnnnnnnnnnnnnnnnnnnnnnnnnnnnnnnnnnnnnnnnnnnnnnnnnnnnnnnnnnnnnnnnnnnnnnnnnnnnnnnnnnnnnnnnnnnnnnnnnnnnnnnnnnnnnnnnnnnnnnnnnnnnnnnnnnnnnnnnnnnnnnnnnnnnnnnnnnnnnnnnnnnnnnnnnnnnnnnnnnnnnnnnnnnnnnnnnnnnnnnnnnnnnnnnnnnnnnnnnnnnnnnnnnnnnnncccagaaaccagggtaatcccttgggtccccccccttttgcccccttgtaaagcat

SEQ ID NO: 365465 - DNA, 796 bp, Homo Sapiens
gggagcctagcactctgacctagcagtcaacatgaaggctctcattgttctggggcttgtcctcctttctgttacggtccagggcaaggtctttgaaaggtgtgagttggccagaactctgaaaagatggggaatggatggctacaggggaatcagcctagcaaactggatgtgtttggccaaatgggagagtggttacaacacacgagctacaaactacaatgctggagacagaagcactgattatgggatatttcagatcaatagccgctactggtgtaatgatggcaaaaccccaggagcagttaatgcctgtcatttatcctgcagtgctttgctgcaagataacatcgctgatgctgtagcttgtgcaaagagggttgtccgtgatccacaaggccattagagcatgggtggcatggagaaatcgttgtcaaaacagagatgtccgttcagtatgttcaagggttgtgggagtgtaactcccagaaattttcccttcttcagctcatttgtgtctctcctcccatgaaggggagtaggaaattaagtgaaaaggtcacacctaccatttattttcccccttcaaaacaaataaatatttttttacgggaaagccggggggccaaaaataatgggcccttttccttcctaaagaaaaataataaatggttccacctaatggggggggttattttttttataatttaagggccctcaccaaccattttttttcacgcttttgtgccaaaataaggaacccttgactaacttgggcgggaaaaaatttttttct

SEQ ID NO: 365466 - DNA, 803 bp, Homo Sapiens
gggagcctagcactctgacctagcagtcaacatgaaggctctcattgttctggggcttgtcctcctttctgttacggtccagggcaaggtctttgaaaggtgtgagttggccagaactctgaaaagattgggaatggatggctacaggggaatcagcctagcaaactggatgtgtttggccaaatgggagagtggttacaacacacgagctacaaactacaatgctggagacagaagcactgattatgggatatttcagatcaatagccgctactggtgtaatgatggcaaaaccccaggagcagttaatgcctgtcatttatcctgcagtgctttgctgcaagataacatcgctgatgctgtagcttgtgcaaagagggttgtccgtgatccacaaggcattagagcatgggtggcatggagaaatcgttgtcaaaacagagatgtccgtcagtatgttcaaggttgtggagtgtaactccagaattttccttcttcagctcattttgtctctctcacattaagggagtaggaattaagtgaaaggtcacactaccattatttccccttcaaacaaataatatttttacagaagcaggagcaaaaatatggccctttccttctaagaagatataatggttcactaaatgtgggttatttttataattaaagccctacaaacattttttcaagtttggccaaataagaaactaaataccgggtgaaaaaattttaccctaaaaaacccttgggtttaatccaaaaaacaatttccccaggtaaaatttccgcgcttccctttg

SEQ ID NO: 365467 - DNA, 1144 bp, Homo Sapiens
  misc_feature (542)..(550): n is a, c, g, or t
ttaagcctcagcaaagagcataatccaactcagtatgaagagcggatgaggatacagaaggctggaggaaacgtcagggatgggcgtgttttgggcgtgctagaggtgtcacgctccattggggacgggcagtacaagcgctgcggtgtcacctctgtgcccgacatcagacgctgccagctgacccccaatgacaggttcattttgttggcctgtgatgggctcttcaaggtctttaccccagaagaagccgtgaacttcatcttgtcctgtctcgaggatgaaaagatccagacccgggaagggaagtccgcagccgacgcccgctacgaagcagcctgcaacaggctggccaacaaggcggtgcagcggggctcggccgacaacgtcactgtgatggtggtgcggatagggcactgaggggtggcgcgcggccaggagcacgcatggtattgacttaaaaggttcattttgtgtgtgtgcacattgtgtgttttgtgtactcctgtgggactcccatggttgtaaataaaggtttctcnnnnnnnnnctaggacctcgttatattccaatatttatattcttgtcggccgccctcggcccccgtaaaaactttctaaaacgattcctttggagccgcggccccagtagggaacgggaaccctgggccctatgctgtttccctacggaaatcccgggccatggactagtggtttggaattcctcacccacataaaaaaacggtccgggcgggaaaactggagcgatcctgtaaaataatccccgaaggggaccttcgtgcgggtccgtcactgggcattctactccgacaaggaagctccgattcccgagccccaaatatccaggaattagcgcccccgggcccgtgggccacttcctttcatccaataacttgggctacgacattcgactttaaggcacattttctgtcccaaaactggcggaaagcccctgtcaatatatattggcttgttggaattgtactcccttggtaaatccgtacccggtgggggcagttctcgtgcgaatatatttggattattctctttcgcgctccccttaccaatacacttattgcgcaccctgctggcgcccacataaaactggtgtccgatctcggtac

SEQ ID NO: 365468 - DNA, 1063 bp, Homo Sapiens
  misc_feature (979)..(1000): n is a, c, g, or t
attcccagtcagttgggacaggccccaatattccttcttcctgtaagccaaacagtcatgaatttgcttggcaggtggatggagacttgggaacttccacctcacccactaagccaggcccaggctatggggcattgtggctaaccccaccaggtggatacttggtctgaggacgcatcttattctgggcctttagggagctaaggcagtgagaattggcaggaggactgctgtgaatgccttgtaggtcgggggattggagggggtcctctgctccctgtctctcaggatggcaatgtacctctcacccccagtgtcagctgaggtaggatccataatcagtaatattcctgcaacaaaatgttcctaagtggaatcaatgaagaccaaaatttatttgtataacaactctaaacctgctctgctctgctgtgtttacaatgtgctttgtgatcatccagcccagggagtcccagtctctggctgtctatctgctctaaggaagagagcccacagttctctatagtgccatagtctgtgatgaataaagttccagatttgaggtcaacccccgaccacccttaaagtgcttgttggtctcatactttggtttgtcttcagcatccaactgatgcacatttgtcaagaacccactgaggctagaaaccccccaaacactcaaggtaccttgagaacatgtatcccaagacctgcaaagaccaaacacatggcctgtaactacttttcactgttcaagccctggaacttgtctgtaccaaaaatctttttgaaccattcaccaaatctcttgtcaagggccagaataaattaagagattggcttttggttttcaattaggctttcaagtttggtggtaagacctgacctgaggctttttataacctttactcagtgggaatatgcatacagttcactacagaaatatttgtgtttacttagaggaagtgccctggatctnnnnnnnnnnnnnnnnnnnnnnaatgggtcttttttaaattgttaaaagcagttcatgccattatttttaataaacatttctaat

SEQ ID NO: 365469 - DNA, 477 bp, Homo Sapiens
  misc_feature (379)..(400): n is a, c, g, or t
tggcctaggagttaagagtattaaatgttaagaacagaccaagtccatcaaacagctccacacccttgttccatgttctggattggggagttgtgggggtggaggtgtagaacttttaaaaagcttcttaaaataagttgctgtgaatacttcaggtatataaaaaaacattggttgacaataagccagtgttctgccattcttacctgcttatcaagacaaaacctgctcaagtccctgcccagctgcattccaagtgttttcaagtttggtggtaagacctgacctgaggcttcttataacctttactcagtgggaatatgcatacagttcactacagaaatatttgtatttacttagaggaagtgccctggatctnnnnnnnnnnnnnnnnnnnnnnaatgggtcttttctaaattgttaaaagcagttcatgccattattcttaataaacatttctaatatgctgtgaaaaaa

SEQ ID NO: 365470 - DNA, 570 bp, Homo Sapiens
gaggcaactgacctcatttctcccccgcagcaggaagttaagtcttcagagcctactgaggatgtggagctcagagaggttgaagatgatgatacaggacccgaggagggctcaccgcccaaagaagagaaagaaaagatgtccggttctgcctccagtgagaaccgtgaaggaacactttcggattccacggggagcgagaaggatgacctttatccgaacggttctggaaatggcagcgcggagagcagccacttctttgcatatctgggtgactgcagccattcttgtggctgtcctctatatcgctcatcacaacaagcggaagatcattgcttttgttctggaaggaaaaagatctaaagtcacccggcggccaaaggccagtgactaccaacgtttggaccagaagtcctaacagaatggtatattcctctggaaaaagatgaacgtcaccaatggattgtgctgctttcgtttcagctttgatttttttgtccttgagaaccttgtcctccctgctgatttgtttataaatccaaagaaatgaagaaaaaagtactgtgactg

SEQ ID NO: 365471 - DNA, 526 bp, Homo Sapiens
cactatggcacttagctttgaagtgacacgaccctgtcttccttccgcccgctggtgggtaaccagtgccttccctgtaacggtaatgctgcagaactgcaaccttttgtacctttctttggggaatggggtgggggtggcagaggaggtagatggggaagaaataccccagacccaacaaacctccagccagaaagccagctattttgcatttgaaggaattgacttcctcattcattgagctttttaaaagatcacaacctcaagatgggtaaaatcccattgacatttgcactttcaaacatgacaagtctcggagctgctgagatgacaggcccctggcctttccacttatgcctccttttctccttattcctcctacctcccgccccgcccaggtctggagttactttcatagcatttttcactcttggcttcttttctcccttgatggtcaagtctcttatgtttcaatatttcttaactggggtgtcttataacaaaaaactcttaggtctaaaatgag

SEQ ID NO: 365472 - DNA, 1731 bp, Homo Sapiens
caaacacatgacaaatcttttattactgtgcttataagtgacacggtttacggaaaaccaaatgtaattaaataacattgaacttgaaatctaccacagagtcaagatatacaagttatacttggcaaggcaaaatttctcaaacactaggttgtttcaggtgaaagataaatttcaattaagtaattcaacatgttttgtttttttgtttgcaaataccaaacagtaccaatgtgattggaaaatagctttcaacaacttcaattgtaaggcacatcttgcatatttatatatacaacactgaaaccggtcaataacttaggggcttctcggagtgacctgaatatgtgtgaagacatgcaagcatgggattacacattgttcattggctcccttcttcggggacaggtacctgccaggaggggactggtagagggatactccaatctcctgcaggtctgggagcctccctggacggggaggggagagcagagtgactgtcctgtcatagtctctgtgcagtactttctcatagacgctctgcagccccactgtcttgggcagctgggcctggtagtaattgtccctgcgcagaggatcccgaggcagtgacgtgctcttacagaaggttgacatctgggctggtgggtgaggcgatggatgtgcgttgggcccgctgcaggatgggctccagcagcggtcagagtggcccaggatcttacactcagcggtgcacgcccacagtccactctgcatgtggttgatgagatcctttttcagagcgtccccgctgatgtcggaatcgctgtcgttgaaatcactgtcccctttaccgctgtctttgccgctgaacttctctgcttctctgccagaaatggtgttgaaggagtgtcctttccacaccgccacagggggcgccggctcctttccaaaacccggggaggcaccgtagggctccttcttgcggcggttgcaggtggtggcgatggcgatgatggcggccagcagcagcgtgcagctcccggccagcacgatgatgacgatcagcggcgtgtcccattgcagcaccgacccggacaccccgagccgagagccaggcgggcgggaacgctccgggcttcctgcactggcaggcgcagccggcccacgcccgccccctgctgttaccacgaagctgacagttgcggtggtggtgagcgggggacggccgccgtcggatatgaccaggagcgccctgaacacgcgaccgggtggctcctgcgagaggtcgccggtgagcagtatctcccccgtgcggcggccgatggcgaaggcttcgcgcggctcctgctgctgcagctcgaacgccagctccccgttggctccctcgtctgcatcccgggcctgcacacgggccacaaccgtgtcctttgcggtgcgcccaggcaccgccacttctagggagccattggctggcgccgggtgcaccaggactggcgcatggtcgttctggtccagcacgcgcacttgcactagggcgctgctggaaagctgaggggagccgccgtcgctagcttggatgcgaacgtcgagttggcgcagcgtctcatagtcgaagctgcgcagcgcgtagatggctcccggtagcttgggtccacccgagacattagttggacccggggcccccggcgcgtgccaccttcggctccagcaggccggtaggtgacctggccgttgcggcccaaggtcccg

SEQ ID NO: 365473 - DNA, 279 bp, Homo Sapiens
tgttataaatttatataataaaagctaaagtggaagttattgccaaaggaactgtctgtaagacaaaaaacaaaacatgttggaattacttaattgaaatttatctttcacctgaaacaacctagtgtttgagaaattttgccttgccaagtataacttgtatatcttgactctgtggtagatttcaagttcaatgttatttaattacatttggttttccgtaaaccgtgtcacttataagcacagtaataaaagatttgtcatgtgtttgaaaaaaaa

SEQ ID NO: 365474 - DNA, 433 bp, Homo Sapiens
aaggatagcaatggctgtggatgggcgatggttgcaaggagccctgccgtggatgtgtaggccacagaagctctcatcagcactgttttcgtggccaggaacagaaaatcctactcagggataattaaaattaaggaacagagctttattataagactgggatcggtagttaatttccctacaggggaaattcagggcatgtaaatcagtgaaatggaaaaggtgtaaggacaagagaaacaccagccctgtctgcaggggggggctgcaactcccttccagctgatgttgttccaccatgggtccagtgtgaccagatcttacaatgttcaaaagaggagtctaggtttttctgtgaaatctccaaatattagtatattggatcaaaaatgttcaaatgatgtgtgagctcaataaaatgcatctgcagtgc

SEQ ID NO: 365475 - DNA, 465 bp, Homo Sapiens
tatgtagtcagtgccattcattaaatcaactttatcatatgctcttttaaatgtttggtttatatattttctttaaaaatcctgggctggcacattgactgggaaacctgagtgagacccagcaactgcttctctcccttctctctcctgaggtgaagcttttccaggttttgttgaagagatacctgccagcacttctgcaagctgaaatttacagaagcaaattcaccagaagggaaacatctcaggccaacataggcaaatgaaaagggctattaaaatatttttacacctttgaaaattgcaggcttggtacaaagaggtctgtcatcttccccctgggatataagatgatctagctcccggtagaggatcaccggtgacaactatagcagttgtattgtgtaacaagtactgctcccagcagcaattagggagaaaactagtctaaattatttcaactgg

SEQ ID NO: 365476 - DNA, 1045 bp, Homo Sapiens
  misc_feature (475)..(475): n is a, c, g, or t
gcggccgctgcctcctgctcgccccggcgcccgcagccccggtcccgccgcggcggggctcctcggcctggctcctggaggagctgctgcggcccgactgccccgagcccgcgggcttggacgcgacacgggaggggcccgatcggaacttccgactgagcgagcaccgccaggccctggccgccgccaagcaccgaggccccgcggcgaccccggggagccccgatcccggccccggtccgtggggcgaagagcacttggcggagaggggccccaggggctgggagaggggcggcgatcgctgcgacgcgcccgggtggggacgcggcgcggaggcccgacccagaggccgaggcaccccccgccgggagcatcgaggccgccccgagtagtgcggcggagccggtgatcgtctccaggtcggatcccagagacgagaagctggccctatacctggccgaggtggagaagcagngacaagtatctgcggcagaggaataagtaccgattccacatcattccagacggcaactgcctctaccgagctgtcagcaagaccgtgaatggggaccagagcctgcaccgggagttgagggagcagacggtgcactacatcgccgaccatctcgaccacttcagccccctgattgagggcgacgtgggggagtttatcatcgctgctgcccaagacggggcatgggccgggtacccggagttgctggccatggggcagatgctgaatgtgaatatccatttaactactggagggaggctggagagtcccacggtgtctaccatgattcattatttgggcccagaggattccctgaggcctagtatttggctcagttggctcagtaacggacactatgatgctgtatttgatcactcctatcctaacccagagtacgacaacttggtgcaaacaaactcaagtgcaaaggaaacgcgacgaagaacttgccaaatctatggccatatccttgtctaaaatgtatatggaacgaaatgcatgctcttgaacatgtctcaaaaccttacacct

SEQ ID NO: 365477 - DNA, 547 bp, Homo Sapiens
agggattaccaggccatgagtcacccatgcccaggctaaagctgttatttcctcataacctttactgcacatgttttaaaacaggtccttatcattgtttgcccccagcaactggaatagctttctatctgctttcaaatcttaacccagtctcaccagggcatataatctttctagaatgcaaatctgatcattttaccttgaaggcttaagttttgcagtgacatactttagagcagcactgtctgataggaatagaatgttagcttcatgtatacagatgctccttgacttaggatgggtttatgtcccaataaatccaccataagttgaaaatattgtaagtaaaaaatgcatgaaatacacataccctactgaatatcatagcttagccaagcctaccttaaatgtgctcagaacactgatgttaacctacagttgggaaaaatcatcttacacaaaccctattttataataaagtgtgaatatctcgtgtaatttattactattgatcataaagtttaagcattataagttggcgatagtc

SEQ ID NO: 365478 - DNA, 641 bp, Homo Sapiens
  misc_feature (478)..(478): n is a, c, g, or t
  misc_feature (503)..(503): n is a, c, g, or t
  misc_feature (527)..(527): n is a, c, g, or t
  misc_feature (535)..(535): n is a, c, g, or t
  misc_feature (607)..(607): n is a, c, g, or t
ttggctgtatgtctgacagtctttagctatggtgactattgtttatttttaatgggtatttcagattccaagtgtatttaaaatttctaaggagatataatatagcctgtatggtttctactttatggaattatatggtcaatatttgtaaatattctatgagttttgggtgggtagaggggtgctttgcctgttttgggtacaggtttttttggatttagcttgttaattgttcaaactttctgccttctacattcctatcttagttgttcgtttaatcagtttctgaaatgtaagcattacatgactattggtgagttgtgccttttataactgaaatactttactttttctcatatcctctataattgacttctattttccttaatcaaaccagctctgggaaatttaatacatgtatattaattgagattattaaaacatttggactattcctggctgtcttactttgtatttnctatatatcatgctctcttgttttnattttgtcatcttactggcttgtnattttttnctccttgttattcctccagtggtttggaagtaattaaacctattgctatttctttagtgattaccctttttnctttaagtttagagttaattagtagccacatctt

SEQ ID NO: 365479 - DNA, 620 bp, Homo Sapiens
  misc_feature (402)..(402): n is a, c, g, or t
attctaagtgtgggcttggatggagcagaaaaaaccagtttcctgcactttctagcttcaaacagagtccagcacagtgtggcacccacccaaggtttccatgcagtgtgcatcaccactgaagacagccagatggagttcctggagattggtggcagtaaaccttttcggtcctactgggaaatgtacctatccaagggattgctgctgatctatgtggtggattcagcagatcacagccgattacctgaagccaagaaataccttcatcagctaattgcagcaaacccagtacttcctctggttgtgtttgcaaacaaacaggatcttgaagcagcctatcacattacagatatccatgaagctttggcattatctgaagtgggaaatgacaggaagatngttcttggtttggaacccttacctgactaagaatggctcagagataccctccaccatgcaagatgccaaagacttgattgcacagctggctgcagatgtgcagtgaccaggactcagcccactgtgcggctcacgactgagatgtcatcagtgttgaatggcaggcttgaagccaaaggtttccacctcaaataaaaattaagccatttcctaaaaaa

SEQ ID NO: 365480 - DNA, 497 bp, Homo Sapiens
tagatattgttcaatttaaaatatggcaccataaaaaagtcatgtagtaatagagcatatgcttttttagaaccaggttaaaagctgtttgttatctaatagagtaaaagttactgaggtcaacagatagacaggtctggcataatatatgcccagtcataatagtctaattatattcttttgacaacagacagcattcatcagagcactaattcgaatgagagttttggctatcaagatgtgttgattctaaatattattgaatgagacctgattaaagtctgactttcctggccccagtgttttgcaggttggctatttccattatcagcccatcactccataaagttcttagctgcaccaagtgattggtgaacaaggacaacaacaaaagcagcatacattgtatggatttatctcaacgctattgtttaatggctgtgtttaatgtgatctatctggaaaatgaggactccgaataaaaagctattactaat

SEQ ID NO: 365481 - DNA, 926 bp, Homo Sapiens
cacatttaatccacaaatatttaccgagaatttgacgtgccaccaggcgcggggctaggttcacaagatacagtagtgagttaggcacgattcctactaccagaagcttagagcatagggaagactaaaagtaagccacccgtctacaaatagtaggataagtggagagtttctaggtcccgtggagtttgtggttgaatatctgctccagcccttagaagccggcagcaattcactaaaagatccccggacttgtttctgctctgtatcccagccaaggagctccgtccccaaggtgttttgttagagtcagagacctctcctggggtgattccattcgtcagccccacaagtccccgtctctggcctttttcagggtctccggcagctctctgacagttccccttctgtctcaggtcgacacttattccaaggaccagggattactcacaactatccgccagagtttgctccgccctttctttttcctgtttaaaatccgcgggctcttagtgttctcggttcctagatttcctgttctgattctcgcgacagttgcgaggcctcgcgtgaagttcccttctagtccctatttcgaatttgagaccgggagagagtgtctgcccttgcccacctcctcagaacccctctggccagggatggcgcctacgtggctcgggagcccctgaatgaatgggcttggcccaacttaggggcgcattccgacgggagagtcctggctgtattccgaggctccagtgcgcatgcggagtcgatcccgcgcaggcgggcggggacggcagccgggtcttgtgggcggagcctgactaagtgccgcccccttgccggctgcagattgctatttctgccccccaccctcgcccatccccccgcgagctggactgcgccaaggcttctgtgagccc

SEQ ID NO: 365482 - DNA, 434 bp, Homo Sapiens
  misc_feature (26)..(26): n is a, c, g, or t
  misc_feature (130)..(130): n is a, c, g, or t
  misc_feature (161)..(161): n is a, c, g, or t
ccttcggcctcacaggggacattttngaaagcttctcctcgcacccgcccctcatcctccccctggggagctggcgcctgcgcctcactggtccagtgacggacgatgccttgcaccgtgaaactcccgntaggctccgccgccctcctctgggatcttgnagcagcaggagctgccagccaatttatcgccatgggcctcccgtggccacgtctccttgagaaccaaataccaaacgagcgcgcgaaccttgaaatgtcacgggcttctacggacaggagcccgcctgaacgcaaagctttctgggagttgtagttcttatcccgcgtggaatgttgggagattgagttttcgggaagtagcggatgggacggtgggagcatgggcttaggatgtgaatgccagggagcaataaaggtatccgtggtatcggc

SEQ ID NO: 365483 - DNA, 487 bp, Homo Sapiens
  misc_feature (89)..(89): n is a, c, g, or t
caggaggctgggagagttctccagatttgggagaggcgcagagacagtgtgtgagccgagccctgtctcagcaatccacctggaggagntagagtatcctcctccctttaccattcagaccgagagaaaaaacccaacttgtgtgcaccctcgtggggttaaggcgaactgttccctggtttaaagcctttcagtatttgttttgatgtaaggctctgtggtttgggggggaacatctgtaaacattattagttgatttggggtttgtctttgatggtttctatctgcaattatcgtcatgtatatttaagtgtctgttatagaaaacccacacccactgtcctgtaaacttttctcagtgtccagactttctgtaatcacattttaattgccacctcgtatttcacctctacatttgaaatctggcgtctgtttcaagccagtgtgttttttcttcgttctgtaataaacagccaggagaaaagtg

SEQ ID NO: 365484 - DNA, 998 bp, Homo Sapiens
ccgactgcgagcgggagccgtgcggctggtgctgggtctggactggctctggcggatccccgcccgagttgggcgcaggactttttgccggggtaaacgcaactgcggcggcgccgccgcaagccccggtgcagcctcggcggcgggtttcgccgccgctgccgccgcctccgagcagccctgcggcttctattcactctgggagagcgatgctaagtttctcccatagaaagagccgggacacgcagaccgaagcggcgtagtcggcttccagggcctgaccagtgacccacacccgcgcggacgcctaggctggaggcagggggcccgtgctgtcccgggctgggctcaggcttccgagccgcaggtggaagaggaaccggcgccccgcagagcggccgagaggcggccaagtgaaaggtaattttggacacgccaggcatggaagattcggtgtttgtctatagtaacctcttcagtccctgaatcctgcaccttccgtttttctgtgcttgtacggcctactgggcttcctccctagccagagagctcttctgcagtggtgcggcctttcccgggagcctgattcctggcggaccagggggagcaccctgggctgccaccgcttccatcccaagggacccctcggaacctgtcccatagccgcaagttcagcgcagcctgtaacttcagcaacattctagtgaatcaggaccttttatctctggatgccacagacctgagcagcattgggctggctgtccgctgctgactggatggcagcacaaagacaatatgagcagagggaggagaagaaggggtgctcaggctgcgggccacagtccagcagcgccagaagcactcatttctgaccaccaggctatgacgttcctgctgcgcattacagaaagcttttaactgtgatcaggcagtctgctcagatacattgagtggcgatttttagttttgtctctgaaaaaataaacagattaacctgc

SEQ ID NO: 365485 - DNA, 917 bp, Homo Sapiens
ggggatgtcattatcttaggggattttggccaagggccagacagcaatgactatgatatcctgaggaaagaaaagttccaccacctgatccccgcgcacaccttcaccaacatcagcaccaagaaccctcaaggctcgaagtctctggacaacatctggatcagtaaaagcttaaagaaggttttcacaggtcactgggctgtggtgagagaaggcctcacgaacccttggattccggataactggtcttggggcggggtggcttctgaacactgcccagtgctagccgagttctacactgaaaaggactggagcaagaaggacgcccctcggaacggcagcggggtggccttggagcgaagtgaagccaacatcaagcacgagcgatgatgacaccaaatccatgtgtccaccccgggacccaggagggcacagccaaggaatgagccctgtggggtgacgcttcagggcagagctgccttttaatttttattctcagagcatcagcacttgaggccttgccccacgccttctctgtggaccattcaggacctccagtgggggtggcgtgccaggcgcgtaccccaccaggtgggcaaagcagaaacctgcggggagcggagacgccttttatctctggatgccacagacctgagcagcattgggctggctgtccgctgctgactggatggcagcacaaggacaatatgagcagagggaggagaagaaggggtgctcaggctgcgggccacagtccagcagcgccagaagcactcatttctgaccaccaggctatgacgttcctgctgcgcattacagaaagcttttaactgtgatcaggcagtctgctcagatacattgagtggcgatttttagttttgttttgaaaaaataaacagattaacctgcaaaaaaaa

SEQ ID NO: 365486 - DNA, 487 bp, Homo Sapiens
  misc_feature (382)..(382): n is a, c, g, or t
  misc_feature (385)..(385): n is a, c, g, or t
tgaaccctgtggggttaaacccttcaagggcaaaaactgcccttttaaaattttaatcctcaaaaaccatcaagcacttgaagcccttgcccccaagcccttcctctgtggacccattcaggaccctcccagtgggggtggcgtccccaggcgcgtaaccccacccaggtgggcaaagcagaaacctgcggggaacggagacgcccttttatctctggatgcccacagacctgagcagcattgggctggctgtccgctgctgactggatggcagcacaaggacaatatgagcagagggaggagaagaaggggtgctcaggctgcgggccacagtccagcagcgccagaagcactcatttctgaccaccaggctatgacgttnccntgcgcattacagaaagcttttaactgtgatcaggcagtctgctcagatacattgagtggcgatttttagttttgttttgaaaaaataaacagattaacctgc

SEQ ID NO: 365487 - DNA, 654 bp, Homo Sapiens
  misc_feature (164)..(189): n is a, c, g, or t
  misc_feature (596)..(596): n is a, c, g, or t
  misc_feature (598)..(599): n is a, c, g, or t
  misc_feature (602)..(602): n is a, c, g, or t
  misc_feature (605)..(606): n is a, c, g, or t
  misc_feature (630)..(630): n is a, c, g, or t
acaatgcaagagacaggaacaagacatacttgggggccacggcttaatgctacctggcgttccttcctggccaccgcctaccaaaagagaaacaatctctctactatgtaaggtgctattctctggtttagaatactgtatttgggaaaacacgggcaaccctnnnnnnnnnnnnnnnnnnnnnnnnnntacagtcaattctttttgtgctacatttagtaaaaagacaaccagatgagggcaaggaacggtgtgaggcacatgtgcctctagtctgccctcacaccttgaggatagagcccttcagagttccatcggtgtggggagggtctcctttaggctatttaccttgagaggaatcgagcttaactactgttcttttcacaaatcctctaaactcaaagccccactttgtccacatgagcaaatgccctcaggacaaaagcagaccccattctatggtgtttaaattacctttctgcgttattttcagttagattttgatccaaaagtttcctgcttttttgtcagttcttttatttatgttttttcatctaacaattgtggctgtttttctggggtggagggtgggggantnnaangtnntctaacctaccctaacattctcanaaacataaaaccttaccatttttc

SEQ ID NO: 365488 - DNA, 437 bp, Homo Sapiens
acatagaatggactttcttccagagaggtttatctttgtcctgtcagatgacaagctagaaacaccttgaattaaattcatgcccgatttccctgaactaccaggcaatgtaactgggctaaaaatcctcacaaaggccaatacagagctacaattctcaggaacaggtttttttcccttttcatctttttgtgctacatttagtaaaaagacaaccagatgagggcaaggaacggtgtgaggcacatgtgcctctagtctgccctcacaccttgaggatagagcccttcagagttccatcggtgtggggagggtctcctttaagctatttaccttgagaggaatcgagcttaactactgttcttttcacaaatcctctaaactcaaagccccactttgtccacatgagcaaatgccctcaggacaaaagcagaccc

SEQ ID NO: 365489 - DNA, 547 bp, Homo Sapiens
  misc_feature (16)..(16): n is a, c, g, or t
ttaccctgaggggggnaagtcactttcccttctctcaggctgagttttttcacgtgtaagatgagaatgggctgatgggctgagagcccaccaaccttccccaccccgtatcagtttgaccacggggccttttgctacattctatccagagagcaggcctgccagcccctctccactgagaagttgggctgagagtatggggaaaagaatcaagagacctgactgccgccaactcactagtgacttagatacatcccctccccctgctggggcctcagtttccccatctgtaacttgagaaaatagaactagatctgtaaagtctggaactagatctgtaacgtccttataggtgtcactagggggttccatgagaggtgtgtgacaggcagtctgattcctctcattctccatagtctgtttcctggaaagtcgatgtaattaactgatggcccaaaaactacctcaagagacctggccctgttaagacggcttaaccactgagatcccgttctattgatttaataaagtcaaactattggaaaaa

SEQ ID NO: 365490 - DNA, 486 bp, Homo Sapiens
tacccaggctccccacctccctccactcctttttttccccctctttctttctcaccaggtggagggaaaataaatattgagactggccttcattttagtacttaggactctggggatccctagtagaggttttagtttacctcttttcaatgttgatttaatttgaagatactgtgcagttagccacagcgtgatgaggaagatgctttggtggtgcgcgggtgagggtgtttggtctgattagacctgcccaccttatttggagatcacagaattcaactgtggatttgccccttatctgggtcattctttcttataatagcccacccaactgtcatttgcattctacctatatgtcataaatgtcccaccatgatggtggaaaaaactctctttatagtaaaacaataggcaaaactgacttattctaagctccttaaacaccttcttctttataacttcaaaagtaagactaggaaatttttt

SEQ ID NO: 365491 - DNA, 423 bp, Homo Sapiens
tttttgatctgcaaaattttattaagcaatagctggacaactcttacaacttcaaatcatcaagaaaaaaataaggagattaatccgtctcagtaataaagacagaaaataacttggacaaaccacatcgttttgaatgcaaaccattaatgccttctagaatatctcctgcacaatctaatacacaaaatacgtaagaagaaaggcaaataaggatgagctcattaaaacgcatttgggagtcgcaacagatcttgcttggaaagtaaaaccagcaggatgctgaattaaaaaacaaacaaaccaacactggaggaactgaggtgcacaagcagtgcacgccactgccgaggtctggacatgaacatgctggtggtctagtttggtctggggcctatgcacctgcatcgtgcacttacggtt

SEQ ID NO: 365492 - DNA, 633 bp, Homo Sapiens
aggctgagtcttcagggaaatggaatggtctacatactcctgtcagtgtgcagtcgagacttaacctgagtatagaggtcccgtcaccttcccagctggatcagtctgttttagaagcacttccacctgatctccgggaacaagtagagcaagtctgtgctgtccagcaagcagagtcacatggcgacaaaaagaaagaaccagtaaatggctgtaatacaggaattttgccacaaccagttgggacagtcttgttgcaaataccagaacctcaagaatcgaacagtgacgcagcaataaatataatagcccttccagcattttcacaggtggaccctgaggtatctgctgcccttcctgctgaacttcagagggagctgaaagcagcgtatgatcaaagacaaaggcagggcgagaacagcactcaccagcagtcagccagcgcatctgtgccaaagaatcctttacttcatctaaaggcagcagtgaaaagaatgaaaacagaagacgttctagaaagggataacaaagcaaaggagaaagatgaagcatctgtgaagggtgtttgcgatgtttactgttggtttgttttgttttattttgtgagaatagaagaaaggctaagctcagaga

SEQ ID NO: 365493 - DNA, 714 bp, Homo Sapiens
  misc_feature (55)..(86): n is a, c, g, or t
ggcagccagcgcatctgtgccaaagaatcctttacttcatctaaaggcagcagtnnnnnnnnnnnnnnnnnnnnnnnnnnnnnnnnccatcggttcaccaaaaaggattcagagtcctttgaataacaagctgcttaacagtcctgcaaaaactctgccaggggcctgtggcagtccccagaagttaattgatgggtttctaaaacatgaaggacctcctgcagagaaacccctggaagaactctctgcttctacttcaggtgtgccaggcctttctagtttgcagtctgacccagctggctgtgtgagacctccagcacccaatctagctggagctgttgaattcaatgatgtgaagaccttgctcagagaatggataactacaatttcaggttggcttggcctgtgttagatggcccaaggctgagatgtagtcgtctcatgatttgagaacataaacagactaaactatgcagatttaacccatttctctaactctgataagcttaaagcagctacccccaaatcttttaaattctgggacttgctttgaaaagtaacaaagcccattcctttgatagctgttagtgacatagttgtagaaatgcagttttcctttatccatgcagatctctgactttctccttcaaaaagactggtcctcatttgaagtttttcccccttcctagatccaatggaagaagacattctcca

SEQ ID NO: 365494 - DNA, 532 bp, Homo Sapiens
gacactcggtattactatgaatatttcttttgggcagggggttttctaagtcccctatcatagttttattgctggtaccactgtttgagggaaccatggttctttacagagagagctcttgactacaaatgaaatagggccaaactgttactagctgcaatggggcagaggaaaaactgaaaggagcaaaaatgaaaaagaatgtatgcatcaaagagtagacattgtttgcctcactatgccttagatctagttgataaccaccaaacatattaactctaggctacagcggcatttgatctttatcctggtatgaaacatctctaaagatctcccattatcttagagatattttccaattctgacaaagtctcaaagttggcataaattgttaaaatactatacctttttttggaggttgaagaatattgttccctcctgtgcttccaaaaagttctggaaagttgtacctaggacttaaataaaatcttagttttccactgtcttttaaatttgagatgtatgctcacac

SEQ ID NO: 365495 - DNA, 790 bp, Homo Sapiens
agcgaggagggagcggcgggggaggagggggtggccaggcgcgcggggaggtgactccgtcagtcacagctgctgtttcggcgcggggccgggccgctgccgcgacgtgtggaggcaggagagcgatgattgccgcaggagaagtgcgggcgcccttcacctggggcccctcccgaaccgcccccgggcccatgcccctccagggcccaggagcgagccagcgggagggcgagggcgagcgctcctggcgaggacagattaaggcgaacccccagtcagcggacatttgagcggctcctcgccgcggtctctgcccccactccaaaaccggactcgacgcctgtcccgggccgcgacgcacgcaccggaggaaaaagggcttctcggctcgctccctctttgggggaagagagctcactcccccatgcgggcgcgggacactccatctctgttccctgccggtcgggtccgcaaacaccggggatcccagctgcggcgcccaaagggttaacgcaggcgttcggccagtgcaaaccggcctcgcaggatccgcgcttaaaatcccgggtgttttcattttgggtttgtttcttctactatgccaagctggtggctctcttttaattctcttgtaacatctcaaccctgcacccatctttcctgaggggaaaaggaaacgggattacttgcggtatttcgatgctcaaaggttaccggcggctctgctccaaccttcaagagattttgcaagttgaaacaaccaataaccttccttcgtaacttctccttt

SEQ ID NO: 365496 - DNA, 647 bp, Homo Sapiens
agcgggggctgctgccgcgacgtgtggaggcaggagagcgatgattgccgcaggagaagtgcgggcgcccttcacctggggcccctcccgaaccacccccgggcccatgcccctccagggcccaggagcgagccagcgggagggcgagccagattaaggcgaacccccagtcagcggacatttgagcggctcctcgccgcgtctctgcccccactccaaaccggactcgacgcctgtcccgggccgtgacgcacgcaccggaggaaaaagtgcttctcggctcgctccctctttggggaagagagctcactccccatgcgggcgcgggacactccatctctgttcctgccggtcgggtccgcaaacaccggggatcccagctgcggcgcccaaagggttaacgcaggcgttcggccagtgcaaaccggcctcgcaggatccgcgcttaaaatccgggtgttttcattttgggtttgtttcttctactatgccaagctggtggctctcttttaattctcttgtaacatctcaaccctgcacccatctttcctgaggggaaaaggaaacgggataacttgcggtatttcgatgctcaaaggtaaccggcggctctgctccaaccttcaagagactttgcaagtttgaac

SEQ ID NO: 365497 - DNA, 511 bp, Homo Sapiens
  misc_feature (101)..(101): n is a, c, g, or t
  misc_feature (177)..(177): n is a, c, g, or t
aatgttgcagggaggagaaaaattaggttccatgcaaagaaacaggaatcagatggtattgagattttcagtagcaacaactgaataccacaatacagtgnaagtagtgtcttcccaaaagcctgatggaaaattattttaaacacaaaatcctatatttagcccaaacagtcaatncaagtgtaaggctaaataaaggcatttttcagtcatacctcgaaaaactgcctgtgtagggatatttcccctgcttccccactcaggcagctgctgggaatgtattccaccaaatgacgaagcaaaccaagaacaaagaagtgaaggatctagaaaatgggctccaacacgggaaggaagcaaagggagatcccacgcatcagccacacagtaggtcttgtgggcattcagtctagcccagaccgggagggtgaaagtctccaaggaaagaggtgtctcggaagaaatcaattactttcaatgtttgaacattaaatagcaaatgacaaagcaa

SEQ ID NO: 365498 - DNA, 753 bp, Homo Sapiens
  misc_feature (159)..(159): n is a, c, g, or t
  misc_feature (328)..(337): n is a, c, g, or t
aaattcggcaagaggaaacgcccacttgaatcagtgcattaacaggtccctgtttcttttgtggactgatccgaggacatcattcaatatccaaagagctgcagaatgttatccttgaattgcgtccacaagattcctgtagataactccaaggatttntttttttaagcaaacctaagtcctttttatgtccgatggtgattggaaggttcaatgaaaaccaaatgtattaaaaggtcagcaatctagtccattagataaaatcttttaattttcttaggatcaaaataatatatttttgacagtaactgtgcactttactccgacnnnnnnnnnnaatacctcatttcccgacccctgtactctgcgctggttttgcccacagctgcttgcgaatggcaggcttttttctccattcctttgcggaacatagaagagtttgtctcagttctcttagaattgatgttactaactgaagtcaaagccaaaagcatgaataattcaggaacgagcactttccttgccccaccccactgtgctcacccaatgcccaaaagcttcttcatttttaaacgggtgtgtacgttttgctactaggctatgtggtggagactggaggggaccaggaactagatggactgttacattccgaaatttatatcaagtacaccatgctttattgagtgttatcacacctgtattgaaaatagcattaatatttaaaatcttttttaataaaagaagtttccgaac

SEQ ID NO: 365499 - DNA, 661 bp, Homo Sapiens
cccatttttcagaacgcgtctgcggtcacagcgcacgtatttttcagaacgcgtctgcggtctgggcgcaagtagttttcagaacgtgtctgcgatcacagcacacatttttcagaacgcatctgcggtcatggtgcatgtgtttttcagaatgcatctatggtcatagcgcatgtatttttcagaacgtctgccatcacggcgcacgtgtttttcagaacgcgtctgcggtctcggcgcacgtgctgcgatcacagtgcatgtatttttgcgaacgcgtctgtgattatggtacacgtatttttcagaacgcgtctgcaatcacagcgcacgtatttttcagaacgcgtctgtggtcacagcacacatattttgttccgtgcatttttcagcttacattttattgtatgaatatatattgtttctatgctattaaagggcctttatttaaataaatttgtatttaatctttgacctgcaatcccacagagtagaatggtgtccctaggtattgatcttagtgcttcaaagataaatataacttttatggtaaatattaacaaaacaatgattttattaacttttatattgcattgtgatacaatatatagtattactttatattaatcttaagtgttaataaaatctttaattagaaaaa

SEQ ID NO: 365500 - DNA, 1111 bp, Homo Sapiens
gggaataaatcccttcgcagcaaaattgcggaggatcattcatccactagggccccacctgaggcacagcgctgactcatcacggtggtaccagtaggtcagccatctggaaacagaagtggccctaattgggcaaaaatgtggtaagactcgctggcctcaggcagggccaggccagttccatcacttctctgcacacctattcccagattccatccagagcaaagctgatgtttatcgtctcattgtacttaggctttcgtactttaaaaaattatgactttttaaaaataagccttcagcagacagaagtgaagaaatttagcctgggttgcctcagcaacaaaagtctgcggttcctaagagccacatgttggggaagtggggtgacccaaacttggtgacataggttgattgatcagaccctcagccttacaagcaagagctcatgcagatccacagagccatgcacatcctgtcttcctgaccttcctcaggtggcaccacctgcgccccatggacctgctgtatcggtgtcatgtggaggtctgatgaatcctttaaaacctaactgtgatgtcgtaaatgtaactgtgctacctttatatctactgaagggcagcgtctgcatccgagggaaattcaacatgaaacaaccatcgttttagttgcactcagtctgtccatatgacatacacatgaagtgaatgtttccttatgttttcaggtctacaatgtttagtacatgtaaataaggaaaaaatttgataaaatatggtaaattaagttatagcgtgtcatttgattcttattttgctgtctcttgttatttaattttcctaatgctccacatctaggttccttcctaggtggtgggaacaccttgcagacgtgtgtgcaccaggacacaccgcggcccaggcagccacaccgagaaagcacacatctccactgatggcagccacccgactctccagttaacctcttttactctttaattctgatttactgtgatgatttaataaagtggaaacacagcacttcagtgctatatgtttctctcattctcattatagtttataagaaaataaagttcaccctggcatctaat

SEQ ID NO: 365501 - DNA, 733 bp, Homo Sapiens
  misc_feature (270)..(271): n is a, c, g, or t
aaactttaagagctaaatattctaaactggcaaaaattttcagggtgcacttctttcatcaaaatgatcatccatcttttgtataatgaacttgtatagtgtgtttaaatgggacacatttcaaaggaaataaatcagtgtccgtttgccagtaataaatttaatattctgttttatactataaagttatgaaaatgccaaacttgtttatttaattgttttcttatgttttgggtgtaatagtcctttttggttacgtatgttcctttnnaaggcaggtctgtcatttttgaatactgtaaaactgtgataaactttatattgaagctgtattttaatatgaccgctttgaatccttacatgaaatgttctgggagttgttataaacacaccccaaggaagcaatatttaataaaaataggtcaaaaacaaaacaaaacagtgacactcacttgtgtgtatataaactctagagacatcttaggccctcccttcatctttaacctggtggatggagccagttattaatttataataatacatgtctgaaatttgaccaaaaacatcttctttatgtcaaggttaatatattttcttcagacattcctaacttgactagtggttaacatttagcaccttgcgtcgtctttcaatatataggatccgggtgacaaataaggaacttagcctttgagaagggacagaatgtggtcgtattgatcaacgatcccaa

SEQ ID NO: 365502 - DNA, 466 bp, Homo Sapiens
  misc_feature (18)..(18): n is a, c, g, or t
  misc_feature (62)..(62): n is a, c, g, or t
  misc_feature (206)..(206): n is a, c, g, or t
  misc_feature (291)..(300): n is a, c, g, or t
aaagttcccagggacaanaacgaaaaaatgcttgtgtgaccctgaaatgggtcaaacctctnaatggtgaaaaatccttttcatactttgctttggctaaaactacccaaatggacccaccttgatacaaggggcctaggaaatgtagtcttctggtgtgcccaggagaaaagggagataggctggtcaacatgcagctttgtganaccgacagcatggacagcaagtaagcgtggacctgcaggccgtatgcctcgactgtcaacatggagggggtcccacatgcccaannnnnnnnnncggcttcccgggcactcgcgccttcagcctcttaaatctcactgcatcatctcttaccttgactgcgcagggatgcaaggagctttgtgaagtgacagtgacatttctgtgcctttggggctgggttgtgcattccagcctgggcgacagagtaagaccctgtttc

SEQ ID NO: 365503 - DNA, 1149 bp, Homo Sapiens
  misc_feature (170)..(182): n is a, c, g, or t
  misc_feature (1014)..(1024): n is a, c, g, or t
caaccttttataggttttaatgatcagaggtcttagatatatatacataggtccatgtagaccttagaagtgtacacaggtacagtctaatttctcaaaaacactaggagctcctacatataatatgtagaaagttttaaatctgtagtaagaatcaaatttcagagacnnnnnnnnnnnnnccaaaagcaagaaacatcatctccaggcaagctagtccttcttttttacaatcactttactgatttgcctggttcaatttctacccatgcatttcaataactctttgttgttaaaactggatgtcttgtaggaaccactccacctgtgtctgcagtgagctgtctgggatgtggactcagcccctctgagtctagttttcttgtctgtaagagccaatgatgacgtgcatctcattggttgcagggcttaaatgagatggcttctgttgagggcctggcccagggccgggcaggcagtgggccctcagttactggcttcctttcttccttctgtaacgtgctgcctttactttcccagcttcacccactcccctctccgctttccccaccacagaatggagagcttcttattttggatgcccctgttcatgcatgagagaggggaacccttgccagaagtatgagcagcagggatctggggagcttaatgtcaaagctactcctttctctttaatgactgccatggctgcttacatagagaagggctatgcacaaagcaccctatgttcttacactgttttcatgttatggtgggagaaaagctgcattctagccagtatgacctaataatgcatctgcaatccaccagcaggaggagtaatccacggacacacagtcctccaccctcaccctaaaaacaatattgtgactgcgtgatgcacagtcagctgcttcgtggtcacagtgaacttagaaccaagactgcatttggcagagcaagcaacaaagatactctcacaatacaaagcaatcacattgtaggtacaggcannnnnnnnnnncttaaacaatgaaacaacaatgatctcaacatgtcattttgaccaccagctattatatgatttctgaatcgatgagtctggattgaatacaatggaataaagactatctacgtgaagtatctgtc

SEQ ID NO: 365504 - DNA, 532 bp, Homo Sapiens
  misc_feature (124)..(124): n is a, c, g, or t
aagaatttaatgtttttcaagattgtagtgttgatccagcgcaacaattcaagtgtgcaaagtaacaggatagtttgcctcttcactttacccctggataaaggccactttccactgcctgtcnactgatccagcagatactgacttgttgcccattaagtgaacttgacttcttatgtgtgctctatgagtttgttgtaattttccttcttgaaattgtgatttttcactgacagtaatgacaaatttaatgtatgtaattgtctatgcattttaagttaaactgcctaaaatgtgatttgagacatatacatatgtttgtattataaattgtaagcaatcagtttgagatactaggttttatcacctgctgctgtatttgtaaacaaagacaaatgttgctttaagaagtaattataattaggaataggctatggatgtgatacttggtattttttaagataaacttgtttgcttttgtgtattatacctggaaactttttttaaaaaatgtattttcatggtttcacag

SEQ ID NO: 365505 - DNA, 1789 bp, Homo Sapiens
  misc_feature (499)..(507): n is a, c, g, or t
  misc_feature (1025)..(1063): n is a, c, g, or t
  misc_feature (1450)..(1450): n is a, c, g, or t
  misc_feature (1469)..(1469): n is a, c, g, or t
  misc_feature (1486)..(1486): n is a, c, g, or t
  misc_feature (1505)..(1506): n is a, c, g, or t
  misc_feature (1522)..(1523): n is a, c, g, or t
  misc_feature (1541)..(1541): n is a, c, g, or t
  misc_feature (1552)..(1552): n is a, c, g, or t
  misc_feature (1561)..(1561): n is a, c, g, or t
  misc_feature (1567)..(1567): n is a, c, g, or t
  misc_feature (1586)..(1586): n is a, c, g, or t
  misc_feature (1606)..(1606): n is a, c, g, or t
  misc_feature (1617)..(1617): n is a, c, g, or t
  misc_feature (1626)..(1626): n is a, c, g, or t
  misc_feature (1643)..(1643): n is a, c, g, or t
  misc_feature (1659)..(1659): n is a, c, g, or t
  misc_feature (1667)..(1667): n is a, c, g, or t
  misc_feature (1699)..(1700): n is a, c, g, or t
  misc_feature (1725)..(1725): n is a, c, g, or t
tgccatcctggtagcagctattgtccttgggggcacaggctggggatttaaaaatgtcaagaagagaaggttcgatcctactcaacaaggccccatctgaatctaggcgctggatggacacccccttgcactgttggattctgggtatgacatactcgccagcagtgttactggaactattaagtttgtaaacaaaacctttgggtggtaatgactacggagctaaagttggggtgacaaggatggggtaaaagaaaactgtctcttttggaaataatgtcaaagaacacctttcaccacctgtcagtaaacgggggagggggcaaaagaccatgctataaaaagaactgttccagaatcttttttttccctaatggacgaaggaacaacacacacacaaaaattaaatgcaataaaggaatcattaaaaaaaatagtaaatgattttttttccctcagcctgctggcacttaatatcttctaaatgatttggcatgannnnnnnnnctttactaccgatgacaaactccagtggcatgaagatctaattttcaaaagggtaaaaactgcatggcatatatacaacaagctagcaagccaattctcagcaaaacctgcaacagaattcctaaagtgaagatgacagatgaacacaaagaagctgcctgggcctcttcacttaaacatgtccccacaccccatcctctcggagccccacttcttaccccccacctcccaccctctataatccccactccccattggagaccaggccagggcagaactccacggaccttgctcttgttgattcactttccccattgtgttttctcctggactgagcatcctttggaaatgggagctggaatttgaacaatgatgctattgtatagttcttttataaatgtaaatatggaaataagagattttgacacatcattttcacttgtctgtattgagatattttccttgtaaaggttctctgtaaacttgagttgattttttgctccccatcttttttgttnnnnnnnnnnnnnnnnnnnnnnnnnnnnnnnnnnnnnnnaacgtgttatacaatgactcttgggcttgcttaaaaagacagatatagccacagatgcagggagtttgggcacaaaacacgtgcagtttaaagttggtgtgcgttaaaccaaaaataaaaggggggacataaacaacaaaataacccatatcaaagacacaaaattatgtaaatggaaatatatgtactaagtttcgaaaattttttgatgtcattataaacctatgtaaataatgtaagaaagtagacaccctttcagattaatcacaaaagtgccaagctcatgattttggttttcggttttgacaattttctttccctgtctttaatgtgaaaggaggataaacttaaagccttaaataaaaaaatttttttaaattgttaacnaagcttggaaaaaattaangctttccaattttattntgtatttttgttagtgtcnnaatatttcatccatgnnctcattttcctgcctcanaaatatatatnggtagaacncctatnggaaaagtggtaatggganatagaaggagcagttacctnttgtatccgcnattgttaanaataggcttttatgctngtgctgtgctttcaangaaacctntgtttgaccctcctggcatttttactgatcanngtggaccgttgcagctggattatanatgggattctactattatacaaatccacattgttcttctccctccagccaagatttactcatcg

SEQ ID NO: 365506 - DNA, 406 bp, Homo Sapiens
  misc_feature (54)..(54): n is a, c, g, or t
atttttgcttctctgggtctgtcttcgtccatgcctgctctgagatgctccccnacccctccctgtacctgggaccaccgccctctggtgttttctttctccctgtgaatcccccccctggaatactgctgctttctggaaggctgtccctgggttacgtcctgcgctcctctccctcccacgcaaagacaaccagaaggacaagccttgagcacgccgataccccagctcgtggctccccagaccatctgtttcccgtgaagacgccccgctccccgtgtctgtgtcctgcgtgtatgtgtcgtgtgttgtgtagattgtgaaccccctgggcagggatccctgtctgcatacatgttccatgtggcacgcccaggtgtgctaataaacgttcatcttgcagaaa

SEQ ID NO: 365507 - DNA, 1016 bp, Homo Sapiens
cggtccggaattcccgggatctttgcacgctatgctagccacacttccggcaagagcagctagaatcgttccggtgcatattgaataggcgcagaaagggagaaaaagattctacagccctggccacagtactttggtgacacttttcgtggggctctctggaggacttttcccaaggcagatggagaaaacttcgtgaaacccactccttgctattaaaggaaatgttgtggaatataattggacttaggttttgcagagcttgagcatggcctttttgtcctcccaccttctggttcttgaagacattgccggtgacctggccccagactaacacaaggcgggcgtataccgtcagcctgcctggcgttccccttgcctcagcacacacagagacctcttgcaagatgcttctctgccgccataggctggaggttccccgggaactttcccttccttcctagctgaggaagatccctcacttccgctcgccgcgccaccggtcccacctccccgccccccgctgggtcctagcgccggcccctgtttggcagggtccgggctccgtcggtgcgaggagccgacgccgacgccacggagtcagcacaagtctcatcagagaaaccccgttcaccaaggccatggaagtggaggctgcagaggcccggtccccagcccccggctacaagcgctcgggccgccgctacaagtgcctgtcctgtaccaagacatttccaaacgcgcccagggcagcgcgccacgctgccacacatggggccggcagacttgctctgaaaaagtggcccgaggtgaagccaaagccagagacagaagctaaggcagaggaagcagtgggggaaaaaaaggtgtcagggctccgcggcccagcctagggcccctatgccgtgtcccgctatgcccccaagggcctaccagaaggccaccccgaagctgggcaagccacgggcgcaaggcccaacacggggggaaaaaaaccccttttccctggcccccga

SEQ ID NO: 365508 - DNA, 516 bp, Homo Sapiens
  misc_feature (20)..(20): n is a, c, g, or t
gcccatctaactagacagcncccacctgtgagtccctcccagtctcgcctcccttcagtctcttttaagggctggggccagatgccccttgatctcctgcagtctcagcaacaagacgtgggatttccccccccagtgttgcagatttcataaaggaaactgctccggggctaagagggaacaagtggggtcccatgctgaatggggcccttgaaagatccactggattgtggcaggtgccctgcccctggctccagccctcctttctttgcccggctgcggccacttacccacgccttcctccagctctgcatcatccggtcgtgctccccagccacagccctccaggcagagagctctctggtccacctctcctggtgggtcacttctggaaaacaagcagggtccccaggtcaaagctctgtgggcctttatggcacccttgatgcccactggccacctttctcaatggaaagccaataaaacccaaacccagaatgccaccgtgaaaaaaaa

SEQ ID NO: 365509 - DNA, 2142 bp, Homo Sapiens
  misc_feature (1534)..(1544): n is a, c, g, or t
ggtgtgtgaggtgtgcgaggagggaagagacacacttgacgttccatcctcagagcagcctgaactgttcctaaagaaacttcagcagtgctgtgtcatttttgacttcatggacacgctatctgatcttaaaatgaaagaatacaagcgctccactcttaatgaactggtggactacattacaataagcagaggctgtttgacagagcagacttaccctgaagtagttagaatggtatcttgcaatatattcagaactctccctcctagtgacagcaatgaatttgatccagaagaagatgaacctacccttgaggcatcgtggccacacttacagcttgtatatgaatttttcatacgatttttggaaagccaagaattccaacccagcattgccaaaaaatatatagatcagaaatttgtattacagcttctggagctatttgacagcgaagaccctcgggaacgggactacttaaaaacagtcttacacagaatttatggcaagtttcttggtcttagagcatttatccgaaaacagattaacaatatttttctaaggtttgtttatgaaacagaacacttcaatggtgtagctgaactgctggaaatattaggaagtattatcaatggctttgctttacctcttaaggcagaacacaaacagtttctggtgaaagtattgatccctttacacactgtcaggagcttatcactcttccatgcacagctggcatattgtatagtacagtttctggagaaagatccttcactcacagaaccagttattagggggttaatgaaattttggccctaaacatgtagtcaaaaagaggtcatgttccttggggaactggaagaaatattggatgtgattgaaccttcacaatttgttaaaatccaagaacctttgtttaaacaaatcgccaagtgtgtatctagcccccattttcaggtggcagaaagagcactctattattggaataatgaatacatcatgagtttgatagaagaaaactctaacgtcatccttcccatcatgttttccagcctttataggatttcaaaagaacattggaatccggctattgtggcgttggtgtacaatgtgttgaaggcatttatggaaatgaacagcaccatgtttgacgagctgacagccacatacaagtcagatcgtcagcgtgagaaaaagaaagaaaaggagcgtgaagaattgtggaaaaaattggaggatctggagttaaagagaggtcttagacgtgatggaataattccaacttaacaaaaacaatgacaacaacattactaacctgtggagtcacacgtttatgtagtagaagatggagcaacagttttctgtattgtgcaactttacagtagatttcacctttgtttcattattacagcagcactgtatatacctgtctctaagtaaaggaaaaaacaaaataaggacttcaatccaaagtttggacagtagatggacttctcagaactttgcaaacataatcattgttctcaccctcttttnnnnnnnnnnntcggtcttcaaagatctgttgatgaaattgctatgttaaaattccattatcgggagttccttattgatcactatcagagagtatgatactattttcaaatgtgaacaatcttaaatttagcttgactttctgctaagctggtaaatgtatttatactaaaggaagaaaaaaagactgtcgtttccttataagattgtgtaacatcctcctctggataacttgactgtaatttaacatctttttcttttgcacatcttcctgaggtgaatgtccacttggaatggggtcatgaattataaaaatccctgataaaagttttgattactggggtgaacttcttaccaggaaccagctagtcctggtactccctttagttttaaaaattagcagttaacagagaagaggtgatgaacatagtcggggaagggaatatcggagtcatgcatcagttaatggtgtaatccaatcaatgtcgtgaatccctttgaaaaacaggcactggggacatcaccaggcttcagtaccttaacccagtattaggttggcatatatccattggaacacaccatacccgaagaatgtttttacaaaaatggtg

SEQ ID NO: 365510 - DNA, 380 bp, Homo Sapiens
  misc_feature (55)..(55): n is a, c, g, or t
  misc_feature (66)..(66): n is a, c, g, or t
taacagacctatatttgagatgacagatgcaaaataaacaggcatgactttaganaggtccagaanggtcttaatatcctgaagcttattcttattcaaacttcgcgttttaattgtttggaattcttagacagagtaggtggaatttcatcctttgtatgttttaagggaacttcgctcctctctttaccacccaccccccgccacccagtaaaatactgaactttcattttaatccataacactaaatgcttttgtgtttttctttcttcaaagactgtcattaagaatgtctacaaggaaatcatgggaaatgacaaaatctcccccagattgattttttacgtgttgttggaaataaccacataacttaaaaaaaa

SEQ ID NO: 365511 - DNA, 1099 bp, Homo Sapiens
ggccggatttcggatgaaggagacctaaagcgcaccttcgttgtcatacaggagaaaggccctatccatgtcaagcttgtggaaaaagatttagcaggctagaccatctaagtagccattttcgaacaattcaccaggcatgtaaactcatctgcagaaaatgtaaacgtcatgtgacagatctaacagggcaagtggtacaggagggaaccaggcgctacagactgtgtaatgagtgtcttgcagaatttggcatagacagcctccccattgacttggaagctgaacaacatcttatgtccccatcagatggagataaggattccagatggcacttgagtgaagatgagaatagatcctatgtggagattgtagaagatgggtctgctgatctggtcatccaacaggttgatgatagtgaagaagaagaagaaaaagaaattaagcccaacattaggtagctgtaatgtgaaccaacagagctggcatgtctgcaatttacattgacttcctgtatctctctctttctatggtcggagtctagttaacaaatttatcacactgactttaaagaaatgatctgatataacttgcatgctttctgaacaggccattgtatccattctgaactttgttgccctaaaatgtgttgctgcactggaaagaaagaactagcttgagttggcttgatggatgaacaattatcctcttactttcattacaatcctcttactttattccagagatacctttttcttttaatattggaggatctacttagcaaacttttttcaaagaaaatactttaaataaattcaccacaaccaaactttatgtaagacaatttcaaggtggtttcaaaaacacataactaccaatggtttaaatttcccagggaaccaattaaaaagcccatttaaaggattctggcaaacccacctttactaaaccaaattaaccctttcctattaattttgagaatccggaaacaaacctgtccattaactctgaaaattccggaaacggttttaggggattatgggaaagaaaaacttaaggggtttggaaatccattccatattttgaaaatttttttact

SEQ ID NO: 365512 - DNA, 1258 bp, Homo Sapiens
  misc_feature (681)..(693): n is a, c, g, or t
  misc_feature (819)..(879): n is a, c, g, or t
gccgcggctggacatgcacacccatgtgcctggctccgggcgcgcacacatgcaggtagccacactcacctgagccggtgcagagggcggcctgggctgggaaggggccccctgcgccgcgggagtggggagagcgggaggtgccacagcgcggacctgcgaactgaggtgatggcccgttttccttaactctcctgcagcacctccgcccctgcgccggctcggctctggccacagcagcgaggacagaggggccccgggcgcggcggactcgcgggcgcacgctcccaggagcgcgccgagaggggcgccgcggcgcaggaaacttgggcgaagttagttgcaagtgccaggcggctgccgagaagagcgaggcggggacgcggccggtgccaggcctgcggcgccgcgtggaggctgcgctgccctccgcggccggcgagctccgggagccctaagtcggcaggcgcgcctgaaggggctcggagcgaacagagccggcatggcccaggggacggccggacgcggctcctcggcgagccgggagaacttcctctgaggccgggcgacccacgcttgctcaagcctcatccaccctccttcctcgccccacccgtcagtccagcagcgggagaggaagactcgagaggcaggtgctgcgggggacagctcccccctccnnnnnnnnnnnnntcacccagccgattgggggtttcccatcggcgcaccctgcccggagccaagaagacaggctggtgctgctgtatttgtatttatatccattgctgcgctctgcgttctcgtggcacgcctggacannnnnnnnnnnnnnnnnnnnnnnnnnnnnnnnnnnnnnnnnnnnnnnnnnnnnnnnnnnnnccatctgcttccggtcaatgagaaaagcccccgaaggagaaccccaaacactcccgcccgcggagagccccccctttggcactttggcaaacacgcgggcgggcggggctcctcgggatcaactttccagggagtcttccccgacgccacctttttgggggacccttttggcatttaaaaagaaaacccaaccgagggagggaggaagtggctccgtccccgcgccggaccccctacctggccggggggagcttcccccacacagaacctcccctggtcagaacgaaagggccccacagcaaacctgcaccggggcaaacccggccccccgccgggaaggggggcaaccgccccggaaagataaagcggcccccaaaac

SEQ ID NO: 365513 - DNA, 917 bp, Homo Sapiens
gtgggctcaacaccaagaggccgccaatgaaaacgtgactttttcacattccccgccccttccgtgtgcacgctccccacgagggcatggttcctgaaaggatgtacagaggatccccaaccgcctgcgaaacccaagccgccgcgtaggagcgtgcgttcgggccctcttctcccacctgttcgactccccatccccaggatgtcaacctcagtccctcaaggccatacctggacccaacgggtgaagaaagacgatgaggaggaggacccgctggaccagctgatctcccgctctggctgtgctgcctcccactttgcagtgcaggagtgcatggcccagcaccaggactggcggcaatgccagccacaggtgcaggcgttcaaggattgcatgagtgaacagcaggcgaggcggcaagaggagctgcagaggaggcaagaacaagccggtgcccaccactgagaccccaaaccacctatccccagtagatggccctgccaagaccagcacccagcaagattatagaggaagaaatcctaaatgctggtgtgggaggtctaaaacatggggagagtttttggatctggagttgagagccatgggtttggacatgactggcacaaacagctgtcatatgttcatggtcagatgtcatacattctcagctgtcttgttccaccagtatttaccaggaaaacaaagaatgtgttaagggatgctcccccaccccacatcttaagtcagtgtgccaagtactgagatgattttagggacattttattttaaattaaatttacaatctaatggtaaattgattacctaattagtgcctttctctttcatcacttgttctggatgtttcaatcagtttagtggaaggaaaaataaatggggaaactttttattcaaaaaaa

SEQ ID NO: 365514 - DNA, 1068 bp, Homo Sapiens
agcggaggcggccgcggggcggcggcgggaggatgcctcgcgccctgcctaggcgttaacggcctcagcgcgtcccgggccgcgccgggaacgcctgagagccgagcccgcgctgaccggggcccgggccggatgggcgctgcgggccggggcgcggaccgcggagcggccgttacgtttttctctcgtcccagctgtgtggacagtgccacacgccctcctggacaacgacggctcttgcgtgcattttccagtgttgcttttgtcagagaggccagcagagccacggttcttccagaaccagccctgagctgagtgaggagtgcccaggagagatggtgaaaatgacaaagtccaaaactttccaagcgtatctgccgaactgtcaccgaacgtacagctgtatccactgcagagcacacctggccaatcatgacgagctcatctccaagtcctttcaggggagccagggacgcgcctacctcttcaattccgtggtgaacgtgggctgcggccctgcagaggagagggtccttctcaccgggctgcatgcggttgccgacatctactgcgagaactgcaagaccacgctcgggtggaaatacgagcatgcctttgagagcagtcagaaatataaggaaggaaaattcatcattgagcttgctcatatgatcaaagacaatggctgggagtaatgtgcgaactttcccttctccttcgaatgctgttttgtgaaagaaactgtgaatgtaatggaaacgtaggagcatctggtgacagcctttcttgccctctgacctcaaaggctagctgcgcatagctcttgacactcccggccatctctgtgggtaaggtgtccctcggatctgtcctcttcgtgtacacagttgtttctgaaaattttcaatgagctttttctaacttctcaagttctagagaaagaattaaccaactgatgacttacctgcctagttaatatcttcctttcacctttgtcttcaatatagttgggctctgcttttttaaggttcagttgaaaaccaaactggggccgggtgcggtggctca

SEQ ID NO: 365515 - DNA, 1768 bp, Homo Sapiens
gggagtgacaattaaagatggctgcgcccatgtaacatcactagcgaccggtgacctctttttcccccttgcctggctcctgtggtggcaggctgggcacgaggaccatgctgggccggagcctccgagaagtttctgcggcactgaaacaaggccaaattacaccaacagagctctgtcaaaaatgtctctctcttatcaagaagaccaagtttctaaatgcctacattactgtgtcagaagaggtggccttaaaacaagctgaagaatcagaaaagagatataagaatggacagtcacttggggatttagatggaattcctattgcagtaaaagacaatttcagcacttctggcattgagacaacatgtgcatcaaatatgctgaaaggttatataccaccttataatgctacagtagttcagaagttgttggatcagggagctctactaatgggaaaaacaaatttagatgagtttgctatgggatctgggagcacagatggtgtatttggaccagttaaaaacccctggagttattcaaaacaatatagagaaaagaggaagcagaatccccacagcgagaatgaagattcagactggctgataactggaggaagctcaggtgggagtgcagctgctgtatcggcgttcacatgctacgcgggctttaggatcagatacaggaggatcgaccagaaatcctgctgcccactgtgggcttgttgggtttcaaaccaagctatggcttagtttcccgtcatggtctcatttcccctggtgaatttcgatggatgtgccaggaatcttaacccagatgtgtggatgatgcagcaaattgtgttgggtgcacctggccggaacctgaccccagggactctaccacagtacatgaaacctattaataaaccattcatggcttcccagtttggcagatgtgaggcaaactatgtataaggacttccaaaggaatctcttgtaccggaattatcaagtgaagtacagtctctttggtccaaagctgctgacctctttgagtctgagggggccaaagtaattgaagtatcccttcctcacaccagttattcaattgtctgctaccatgtattgtgcacatcagaagtggcatcgaatatggcaagatttgatgggctacaatatggtcacagatgtgacattgatgtgtccactgaagccatgtatgctgcaaccagacgagaagggtttaatgatgtggtgagaggaagaattctctcaggaaactttttcttattaaaagaaaactatgaaaattattttgtcaaagcacagaaagtgagacgcctcattgctaatgactttgtaaatgcttttaactctggagtagatgtcttgctaactcccaccaccttgagtgaggcagtaccatacttggagttcatcaaagaggacaacagaacccgaagtgcccaggatgatatttttacacaagctgtaaatatggcaggattgccagcagtgagtatccctgttgcactctcaaaccaagggttgccaataggactgcagtttattggacgtgcgttttgtgaccagcagcttcttacagtagccaaatggtttgaaaaacaagtacagtttcctgttattcaacttcaagaactcatggatgattgttcagcagtccttgaaaatgaaaagttagcctctgtctctctaaaacagtaaacatatcttacaaattaaaatgacttttaggctgggtgcaagtggctcacacctgtaatccc

SEQ ID NO: 365516 - DNA, 690 bp, Homo Sapiens
  misc_feature (526)..(535): n is a, c, g, or t
agtatatgtttaatagaccatacagcagaaaattggaggccgaagctgacaaaattggactactgcttgctgcaaaggcttgtgcagacataagagccagttcagtgttttggcagcaaatggagttcgttgatagcctgcatggccaacccaagatgccagaatggttatctacacacccttctcatggcaatcgagttgagtacttggatagacttatacctcaggctctcaaaattagagagatgtgtaattgtccaccactgtctaatccagacccccgattactattccaaactcagcacgaagcattttcttgaagaatcagagaaagaagacctaaatatcacgaagaaacagaaaatggatactcttcctattcaaaaacaggagcaaataccattaacatacatagttgagaaaagaacgggcagttgaattaaaatttatgagacacaagatatatgaagaatgttgcagtccttatcattttatgttactttttaaaaaatgatgtttgaagtgnnnnnnnnnnggatattcagggtcaaatcatgtacattacagatattatctaaattcttctagaatttatttttcatgaaatattgatgtattttaatctatgttaaaatatcttcaatgaggaaaatgtcacagaataaatttatattacacattttaaaaaaa

SEQ ID NO: 365517 - DNA, 411 bp, Homo Sapiens
ccctccctttaaacgcagcccaaaacgaaccctgtggaaggtacccataatgactgtaggcctctggggaaaagggaagctgcatctgcttctcaaaggcccagggacacagccatttctgcccagcatctgttgatcagtgagtgagtgaatgggcaggtagagcaggagccagtgaagagcaggccctggatgggtggggatgcaccatgtccccaggctgcagtgcaggcagccccccacattgtcggagaagcctctgcaccagctcagccccctcctcactccccttgtgccctggggacactctgcagaggggcactctgcagtctgtccccgccatcgctggacttctggacatggcctccagatttgcacctcttaaataaaactgcagtggatgtcaaaaaa

SEQ ID NO: 365518 - DNA, 802 bp, Homo Sapiens
  misc_feature (74)..(106): n is a, c, g, or t
ggggcccgcccggcgcgcgcactcgaacccgcccagagagcggtgcgtggcgctgggtgcgagcagggtctagnnnnnnnnnnnnnnnnnnnnnnnnnnnnnnnnntgcttttttcaggttcatcaaggtttgcgcagtggatccgcgaatgaagccagcctggaagatccccagtctcgagacagagcctgacaggggcagatgcactggaaggaccctgtctgggtttagcaaccaagcagccatcctggccccacaggtgtgggacttctgggtcttctcctggctggcttcttgctagaggatttcaagagacccagcaagactgtattgtcccactgaatgctcaagatattggttagaagtagaaaaggggagggggtagtatttagcctctgtccccactaaaaattattcccaattgtcatttgtgtcatctgtttagcttacagttttaatccttgtcaaaatgatcatttgccagggtgcataaaacaccctatttgatgagaactggttttaaaggaaaatggggccatcagaaggaagccggttggtgtgaagagacgtctgggaagagcccctggcgagggccctcattccactgggtggcccagaaggagaaaaccgcgatggcgcttctcatttgaaatgttttctttatggacagtgtttagcaattggtataatgtgtacttttggtgattgatctgtatacatatgtaacaaataatttgttctctgagttaatttgttggaaccaaagactttagtgcttcctacattaaaacattttactgc

SEQ ID NO: 365519 - DNA, 794 bp, Homo Sapiens
gtgcaaggtgctgtcactcacgtgtgccctcgaccctcccgttcacccgcagccttctcagcgcctctccctgggccggaggcctcctcaccagcctacctgttgctctggaaaaaaatcccgtcccccgactccgtccctacccccagtcttcggccggctctggcccctggggagggggctgcacggcggaaggaggctggctatgggcccggctgcccgctgcatgtacctcctcctccacccatcgcctcttgcctgggggtaactttgcctggggctcattctttggttaagctgaagctgccgtgggtggccaaaccgcagattctttgcaaattctgagctggcagagctcgcagccgggagccggccggggaagaggagacttgcgcgccgcaagccgcctgcctccaccctgctctccatctcccgctctagaagggctgggaagctcgcggccggggttccacctggaaagctgcttgcatggctgaacccagcttaggtccctgacggggctgctggtggaattctcccccttcgaagctggggaggtttaggagggggaaggcttctgtgaagctctcaaaaccactaatagagccccctccccaacagtgacggcgcagatgctcccccttttcttagttgacaccaccaggcagcttcctggccgttggtaggttcctgcagctggctgagggaacagggaccggcaggggactttgttaggggagggttgggatgggcagtgggcccctgaaagttaatatattggaacctagctcaga

SEQ ID NO: 365520 - DNA, 922 bp, Homo Sapiens
  misc_feature (865)..(865): n is a, c, g, or t
gctggcctcttccagacagactgtgagcacgctgacagcctggcccaggctgccgaggacgactggccacccttccgcaaggtgggctgcttcgatccctacagtgacgatccccggcttggcgtgcagaaggttgctctctgcaagtatacagcccagatggtggtggctggcactgcaggccaggtgctggtactggagcttagtgatgtgccggtggagcaggcggtcagcgtggccatcatagacctcctccaggaccgcgagggcttcacatggaagggccacgagcggctgagcccacgcacggggccgctgccctggcctgctggcttccagccccgtgtcctggtgcagtgcctgccgccagctgctgtaaccgctgtcacactccacaccgagtggagcctcgtggcttttggcaccagtcatggctttggcctcttcgactaccagcgcaagagccctgtgctggccaggtgcactcttcaccccaatgactccctggccatggagggtccgctctcccgggtgaagtctctcaagaagtcactgcgccagtctttccggcgcattcgcaagagtcgtgtctctggcaagaagcggggctgctaatgccagcagcatagttgcaggaagccaatgcacagctggctgagcaggcctgcccccacgacgtggagatgacgcccgtgcagcgccgcattgagccccgctctgccgatgactccttgtcgggtgtcgtgcgttgcctatactttgccgacacattccttcgagatggggcccaccacgggcccaccatgtgggctggcaccaactcaggctctgtgttcgcctatgcactgggaggtgccggcagcanccagtgggtgggtgagaagcggggcctgaccaagcggtggagggccgtgctgggcaa

SEQ ID NO: 365521 - DNA, 891 bp, Homo Sapiens
  misc_feature (18)..(18): n is a, c, g, or t
gctggtacggtccggganttagggatggcttctttcacacgggttgcttcggaggaatccgccgtgcaaatctgtccgcccccttggccactgatcccccgaagagcttctgtcgccgctctaggaatacagacattgaagtttgggacaagatatttatctaacttctgtgtcaaaattagcgacctgctatggcaatgaagaaagaaactgaatttgtcattttcacctgaagaaaaatgatagacaaaaatcaaacctgtggtgtaggacaggattctgtgccctatatgatttgtctgattcacatactcgaagaatggtttggtgtggagcagttggaggactatttgaattttgcaaactatctcttgtgggtttttacaccactaatacttttaatacttccttactttactatctttcttctctaccttactattattttcttacacatttataagagaaagaatgtattgaaagaagcctactctcataatttatgggatggtgcaaggaaaacagtggcaactctgtgggatggacatgcagccgtttggcatggttatgaagttcatggaatggaaaaaataccagaagatggaccagcacttataattttttatcatggagctattcctatagatttttactatttcatggctaaaatatttatacacaaaggcagaacttgccgagtagtagctgatcacttggtcttgtaaaattccaggagttaagatttattacctggactgtgttattgtagccctacattggaccaagaagacacatgttgttggacattctgcacgaattgccccatggtataagatattttcaaccaggtgaagcttctgaaaagccctaatttaaggatggacacttatt

SEQ ID NO: 365522 - DNA, 486 bp, Homo Sapiens
agacgcaatccaccaccacgaactcttcatccgatcagcacgagccattcatgtgctgaaacaccaagatctgtggaagaaatcctcagaggagcccgagtcccagtggcacccgactcgctctcctctccctcaccgacgcccctgagtcgaaataatctgctaccacctattggcacagctgaagtggaacatgtgagcactgtggggccacaaagacagatgaaaccccatggcgactctagtcgagctcaaagtgcggtggtggatgaacctaactatcagcagccacaagaaaggctccttttgcccgactttttccccaggcccaacacaactcaatcatttttggtagagtgacgtacttcctagaatggtcttgatagttggggaaagaaaaggtggggggaataatagtttggcagacttaagattttatctagaggcttaacccagaataaaagttgagtttccaacaataaaaaa

SEQ ID NO: 365523 - DNA, 504 bp, Homo Sapiens
  misc_feature (15)..(15): n is a, c, g, or t
gaaagtcttcccttnggaatgcagcatatttcttatctaatttaaaacagctttatcaagattattcagatgttcaagctcaagaaccaaacgtaaaggaaacgtatgattcatccagccttccagctctgttatttaaagcaagaacacttctgggagccgaaagccatctgcgaaatatcaaccatcagttagagaagctccttgaccagggatgagaaaagcagtctactaaaatgtgcctataggaagactagtctcatgctgttaccttctgaaactgtacctttataaatcaattgttttgcaaagaagttatggcctacttagaatctaaaatttgttattcaaattaaatggctgtgaacaatgttaaatagcatcagtttgtccaatagttttaaaggccataatcatcttttctggttaatatcttgagtaattttaaaatgttgacaccttaatcggtcccaggtatgagctataataaacttgtaaaattaa

SEQ ID NO: 365524 - DNA, 1418 bp, Homo Sapiens
  misc_feature (28)..(28): n is a, c, g, or t
  misc_feature (40)..(40): n is a, c, g, or t
  misc_feature (197)..(197): n is a, c, g, or t
  misc_feature (793)..(959): n is a, c, g, or t
  misc_feature (961)..(1019): n is a, c, g, or t
  misc_feature (1074)..(1083): n is a, c, g, or t
  misc_feature (1122)..(1163): n is a, c, g, or t
  misc_feature (1189)..(1211): n is a, c, g, or t
  misc_feature (1228)..(1257): n is a, c, g, or t
gatgcctcgaatgagacagcatcgcgcngcagcctcaacnccgaaaggtgtgacggaggtaagcgaagaaagacgagatcagtgtgaccagtctgactttcaacaagaagatcctgcacacagcctggcacccagtagacaatgtcattgccgtggctggccaccaataacttgtacatattccaggacaaaatcanactagagacgcgaacgtgacgaccaagtcttgtcttgcatagttaagccggacatttgtctgtcagagaaaaggcatcattgtccgctccattaagaacagtgacgcacctgctacttcccttcacagacacaggagaaagccgcctccgctggaggcccggtgtggttccgcctcggcgaggcgcgagacaggcgctgctgctcacgtggagacgctctcgaagcagagttgacggacactgctcccaaaaggtcattactcagaataaatgtatttatttcagtccgagccttcctttccaatttatagaccaaaaaattaacatccaagagaaaagttattgtcagataccgctctttctccaactttccctctttctctgccatcacacttgggccttcactgcagcgtggtgtggccaccgtccgtgtcctctcggccttcctccgagtccaggtggactctgtggatgtgtggatgtggcccgagcaggctcaggcggccccactcacccacagcatccgccgccaccccttcgggtgtgagcgctcaataaaaacaacacactataaagtgtttttaaatccaaacagnnnnnnnnnnnnnnnnnnnnnnnnnnnnnnnnnnnnnnnnnnnnnnnnnnnnnnnnnnnnnnnnnnnnnnnnnnnnnnnnnnnnnnnnnnnnnnnnnnnnnnnnnnnnnnnnnnnnnnnnnnnnnnnnnnnnnnnnnnnnnnnnnnnnnnnnnnnnnnnnnnnnnnnannnnnnnnnnnnnnnnnnnnnnnnnnnnnnnnnnnnnnnnnnnnnnnnnnnnnnnnnnnccccggggggggaaaaaccgctctttggggatttttggaaaaaaacccttctttnnnnnnnnnncattttgggcccacccccccccaaaattttaaccccctnnnnnnnnnnnnnnnnnnnnnnnnnnnnnnnnnnnnnnnnnncgccaaattttttggtgttaaaaaannnnnnnnnnnnnnnnnnnnnnnaaaaaaattttaccccnnnnnnnnnnnnnnnnnnnnnnnnnnnnnnaatttaaaaaacaacacccccagggggttctttgggggccccccaagctccccaaaagggtggtttttggaatattaacccgcacccaccccctttttgggggagagggttttcttttgtctttaaaaaaatattcccaaaaatccccccccgggaaactg

SEQ ID NO: 365525 - DNA, 473 bp, Homo Sapiens
  misc_feature (11)..(11): n is a, c, g, or t
  misc_feature (23)..(23): n is a, c, g, or t
  misc_feature (37)..(37): n is a, c, g, or t
gaaaagccccncccgctggaagncccggtgtggattncccctcggcgaaggcgcgaaaacaaggcgctgctgcctccacgtggaaaacgctcctcgaaagcagaagttgacggaaactgctccccaaaaggtcattactcagaataaatgtatttatttcagtccgagccttcctttcccaatttatagaccaaaaaattaacatccaagagaaaagttattgtcagataccgctctttctccaactttccctctttctctgccatcacacttgggccttcactgcagcgtggtgtggccaccgtccgtgtcctctcggccttcctccgagtccaggtggactctgtggatgtgtggatgtggcccgagcaggctcaggcggccccactcacccacagatcccgccgcccacttcgggtgtgagcgctcaataaaaacaacacactataaagtgtttttaaatccaaaaaaaa

SEQ ID NO: 365526 - DNA, 281 bp, Homo Sapiens
ctccctccctgcaggggccccgtttggggcgttgtgctggctcttggcaaatgtctgccaacaccgtggcttctgtgctgtggtcgcacgtgaggcgtctgtgggcacgaatgctgtctttgttgtgttttggtgtctggcttcagaaaagaatgtggaagagtttcgttctctttcctgtggttcagtgtagctggcagtcagggagaactctctgcagctggcgccggccctgtatttgttaggcttgtttctcctgggctcggctgctgggcaaggcc

SEQ ID NO: 365527 - DNA, 1604 bp, Homo Sapiens
  misc_feature (30)..(31): n is a, c, g, or t
  misc_feature (1496)..(1507): n is a, c, g, or t
ccggaatttcaaatcctgaccttgggccgnntgggtagcacagaaaaaggcctggaggtgtctgggtcaccttcctgggctggcaagctgcctgcctcctgcacagccactgcccttcctgttgttcccgagccaccagccacagctctgagaagctcctggcagcttctgtttgccactggctcgaatctgggcaggaaggcaaggcccgcagaatatctggtgaccaagaaggaaaccccagagcctcagagaccatcttctcagtggacaaaattaaggcccgaggaggggaggggcgtgctggaagtctatgggactgcatctttctgaggcccaggagcagccatcccccacacctgaagcccgaaaatgagccacagagcaagctgaccccagcgacacagccccccagccctactgtatttccgttcctatcaaaaaatggatgactcggagacaggtttcaatctgaaagtcgtcctggtcagtttcaagcagtgtctcgatgagaaggaagaggtcttgctggacccctacattgccagctggaagggcctggtcaggtttctgaacagcctgggcaccatcttctcattcatctccaaggacgtggtctccaagctgcggatcatggagcgcctcaggggcggcccgcagagcgagcactaccgcagcctgcaggccatggtggcccacgagctgagcaaccggctggtggacctggagcgccgctcccaccacccggagtctggctgccggacggtgctgcgcctgcaccgcgccctgcactggctgcagctgttcctggaagggcctgcgtaccagccccgaggacgcacgcacctccgcgctctgcgccgactcctacaacgcctcgctggccgcctaccacccctgggtcgtgcgccgtgccgtcaccgtggccttctgcacgctgcccacacgcgaggtcttcctggaggccatgaacgtggggcccccggagcaggccgtgcagatgctaggcgaggccctccccttcatccagcgtgtctacaacgtctcccagaagctctacgccgagcactccctgctggacctgccctagaggcgggaagccagggccgcaccggctttcctgctgcagatctgggctgcggtggccagggccgtgagtcccgtggcagagccttctgggcgctgcgggaacaggagatcctctgtcgcccctgtgagctgagctggttaggaaccacagactgtgacagagaaggtggcgaccagcccagaagaggcccaccctctcggtccggaacaagacgcctcagccacggctccccctcggcctattacacgcgtgcgcagccaggcctcgccagggtgcggtgcaaagcaaagcaagcagggggtggggggccgggccccgcaagaaccccgaaaagggtcgccacccccctaacccggtggggggtgcattctgccgaaaccaggggtgaaagtcacaagggtccccnnnnnnnnnnnnaagggttccaatccccttttctcccttttttgtgcccacccgaatggggtcccctccatcctcacggggcccccgtggccccgggggagaaccccct

SEQ ID NO: 365528 - DNA, 1023 bp, Homo Sapiens
aagcaggctggtacggcccggagatttaggatccacaggtccagaccctcctgttccgtgccccacgggtctcctgagcactgtggggagggggcatcaaggtggcacgggggagaagggacacagcatttcactgggtgtagcagagtcccagctcctgggggccttgggctgggctgggctgtgcagacccacggccgctgcgggaggcggcctgctgcgtccctcggggaactggtgccgtgcaggggctacggaggaggctgtcccaagggcggggacttcctgggcccttctgtgaggagccttggtctcagcttccggctgtcctgcccccagtctgcctggcacgctgaggggcaaacaaggcaggagaggcggggagagccccacagtgcccagactgctgttgagggtttctgccagccagggcatggagggcactgagtcccctgggctcaaggctgcccacctgggcagacactggggtcccaggcacgggcctgagatgaggacacatcggatggcagaaaggagaaaggatggagcctccacaccccgggacctgtgacttcaccctggttcgcagatgcaccccacaggctagggggtggcgacctttcgggctcttgctgggcccgtgcccccaccccttgcctgctctgctctgcaccgcaccctggctgaggcctggctgcgcacgcgttgttaataggccgagggggagccgtggctgacgcgtcttgttcctggaccgagaggggtgggcctcttctgggctggtcgccacctttctctgtcacagtctgtggttcctaaccagctcagctcacaggggcgacagaggatctcctgttcccgcagcgcccagaaggctctgccacgggactcacggccctggccaccgcagcccagatctgcagcaggaaagccggtgcggccctggcttcccgcctctagggcaggtccagcagggagtgctcggcgtagagcttctgggagacgtgatcccgggaattccgg

SEQ ID NO: 365529 - DNA, 443 bp, Homo Sapiens
ttgggtctgaacgcgaaataaagaaatcctctcagcccgcctttgccagcgtcgtccctcccaccccacccagaccacgtccaacagcctgggactttcgggaccctggggtcggggcaccgtgtggagtgagacaggcgtgaaagacagcggctgcggccacccagggcaccagccacatcctcttcctcgtccccgcccctcagcctccctcctctggctcctggctggtgggtctgggggcaaggcagaggcgctccaggtggaggggggcgggccggggtgcccacgctggggtgacgcaagaagaaaactcccgggcctcagagtcggcgccggaaacctaggtctgggtttccctcgtggtggttgtgtactgaggacctggaagtgatcatattttggatatattcggttaaataaaatcagcggttaggattcac

SEQ ID NO: 365530 - DNA, 1181 bp, Homo Sapiens
  misc_feature (1097)..(1105): n is a, c, g, or t
agcggagcggccagtgcgcatgcgccgagtatcgccacgcctggtctctgggacgcccctccggaccggtttcgcctcgcggagccggtaggtccaggtgcagcggccgcagtgctgcgtccgtgcgccgcgggctggggcggtctcaggtgtgccgaagctctggtcagtgccatgatccggcaggagcgctccacatcctaccaggagctgagtgaggagttggtccaggtggttgagaactcagagctggcagacgagcaggacaaggagacggtcagagtccaaggtccgggtatcttaccaggcctggacagcgagtccgcctccagcagcatccgcttcagcaaggcctgcctgaagaacgtcttctcggtcctactcatcttcatctacctgctgctcatggctgtggccgtcttcctggtctaccggaccatcacagactttcgtgagaaactcaagcaccctgtcatgtctgtgtcttacaaggaagtggatcgctatgatgccccaggtattgccttgtaccccggtcaggcccagttgctcagctgtaagcaccattacgaggtcattcctcctctgacaagccctggccagccgggtgacatgaattgcaccacccagaggatcaactacacggaccccttctccaatcagactgtgaaatctgccctgattgtccaggggccccgggaagtgaaaaagcgggagctggtcttcctccagttccgcctgaacaagagtagtgaggacttcagcgccattgattacctcctcttctcttctttccaggagttcctgcaaagcccaaacagggtaggcttcatgcaggcctgtgagagtgcctattccagctggaagtcctctgggggctttccgcacctgggttcagatgtccctggtaaaggaccaaggaggtagcactggtaggcaaccccccgccatttccccccttggaaaaaggggcgggtttccttcccctggatctataggttatgttgtgccaaaagaagggcccccactggatttttcgcggcccgcgtgtatgaggtagacccctcctcccccgtaaaactgtttactaatttctnnnnnnnnnacccgtttgtgaatatcccttttctccctttttgtgagccgcccccccttcgccgccgccgttttttgaatatttt

SEQ ID NO: 365531 - DNA, 475 bp, Homo Sapiens
  misc_feature (240)..(240): n is a, c, g, or t
agccggtgcctgaggggtctgggcccctgggtccctgggggccccaagactgggtgggccccctaccacgtggccctaccacaccagatgagggctgcctccggtactttgtcctgggcaccgtggcggctttggtggccctcgtgctcaacgtgttctatcctctggtatcccagagtcgctggagatgagctcgcctgcaggcagctgctgtgagctggcctacctgcctgccccagnccatgcctgcctttgttgtggggaacacctctgggctttgggcctcagcttatgcatctggtgggagagggtggggaggttgtggcccctgcaggggcagagtatcctagggtgtgtatccatctggctgtctgtccattcatcctgctgctctgacccttggcctcaggcttggccctgcccaagctacttcctgtacttaaaagtgttaataaaaccagactattcaggccca

SEQ ID NO: 365532 - DNA, 436 bp, Homo Sapiens
ttgtcttttcacctgtggattgtaatcaggcccaaggaatatcctggagtggtccccagaagcatccaagaaaagatatttggggacgtagcctaacattttaccaacttacgtaaatcaaaaaagtcattattgttgcaggagtttgcatcaaatagcagtgcatcgctgaagcttttggagacttttggatggaagataagatagggaagattaagttccagcatttctgacttgttattttgagttactctgctactcttaggctgcatagtttatgagaaaatgaacacatgcatttatggatccagtatcatgcagtgctgccctcatcctccagcagtgcaatttcttcagtaatttagatttttttcactatagcatgaaatatattcaaatacataccttattttatgcaataaattgtttaaaatgc

SEQ ID NO: 365533 - DNA, 460 bp, Homo Sapiens
ctacatggactcagagggtaagagcattagctctcatcattgtgatgtgtgtgctctcctctcccccttggatgtcacagccattgatttctttgtgggcctcatggacttggtcttgttagtctaatgaaagccagacttcaaagagacaaggcaaccatgcagccagttcaccagtaaatgtggtaacacccacttaaaaatttgttttctcctcaaggacggtgtatgaagttgatcataaaagttctattactttatcctaaattaaattgagaaaaagatgtgttcttctaatcagacactgcattaatagggaaagattggtatagaaaagattttctttcctttttacttaatgtatatagtttaactcttttctttgttacatttaaactatgctcatgggtatcagtctgttttggactagtattaaagatggaaataaaacaatttgaac

SEQ ID NO: 365534 - DNA, 475 bp, Homo Sapiens
  misc_feature (434)..(434): n is a, c, g, or t
ggcatacatctgtgggatagtcaatacataacatcctatctttatatggccatatgagaagataacttcagtgtccctatgatggtaagttcttgaatgtgagggcaagatggctgtgatagccatgactccccgctttgcctggttggacagaacccccttccccaaatgctcacagtcccccccttgagctgtgtctcactcagagaccctaaattttgcagacgaacaagggcatctttgcgttgcttcatctctgctcctcctctaagaactatcccacaggctttctaagacttagaatatctgacctgatgcaaatcgctatgtggccagtatgccacagaatgtcctaaacccttgctgcctcttatcaaaaccatgttgcacatctcatcatatagtacagctaacccttgaacagtggggggggntagggacactgaccccgactgctgtgcgcaaaaaatccaca

SEQ ID NO: 365535 - DNA, 876 bp, Homo Sapiens
  misc_feature (77)..(126): n is a, c, g, or t
  misc_feature (133)..(148): n is a, c, g, or t
  misc_feature (785)..(822): n is a, c, g, or t
cttacgtttggtcacctggtgcctctgaactccctcttccactctctctacatcctgatgcacaatttatttgaaannnnnnnnnnnnnnnnnnnnnnnnnnnnnnnnnnnnnnnnnnnnnnnnnnccaattnnnnnnnnnnnnnnnncaggcaaagaatatgaacaggcaattcacagaaggaaaacccaaatgacccacaaacatgaatagatgttcaaccacaatgacaatcagagaaattgtaaaaataaagcagcaacaatatatcattttacatttatcagctaagcaaaagctaaagtctgataatcccaattattgatgggtgtgtagaaaaaggagattctgacacatgctggtagactgtcagttggtataaccccttggagagcaaaacagagatattcaccaccctcttatcccaaccattccacatactattctacgtaaatatcttccagagagattccagcactagtactatagaatacatttacaggaatgtttaattgcaacattgtttcaaacaagagaaaaaaccagagaccaagtcaatgttcacctacaggagactggataaaccaagtataatgtataatggaatatattgtagcagttaaaataacgaaagaaaagctacatatatcattatagtctacgtagtatccacttggataaacctcacaagtcattagtagtgagcaaaataagcagcttgcagaaggatacatacaatatgatacccgttatataaaatgtttatggttctacttttccgtctnnnnnnnnnnnnnnnnnnnnnnnnnnnnnnnnnnnnnntagtctttgtgtacgttttgtgagtctgcagaatgcatactttagtaaacaggt

SEQ ID NO: 365536 - DNA, 417 bp, Homo Sapiens
  misc_feature (278)..(375): n is a, c, g, or t
gggggactcattcctgaagctggagatgctgtaacacaatcaaaactgtaaggcttaaaagaattaaagtaggaattgccgcaattcccttcctagacttattcccaaatatacttactatggactacctgcatacagcagccccttcacatatttttactgcctgtcataaagtagtctgggttacatttaaagaagctgccagcacttaatgcataaaagtactaaaaatttgttactgatgtttgaaaaatatagaaaattaaaagcggaatggnnnnnnnnnnnnnnnnnnnnnnnnnnnnnnnnnnnnnnnnnnnnnnnnnnnnnnnnnnnnnnnnnnnnnnnnnnnnnnnnnnnnnnnnnnnnnnnnnnaggctttgtctctacgaaaaattgaataaatggataaataat

SEQ ID NO: 365537 - DNA, 565 bp, Homo Sapiens; identical to SEQ ID NO: 8458

SEQ ID NO: 365538 - DNA, 687 bp, Homo Sapiens
acgccaccgccggcgccaggccccgcccccgcgaggctgcggctccgccccgagtggggaagtcaccgcctgcctcggctcgacccccgcagggcaggaccctgggcgactccgcccgttcctccagcaaccgccgctaagcccggcgcaccgctccaacctgttctccacttggcggctagaaatcggcctgttccggcctcgcctcgggtctttcttagtcctttcactaagtcaccgatgttagtcgccaggaggcgctgtgccgggggtggggatgcggcggtgaacccggaagatggccccttacccttccagagatgaagcccagttcattccactgcacgcactgagcccctgtacctcctgtctttgggccacatgtcctcaagggctccagtcccgcatgcgtgagcttgtgtgtatgagatggggcggggtagtcatcgcggcaggtgagaggggagctgcccctgcgaatcaccatcaaaggcaacttccccgaacccctgctctttaaagaggataagacgctgggaggcaccgaagggaaggaggcgaggtccagagcaggttcagtggttcaaacgtgctcagcatccccttctctgggcctctgggcaacttcagcatcctcagggaagccagacctagatcaggtccaccgtgtaatggccttctcataga

SEQ ID NO: 365539 - DNA, 471 bp, Homo Sapiens
cttaacgatgtttttgagatctgtgccatgttacttaatgtagctccaatcccatcttctggtaattgctggtatagattgtcatccatatggattacccacattttacttacgcatgtcttttgtgatggacattaagactgtttttaggttttgcctattacaaaatactacacaggagcatcactatgccctgtgtgaaagtatatgtatgaaagtttaccctagggttgattcctagaagtggaattgcaaagtcataggatatttatatattggtttttaataatacttccaaattgccctcctgtactatttactcagtatttttcttgaggttgatctgaggtctaacattgttatcctatatcattttcatcccaagtagtgatatctgtgaaatcacaggtttgatgtgtgctaattatgtattcttctaatacatattaaaagacataactatcaaaacaa

SEQ ID NO: 365540 - DNA, 495 bp, Homo Sapiens
  misc_feature (57)..(57): n is a, c, g, or t
cagcccctcctccacgggccctggctgggatgtaactgcaggaaatcaaaacttccntggactacaacttcctgtttggaggggacagaaatcaaggaaaccaccacccctttggagctggacatgggggatctcaggtatcagaccactgagcaacccaccgccaggctgcaggctttcagaggcccacctgggcccagcgtggcctgccccagggtgggctcccagcgcaaatgcagggcatcctctagtggggcctctggtaaccctagcagatggtggtgacccccctgagatgaggaagctggtgacctaagactgagcagcagcctatgggctccgggtcaagtgctattcccagcggatgcccttcccctgcgccagtccctccttcctgagtgtccagcccccaatgcaaacagcaaccccaggctctgaaactactttttttcttagaaaaagcaaaacaaaacataaaacttgtttctgattatg

SEQ ID NO: 365541 - DNA, 603 bp, Homo Sapiens
  misc_feature (41)..(49): n is a, c, g, or t
  misc_feature (190)..(311): n is a, c, g, or t
ggagagactcttggtatattggattatctgttgtaaacaannnnnnnnncttccctgacacagggtctcactctgtcacccagactggagtgcagtggcacagttctctgcaacctcagcctttgggctcaaatgaccctcctacctcagtctcctgagtagctgggactacaggctcatgccactatannnnnnnnnnnnnnnnnnnnnnnnnnnnnnnnnnnnnnnnnnnnnnnnnnnnnnnnnnnnnnnnnnnnnnnnnnnnnnnnnnnnnnnnnnnnnnnnnnnnnnnnnnnnnnnnnnnnnnnnnnatgagccaccatccctggccaagaaacaaagttttaatttcaaaaaaatctacaaaaacaggataggcattgtctttcaaatgttcagaccccagtttattaaaggatacttcaaatagttggctaaattttatgatctctcccgttgaaaagtaggtgatgattttaatgtgacatgcacaaaaaatccttgccagtttacttctgcaatttaattttagcctttactaattacccacttctgtttaattccaatttttaacagcaggtacataaagcattatgtgcacaa

SEQ ID NO: 365542 - DNA, 1523 bp, Homo Sapiens
  misc_feature (21)..(21): n is a, c, g, or t
  misc_feature (108)..(135): n is a, c, g, or t
  misc_feature (945)..(945): n is a, c, g, or t
  misc_feature (1123)..(1123): n is a, c, g, or t
  misc_feature (1236)..(1236): n is a, c, g, or t
  misc_feature (1246)..(1246): n is a, c, g, or t
  misc_feature (1264)..(1264): n is a, c, g, or t
  misc_feature (1276)..(1276): n is a, c, g, or t
  misc_feature (1381)..(1381): n is a, c, g, or t
atatttctaagtagacacttntccagacctttgtttttttgtgtcagtgtccaagctgcagataggattttgtaatacttctggcagcttctttccttgtgtacatannnnnnnnnnnnnnnnnnnnnnnnnnnnttttaatcagaagttatgaagaacaaaaagaaaaaataaacacagaagcaagtgcaataccacctctcttctccctctctcctagggtttcctttgtagcctatgtttggtgtctcttttgacctttaccccttcacctcctcctctcttcttctgattcccctcccccccttttttaaagagtttttctcctttctcaaggggagttaaactagcttttgagacttattgcaaagcattttgtatatgtaatatattgtaagtaaatatttgtgtaacggagatatactactgtaagttttgtactgtactggctgaaagtctgttataaataaacatgagtaatttaacaccaggacctgcaagaggcgacgctccactggacaaactcctcgcaaacgcaaatatgccaatcgccacgattcacgaaatgaacctgaacctcggaacctcctgtgctgcaagagcctttgggttcccggcatcgccctgtggcgcgatctccatcccgtcctcgccggtccgccctcgcccgggacggacctgcatacaagcgcgaagtacgagtattcatgaaacgatgttccgcttacttcgccgccgccgggctccccctctatacgaggtgggagcctactgttacggtccaaattcccccaattcctaggggaccatcccgcggaaacgtgctttggcaagcagcccttgcgccggggcgagtccactgtcatcgtccccctagaatgccacgcacgcacccattctctgtaatccacactgccggcccccttccccacattaccaatacgntcctccccgaaactcttcccctctatgatggcgggctgcgtccttctgcggtaaaaccccgagggacgcgcaacacacacacggcgcccaccgtctgttatccccacctctttggtacccctctttccgcagaagcacgccttgtgagccttctccggtacgccgccagtgtctgtantaataagaattgctagccacacccatgctcgttgacagcgctgcggaacccgccacactatagttggctaacaccggcgctgccgggccatagatgatataagccccgcccgntcacacaagncggaggttataggtgcgngagactcactcntcaccgctcccattgcgcgcgcggctcggccgcctccccccaacacttatcccacgctcccccgccgcctccctacttataccccccgtgaccctgggcatacgntttccgcgacgctcaaacaacaaagctctgactcagaggaaattaacccaccacagcgcccccgcggatcgaacggtcacgaaggctttacatgatcagcgcatcggccgcggcgacgcagcctgtgatcgagaccacgcgg

SEQ ID NO: 365543 - DNA, 1164 bp, Homo Sapiens
  misc_feature (944)..(944): n is a, c, g, or t
tggaccggtccggaattcccgggatgggggcggtgccatggcaaaagaactcccggagaatccgaattcgtggtcctcagaattggtttagggttgtttcgcggttcttcccgtattctgcctccgaggcccagtggggctggctgtgggccccctgtgctgtttgaggcgtgaaactcacctcaggaaatgtatctgatccattagcgtggattcatattatttggtgatggagaatcttcagctgtgttaagtgttaccgtcagtttcagagatggcttctttgcaaaggaaagggctgcaggcaaggattctcacctctgaagaagaggagaaactgaaaagagaccaaactttggtgtctgattttaaacagcagaaattggaacaagaggctcagaaaaattgggatcttttttacaaaagaaatagcactaatttcttcaaagacagacactggaccaccagagagtttgaggagctaagatcatgtagagagtttgaagatcaaaagttaacaatgcttgaagctggctgtggggttggaaactgtttattcccacttttagaagaagatccgaatatctttgcctatgcctgtgatttttctccaagagccattgaatatgttaagcaaaatcctttatatgatacagaaagatgcaaggtattccagtgtgatctgactaaagatgatcttctggatcatgtaccgccagagtctgtggatgttgttatgttgatatttgtgctgtcagctgttcatcctgataagatgcaccttgtcttacaaaacatttacaagtgccatggctgctcttcagagcttcgcagcctgggacaacgatgattttgcagttacctgggatccatggagtcctgctataaggctgcttggagaaggcttgcgacatgtgcacgagaccctgaaacaagcccttttnttgcaaattatttacccagcacttggaaggcacagacctggcccctgcccttgaagagctcacaagccttttttggggtcagtgactcccctaatgagcttgggttaatggacagcctttgacatgccatgtggattccctactaggaattgtgttggaataaaagggagggcaagtcagaaactttttgtccagttaaaaataaagcaaatttgccagt

SEQ ID NO: 365544 - DNA, 952 bp, Homo Sapiens
  misc_feature (666)..(666): n is a, c, g, or t
  misc_feature (840)..(840): n is a, c, g, or t
gggtcagaagcctttcacccatggtcatctgaacaggatcttttcttgctccccagcttagaagagtatgagcccagaggactgtttgggccttgtaccaaagaagaatctcatctagctcagttcaacttgttttgaagaagtaagcactctcaagacagtctggctcagtgtaaagagcttcaggaccacagtaaccaatcttctttcaacttttcatccccggagtcctgggtaaacaccacctcatctactccttatcagaacattccgtgcaatggatccagcaggacagctcagcccagagagttgatagcgccacccaagactgtcaaaccccctgaggatcaactgaagtcggagaacctcgaggtgtccagttccttcaactacagtgtgctgcagcatcttggccagtttccaccccttatgcctaacaagcagatcgcggagtcggccaatagcagtagccccccagaagctctgcggggggcaagcccgccatgtcctatgccagcgctctgcgggcccctccaaagcccaggccccctcctgagcaggccaagaagagtagcgaccctctgtctctcttccaggaactgagcctagggagctcatctggcagcaatggcttttactcatattttaaataatcacttttttttnccctcaagggagaatgttttaatttctgtttgtatcagtagaattaaggtagttggacttcatctatagatgcacagttccctttgttttaatattacatatgttctcacttaattgctttgctgctagacttgcaactaatttttttaacagtatattccattattttgcatntttgatgtgtcaaaactttgacagcttttatgtagaataaaaaaatttttaaatttgtgtattgttacatatgtatgcatcaagctagcagccaagaggttaattgtgcaac

SEQ ID NO: 365545 - DNA, 545 bp, Homo Sapiens
atgccattgataggttgaacataacatttttcttagaataaaagcacattccatacactctactatggcagaataaggaggttcacagataattgagagaagccaccgaaacgtgctgttttctgaaggtctccctacgcgtgttgtagtaaatgtgtgtctctctgtgactgacagtatgctggcggtcagggccccaagctcagccttgcgtttgagtgtatctttagatggaaaaggcgttggtgtggtgtggattgtagcttcccgaaactcatggcgcctcccctcggacgtcggtgtcgtggcgcctccccgcggatgtcggtcttgggtgttttgggggagaaaacaagccccatccttcccgcggggtttctgggcttcacgcctgccttgccctctcagacaaaggccaggacttgtgcggcccacactagtgtatcgccctgtattagagtaaaacatgtttatcaaagaacattggaaaatcagacacaaagaagaaaataaaaatcacctacaagctgccacaccaaaaaaaa

SEQ ID NO: 365546 - DNA, 771 bp, Homo Sapiens
  misc_feature (387)..(397): n is a, c, g, or t
gtaagatttcacccacaccagtgtcgacgaaataatgcaatgtgcgcagcggccatgctgagcccccagcaactcagggcctaccctgcatccctgctcattccctctcccacccgccacctccggacgcacagaatttcaatctgcaaataaatggtgcatttataatattccagtttaacccgcaagagccttgcggcgtagggagtatcattctcactttacagactcattttacagatggggaaacgggggcccggagaggcaaagggttttttactcagtaaaagtgcagttttcagagcctgtccacgagattatctcattttctcgcacatcggccatgccaggtaggtaggagtaatattcctagtccatttatgaggnnnnnnnnnnngaaacaaaagcttatttacctgcccaaattacatagctgataggtgacccagtgagtattgggacgtcgattttaaattactgggctcgcgctcttttctacattttcacataatttcacacagagcaccctctgtgggcgggcctgcagttggcagtctctaatcccattctgcaagggacacttactgggtattgggctgataagcatccgcagtatctcctttctgtgatgggggaatcatcgctatctagcaaaatctttttttctgggcgccctttatagctacagtgccagcctgcggcctgggactggcacagcaggcacaagcgcctaggactggggtgaagagttaggggacattaagaagcagg

SEQ ID NO: 365547 - DNA, 1124 bp, Homo Sapiens
  misc_feature (22)..(22): n is a, c, g, or t
  misc_feature (32)..(32): n is a, c, g, or t
tgaaaacgggagaaattatcgngaaccaacantatccaatgtgtggggcgctgtgcatgcaaatgtgtggacagaaactcgggatgtcagagtagcaacacatcttcaaggcgtgcctggagcttagatctgactctggaatatactggagtttccctgaaactctttggtccattcccattggtgcctgggcttacgaaacacgtttgtgtccttctctggaggcccgcccagcatgcagcccgtgccccggccccagtggtggcccacgctggacggcccgccgccattcccaggaccactcgcagagcccgggactgagtgaagcaggaggtggcaacgggacctgccccggaaaaggaacttccctgtcaacccaaagcatacatcgcttacaatgttgaagcggttgagaaaacgcacactcagcatctgtctaacatctttagattaaaaactaaaactaaaaggtgatttttttgctacccagtctgtggagacattgaatgaaacgcgtgttagacagtcttagaggttaaagcatgcttcaggttcaccaccatccagagggactggttagtcaatgcagttctacttagatttctgtttaatatatatcttaaaggaaataacttacgaaacttaagattggtctaacattgtgggatttcaaacatttgaacatgtcggttgcatcccagagtataaaaaccttctcacttctcattcagacaaagacaaacacttgtgaaaattggcgcaaaatgagttgtacactaacaagaaaagtttcaactccttcactcttaattatctattccgtacaaaagaaaagcatgagcgagttatttgtgggacttgttggttttgaaggaaacctgtaagattttgtcccccaggcggtagccgttcaggctggctatgaccatcgcggcttcttcatagtttgtcatggtcacaaagccaaccctttgcacttgttggtgttgaagtcgcggatcactttcacagtggtgacggcgccaaacggcccaaacatctgccagagcgacgcgtggtcgacgatatcccggaagtccggaccgtacagcctgcttgataagcgatgtgcatatgaaaaggca

SEQ ID NO: 365548 - DNA, 1189 bp, Homo Sapiens
  misc_feature (64)..(122): n is a, c, g, or t
ggctgccgccgtcgcgggggccgtcaccgccgccaccgctaccgaggccgagcggagccgttannnnnnnnnnnnnnnnnnnnnnnnnnnnnnnnnnnnnnnnnnnnnnnnnnnnnnnnnnnatccagatttttgaaaaatacaatgtctaatggttatgaagaccacatggccgaagactgcaggggtgacatcgggagaacgaatttgatcgtcaactacctccctcagaacatgacccaggatgagttacgaagcctgttcagcagcattggtgaagttgaatctgcaaaacttattcgggataaagtagcaggacacagcttgggctatggctttgtgaactacgtgaccgcgaaggatgcagagagagcgatcaacacgctgaacggcttgaggctccagtcaaaaaccattaaggtgtcgtatgctcgcccgagctcagaggtgatcaaagacgccaacttgtacatcagcgggctcccgcggaccatgacccagaaggacgtagaagacatgttctctcggtttgggcggatcatcaactcgcgggtcctcgtggatcagactacaggtttgtccagaggggttgcgtttatccggtttgacaaacggtcggaggcagaagaggcaattaccagtttcaatggtcataaacccccaggttcctctgagcccatcacagtgaagtttgcagccaaccccaaccagaacaaaaacgtggcactcctctcgcagctgtaccactcgccagcgcgacggttcggaggccccgttcaccaccaggcgcagagattcaggttctcccccatgggcgtcgatcacatgagcggggctctctggcgtcaacgtgccaggaaacgcctcctcccggctggtggcattttcatctacaacctggggcaagatgccgacgaggggatcctctggcagatgtttgggccgtttggcgccgtcaccaatgtgaaagtgatccgcgacttcaacaccaacaagtgcaaagggtttggctttgtgaccatgacaaactatgaagaagccgcgatggccatagccagcctgaacggctaccgcctgggggacaaaatcttacaggtttccttcaaaaccaacaagtccccccaataactcgctcatggctttttttggacgggatagataattaagagtgaagggattggaactttcc

SEQ ID NO: 365549 - DNA, 456 bp, Homo Sapiens
  misc_feature (417)..(417): n is a, c, g, or t
  misc_feature (422)..(422): n is a, c, g, or t
  misc_feature (442)..(442): n is a, c, g, or t
ttaacagaacagaacaacccaaaatgtcaaggcagttatgaagagaactttgagggttaatctttaaaactacaaatcaaaggttttggttaatagataactggcaagaagtaagtacttttctgctgagtgttcatacaaaagcaaaattccaaaacaaaatccgactaaaatagaaaaaggtctaagcgctcacgagaagggatgcgagaaatacaatgctcaaatgtttctgtgttattaaaatacagagccattttacgcctccaagctatgttaaatgctctggaaaacgggagaaattatcgtgaacaacagtatccaatgtgtggggcgctgtgcatgcaatgtgtggacagaaactccgggatgtcagagtagcaacacatcttcaggcgggcctggagcttagatttnacccncggggtatctggggttcccnggaaaactttgggc

SEQ ID NO: 365550 - DNA, 684 bp, Homo Sapiens
  misc_feature (310)..(310): n is a, c, g, or t
  misc_feature (335)..(335): n is a, c, g, or t
cagagagaaagtgctttatcagccgggctcagccccgcacacggactcgccaggagtaggtggtcagcacgcgctgctggcggcgcaccacgcaggtgtaggtgccctcattgacggcgttggcgatgatgctcaggtgcgcctcgcccagggccaggtagccggggtaggagaactccaggggctcctggtccttgtaccagtcactacactttccctttcttgtggaggatcttctggccgcagcggaaggtcacgttcctgccctcgggcaccagcctgggttttggtcctggggcgcgggggggtnggtggccaccgtggggaaagggaanttcgtaccaaaagtcgcagctgctggggcagagcctcttcatgagccgccggcgagcgtcgcaaaagcccctccggcgcccaggaacgcgcacacgaacagcctgtcgaggcatccgtagagccggtgcagcccccacagctcgtcctgggacaacgccttccagccgcgcagcgtggcgttcaggtgcatgagcgcccggccgtgttgtgagtgcatcaggcccagcgcgtggccgatctcgtgggccgccacgtgcaccaggtccgtgagccacacgcctgcgggccccgggggtcagcgcctgggagccccgggcccagccccgccgcccgtgggccagctccccg

SEQ ID NO: 365551 - DNA, 972 bp, Homo Sapiens
  misc_feature (647)..(677): n is a, c, g, or t
  misc_feature (887)..(887): n is a, c, g, or t
  misc_feature (949)..(949): n is a, c, g, or t
ggctacagaatcaacacaaaataatcagtggacggaggtgatgttcatggcaacacgagaacttctgcggattccccaagcagccctggccaagccaatctctatacctacaaacctagtgtccctcttttctcgctatgttgaccggcagaaactgaacttgctggagacaaaactgcagctagttcaggggatacgataaaagatctccaaatgtgtcctgtacctccttttggctgccacctgcactgctgccatcaccaatggagtgtttttaatgagggaaggaaggtagctttttccccaaagcaaagtcttgtgggatcgattcctgtttacaggggttgtctctctaaatgtcagatatttccccactgctctatgaaatttggctgggtgatacttctgctggtttctttaccttctgtgttacagttctgcatgtcctacttttactcagttctgttttgcattttctttgccctagagacacaagtgtaatctctccctttatccctccactactccacctcagagtagattgtagcctgccaaaggattccttccctcatcctattgaagttgttttttcattgccccatattaatatgactatagaagagccaattaagtagaaatcaagatannnnnnnnnnnnnnnnnnnnnnnnnnnnnnncccatacatgtatttatgtggtcttcagagggtccttaaagaatgaattttagattgaaaaatatttagttgtctcattacctcttctaaacacaaaccagctgatgtattttaatctgtttctgttctatcttgtaattaatttggtgggttctacttgttttaacataaataaagagtatggcaggcacgtttaattaaaatcagganctcttaattgggcttatgcccagggtctagggctgaggagtccctttttcttcttcccaccntttattttcctaggtttctggtc

SEQ ID NO: 365552 - DNA, 936 bp, Homo Sapiens
cggtcactccaggctgcctcgctgcgccgctggcggtgggcgtggcgctgccggcggctaggcgcggacgccggaggaggtgtccccgggtttaggggtgttcggccaggggcggggctgccgggcccgggcgactgccggagctgcggaagtcgtggaagcgtcggcgacgcatcgcgcgatggcgcgggcgggacaggtgagcgaagcgcggcttgtagccttttccctctctcggggggacgagtggggcaccacctccgcgcggggctccccgctgggccaccccttcgccagcgcccagccccgtgcggcctgtcggatcaggcagggcagagtcggtctcggcgctgtccccgcccctggggtcggaagcgaaccggggctggccgggcctggtctctggtgtctccggccgggcctcggttcccctcctcccccggcttcccccggccgggccgagctcccctcgcgcgcccattgtgaggtcacgtcctgcaggcgcgccctggcacccgggccaagacgcccggagcggctgctgcagccagtagcggccccttcaccggctgccccgctcagacctagtcgggaggggtgcgaggcatgcagctgggggcccagctccggtgccgcaccccgtaaagggctgatcttccacctcgccacctcagccacgggacgccaagaccgcatccaattcagacttcttttgggtaaagggccaagagggaagggcgaggcggggaggaagcagctcgggccgccttccctccgtggcctccaggacatccgccggggatagattatgcgtttccattggttacccaccttgagcgagccgtttgatagaaaccaagagcttgaaacgtgcattaggccattgtggactcccagtgggaggcgagtgaatgaattattcatagttaaaaaaaa

SEQ ID NO: 365553 - DNA, 988 bp, Homo Sapiens
ggggaagcgtcggcgacgcatcgcgcgatggcgcgggcgggacagtgcttgtgaaactgaacacaacaaaagtatggatatgggaaaccaacatccttctattagtaggcttcaggaaatccaaaaggaagtaaaaagtgtagaacagcaagttatcggcttcagtggtctgtcagatgacaagaattacaagaaactggagaggattctaacaaaacagctttttgaaatagactctgtagatactgaaggaaaaggagatattcagcaagctaggaagcgggcagcacaggagacagaacgtcttctcaaagagttggagcagaatgcaaaccacccacaccggattgaaatacagaacatttttgaggaagcccagtccctcgtgagagagaaaattgtgccattttataatggaggcaactgcgtaactgatgagtttgaagaaggcatccaagatatcattctgaggctgacacatgttaaaactggaggaaaaatctccttgcggaaagcaaggtatcacactttaaccaaaatctgtgcggtgcaagagataatcgaagactgcatgaaaaagcagccttccctgccgctttccgaggatgcacatccttccgttgccaaaatcaacttcgtgatgtgtgaggtgaacaaggcccgaggggtcctgattgcacttctgatgggtgtgaacaacaatgagacctgcaggcacttatcctgtgtgctctcggggctgatcgctgacctggatgctctagatgtgggcggccggacagaaatcagaaattatcggagggaggtagtacgaagatatcaacaaattatctgaaactatctgggattcggacagaggaagcagacacaataaagcatttgacctgagacagaattcttccattttaacaaatgaaaaggtcctcaagagaatgcagcagaaataaaaattgacctctccaagcacaaaaaccttttgaattgtact

SEQ ID NO: 365554 - DNA, 850 bp, Homo Sapiens
gcagtagcggcccttcaccggctgccccgctcagacctagtcgggaggggtgcgaggcatgcagctgggggcccagctccggtgccgcaccccgtaaagggctgatcttccacctcgccacctcagccacgggacgccaagaccgcatccaattcagacttcttttggtgcttgtgaaactgaacacaacaaaagtatggatatgggaaaccaacatccttctattagtaggcttcaggaaatccaaaaggaagtaaaaagtgtagaacagcaagttatcggcttcagtggtctgtcagatgacaagaattacaagaaactggagaggattctaacaaaacagctttttgaaatagactctgtagatactgaaggaaaaggagatattcagcaagctaggaagcgggcagcacaggagacagaacgtcttctcaaagagttggagcagaatgcaaaccacccacaccggattgaaatacagaacatttttgaggaagcccagtccctcgtgagagagaaaattgtgccattttataatggaggcaactgcgtaactgatgagtttgaagaaggcatccaagatatcattctgaggctgacacatgttaaaactggaggaaaaatctccttgcggaaagcaaggtatcacactttaaccaaaatctgtgcggtgcaagagataatcgaagactgcatgaaaaagcaaccttccctgccgctttccgaggatgcacatccttccgttgccaaaaatcaacttcgggatgtgtggaggtgaacaaggccgaggggtcctgattgcacttctgatgggtgtgacaacaatgagacctgcaggcacttatcctgg

SEQ ID NO: 365555 - DNA, 1075 bp, Homo Sapiens
cggtccggaattcttgggatcgggccaagacgcccggagcggctgctgcagccagtagcggccccttcaccggctgccccgctcagacctagtcgggaggggtgcgaggcatgcagctgggggcccagctccggtgccgcaccccgtaaagggctgatcttccacctcgccacctcagccacgggacgccaagaccgcatccaattcagacttcttttggtgcttgtgaaactgaacacaacaaaagtatggatatgggaaaccaacatccttctattagtaggcttcaggaaatccaaaaggaagtaaaaagtgtagaacagcaagttatcggcttcagtggtctgtcagatgacaagaattacaagaaactggagaggattctaacaaaacagctttttgaaatagactctgtagatactgaaggaaaaggagatattcagcaagctaggaagcgggcagcacaggagacagaacgtcttctcaaagagttggagcagaatgcaaaccacccacaccggattgaaatacagaacatttttgaggaagcccagtccctcgtgagagagaaaattgtgccattttataatggaggcaactgcgtaactgatgagtttgaagaaggcatccaagatatcattctgaggctgacacatgttaaaactggaggaaaaatctccttgcggaaagcaaggtatcacactttaaccaaaatctgggcggtgcaagagataatcgaagactgcatgaaaaagcagcctttccctgccgctttccgaggatgcacatccttccgttgccaaaatcaacttcgtgatgtgtgaggtgaacaggcccgagggggtcctgatgcacttctgatgggtgtgaaacaacatgagaacctgcagcacttatcctgtgtgctctccggggctgatccctgaacctggatgctctaaatgtgtgcgggccgggacagaaatccgaaattattccgggggggagggtagtttgaaagaaatcacaccaatttaattgaaataattcggggattttgggaaaaagggaaagccccaaaccctaactctaaagt

SEQ ID NO: 365556 - DNA, 709 bp, Homo Sapiens
tgggctctccacccaagttaggcctgctttggcctaatggatcttactgtatgagcaggacggctgcattggattgtacaactgttttgtgatgcccccagacactgtcatcctaggccgagaagaacctgctagcttgacataccccatgggcttatccttaggttttggaattggtcaacagtgaggcagtttcccttcctgaccatttttttccacccagtcacagataagggaataaccttggccatatatttgctcaataaagattgaaggaagcatggtcatagttgccctgggttcagagcataatgcatatgtgaagcatggggtgacattcctactgtcatgggtttgggatttgtaacggcaaattcctgcccgacgacagggtgtcttacgcaaaggctgacttgcctgaacgctaagaacatgacttctgtctgagctaagagtggcacccatactcagggatcctctggagctaatcctttaagcaaaatgtgcttgccttttaaagatccctgaccgcagctttagctttctccaccagataaccagctaatcccaggaatttgctgccccccaccagtggcttctagggaaagcaaggacctcacatgccaggtgccctagtacttgcttagtgagccatgtcatcctcctttcatttttggatggtgacagcatttttcccctctgtgctgga

SEQ ID NO: 365557 - DNA, 683 bp, Homo Sapiens
agtacagggtcacatcaacggtcgccagtaagagctctcacatcttcataagaggaatcacgtgggcagatatcgcttaaccgattcattaacaagcgtaggcacgtcgcccaaatcggtgcttcagacatgcacggcttccaggcagactcgtagaaggagtaagagtaggagggcgactgtatgatagtggatgtcccgaatgctgtgaaggtacaagccccgtgtggagccgcttccggagctgggggtggtgtaggggtggacaccggcaaggccaccctgaccgcgagcccactgggtgcatcctgagagcaggggtgacgtatgtagaacgcttagggtgtcctccccacagagcagatacttgaaccgactcaattcctgtgtaaagagcactttgtcctgcttcacggacctccccaaagtgtgcagagttctatataggatgctggattagttcctttgatatttgtaaaaattcccccaagagccgcatatgaatctgccctttaataaagcattattgagattgctggcctattggggaagcctgcgggcacaggagcaggcgtggaatccaatacttgtaaatgaattgaagcgtcaggaccacccgcctggccacgtgcgcgggcccctggacctaacgaggcagtgtataaacttattctctagccctg

SEQ ID NO: 365558 - DNA, 875 bp, Homo Sapiens
  misc_feature (65)..(100): n is a, c, g, or t
ggagggggttggtatctcgtgctcttctccagagattacaaaaatgtagcttctcaggggaggcnnnnnnnnnnnnnnnnnnnnnnnnnnnnnnnnnnnncccaatctataggagcagtggactgcttgctggtcgcttacatcactttactccataagcgcttcagtggggttatcctagtggctcttgtggaagtgtgtcttagttacatcgagatgttgaaaatctacccaaaatgcagacagatactaaaaacttctgttcagtaagaatcatgtcttactgatctaaccctaaatccaactcatttatacttttatttttagttcagtttaaaatgttgataccttccctcccaggctccttaccttggtcttttccctgttcatctcccaacatgctgtgctccatagctggtaggagagggaaggcaaaatctttcttagttttctttgtcttggccattttgaattcatttagttactgggcataacttactgctttttacaaaagaaacaaacattgtctgtacaggtttcatgctagagctaatgggagatgtggccacactgacttccattttaagctttctaccttcttttcctccgaccgtccccttccctcacatgccatccagtgagaagacctgctcctcagtcttgtaaatgtatcttgagaggtaggagcagagccactatctccattgaagctgaaatggtagacctgtaattgtgggaaaactataaactctcttgttacagccccgccaccccttgctgtgtgtatatatataatactttgtccttcatatgtgaaagatccagtgttggaattctttggtgtaaataaacgtttggttttatttatcaaggtt

SEQ ID NO: 365559 - DNA, 579 bp, Homo Sapiens
  misc_feature (38)..(38): n is a, c, g, or t
  misc_feature (62)..(62): n is a, c, g, or t
  misc_feature (487)..(496): n is a, c, g, or t
cccaggaacctgggctgtaatccaggttatgccccganagggatggccagacaatccccacngggttaaaataaagccccatttttcaaatttaaggggaggtttcctcaaggtttattatatttttccccttgtttttatttaatgcacaatatgggcattatatcaatatccctttaaactgtgaccctggcatacttgtctgacagatcttaatactactcctaacatttagaaaatgttgataaagcttcttagttgtacattttttggtgaagagtatccaggtctttgctgtggatgggtaaagcaaagagcaaatgaacgaagtattaagcattggggcctgtcttatctacactcgagtgtaagagtggccgaaatgacagggctcagcagacttgtgcctgaggccaaatctggcccaccacctgtttggtgtagcctgctaagaatggcttttacatttttaaatggttgggaaagnnnnnnnnnngaagtagtagattttgtagcatgtgatgtaagtaatgtaaaacttaaattccagtatccataaataaagttttatgagaacag

SEQ ID NO: 365560 - DNA, 696 bp, Homo Sapiens
  misc_feature (19)..(19): n is a, c, g, or t
gacaaaaaagtaaattacnaaactgtaaacaaagtgaagaaaaaatgtaataatttgcctttttgtaaaagcagttagttgctgcacatggataacaacaaaaatttgattattctcgtgttagtattgttaacttctttttgcgactgcgttacatcatttaaagaaaatgctgtgtattgtaaacttaaattgtatatgataacttactgtcctttccatccgggcctaaactttggcagttcctttgtctacaaccttgttaatactgtaaacagttgtacgccagcaggaaaaatactgcccaacagacaaaatcgatcattgtaggggaaaatcatagaaatccatttcagatctttattgttcctcaccccattttcctccttgtgtatgtacttcccccacccccctttttttaagtaaaatgtaaattcaatctgctctaagatatgaggagttatttaatttcttcagatgtatcgagctctgttttcttccccccgagtcctcccaatcttttgaaacattaaggccattttccttaaggatgtttttggctctcctactccccgtgagaaagatctttccatttccagaacttctccacactaaaagtgaaatatttttgtgaaatgcttttttagggcctgccaaactcaggtgagtctgttctctgggataagctggcttctc

SEQ ID NO: 365561 - DNA, 1029 bp, Homo Sapiens
  misc_feature (418)..(478): n is a, c, g, or t
  misc_feature (570)..(570): n is a, c, g, or t
tgacagatacgaatcgagctggcacccgatgagtcagctggctgggatggagggacggcaggtgatcatgtacagatgtagagtgagaatacacagcattttctttaaatgatgtaacgcagtcgcaaaaagaagttaacaatactaacacgaaaataatcaaatttttgttgttatccatgtgcagcaactaactgctttacaaaaaagcaaaataatacaatatatcatcacatatatttacagtatagtaaatatactttttttgtcaaattttacacaaactatttacaggtgaatatactgcattaaaaaaaattgtgtggctgacactaagaatgaatttttgcctaaatccattgcataacattgagtaagacatgcctcattatgcctgggagtcggggaaggatgtagnnnnnnnnnnnnnnnnnnnnnnnnnnnnnnnnnnnnnnnnnnnnnnnnnnnnnnnnnnnnngggagggttgctggctggcactctgtctccccaactaggacacaggaatagaagctgactgtttaggatgtgtcccgggcacccggcctcangtccatgaaacaggtgttgagtgaaatggaagacagagctgtagcccactttgccccaaatctactgaactgcatctcccatctgggcaactaagggcatgccccctcggatgggagtactggccataacaggtagattaccccaggacaaaaacatgactgagttcccggtttccctctttaacaagtcaggggaaacatcctacaaaccgaaacgaattacttataatatttttaacagaacttatgtcaattacgcagaaatgggcaacttggtctaaacttcagaatttcttttatagattacaagtatgaagactaaaaaagtgttgcatttctcaagggacacatagtggtgagaggtttatctcatgtacattttagttacttggaaagctagattttcctcaaaagtcagaagttctttaaacaaggtaaattttaaaccttagttaagtt

SEQ ID NO: 365562 - DNA, 728 bp, Homo Sapiens
cgaatgctgctctatgatgtatgccgtggacaagagatgcctgggcgtcaccatgccacagctacccacttgtagccaccaggcctataatgaggaaatttctgtctgaccaatatcaggagcacatacagctgctgtactaagttatcttcaaatatcctggaattcgtgtcgagtacatccgagaagtaacaccatatatcaagaagccatcataagtatcagatctgccgtgggaaggtgcagacccccagtcaccaagctttagtggcagtgaggactctggatcgccaaaacaccagaacagcaccaaggacaggaagatcatccctctcaaaatgtgctttgctgctagaaacctaagcatgccggatctggaaaacagattgatagagctacattctcctgatagcaggaacacgttgatcctacgctgcaaagatacagccacagcacactcctggttcgtagctatccacaccaacataatggctctcctcccacaggtgttggctgaactcaacgccatgcttggggcaaccagtacagcaggaggcagtaaagaggtgaagcatattgcctggcatgcagaacaggcaaaactagatggtggaagacagcaatggagacctgttctcatggctgtgactgagaaggatctgctgctctatgactgtatgcccgtggacagagatgcctgggcgtcaccatgccacagctactcactt

SEQ ID NO: 365563 - DNA, 601 bp, Homo Sapiens
  misc_feature (537)..(537): n is a, c, g, or t
caggtttatcaggtcaaacccagaacacatcctcagggcaagcaatctgaggaatctcagtatgcaggaccagttcagcaagaggtttaggttcaaatcaggagtgagggcaaagtctggctcatggtggaaccttagaaaagtccccaggcaccatgtgaggccatgtgccatgaagcccaattgcaggacagaaaaggatgcccttctacccacacagttggccagacccaaccctgccaagaacacgccttctggttccaagataacaaaaacaagtcctaggtcacaccacccacagtggtgagagcccaagggctgaagtaggcaaaggccaggctcccataactgagcccatagccattttccccactgggcagagtaaaagctaaagaagccttggggcgaaggtcaggaagctgtagaggggtataggaacaacaaagacccaaacagctcatctgtactacatatgtactattgcatctactttaataaatgcctaccataaatgttgcaagctgacttcatcagcangtatggactgagcagggtaaggaggctgggaattgaggttccagctctactataggctttctga

SEQ ID NO: 365564 - DNA, 498 bp, Homo Sapiens
tctccccaccccagcgcccagggaagcggctcaaccacctgaatccggaaaacgccaacaagtagtttctcgtcggagaagggcggctcacctgggcgccaagactcagtcccgctgcccagagaacctcgtccactcggaaaccaaagcagaaccacttttctctcggtctcgttaagtcatgtctgagtcacagagatgggcaagatcgagaacaacgagagggtgatcctcaatgtcgggggcacccggcacgaaacctaccgcagcaccctcaagaccctgcctggaacacgcctggcccttcttgcctcctccgagcccccaggcgactgcttgaccacggcgggcgacaagctgcagccgtcgccgcctccactgtcgccgccgccgagagcgcccccgctgtcccccgggccaggcggctgcttcgagggcggcgcgggcaactgcagttcccgcggcggcagggccagcgaccatcccggtggcggccgc

SEQ ID NO: 365565 - DNA, 518 bp, Homo Sapiens
tgatgaggtactttgtaaggtttgacataccagattttttaacccagatcctgtttgaatatatctggaaatattctggggcaactaacctcatttttatttcaagtggggatatatttttaagggaaaccaggcaatcatctataatgaagtgattctcaactaggtgatttttgccctttgggggtatagcaatgtgtgaagacgttttgggttgtcacatggagggggaggtgatggccagggattctactaaagatcctgtagttcacaggacagtcccctgtctcccttagtaacaattaccagactcaaaatgtcattagtaataaggttgagaaatcttgctgtaaagaaataaggcttattccgatgctcactaaagtcggaaaaaaagcttttaagaaaaccctattttaaacttatttctaaaagtttagtatcatcctggtgatcatgtggaattgcagtagtagttgagagaggtcatcttcactcccaaaaccaaggcaaaaaaa

SEQ ID NO: 365566 - DNA, 737 bp, Homo Sapiens
accttagggaacaagcattaaactgacactcgattctgtagccggctctgccaagagacagtggcgtcggggtgatatgagggcaggggtcatggaacgaaagccttctggttttagacccacaggaagatctgtgactgcgctcttcggtcagagcacacgttgctgggcgtgcgcttgaaaagagcctaagaagagggggctgtctggaatggaaccgcaacgccataggtgagggctgtccatgccttcccgcttcaacacctggagcacattctggaaagtttcctagagaaagccagaaacaatacttttatagataaatccagaggccagacgggctaatggggctttactgcgactatctggcttaatcctccatacaaccttgccataccagcccatcagtcctctgagacaggcaagcccaagaaagtcaggggcctatgtgagccaaagaggagagaaggtgatgcctcagcccagtgttctctgcacccgacctcgcttgtggccttcggaacttgatttgcaccgcaggaaaatgggcaatgaaaagccctccctaactggcttctcagttccactctgaccatgcccactgcacagcagccaccctgcagctcccagatgaggcctcactctgtcaacccaggttggggtggagtggcacagtcaacaagtcactataaacctcaagctcctggggctcaagtgatcctgccacctcagctcct

SEQ ID NO: 365567 - DNA, 535 bp, Homo Sapiens
ggactaggaagggagaaaataggaagctgctgtggcataggcatctgcatgggcagatggtgaggccaaagcccctgattttgccatacctcctgccctggtcaggactggttcaggcattagggcaggcccagccagggcagaagccttcctagatacacctgtggggagttgaggaactacagcagggctgaaaccctgctttcaggggcccccatgtggctggtaggggcagcttttggaagctagactggatcctattactccccagatgaaaagttcaaattccttaatacaactcagagctcatcacaatatcacaaccctcctttctcggctcgcttcctccttaagagctctggggcgattctttcagaccagcccgagggatcttccacaggttgttaatatgggctagaaacaaaaagtggtggtgtttctatgatctaatttgttggaacaaacgtagtgttaaactcaaacatttctgtaggacttcttggagctttaactatacgaacatctactgtaactc

SEQ ID NO: 365568 - DNA, 462 bp, Homo Sapiens
  misc_feature (93)..(93): n is a, c, g, or t
  misc_feature (125)..(125): n is a, c, g, or t
acaggtggtccccaggccaagatgggcaggtgtcacaaagaagagggccctaagggctcacaaccaaagtgatccgccaagcagggcagtatntgggttacagtccacagcacggaagaaccacntggagagacacgtcagaaggacttccctgacatctgcaccaaggagagtctggacaaagctactgaaactcctccacctgcttctaaaatgcccagaagacaactggaccagtttggtattagaagtaggaggctggacgacttcacccccaaagggtcctgaagccccagaactggcatgtggaaggggctgaggcctaattgaggttggtggattcacacatgggggtcctccaggacctcagctgcacccattttctggaggttttgctgcccacaacaccagtatttcacaacttcctggtcgctgagaatatttattcaaaaacagggattg

SEQ ID NO: 365569 - DNA, 418 bp, Homo Sapiens
caattaagctgaagaggtttatgaggcccttatttgtgtggatagtggacaggtgctgggaatgatggatggcaggaagatctgatactagagcagttaaaattatctaggcaagtgagatggggaaatgaagtcaaacagcagcagcagggatggagggaaagtgacaagtttatgagtctaaactggagagagagaggatgagggaagaagaatgtagaatttgaagattgtttggttcttctggtcttccaattatgttcaagtatatgtgagatgcaatggtcaaagtaataggtacataataaataaaccatttctgttttcagcatctgtagatcaaactttagcttgccttagtttatcattcgtgtgtttagactaggatcaaataaatatattcattttcacactctaa

SEQ ID NO: 365570 - DNA, 472 bp, Homo Sapiens
ataatttggaaaacgcagaagtatgctaagaacaaagtcaacaataattccaccacccagcaataagtactgaatggctaaaataactctttggtaaatttattttcagtgtttcctgacacccaaagcatttatagatatatatgtttaaaaagagtcgtgttatatataggagtttatgttcctcccttgggtattttgagaaactataaaattaaatcattcttatgattaagaaaaacagtgttacagcaacagccggtttcaatcccacctccacttacatttccattccaacacttcagtgctgactaacacccactgtttgaaaaactttctagaatttacatgtatattttatatacactttgaatatatcttcccttccttctttacccccatacatatcaaaatatgctttaactttgactatcttgttattaacaaaagacttaaataaatatgttaactt

SEQ ID NO: 365571 - DNA, 162 bp, Homo Sapiens
attcagcctaactgaataaggctaaatgaatactgtaattgaaaatatattttaaatctttgtcatgagtttttttaaaaaaaactattgcaaattgtatcattcctgattacacagaactttgtgggtggttttaaataaattttatacttctattttgca

SEQ ID NO: 365572 - DNA, 222 bp, Homo Sapiens
cagtctgtagtgcctataatattaaagattaatgcatatcttttaaaatagtcctcataagaaaacagaaatgttaattccccttattttaaaaattggaagatgaaattaatgtaaaatatcaaagcagaaattatataaaattaatgaatataagttcaaaacttctatgaagataccaatgaagcaaataagcccctgattaaggagaggatgagtagc

SEQ ID NO: 365573 - DNA, 471 bp, Homo Sapiens
ttcaaaaaaaatgtatctttacctcaccctacatgaatataaactccagatggtttaaagacataaatgtcaaaagaaaaacacttttagatgttagaagaaaatatagatatatttgtttatatatgaaccttaaattgagtaagaatttcttaaacaatataccaaaaacagaagaagcaaatgacatgaagaaaacattgatatatctgattatatcaaaatgcttagcttggatataaaattttaagatatatttatgcactaaaaatataaaatcatgaatcattgttaatttgagagaagcaggaagaacaatagatccagagatagtacccaggatattttaattatatgtataatttctcaaaaacatctttatatccatatatgcttatctatatataattgtatctatatttctcaaaaatatgtataataaacatttatagcaaaatgctatagtttgac

SEQ ID NO: 365574 - DNA, 181 bp, Homo Sapiens
cgcgtccggttttagctgaactatcaatccaactttccttgaatgctgatgctttcctagggttctggggacatgaataaagtgacatttccttgatttttcccgctgcagtctcaggccgtaggattttctgttttgtgaaatgagttataacttgttcatattaaagtgagatagaagg

SEQ ID NO: 365575 - DNA, 255 bp, Homo Sapiens
cgcgtccggatcattgcagttaaagaatggttctgccttttgattatggtggtgtttaaataaatatgtgtacatatgataaaatggcatagaactatacccccccatcatattaatatcaatttcctggttttgatattggattataggtagataagatgtgaccattgggaggattggataaagggccctgagaaactaatatctttgcaacttcctgtgaatccataattatttcaaaataaagagtttctt

SEQ ID NO: 365576 - DNA, 472 bp, Homo Sapiens
  misc_feature (29)..(29): n is a, c, g, or t
gcaaaaaatgtcttttaagagtagaaaanaaattattttgtatgtacagaagctgaagcaattcattaccaacagactcacattaaaagaacagttttttaaagttcttaggaagtagaaaatgaaaccagatagaaatattgatctgctcacacaaaaaagaagagtacttgaaatggtaactacatatatattaaataaatgcattttaatttttttcttattgtttaaatctctttaaaagataagtgacaatgtgggctttatatgcatacatagtatgacaacaattgtacgaagtcctagaggggagaaatgaaagtatattattgcagggtttttatgctatgtatgaaatggtataattgcacttaatgtaggctactatatgttaatgatgtagactataagccctgggaaactactaaaataacaaaataaagagttatagctaataagccaacaaagaagt

SEQ ID NO: 365577 - DNA, 488 bp, Homo Sapiens
aaaagttcaaaataaagcagcatcacttattcagggatattggagaagatattccactagacaaagatttctgaaattgaaatattattcaatcatcctgcaatctaggataagaatgataattgctgttacatcttataaacgatatctttgggctacagttacaattcagaggcattggcgtgcttatttaagaagaaaacaagatcaacaaagatatgaaatgctaaaatcatcaactcttataatccaatctatgttcagaaaatggaagcaacgtaaaatgcaatcacaagtaaaagctacagtaatattgcaaagagcttttagagaatggcatttaagaaaacaagctaaagaagaaaattctgctattatcatacaatcatggtatagaatgcataaagaattacggaaatatatttatattagatcttgtgttgttatcattcagaaaagatttcggtgctttcaagcccaaaagttat

SEQ ID NO: 365578 - DNA, 464 bp, Homo Sapiens
cctaaccagatactgaacctgttggcaccttgatcttaaacttctcagcctctggaattgtcagaaaaaaatttctgtctttcaggaattacccagtatcaagcatattcttacagcagcacaaactaagacagggaggcttttgctatctctcctctgaattgtcacaattatcttcgaaatggtctttctactttcactttcatggctttccaataattctcaatacaaatgcatgattacataaacatttgctcaagaacctgtataaaaagactggtggatagtgactagatcctcaggatatgcagggctcaagagaaatgaaatatcttggggatatggttacttaagacgtgatactgtcacagtgaatttcacagaagatggtgctgccctaactgaggttcaatccatgtataagccagaccaatctgaagacaaataaagtatttcacagccac

SEQ ID NO: 365579 - DNA, 473 bp, Homo Sapiens
gaatgagttaagattatcagagaagcatgtgtgggttttaggcatgtgcagtgctacagtgttgtgaaaggtatagacccctgaggaaatagaacttattcagagtgtcgggactacaggatgtgttgctgatgggacaggggatgatctagaaatgtagattgtgatcagatgtaaaatgtttgtatgtctagcaagtgagtgtgaactttatcctgtaaccagtgcggagccaatggaggtttttcagcagggagtgatagcatcctctttcttattttagaaagataaatggtgcaaatgttggagaatagagaggatagagagaaattggaggcaaggagaccagagaggaaattattggaataacccaagggatagatccttactgcctaaaccagaacagtactattttgtatagtgaagaaaggatggctctgataataaaaggtttttagtagtgagaggatgag

SEQ ID NO: 365580 - DNA, 392 bp, Homo Sapiens
taccccccgaatttggtgtggctgtattcagatcgtattaattatctgatcgggataacaaaatcacaagcaataattaggatctatgcaatttttaaactagtaatgggccaattaaaatatatataaatatatatttttcaaccagcattttactacttgttacctttcccatgctgaattattttgttgtgattttgtacagaatttttaatgactttttataatgtggatttcctattttaaaaccatgcagcttcatcaatttttatacatatcagaaaagtagaattatatctaatttatacaaaataatttaactaatttaaaccagcagaaaagtgcttagaaagttattgtgttgccttagcacttctttcctctccaattgt

SEQ ID NO: 365581 - DNA, 463 bp, Homo Sapiens
tatatatatgaaatcattaggactttgagaaacagactagctgcattaagcagctactctgaaagtattttagtattcgacatttaacattctctattgtagcttatgttgtacccacaaagaaagaattgaaatttgacatttcagttatttcaaaaatgatctctttgaccttattttccttttattccagtctctcagatttcaccggcccttaggctatttgcttgacagcatctctgaagaaaaacatgttaagcttttctagtgagatacagctgatggcagccattgtcaaaagctatcagtggatttctttgtatcagcaaaatgcagttgacatctaacatggaacctgtgcattaatctttattcatacaaaatgttaaaatatttatacacttaattatgccttatcttgtccagtttgtccaagtatactaataaatttgaaaataatttc

SEQ ID NO: 365582 - DNA, 423 bp, Homo Sapiens
cagtaaccagttaaaactgtggaatatcacttctggttgaaaacccagaggaaaggccctgctgttttccacctaccacgttgtctgatttcataaaagggctgtgggggtgggaagggcagtgggttcggtggtgtgggaaagaaagacgaatggcaggcttcttccccagattctgcccgggtccacacaccctggcccaccttctccatatccccctcttgcagcagaagccaggaagacttggacaagcaacaagcaacagtggctatcgtatttattcagtgtcttcgctgagccacagccccagcacaatcaagagggactttcatgaaaggcaggaatgcagataaaacaaagatatcagaaatttgcacctatgtttctaggtacaagagaaggattatttccaacaatctttgc

SEQ ID NO: 365583 - DNA, 1367 bp, Homo Sapiens
taggaaagtaaactttgttcagaataaatcctcaaatggattactgagtagtctttgcaccattcccatcagcctaatcagactgaatggtcacgctcagtgcaaaaagctgttttgctgttaggatgtttcagtgtttcttgtctttcctggaacagttcagttgtttaaatttagtaattcaatcctgaccagtgtaaacccacttaattattgcagcctaaagaattcagctacttctactcttcataaatgtgcccaagtaaatatgtgtttttaatattcaaccctggaaaattagtaattcagatgataaaagctcatgttttggtgtctttgtactcagattgtgaacaggcatatttcactgatttagacttagtatacttgatgagaatgctcaggttgaagagatagttctgtcagcaatccaacatctatagcaatgtggaaaaagtaatcaactcatatttcacgaatttgatgtatgttgtgatttagagggcatgagataaagtttatatttgaactgtgtggggtagggggaagaagaggttgcttaagcaaatagtggggtgattgtggaacaagatgtctctaagatgagaagttattttcttgcatcatagaagcactctttttacccgtgagtgattgtgttaactataaatcatttatatctgtacattaaagcagattccctcaattaggcaaatttggttagccaagcccaagttattgtttgtacttgaaagtaataaagctgcatttccttaaaaatatattctgtagttaagactttgtcttgctttccccccaaccacttcagacattttatccaaccaatgcagggacttttcaaaagtcagtgtgtttttgaaaatagaacaaccccttgagtgatctgaggtggctctgtttttttactgtttctgcatcttctagaaggtaaactcaacagatataaccatttctgaaggtgatccaaaaagcaaaacaataaaggtaaaacacaaggaaataattttggtgaatttcatgaatagttgcaaatgaacgggatggggtgggtaaaagtcccattgtgcttccagaccttggaatagtcgttcctctcttatgcccaaggatgtgtcgatccagcacatctttgcagtgagttgctttgcttactaacttaaacttacggggcttctgtgtcgatttgagtaccacaggcctgcacctttgatcccctgacagcatcattaagggcagatgtcattcctgttttacagatgagaaagctgtggcttggtaaagtgattcatgcctagaggagttatagtaagtggtgaggctgaagccctgatatagacccaagactg

SEQ ID NO: 365584 - DNA, 411 bp, Homo Sapiens
gctctcccaagagagagtgggctcctgaaggaagaaataaggaataaccagatgcgaagtatgatttagagaggattcctagtacaacgcagcttgtttggaactggagaggtcgcagaacaggagtggaagaatgcgtggaacgcagagctcgccctagttgagagtcggaagggttgagcccttgctctgcggcataccttaaggggggattcagacacagagacatgcatccagggaagaaaatgtgaagtggcatgcacaagagtggaccatttacaagtcaaggaaagatccctggaagagatccttccctcttactactcagaaggaaccaacccagctggcgctttgatttggacttccagcctgcataaatgtaaccaataaatttctgctgtttatgccgcc

SEQ ID NO: 365585 - DNA, 781 bp, Homo Sapiens
tcacctcggtaccccggtagactgtcatcaacacagcctgtttcaccctctggacccgcctcctctgagggagtggactggaccactgaatgtcactgttccttgaatcatgggcctaccagattgcctgccagaggcaggactgaccagcccttctgggccccagggcaagccagacactgagtgacaccaaaggctttgtaactatgtcttgagggtctgctgccccagcctggcagcaggaaccgccctccccaaacacccacagccactgacccatccaggactccagagagtcaggtcaaccccgaggaccccttgggcccttctggggtactcctttcggcccccctggtagagtctcgggagttcacacagggtggcaaacaccccctagagctcctctgcctgaatcctgccccctagcctttgaccactgtcagccacctgtgtcccttgagccttcgggtcttcacttcccacttggacatcactgctggacattcccatcgagatgacacctgggttccaatcccagctctgcctttgaagcacttgcggccaccgtcaagtccctttgctctcggaccctgggtttctcatcctttaatgaggtgggttcagaagctctcccatcttcacagcaaccctggcactggcttctcaatgggagggaagcagcagagaaactgaagtgttagacactatgtgtcccaccaccccattacagagacatatgacaatgttcagcaggtcatctttaatgcagaggaggagatgg

SEQ ID NO: 365586 - DNA, 563 bp, Homo Sapiens
  misc_feature (13)..(13): n is a, c, g, or t
  misc_feature (51)..(51): n is a, c, g, or t
  misc_feature (70)..(70): n is a, c, g, or t
  misc_feature (93)..(93): n is a, c, g, or t
  misc_feature (101)..(101): n is a, c, g, or t
  misc_feature (106)..(106): n is a, c, g, or t
  misc_feature (128)..(128): n is a, c, g, or t
  misc_feature (137)..(137): n is a, c, g, or t
agagccccaattnccccctactgaaggcatttggcgggggctttccagggnaaaaatgcctggcaccctnaaagacccctagagaaaaattgngggcccantaatnaaaccttaaagactttggtttnacaaacaanaaatacctactttggagagggagattaataataattgaaaaggagcctagaggaatgtataatgtttacccattaaacactatccctttatttaacagccccatgggggaaattccctttataccccaggagcccatgtcttacccaggtaagaagcccagattgaactggagggacattcttccagtcctcttagtaacataaacccctgggatgtggtccaagtttgacctgtcattaaaaattccatactccagtgggttagaagctagattccaatgaaggcggttggttttgtttttctatttacaaccattcttagtcacattcttctctgggcttttgttgtatactttaaaaaaactgtttgatgtgcaatttgttacctgtaactttctaaatgaataaaagaagattgaaaaaata

SEQ ID NO: 365587 - DNA, 430 bp, Homo Sapiens
catttaaaaatacttctctctcttttctaaaaagctttaactgtagtgcctcctaataagcagtatgtttgtttcattgtgagattgcagttctgtatttcgaatgagtctaagaaccacagggataatactgtgcagatttcctgttctttacctggctctgcttccagcagtattgacacctagtccttgctgcattgtacagtagcttttcaaactgcagttttattgctaagtttttagtatgggtgatactggagtcttatcatttgaagtgtttgcttttctacttttacagtaaaacctcattaattctgaaatttaagataatgagttaagctgaagagtttactgaagcaaattaatagtgaggaagcctatttgaactacttaaacagtattaaagccctttttaaaaagcacctatttg

SEQ ID NO: 365588 - DNA, 491 bp, Homo Sapiens
tagcaagccctggagagcagcactcgggcaagtgagggtggctctggcactgcccctggactttcatgtttgtagcttgagctggttttaattggaagctctgtgatttacataatcacttacaatctctgtaaataaggaactatttatgaggaattgtaaatttcctctctcccccttcttaccctgtctgtgatcttgtctgtgatgcagtaatgatattccactctaggttcccatgatcagtggtgaaatatagtgattttcacctgtgcttccattctgaagttctggaaagaagtactggatggactgaagtccaggacaacgtcccaaagaaaggcagagtccaggtaggcttggaggaccaagccctggatgagcactggagggcagaggcctcagtgtccagcactgtgccctgcacatggaaagcccctacgtttgtggaatgaatgaataataaaaatgttttcataagtgaaaaaaaa

SEQ ID NO: 365589 - DNA, 1139 bp, Homo Sapiens
gggttatcagaagccattccatcattatagaccctttttcattatttcatttgctctcatatatcagtattatttttgagcattttgttacatgtcattcacaacttacctaagtgtgctgtgttctggtagcccgtatttgaggtaagctgctgaaaacaaaagtctctatattctttgcctattccaaagagctaaaaaagtctaacccaggaaagcttttgatattttgtgtttgttttcttgttcttatggttgttgttgctgtattatgattgctgttttacataaaatctatgggaactgtgaatacagacaagagagccacagtagagaggcttgtttaatgcagtaccattggagagttaacagaataatctagtagaaaaataactggttgcatgtaaaattccttccagccagaaagaaagaaagacaaggagtaagggggatttagagttatgtctcagctacacattacattgtgatactgcagctcaaattcagaatggcaatgatacatgatatcatggcctagatccttgagagggacctggctttcctttttaaaagatattttactgaagagctaaaaactggccagtgtggggttagcagatcgaataacttgaaatagaccgtgcagtattcctagcactcaatgtaatcaccccatttgtgacagagaaagggaaaaaaatataataagatcatctacctataatttgaataattttgagctatcaaaatgtctttgtaattttcacaaccgctgtccattgtttgaggatgttacctactaaactgaaaacattcattccatatctacttacacatacaccagcaacagtataaatgtaagcctaactttgcaaaattcgtaataatttagtgatggaattttttaataacatgcagtatataaatgtgcagattttatgcgtgttgacaaaatcatttttcagcttgcaaaatgggactgcaatattacatttttcacttaagcagttttttacatctacgttgttgctttctaaaatgaatgtgaatgccatcttttatgactgcaacttgccttttccattacagaaatttttgtttgatgtaatcaataaactttggtatgatatgattgataa

SEQ ID NO: 365590 - DNA, 618 bp, Homo Sapiens
ggcaaatggacggattggacaggttggaaaattcaaaaatggaacactgattctgagcccagttgatatcaagaaaataaattcttccagagtggccaaatgaagtactttgtcaaataaaacgaggatgggaacaactgagtcaactgcagcggccctggaccctgtgcgactctagatagatcgttcttaacacgcatttcacagactgctttttcattttagaaaaaaagtcaaacagaagtaacatttctagttgccgaagtgtctgcttcatggtgctgaacgtgtcaggcccagtgcagcatgaatgtgaagtgaacccactgaaaagtgatttttaatgttctccagcaaacttcactcctgtttcatgttcactggtatttggtgcatttgcttgtaatacagttttttataactttactgttttgtaaatgctagtagtttacattaaattgccttatatttttaatgatttaatgttatgatatcatgaaagaaccaagaatctagtaatttatcagttttgtggaaaagcagttttaatttttagcctaccatgtgtacaaaatctacttcataagaagttatataaataaaataggtttgtagtat

SEQ ID NO: 365591 - DNA, 1072 bp, Homo Sapiens
agatatgttaagaatgagatggtttgtccctttcgtttcagtttctgtggttccctgcatattacgtctgccctttttttctcgatcttctttccgaacaggggcatcgttcgtcacttctgggccccaccattcaagatgcctacgcttaatcctgcactggaacctcctgccctgaatggactagcacacttgtcctttcccggcgcttctctgagaacccaggtgcagtccctcatgctgtgttatcgtgtgggataccaatactctcgccctaatgtctcatcgagacatcaagcagggaaaatccagggagataaaagtcatggtgacaagtcctgggcagttctggtaaacggtccagttagggagggagtagaaactattgactcaaaagagtttctggctgatctgtggctttgcctccaccatccctaaccaacctctcatcacagcttttgtgtgtgggctgagtgctggccttaaccctaggcgtggaagagaaaatgtgaggttgtttagatactcatcaggacctcacaggagctgagacttatcagccagaatgtgttcttcggacagtcgtacacatcttacagaaaaccctccttgtagagttggttgtggtatgtgtttgatgctataaagctcatttttaatgtgtacacctgctctagggacgattcgtttgaaagagagtaagatgcattaacagaaactatcctgggattaggtgaaaaatgtctagcaaaagaaacaaagtctttaatagagtggcctctttcgctcttcgattatgactgctgcagttttaccccagcagtcagctgtctttgtcaaccatacgtttttggagattgggtctagcacatgtcacccttgtccacgttgtttcacatctggttagggggcagattttaaaatgtagttttgtaatgttacatttaagcatgataaatgattagactaccagatgttactagtgctaactttgtattcttagacattaaaatgattgacataaactctttgtgccttgaaaatgaaacaaattataaaaatgtttaaatgg

SEQ ID NO: 365592 - DNA, 988 bp, Homo Sapiens
  misc_feature (489)..(569): n is a, c, g, or t
  misc_feature (579)..(593): n is a, c, g, or t
  misc_feature (812)..(821): n is a, c, g, or t
ggttagacaaatgctacattaatgtttgggtggtcagattctactttgaatctgaagtttgcagatatgcctatagatttttggagtttaccactttcttattctgtatcattaatgtaatattttaaattactatatatgttaccatttttctggatttagtaagaaatttgcagttttggtttgatgtaacaagggttttaatgtaatttatgttagattttgcatttttttcattactgttatattttaacctgactgactgatctaattgtattagtattgtgaataatcatgtgaaatgttttgagacagagtactatatttgtgaatataattttatggtttttttcacttagaacctttctgtgtggaaaactaagaaaattgctttctgctgtataatctggcattcattgtagattaaagcttatttttctgtgaataaaacgtattcaataaaatactattctttaaaattaacaaacnnnnnnnnnnnnnnnnnnnnnnnnnnnnnnnnnnnnnnnnnnnnnnnnnnnnnnnnnnnnnnnnnnnnnnnnnnnnnnnnntccttgccgnnnnnnnnnnnnnnnaaaaatttttcaaaacctttctttggccgcccggccccctaaggaaagggaccttggcctaagttgttcccaagaaaacccgggcaagaacaagggttggatttcccccaaataaaaaccccccggggcgacccaagggttctaacaaatccaaagggggctttggggcctttccgggacctctcaacgggaccccaagcgagcccaatatcaattttnnnnnnnnnnttggccttatgggaagaagtggggaaattcttaaagcctttcccccgaacttgaaacccctcccaaaccggccttgttgaaccctgaactcccccggcggcatcaccacccttttgcccccctgtgccaaaaataatttcgccccgggggcaaaaaaccgggggggg

SEQ ID NO: 365593 - DNA, 405 bp, Homo Sapiens
cactccataatgttcatgtcagccaaagaggactaaccaaagctgaaatctcagagaacaatttgctttactaagctgagtcaacttgagagcgaacttctaacaatgccgcactgtagtgtggctggttctaccactatgactttaaaacatgtttatatcatttttaatttttatgatacggtagtgtcagggagaaatgtaatgttctatatgaaattcctttttcaagtttgttcattaataacagttattaatttaaatcagcgttagagtttgtgctgctgcaactgctgtgaaaatttctctgagtaattctgatttgtgaatgatcccagaccaaccctgagattttgtcaacctgattaagtcaatatgaatgattaaaaagatgtgagaacactg

SEQ ID NO: 365594 - DNA, 700 bp, Homo Sapiens
  misc_feature (29)..(29): n is a, c, g, or t
  misc_feature (36)..(36): n is a, c, g, or t
  misc_feature (41)..(41): n is a, c, g, or t
  misc_feature (48)..(48): n is a, c, g, or t
acccgtcgggaagtttttcctcctatttngccctanaaaantccctanggaagatgttccagtccccctttccacaacctttttttaagctggaagaagcctaaacatgcttttgcccattgaagaatatagcttttcctcaagcaacattggaacaggtttttgtagaactcactaaagaacaagaggaggaagataatagttgtggaactttaaacagcacactttggtgggaacgaacacaagaagatagagtagtattttgaatttgtattgttcggtctgcttactgggacttctttctttttcacttaattttaactttggtttaaaaagttttttattggaatggtaactggagaaccaagaacgcacttgaaatttttctaagctccttaattgaaatgctgtggttgtgtgttttgcttttctttaaataaaacgtatgtataattaagtgaagctgccatgtttgtattgaagtatattgaactatatagtttgtatgtcatctttttcaccattcagaaacagtgcttctgaatttgtgatttaaaggaattgtaatagaatagttttatttttaagttatctttaagtttatgccatcttcttaaataagtacgtaatgttccaatctaaataaaaaactaatacataactaatgcatagaaaagatacataaagcaatgtgaaagtt

SEQ ID NO: 365595 - DNA, 392 bp, Homo Sapiens
gaggctggcgtccagccccgggtcacatcagcaaggaacaagcagccactctgggggcaccaggtggagaggcaagacgacaaagagggtgcccgtgttcttgcgaaagcggggctgctggccacgagtgctggacagaggcccccacgctctgctgcccccatcacgccgttccgtgactgtcacgcagaatccgcagacaggaagggaggctcgagcgggactgcggccagcgcctgcctcggccgtcagggaggactcctgggctcactcgaaggaggtgtcaccatttcagctttggcttttcttcttcttttaaattttctaaagctcattaattgtctttgatgtttcttttttgatgacaataaaatatcctttttaagtcttgt

SEQ ID NO: 365596 - DNA, 848 bp, Homo Sapiens
ggggggttgcctatggctgggtgtgccctgccctaaatgcagcaccactttcaagcttagtaggaccattccaagaaaaccaggtttcttctccccataccacgttgtgcctgaagaacaagccttcccgtccttgcctgcatgtgagtcacttcttggctgtgcagcaggtccccccctccccgcgatatgctggagggtaggattctgcagcctgtgttgctctctacctggcagcagactgtgcaggagccccaacctgtcctccaattccagcattcacagctgatgagcagtgcaggagcagggcgagaggaacagagccaatgatgtgtgggttacactgaggagccaaggacagggcctcaggtctcccccttacaaggcgtggctcatggcctgcattccagagaccaacatgatagcttttaattcagctgcatgacctgtgccttttaagccataaagatacctcaagcctagcacctcttgaaatccagatgttcatattagactcgaaaaaataggctccaggcctaggtgcccaggctatgatgagtctgcttttgaaggaggtagggaatgacatcttccttggacccaaagcttaaaagtaatgtatgctttgctgaccactgtttgttaggccttaaacaacattcactgtggtggtatcaggcacactgctatgtgcatcaattatttttttgctttccaaacagaatctctggggcacaagttttacactcaagctaagtataactttgtcatttcaggtaaatatgacaagtggtggagcatgaagttttctaatttgacttaatcctaataaatttttgttacaaagt

SEQ ID NO: 365597 - DNA, 582 bp, Homo Sapiens
  misc_feature (400)..(438): n is a, c, g, or t
atcatagtaaaaaattgaaagacctaattactacgttacatggacctattgaattttgggggaacgtgttagtaaacccagactagctttgttgaatagaagttgatcgctgttatttaggaaatgggtagatcaaatgacttagagactgaattatcctatcagtggttacatggggttggagacactgaaaggcagtgatcactgttgcttctaggctcccttactttgtaggaatatggtatactttcaggaatatgctatatatgttttcataagtacagacaccttagggaagaaaaaaagtgggtaattgaagcttatggttgattaatttcctaacagcacagctatgaatattttgctggggtacactggaggtaggaagactactggaaannnnnnnnnnnnnnnnnnnnnnnnnnnnnnnnnnnnnnnaaagaatggtagaaacagattatccattccaaaatgtcttttctctgatcacaaagagcaaacaaatgtcaatatctcttatgatggtgaaaaaaaggaattaatcgatgcaaataaacttttcacagtattacttttaatgaa

SEQ ID NO: 365598 - DNA, 328 bp, Homo Sapiens
aaataaagagatatgctaactcacagatgaacttcgttaagacccctttatttttatataaagtctaatatttgaaaagcgattgttataaagtaaaattctctcttcctattctaatatatatcatatatttcaggcttctatttgaaaacaggtataagagatgatatgatacaaccctatagataatgttttttgcctgattgacttatataatcactgtttcatgattactgcttttggaataataggaagttttgtgaaatgctggccttgtgtatatcttagaatgcaaatttaataaagtgtgtatacatgcataaaattt

SEQ ID NO: 365599 - DNA, 401 bp, Homo Sapiens
  misc_feature (15)..(15): n is a, c, g, or t
gaatgtgtagctccnaatgcaaaccctaagtttgctgtcagttattgtatggtcagtaccccagtcctagtaccacatattttaaaggttaaagtgaatgtttttgtaacatttaagcatatttcagatgtaaataaaagattgtaaaatatacggtttttaccaaatttaaaagatcctttttagttaatactatgacagtactaaaaatatatgaataacatttcagataccattatattaaaatatttgtgtatgtgtacaaaagcgttgataaatactaatctttaaagtttgtggagttcctttatttgtaatatatgtgctcttaaaagcaatgggatgtgaaattatgaaagtattttattgttcatagaaataaaaaacacagttactttgca

SEQ ID NO: 365600 - DNA, 1204 bp, Homo Sapiens
  misc_feature (62)..(70): n is a, c, g, or t
  misc_feature (237)..(246): n is a, c, g, or t
  misc_feature (378)..(453): n is a, c, g, or t
agggcggccaagggggttataaccccgcgtgggaaattaagggttccaccacagccggtttnnnnnnnnnttccccagcccggcaaaattcttaaaagaaattccccccctttccccaaggaggccccggggggggcttaatttaaattggattcccctgggccccctgttataaaccccaataagccccccaaaaccccctggggtttttttaaaacccttggtttccccccgggnnnnnnnnnngggggggatccccaccctttttcttccccgggttttcttggaaaccagttagcccccttttcctttcctttggggcccccgcccccaaagaaatgtttaaaaaattttttggggggcgggggggcccaacannnnnnnnnnnnnnnnnnnnnnnnnnnnnnnnnnnnnnnnnnnnnnnnnnnnnnnnnnnnnnnnnnnnnnnnnnnngatgatcattgtgggaaactttaatatctgtgtctcagccactgaaaaataaacaaacatcagtaagcacatagaatctttaaaggatgcatttaacacactggacctaactgagatacgtggtacactacgctcaacatgcagaatacatatccttttcaagtgcagaagcaatatttataaaaattaatcatattttcaatcattgagaagacacaaattccacagagttttagttatacaaatatttaatcacagtggaactataagtttggaaattaagcaaaacattttcagtatggtaaagggatgaataaaatcaaagtttgcttttttgaaacactaataaaattgatggcccccagcaagattgattaacaaaacagacaaaaggcacaaactctaaccgcacaccttataagtattaaaaagataaatgaataatagaacaactttgaaattttagataaaatgaacaaattgattcagcaaacacaggttaccaaaatgaatatttatatatatgtaattgaacctgtagttaaacaccttataaagaaaactacagtctcacatggcttaataagtgaattcttccaaatgcttaaggaagaaatagcacacatcttacataaactctgtcagaaataggagaagaaacattttccaaattgtctaaccagcatagctttaatacttcatattaaaacctcacaagtctgggcgtggtggctcaagcctgtaatccgct

SEQ ID NO: 365601 - DNA, 504 bp, Homo Sapiens
  misc_feature (40)..(40): n is a, c, g, or t
  misc_feature (125)..(125): n is a, c, g, or t
  misc_feature (186)..(228): n is a, c, g, or t
ccatcaacatgaccaccaaaattcattgggggtctacccngcgtgcattcccatttcccactgacccatgccaggtgcacgtcgcggaaatactgggtttaactacttagcgtgttactgcctcnattttatctacataacattattaactagaacgataatgctttcaaagtttaagttaatgtnnnnnnnnnnnnnnnnnnnnnnnnnnnnnnnnnnnnnnnnnnntaatggatagtacaaagtttggagactcaacaaatgcccctaaccttctagagacaaaagtcctatttctgttttcttttgtctttttattttcaattagtgacccattgttaaatccaaatccacttttactgaaaaatactgtacatgtgtaaaatgttcagttgtttttttgtaaaatatagtagaacggttgtaactgatactggccaaaatcaatgttattccatattttattttttctattaaattaacctaagttcctgtttaaaaaaa

SEQ ID NO: 365602 - DNA, 435 bp, Homo Sapiens
  misc_feature (18)..(18): n is a, c, g, or t
  misc_feature (24)..(24): n is a, c, g, or t
acacatcttcaatgagangccccnggaaaggccccctgagaaacccagaggcccagccatgggaagtgaaaggggcagaaagctgatccatccccccaggggcttacagaaagcctacagaacggatctagtgtttggaacgggacgttacctgctggtttgtgcacaacagtggaaaaggattcattgacgggcattacaaggattacttcgtgcctcagctctacagctttctcaaacggccttaaaggtttatagtttgggaaattatatatattaatatacatctttcccctgtcacttttgcagatattcttcggtttgaataattaaaatgaaccagatatcagggtggttaattaaaatgaaccagatatcagggtggtttataaagcctgtaaacacacctaagaaaataaacattttacaaatgaa

SEQ ID NO: 365603 - DNA, 486 bp, Homo Sapiens
  misc_feature (452)..(452): n is a, c, g, or t
aaatgcatgtgtatttgagtaattgtaagataaatgaatttttaattttttgagatgtagcttaaactgtcttcttaatcccaacaacttacattccgttgttgctgcatccttttatttaaggacttgttttaaaagtctttttgtcactccttggaaaattcttttattagtagtaaattttgcttttaggagcatggctcctgtattacaagggaaaaaatatgaagagcacattttaggattataattgttaaaagataatgtgtgcatatcattgtacagtaagtgtcaactgtgtgcctaactgttctatcaatactttctttctttaacaaagaagaaacaacaatcagaatgtcagttatttttattcaactaaaaggattaaaaaatttatttggtttgtgttctgtccattagaaaatactaataaagtattaacaaacctnctccctaccactatacaataccaaaccttgtcgg

SEQ ID NO: 365604 - DNA, 483 bp, Homo Sapiens
  misc_feature (47)..(47): n is a, c, g, or t
gaaaattgtaatcactgaaatattaactgttccttaataaaaagttncctgaaataacaacaaaatacaactcctcagctagcttgctgttaaaccacattgaagtctgttaaaagatatttatttttcttgtaaatatctgaagctgtagcttagtggaaattttagcaaggtaatggattttgctttaaaatgtctgccttacaaattcataacaacaagatttgtcagtcagcatttattcatgttttccctgatttttatcttctcaccattttacctcttttaacaggagcctgagcacaaggtttaatgaggaagctggggctataaatatgtgtgtatatatgtatatgtatgtttgtacaaatctccatgatgtttgccaagtttgaatgcgcaaaacttggaaaatgtgacaataaagaataaaagtagtaactcaaattagtattaagatgtgtttacatagataaatttttt

SEQ ID NO: 365605 - DNA, 593 bp, Homo Sapiens
agtggcagaagggacttatattaatattctttcccctctggccttcttacagtctgttggtccctttgcttctgttgtcagtgtgttgaattgcaaaccgagtactgctgtaaatactatgtttacttcatgctgaatgtttgcaaagacttgatataagtattaatagtaatgaatcaatgaataaataatgagctagggtttgtgaggctttctacaaataggtcagctccacctggagtgcgaattgccagagacaccttggtagtgcccatcggcaaatcgcaatggcagcatgtgagtggaccattcagaaacttctgcttggtggaaagtaaacagagaggatggaggtttggggcgaatgtcctgaggcagagatggtctttattgtgtgtggtggtggttgtggtatttataataatgcaagcataccctcccttgagtctcaattgaagataaaagaatgtactgagcaagcaaagccaatggagagtatttcacaaaaatactttgtaaatgagatgccagtagtgttcaaagttgtatttttaaaagataaatattcctttttatacctcaaaaaaataata

SEQ ID NO: 365606 - DNA, 611 bp, Homo Sapiens
  misc_feature (146)..(147): n is a, c, g, or t
  misc_feature (227)..(228): n is a, c, g, or t
  misc_feature (261)..(261): n is a, c, g, or t
  misc_feature (320)..(320): n is a, c, g, or t
  misc_feature (372)..(372): n is a, c, g, or t
  misc_feature (376)..(376): n is a, c, g, or t
ccaaatctttttaatgagtgtgccttttgcacgagcctcttaaaaattgaaacttggttcgaagtgagtgccccccccaccaattccgagaaagtaactggggcacattgatatttgtaacccgggccccataaagggctactttnngaagtgtttgtgcttaaagatagaacagcccaaaaagctagattgttttatgccctatataagtaaaagcaaatcttctnnatctaaatttcaaataaatagctgtcctacagncctggtcacagttatagcagcaccccccccacaaacagatctatgtgatagaatctaanactaaatactatttaatgggtccagaaagatgctgttttgaaaagaacactnaaanaatatttcattagcgttttcttgataacaaaataggaaaatatatgtttacacccctgaataaattcagctgtgggtggatttttgtttttcaaaatgattttgttagtttgaatgaaacctaaatataacattcaagtcaattcttttaacatttttctttataacagaatatgaaaaacgctgtcttaaagtgttgtaacttttctgaattttcaataaaatattttgcttgc

SEQ ID NO: 365607 - DNA, 1028 bp, Homo Sapiens
  misc_feature (981)..(981): n is a, c, g, or t
gtccggtccggaattcctcggatcagctttgaggagtgcgagagaaaatttaaagcaacagagaaagaactaaaagaccagttatcagagcagacacaaaagtatagtgtcagtgaagaagaagtcaagaaaaacaagcaagagaatgacaagttaaagaaggagatttttacccttcagaaagatttgagagataagacagttctcattgagaagtctcatgaaatggaaagagcattaagcagaaaaacagacgagctaaacaaacagttaaaagacttgtcacagaaatacacggaagtaaagaatgtgaaagagaagctagtagaagaaaatgccaaacagacttctgagatacttgcagtgcaaaatcttttgcaaaaacaacatgttccattggaacaggttgaggctctgaaaaaatctcttaatggcacaattgaaaatctaaaggaagaactgaagagtatgcaaaggtgttacgagaaagagcagcagacagtgaccaaactgcatcaattgttggagaatcaaaagaactcttctgtacccctggcagagcatttgcagattaaagaagcatttgagaaagaagttggaatcataaaagccagcttgagagaaaaggaagaagaaagccaaaacaaaatggaagaagtctccaaacttcagtcggaggttcagaatactaaacaagcattaaaaaaattagagactagagaggtagttgacttgtctaaatataaagcaacaaaaagtgatttggagacacagatttctagcttaaatgaaaaattggccaatctgaatagaaagtatgaggaagtatgtggaggaaattttgcatgccaaaaagaaagaaaaattctggcaaaggatgagaagggaattactgcaatttcagcatttgaggcaggaaattaagggatcagaagggaacgatggtgataagtccctttaaacaacaatcacaggagtttncaaaggaagaatttcaggaatttctgctaaaccaaatagggaggcca

SEQ ID NO: 365608 - DNA, 384 bp, Homo Sapiens
tctgtctgacatgaagtgttttgattgagaaatatatgaatgtccaccaatgaagaggttgtggccgaagtccacgtcaggcaccgtgatggagagaaccgaagagcagaaaacggaggtggaagaaacagcagggtctgtgccagctgagagaattggttgataatggatgcagaacctcaggaagctgaacctgccaaggagctggtgaagctcaaagaaacatgaaagggaaaagaggaggaggagagatggaagttaaagaatgtaacaacacctgtaggtggtcaggactttcaggtgagctctgaacgtggaaagggccaagtgcaggagcaaaaatcagccagattatcgagtgatcttgctgagataaatacaaat

SEQ ID NO: 365609 - DNA, 917 bp, Homo Sapiens
  misc_feature (161)..(338): n is a, c, g, or t
  misc_feature (576)..(576): n is a, c, g, or t
  misc_feature (595)..(612): n is a, c, g, or t
gaggataagtatatatatatatttcccagtgttgtgaagattaaaggagtttatcgatgtaggtcttaggatgagtcctggcatttaccaagggttggatatatgttattatcactattaagtgttgagggtccaggcatgctgggcaacagggaccccannnnnnnnnnnnnnnnnnnnnnnnnnnnnnnnnnnnnnnnnnnnnnnnnnnnnnnnnnnnnnnnnnnnnnnnnnnnnnnnnnnnnnnnnnnnnnnnnnnnnnnnnnnnnnnnnnnnnnnnnnnnnnnnnnnnnnnnnnnnnnnnnnnnnnnnnnnnnnnnnnnnnnnnnnnnnnnnnngaaaaatgcagagaaacaggagtcttggctactcctttagaggcagactcagaccctcctgcctcacagctttatctttgtatttgccccttactttatcttgtgccttgagaaattgctggggagagaggtatgtccactgggcagctgtacaggatggaggatctagggcgtttccactcccagcagccaggttccctcaccccaagctcacccactgttggggagattatctacnataacaccagaaacacatnnnnnnnnnnnnnnnnnntaatccttatggggttctttttcaggggaaccattgctgggaccaaggcacaaggagcccacctccattttctgagcctctggcaaggggaccaagaactaaaagcccctccagggggcctggggcttcactggggggcccccacccccaaggccggtcaggccctcccaggggaatccttacacccctggcccttgtggcttgcctacaagcctttttttcactctccacctgtggcccctcggggggaagtttctcgccaaacccctaatggggttctccctaatactcttggaaacactact

SEQ ID NO: 365610 - DNA, 341 bp, Homo Sapiens
  misc_feature (14)..(14): n is a, c, g, or t
tcacactcgggacntaattcaagtaaaaaccctttctccttcctggggcctcggctcctggagggctggagggtctcgtctgaggacgggaggaggctctcgctggacgtctggcctgtgcgctggtggacggatgcctacgcggttttggaggacccgatgaccaggcgtcctgcgagtccgcccgctggcctgcagcacccacctcggacttggctgtggacggttggtgcaagtgcatcctgcagggctggctgtgcgcagctgtgggctgacctttgcagagttttgtggaatagtttgcaatgtcataaaagtgcaataaaggtacagcagatgtg

SEQ ID NO: 365611 - DNA, 342 bp, Homo Sapiens
ccacgcgtccgcccacgcgtccgtgtaaagatcagtatcaaaagcatagtgttcttcacctctcctcctcagcatccatctctatatacttgattaaatggaaaagtctcttttatcacctctatgtaaagttttatgggtagttatcgtcagtgtatttaaatatatcttctagtatgttttaaaggctggtcttcaatactgtggagacaaaaaataaaagagcgtatgaaaagtacgttagacttttgctggcattcaagtcatggctagtctgtgtatttaataaatgtgtgttatttatgtcgtgtttgtcaatggaaaataaagttgaatattctg

SEQ ID NO: 365612 - DNA, 394 bp, Homo Sapiens
  misc_feature (71)..(71): n is a, c, g, or t
cctatattaatttggtaattcttagcctaatagatctaattaaaggcatgggactaggggaagtcatccanaacccagtgagaagaaaagagagcctctggaaaactgagccttgggtcaacctaaactttaagtgcaaaaagagggaggagagccagcaaagaaggctaaaaggagctgttgtgtctcagaaaacaagagaaaaggccatttgaaggaggaggaagtgcttacttgtgccaaatgcagctgtttgttgagaggttcaataaaataaagactgagaattgaccattggatttgtggcaagatggaattttttggtgaatttgacaattggtttcagaagggtgggaaaacaaaatcctgattggaatggattaaaaaaagaatg

SEQ ID NO: 365613 - DNA, 383 bp, Homo Sapiens
  misc_feature (20)..(20): n is a, c, g, or t
  misc_feature (34)..(34): n is a, c, g, or t
cttggaatttttacttttgntggccttattttangacccttttcatatttcttttgacttagagtattaatacatggccaaaataatttagttactacctcatacaaacaatataatggttactacacatcacaggaacttagttttggtttaagtcatttttgattgcttttttccaatggaatatgtatataccaggttttagcaaaatgcacacttttggctctttttggtatatgttctttatattttaatgtgagtatatacactaagaacaaactaaattgtgatttatgatcttcatttattttaatggtaatggttttaaaatatgttcctgattgtacatattgtaaaataaacatgttttttaacaaaaaaaa

SEQ ID NO: 365614 - DNA, 3447 bp, Homo Sapiens
  misc_feature (114)..(164): n is a, c, g, or t
  misc_feature (2485)..(2504): n is a, c, g, or t
ctcgcgaacgtgttatccagaactgggtgccaaagcattcaaagatattgatattgaagaccttgaggaattggatccagattttatcatggctaaacaggttgaacaactggnnnnnnnnnnnnnnnnnnnnnnnnnnnnnnnnnnnnnnnnnnnnnnnnnnnttgactattttgaaagagccaaacgtttggaagaaattcctttgataaagagcgcttacgaggaacagagaattaaagacatggatctgtgggagcaacaagaggaagaaagaattactacaatgcagctagaacgtgaaaaggctcttgaacataagaatcgaatgtcacgaatgcttgaagacagagatttattcgtaatgcgactcaaagctgcacggcagtctgtttatgaggaaaaacttaaacagtttgaagaagcgattagcagaagaaaggcataatcgattggaagaacggaaaaggcagcgtaaagaagaacgcaggataacatactatagagaaaaagaagaggaggagcagagaagggcagaagaacaaatgctaaaagagcgggaagagagagagcgcgccgaacgagcaaaacgcgagaaagagctacgagagtatcaggagcgggtgaagaaattagaagaagtggaaaggaaaaaacgccaaagggagttggaaattgaagaacgagaactggcgtagagaggaagagagaagacttggcgatagttccctttctagaaaggactctcgatggggagatagagattcagaaggcacctggagaaaaggacctgaagcagattctgagtggagaagaggcccgacagagaaggagtggacgacgtggacgaagggcgagatgaggacaggtctcatagaagagatgaagagcggccccggcgtctgggggatgatgaagatagagagccctctcttagaccagacgatgatcgggttccccggcgtggcatggatgatgacagaggccctagacgtggtcctgaggaagataggttctctcgtcgtggggcagacgatgaccggccttcctggcgtaacacagatgatgacaggcctcccagacgaattgccgatgaagacaggggaaactggcgtcatgcggatgatgacagaccacctagacgaggactggatgaggacagaggaagctggcgaacagctgatgaggacagaggaccaagacgtgggatggatgatgaccgggggccgaggcgaggaggcgctgatgatgagcgatcatcctggcgtaatgctgatgatgaccggggtcccaggcgagggttggatgatgatcggggtcccaggcgaggcatggatgatgaccggggtcccaggcgaggcatggatgatgaccggggtcccaggcgaggcatggatgatgaccggggtcccaggcgagggttggatgatgatcgaggaccttggaggaacgccgatgatgacagaattcccaggcgtggtgcagaggatgacaggggcccttggagaaacatggatgatgatcgcctttcaagacgtgctgatgatgatcggtttcccagacggggtgatgactcaagacctggtccttggagaccattagtcaagccaggtggatggagagagaaagaaaaagccagagaggagagctggggtccacctcgagaatcaaggccatcagaagaacgtgaatgggacagagaaaaagaaagggacagagataatcaagatcgggaggagaatgacaaggaccctgagagagaaagggacagagagagagatgtggatcgagaggatcgcttcagaagacctagggatgaaggtggctggagaagaggaccagctgaggaatcttcaagctgggagagactcaagttcgccgggacgatagggatagggatgaccgtcgccgtgagagggatgaccggcgtgatctaagagaaagacgagatctaagagacgacagggaccgaagaggacctccactcagatcagaacgtgaagaagtaagttcttggagacgtgctgatgacaggaaagatgaccgggtggaagagcgggaccctcctcgtcgagttcctcccccagctctttcaagagaccgagaaagagaccgagaccgagaaagagaaggtgaaaaagagaaggcctcatggagagctgagaaagatagggaatctctccgtcgtactaaaaatgagactgatgaagatggatggaccacagtacgacgttaagtctcaagataatggatttaaactggtgtcttaaataggtttgatcacattcaaggattattatacttgtgcttcaaccaatctaaattggattctttaatgttgtttcaccataacacaaaaagcatgaacttgtattaatcctatataatagattgatcatgcaccatatccacaggaggttggaaaaaccatgccattttctggaatttaagggtgttgcattatttcatcaatcatttgttgacnnnnnnnnnnnnnnnnnnnntaacatttaaaatgtgaaccttcaggtattgagtaacacctttatcttggtatagaactgatactttcttatagatcttcgaaatatctgcataataatttggaactgaagtcaggtcctgtccaacactatatttgaagaccctttaatgctcgctgaatctgcacaaccatcttcacacccttaagctggcttgatacgtcacctaattatacggtattatcgcaggtacttaccccatactacctacacatctaccacaccttttctaacgaatatcactttgtcaagttaaacacttaccaaaacacttggcataccggcagcgcgctcactcttaaagcattcctcaccttgacaagaacaggctgagttcccacagcaaacacagacacccacagatcagtccatgaccatcaaactttacattgcgctacaagctgatgaaataccacaaaccaagacactacagcttctcaacgacgtgccacacagcccgttgaccgcaacatcaaatccaccttgacacccaaccaccacacagacagcaccatatacaccaaaacaatgtactaacacctatcaacatgcgcagactagctcacagcccactttcaacactccaatagttacaaatctatttaactcaactcatcttcattacacgtcactactatgccttatccacatcaaacataaccaatacaccaccacaatcaccaacacaacaaaaatagaacaaatccattctatacatcatatagcaacctctttgctaccagtttatcagatacacaacaaactcacttcataagccaactacccaaccatcatacaacccccataccccacttaatacctatccctattaacctccgtccacacacaacactactcatacacgccaaccacaccactcatccacccccacctcacctatctt

SEQ ID NO: 365615 - DNA, 726 bp, Homo Sapiens
gggggccatagtagatgcagccaggcattgcgacttgcaggttcgtattgatcacacttctcggaccctgagttttggatctgatttgaattatgctactcgagaagatgctccgattggtcctcatttgcaaagcatgccttcagagcagataacgaaaccagctgacagccatgtcctcagtacttgcaaaagcacttgaagtcattaaaccagctcatatactgcaagagaaagaagaacagcatcagttggctgtcactgcataccttaaaaattcacgaaaagagcaccagcggatcctggctcgccgccagacaattgaggagagaaaagagcgccttgagagtctgaatattcagcgtgagaaagaagaattggaacagagggaagctgaactccagaaagtgcggaaggctgaggaagagaggctgcgccaggaagcaaaggagagagagaaggagcgtatcttacaggaacatgaacaaatcaaaaagaaaactgtccgagagcgtttggagcagatcaagaaaacagaactgggtgccaaagcattcaaagatattgatattgaagaccttgaggaattggatccagattttatcatgggctaaacaggttggaaccactgggagaaagaaaagaaaggaacttcaagaacgccctaaagaatccaggaaaaagaagatttggcctatttttggaaagaacccaaaacggttttgg

SEQ ID NO: 365616 - DNA, 482 bp, Homo Sapiens
taaatttaaaaccaagtagcaaggatctagctgagagaataattgaatacattaatataggaggacagacaaagatcctgaaaaggctgggagaagagcatccaaagcacaggtggagagacaaaaaggttagggctgctggcagctgtggagagaactgtacgtggtaagggggagatataagatgtcctgcataagtattttccctgtagattgcaaagtcatctatggagaggaaaggtccaaaatagtcactggggagagcaggtgaattagatggccaagcagggtggatggatcatttgaggtttggggtgacagatcaactgagatccacttacacttctgaaaacgcaagaacactttagaaattaacaacacttaaagctttttacatcatttgtaaataactggtggaacttaacaccacaaaataaagtattataaagaactttatatgaataaaaatatatgcagtctga

SEQ ID NO: 365617 - DNA, 807 bp, Homo Sapiens
  misc_feature (591)..(604): n is a, c, g, or t
accttcaaatactattattttaaatttatgttcattatgtaattcagggagtaacgatgcctggagcaatttctgaaatattctcaaaccacttcactcttgacactacagatttttctctcagtctcaatcagaatctctgcagtcattatttgtttttaagatgtgagggacgaggaaaattactgaagaaattctagcagatttcgattgcagagaaatttggtaacactttttgggtaactgggtaaattactatttcttttaataatcgggtgaaactctgaattgttaaaacggaccaataatcaaatggttttataatctttcttaacttcccgtccttgttataacatcttggaagaagactcttcaggataaaaaggatattatttgattaaaaattatagcatttggagaggtaacacacaaaaacaaaaacatatttgacaaagcgccctacatcctgtgttttgttaggactagaaactatactggatgagtatgtatactgcatgtttacacatgctgtgtttctttatatgtgaggcttcactgaccaccgtgcattttgaaattgtattgcatttnnnnnnnnnnnnnngtgacaggtttgctcttctcacttaaggagctctggtctgtgtaggcagtacagtgttgttagggaggttgctgaattatctaaaaatgtatccatgaatttgggggaaataatgcttaatatctgaagtattttcagtaaatgtggagatatatcagataatacttttaaattagtggaaacacatttctgagtgaactgag

SEQ ID NO: 365618 - DNA, 745 bp, Homo Sapiens
  misc_feature (573)..(596): n is a, c, g, or t
cgggaccaacgttgggacaccgagggcacactccatacgaaagacatgcacggcccccacaagtatgcgcgaggatataacaggtcactctggacgaattcgttttgctccatgatttgtacttgccgtcacctggggccgatttcctcctcccaaaggggggttctctgtatgaaactctttctcggcgtctcgggaacgcgctaggtacctggacggcggggggcgggacgaggaaacgggggaggggaccggcgtccggcccccgaccctcgagacgccctagcgggaaggccggggagagcgagcggggccgtgcccggcggcgcggagcggcgcggcggaggcgacgggaatccggccggccccgaagacggggagccggcgcggcggggccaggacgacgggccccggcggggaggagggcaccgagaccccccagacccgccgcgacgccgccgagaaccgcccccgcgcccgccgacacccacgccgtcggggccgcggccggggaccgctccccgccgcccgccggccccacgacacgcgcacaccaacgacacgcccttcttnnnnnnnnnnnnnnnnnnnnnnnnccccgtctccctcccgagttctccggctctcgcggccggcggggccgggcggcgaacgaacgagcgagcgaacgaacgggcacgcgggccccgcccgcgcacgcgccgcgtcgcggtgggggggtgggtgtgcggagggaagcgcgcgg

SEQ ID NO: 365619 - DNA, 642 bp, Homo Sapiens
gacccactactggcaagagctgggccttcattccacaggacataatgcatgggcaatataatgttctacagaaagatcatgccaagaccagtgatccaggaagatcatggaaaataatgcacatcagtgaacaagaggaacccatagagcttaaatgtgtgtctgtgacaggattcactgcactgtttacttgggaagtggaaaggatgggctataccattaccctctgggatttggagacccagggcatgcagtgttcttcccttggcacaaagtgtattcctgtagacagtagtggagaccagcagctgtgctttgttttgacagagaatggactctctctgattttgtttggtttgactcaagaagagtttttaaacagactcatgatccatggaagtgccagcactgtggacactctttgtcatctcaatggctggggaaggtgctcaattcccatacatgcactagaggccgggatagaaaatcgtcagctggacacagtaaatttctttttgaagagcaaggaaaatctttttaatccatcctcaaaatcttctgtatctgatcagtttgatcacttgtcatcccatttatatttaagaagtaagtggaataaagatttctacatttgtatttata

SEQ ID NO: 365620 - DNA, 782 bp, Homo Sapiens
cccgacaaagatgcctttattgggcgacagacgcggggtggggcgctagcgggggtgcacggcgggccggtaggccgccaggatctcggcgctgtgcggacacgtgtatttgaactctttctcctgcatcgcgctgtccaggtagcggcgtacgccgcgcagctccgcggggatgggcgcctggcggaagtgcgcgcacaccgtgtcgacgatgtgcagcttgggcaggaggctgcagtcggccagcgtgagcctgtcgccgtccaggaagcggcggcgggactcgcgcagctgcggctcccccgccagctcgtgctccaggggcgcgcgcaggtagctgtccagcctggcgagggcgcgcagcagctgctggtacagggcttcgtcctgcgcgggcaccgggttcttgatgaacgcggagaacttgtggaaaacgtcgttgccggcggtgttggactccctgtaacgaggcgccaggctggggaagtcgggcggccccagcgtctcctccagaagtcctcgatctgcagcgtgtctgtcttggcgtcgctgtcatagagcaggatgggcagtgcgagccgggggcgaagtccttcagcacgtccgggacctgcgcgtgtccaccgtggtgagggtgaaagtacgccttgaggagcaggccatgaagagccgctgcaggaggggcagtgacccacgctctcccgtctcactcgctgacaacagctgagctgttccgcatccgtatcggccgacagctgcttttttatacccccaagcgtggg

SEQ ID NO: 365621 - DNA, 605 bp, Homo Sapiens
tgatagccattctgtcatatgcatttatgacttttactacgtaaaagctgtggatttggaacttgttttcatatacaaaatcactgacaattagaattctaaagccccaaagcaggaaaggaataccacagggatatggccctcattcaattgagggatgcaacaattctagttttgcagccaccatatcgattttgaagaaaaggtgaataaagatataaataaaatctgggttaagttaaatatatttatatgcaccatgaggaccatgacatgtctagtgctagtcactatcatacaagaaaatgcatgctcatttcagttcgtgtaaaactcacttcaggagtaatcacctttttcagtaattccccttggtaaagcacaagtttctttgctcaaaatttggatcattgaagacagagcatttgttaatggaagcataagacccacataagaaaatattatgactctggcaactgattcctcctggtttctacttttccgactattgatgagggcctttaacttgccatagtcccctctcattttctgtgattcatctccctgctgatgttgctgccgagtgtctttgcagtattggttaa

SEQ ID NO: 365622 - DNA, 553 bp, Homo Sapiens
  misc_feature (392)..(392): n is a, c, g, or t
  misc_feature (401)..(401): n is a, c, g, or t
  misc_feature (422)..(422): n is a, c, g, or t
  misc_feature (456)..(456): n is a, c, g, or t
  misc_feature (470)..(470): n is a, c, g, or t
  misc_feature (503)..(503): n is a, c, g, or t
  misc_feature (522)..(522): n is a, c, g, or t
aaggatcctctgcaggagagagaactgagaagcagtggaacgagaggcataggattcagggcccaagtgcccttaaggtcggtgtgggctctcccttctcggtatatctgcaactaaacaggactggggttgtgcgtccctctccgggtgttggattgaaaagtgactggggctgcacagccactcctgaggacccgcctggaacaagtcacttcactgttgagccccatgctgcttctcctaatgcttagttctcaggacagtactggaattaaatgataatgtaagacctagcacggagcctggccaattcactagatttcacgtgtgaacagttgttctgttcccacgtccccctttcttaacatggggactaaggattatttcccccntcctatttnttccgtcagtgttaagcattntaagggttttgagttttcaagtttcctgagggcnggggcacagaaacnttttcattattatttacggttgttattattttnccttccagcagttcctgtnttctttccttcccattttgggggaacccttc

SEQ ID NO: 365623 - DNA, 373 bp, Homo Sapiens
  misc_feature (24)..(24): n is a, c, g, or t
tttactgaaagatctaaaagaagncttgaacaaagggaaatgcaggagactcttcggtaaaaggctaaaactgttcatataccacactcccccaagttagtctacaacatcactgcaataacacaatgcttgctgaagtggtcactttcacatactgtttgcagagggcaatttgtcaagagtcaacacatttggaactttgcccaccttgtttgcctgtcattccactcaggattccagcttttagaaagaattgcatctgattgtaaaaacccaagttcaagaagtgaacttggtctataatgggaaatcattggggaaaacccataactgagtgtcaatgaaggattggtaaataaattatggtatatac

SEQ ID NO: 365624 - DNA, 481 bp, Homo Sapiens
taggcggaccgcagaggaacattgtcacaaaactgatgttcttttggggtttatgtacagacttgtccaatcatgtgtgtggttcctgcgagttgctgatgactccgcattgaagctctctgagttctttgattttaagttgggtttaatggaattttttcaaatgttggaaaggcgtgtggttcttcctgcccctccctccccttttggaaatatgaaagcaaatgtttagaagaattccttttgaaaagctgtgtcgtgttccctgtgaaactgagcaggtgtgtgttggcgcgctaagtgccacatgcttgtgtgtagaggaggaggtggccctgccggctccgcgctgctgtgcctgtgatccctacctgctccccgctcctgttgccagcagcactcactgcactcctttgtcatatactctgcatcactgtcatactcacaacttcgtgaataaagttgtgtgctttaaaaaaaa

SEQ ID NO: 365625 - DNA, 593 bp, Homo Sapiens
cttccagtttggtaaccttagtaaatcttgtgttgttgtttaatcgtgccttgcaaatcatcctttaaacactatgactgtggtttcttgtggtggagtccctcatcatagtgaccctcatagcaacctctgaggttagcagagaaggtattattatctcgatctcaatgaggagaacaaggcttaatgaggtttagtgacttctcaaagccacatggttagtcaggggagaacctaatcccttatttcttatcttattctgattctggccatgctacaaacatgttctcacctgccccccatgcttctaccccaacagcaataaaaactgtaaagcaggaactctctagtacattgtgttgtccctaaactgatgggctaggaattgtgtctcattatggcttagtctttgtgggttttccccagtgagttgtgagtggagatagacctagtaggatgattatattcaggtcagagaccagctcctctcaagagagttctttccacagatggaaaagatacgttaaaatcgccaaataaattaggaaatacttggcagaacctggaagagcctccagacaaggtagagccga

SEQ ID NO: 365626 - DNA, 466 bp, Homo Sapiens
  misc_feature (15)..(15): n is a, c, g, or t
gcatatgaccatctntccatcaaatcaatgtagagataatgtaaactgaaaaaaaatctgcaagataatgtaactgaatgttttaaaaacagaacttgtcactttatataaaagaatagtatgctctatttcctgaatggatgtggaaatgaaagctagcgcacctgcactttgaattcttgcttcttttttattactgttatgattttgctttttacagatgttggacgattttttcttctgattgttgaattcataatcatggtctcatttcctttgcttctttggaatatttctttcaacacattcctttattttattatacattgtgtcctttttttagctattgctgctgttgttttttattctatttacaggatgatttttaaactgtcaaatgaagtagtgttaacctcaaataggctaaatgtgaacaaataaaatacagcaaatactcagaaaaaaa

SEQ ID NO: 365627 - DNA, 439 bp, Homo Sapiens
  misc_feature (39)..(39): n is a, c, g, or t
accccccttaataattcgtactgcactttggttttttcnaaggaaaatccagtgtcttttacgttgttatgatgaatccccacatggggccggtgatggtatgctgaagttcgagccgttgaacacatagaaatgtctgtggggtgactctactgtgctttatcttttaacattaagtgcctttggttcagaggggcagtcataagctctgtttccccctctccccaaagccttcagcgaacgtgaaatgtgcgctaaacggggaaacctgtttaattctagatatagggaaaaaggaacgaggaccttgaatgagctatattcagggtatccggtattttgtaatagggaataggaaaccttgttggctgtggaatatccgatgctttgaatcatgcactgtgttgaataaacgtatctgctaaatcaggaaaaaaaa

SEQ ID NO: 365628 - DNA, 790 bp, Homo Sapiens
taattgaagccaagatgagatttattcaagcttggcagtcactacctgaaatttggcatcactcacttcattgcaagggttccaagggggcaaaaaagaagaacttattggaattgcatacaacagactgattcggatggatgccagcactggagatgcaattaaaacatggcgtttcagcaacatgaaacagtggaatgtcaactgggaaatcaaaatggtcaccgtagagtttgcagatgaagtacgattgtccttcatttgtactgaagtagattgcaaagtggttcatgaattcattggtggctacatatttctctcaacacgtgcaaaagaccaaaacgagagtttagatgaagagatgttctacaaacttaccagtggttgggtgtgaatagaaatactgtttaatgaaactccacggccataacaatatttaactttaaaagctgtttgttatatgctgcttaataaagtaagcttgaaatttatcattttatcatgaaaacttctttgccttacctagaccagttaatatgtgcactaaacaagcacgactattaatctatcatgttatgatataataaacttgaatttagcacacattccttagggccatgaattgaaaactgaaatagtgggcaaatcaggaacaaaccatcactgatttactgatttaagctagccaaactgtaagaaaacagccatctattttaagctatcagggcttacctatatgactctattatcagtctatgcagtgattatgatgttaattgaatcagtttaa

SEQ ID NO: 365629 - DNA, 428 bp, Homo Sapiens
cttttcgggtagttaattcagcagtccataaatatgatccagtaacttgcttatattttattgaagtctcgacagctcttcagaagtaaatttagaacgatgctgtcagttcatatttatagatattagtgttttagcagataaaacaaaatcaacaaaaattaagttcattttgtgattaaacctgcaaccatttttccattactttttttctatagttaatggttattgccatgatttcttctgtttggttctactaagctagaaagccagggtgaagttaatgataattcccattattttatttctgtaccatgagattgctgttgatgactgaaataccaggtgcaaaaattaatgatttgatttttgtacagtttcaatgagtattttttacttattaaaaataaattaagaaatgcaaaaaa

SEQ ID NO: 365630 - DNA, 1020 bp, Homo Sapiens
  misc_feature (298)..(391): n is a, c, g, or t
  misc_feature (568)..(576): n is a, c, g, or t
  misc_feature (616)..(654): n is a, c, g, or t
  misc_feature (684)..(692): n is a, c, g, or t
aagatcatttccgcacgcccctctctaggggggctgcgaggacaccccacaggcccggcacccggtcccacctggtgacactgggcttcctcccgccttcgtccctgttttgtaactgaccaagttgggtcccgggtggggagcctcaccctggggacatgcctgttgataacatgcatctcagtgtaggttctatttatatggcagatgacgtgaaattgtgatgtttgttacagagcttttatgtttaaagacttcaatggagaagtacggttcaataaactatttttcccgttcnnnnnnnnnnnnnnnnnnnnnnnnnnnnnnnnnnnnnnnnnnnnnnnnnnnnnnnnnnnnnnnnnnnnnnnnnnnnnnnnnnnnnnnnnnnnnnggggggggccttttaaaaaatcccccggggggccccagttttaccgaccccccttttttttgaaaaagggggcccctaaggggcgcctttttaaaaaaaggggcggggccgccttttaaaccctccggggggggaaaaatgctcctttgggactttttggagggacccttctttttnnnnnnnnnaatatttgggcaaccccccctccggaatttaacccttccnnnnnnnnnnnnnnnnnnnnnnnnnnnnnnnnnnnnnnnccaactgcaaaatcttgggctcttaaaaannnnnnnnncggggctgggtttttgaaaaattatttccccggggcgccagggggccccaatgggtcgggggagttaaaaaaaccaaagcccacagggctttttttgggggcccttaaacccccccacgacggtgtatgtgggaataaacccgggataaccactttttttcgaaagggtttctcttgtcttttaaaaaattttcccgacgtttatcctttgaaacctcgaaccacgcaaagaaaatggcacgtgtatgtgcgtccccctcttttacatctccctgtttatatgatgctgcccccccaactaaaacaagtcgtcacggtaaattcccgc

SEQ ID NO: 365631 - DNA, 725 bp, Homo Sapiens
cagggtgccgcagacgcggggacgctggctcgctccctccctccctccctccgacgctatcaaatgatgctgtttggaaaaaattcccagcagttgtgtggcgtaaagaaactcccatggtcatgtgactccagatacttctggggctggttgaatgcagtgtttaataaggtggattatgatcgcatcagggatgttggccctgacagggcggcatccgagtggttgctgcgctgtggggccatggtgcgctaccatggccaggagaggtggcagaaggactacaaccaccttccaacaggccctctggacaaatacaagattcaggcgatcgacgccaccgactcttgtatcatgagcattggatttgatcacatgggtaactaccctatcgttttgctaatagaaaatgcagatgatttgcagtgaccattttgttgcagttgactcacgattatagtcataggtatgtcctttttgcccatttcattatagtcaagtttgtttcttcctgtgtttcatatttattttcaaattaaattgaggttacagacaccttcctctccttcctcctctcactaagcttgtttctgtatgtctctagtctttggtttattgacttaaaatccagggccttgtttgtcaaactatctttgtcaaacttctgtcattgagaagccctcaataatgcaggaataattatatccacacagcttctgcttacg

SEQ ID NO: 365632 - DNA, 1260 bp, Homo Sapiens
  misc_feature (783)..(831): n is a, c, g, or t
  misc_feature (913)..(968): n is a, c, g, or t
  misc_feature (1171)..(1181): n is a, c, g, or t
  misc_feature (1204)..(1220): n is a, c, g, or t
cgtagtgcgtgtgttgccctccgcccgtccttcccttttttccgcagctggtaccggtccggaattcccgggatctccgacgctgtgagtatagaagctaggccccgatccgggcgggactagggtggtggttgtgttctgccctcgcccgtcgccaacgctgggctgactgaaaacctggccctttgggtcgcgcgtcttcgaccttcaccgccatgcgcacatggggccgtgggagaaactctgggcgggattacggcgaaaattcttgtttgggcgggccctgcggcttctttcttccggctcgccctcggccccgtcctcgccccgtcctcttcccgcccccgctccagctccagccgggtcctcgctcggccccgcacgcggtccgcgcgcacacggacggtctgggcacctcccgtctccctcccggccccagcccagtcgagcgtccaccacaatggcgctccctgcccggccctaatccccgctcctcacggaggctctttgtcacagcgaagactgccagcccccagtcttctggactttttttatggggctcctggcgccgctattcacccagttccctgcattctccccgttactacgcgaccgcctgctcccgtactcgaacccgggcactgggtacccgcaataactcataccgctccggttccttgccccatatctcccaacgcctgccccctttcttccttgtccccctccccctttagatccccgccttcaccccgcgtttgctgtcgccctcctttatttccggannnnnnnnnnnnnnnnnnnnnnnnnnnnnnnnnnnnnnnnnnnnnnnnntgttaaacaccgagcgcctcaatggccctttccccccccttcccacgccccacccgcataaacctccccttaaaaatctggnnnnnnnnnnnnnnnnnnnnnnnnnnnnnnnnnnnnnnnnnnnnnnnnnnnnnnnnttttccgccttgtttttatttagcccgcctacacgcacttaggcgcccctttttatacacgcgcccgcttatcccgtatcccatcccccgcgacctattcctcccgccttcacttatgcccctatctcacggcctattatcgctataacgacaccattcgagccttattactcccatgccccgcgttacactctctccttatnnnnnnnnnnnacttctcaccgcccatttttcannnnnnnnnnnnnnnnntttgtttcccgcttccgcctcccgcgcgctgttctcgcgc

SEQ ID NO: 365633 - DNA, 936 bp, Homo Sapiens
atcaggccaaatcggccgagctcgaattcgtcgagagcgggccggccaggtgccgcagacgcggggacgctggctcgctccctccctccctccctccgacgctatcaaatgatgccgtttggaaaaatttcccagcagttgtgtggcgtaaagaaactcccatggtcatgtgactccagatacttctggggctggttgaatgcagtgtttaataaggtggattatgatcgcatcagggatgttggccctgacagggcggcatccgagtggttgctgcgctgtggggccatggtgcgctaccatggccaggagaggtggcagaaggactacaaccaccttccaacaggccctctggacaaatacaagattcaggcgatcgacgccaccgactcttgtatcatgagcattggatttgatcacatggagggcctagagcatgttgaaaaaataaggctgtgcaagtgtcattatatcgaggatgactgtttgctgagacttagtcaacttgaaaatttacaaaaaaccatattggaaatggaaataatatcctgtgggaatatcacagacaaaggcatcattgctttgcgtcatttaagaaacctcaaatatttgttgttaagtgatcttcctggagtaagagaaaaagaaaatcttgtccaagcctttaagacagcactgccttctctggaactaaaattacaattgaagtaaaataatgtgtcttatttcagtataaaggatcatttgaaactgttgattccaaacatcaactaatattatatagtcatcagtagaattataaggatgccatatcatgacattttagaagtggagagtgcatcatatgtagaaaataaatattcagacgtggctcattaatgttactaagttggaagtgagaatttatgaacattaattcattttaagaaaagtgca

SEQ ID NO: 365634 - DNA, 493 bp, Homo Sapiens
  misc_feature (32)..(32): n is a, c, g, or t
  misc_feature (418)..(447): n is a, c, g, or t
tccccccatccctcccggcttataggccccanaggtgctatttgttgtgctggcccaggcgtggggctaccaagcaaaggcttggcatataccaaaggccagctgcatgcccatcagtctggtctttttcctctgcggtcatgttggctttcatgctggatcaaatgttttactttcccagactggtggcatctgagttccccatcctaccactctcaccccactttcctgccccacctaaaccctcgttttagtaatttgtagtgactgttcccttccctctgttgcagggaaccaggaggaaagggaaagatgttgccatatttcctactctttaggcatggactctcctttccctttgttagtgtcctgggttcccatggactcagggatttgttggctaaggtttctctgtgcnnnnnnnnnnnnnnnnnnnnnnnnnnnnnnttaaatacacatatatattgtacagaataaaaatgttttattgaaa

SEQ ID NO: 365635 - DNA, 551 bp, Homo Sapiens
  misc_feature (163)..(163): n is a, c, g, or t
  misc_feature (213)..(213): n is a, c, g, or t
aattgagaaatatgctgggtttctagcctggcaagatattttcataaaagagggataccaatgctgattactaccttttaaaatattttagataaatgcacagcaccacagcaccacatctaagcattagtgatgggtagctgatgtcagcttcatgtggatnttaagcactctagaaacaatgaagcttcttggcatattttaaggagctcncaaaatgtgttacctattaaattgtaactcagcaagtagaagaccatttgaaaagtcaggtacaaatatcctcaagtggcataaaaatgtagtcagttttctcttttaccagtttttatttccactccaattatttagaactttatttgtacatgtgcagaagaataaggcagctgagaatcttgtttcccccaagagagttttacaggctgagtgttgcaaatgtgttctttgtcctgttatatgtatatcaggaatacaaggatgtgaaataaaactgtaaatttgcataactggatgtacttagataatgtgaaataaacattaaagacaaggtc

SEQ ID NO: 365636 - DNA, 967 bp, Homo Sapiens
  misc_feature (179)..(179): n is a, c, g, or t
  misc_feature (220)..(220): n is a, c, g, or t
  misc_feature (371)..(371): n is a, c, g, or t
  misc_feature (373)..(373): n is a, c, g, or t
  misc_feature (377)..(377): n is a, c, g, or t
  misc_feature (380)..(381): n is a, c, g, or t
  misc_feature (850)..(911): n is a, c, g, or t
agaataacctattttttgtagcccccggcaaaaggtattattttgggtgggggtagagcatgaacgaattatttttaatgcaggaccattaattgttgtgggtaaaaaaaggggggtataatatcgttcccccacccatttggtgagcggcgggggccacacaaaaaagagggtaaaanaaaaatctttctgtaggagaaaagggcacaaacaacaggtngaattttcattttatggcccccgcgcacgcccgaaaaaaagtgtgagaaggtctttcgttggggccggggcgaaatacacacaaagggggtaaggagagaaaagggaatgtattggggaagtgtggtatttttattgggtttgttggtttntntgtnttnntttgtgttgcaaagcctttaattagaatgtttgtattttttacatcatgcataacttcacatttgtgattaattagtaattatttcaatacttgtaagctcatctgcctcagatttaatcataatacatgaattaaattaatcaaattaaggaacagcaatttagaaagaaacacactttaaaaaatcaaaattctcaattcaggcagtctgtttctatcatttggtattctactcctttaaaaatttcatattgcccaacaaaaagtggttatttttactgtttttggagatgactgaacagatgaaggcatcagatgccttcatcagctggtattttgcctaagatctatttaagataaccttttcttatattttttacttaatattgggcataatcgtatcattcaagattaagtctgggttatttctttgataagaactgaatgtggccgggcgcagtggctcannnnnnnnnnnnnnnnnnnnnnnnnnnnnnnnnnnnnnnnnnnnnnnnnnnnnnnnnnnnnnaccatcctggctaacacggtgaaaccctgtctctactacaaatacaaaaaattagc

SEQ ID NO: 365637 - DNA, 662 bp, Homo Sapiens
  misc_feature (28)..(28): n is a, c, g, or t
  misc_feature (71)..(123): n is a, c, g, or t
aaatgcaggctgtacggtctgggagtanggatctcctactgagccggccgcagaaattgcagccgctcagnnnnnnnnnnnnnnnnnnnnnnnnnnnnnnnnnnnnnnnnnnnnnnnnnnnnncggcttcccgctcttgcctcactctcagcggctgccttcgcccctgtctgcagacagcgccgctggatgctcccagctggacttcaaccccactcctctcagtccctctccccactgccttccagacgcgcctcttccccgacccgcgcccctctctcctctcccacccctgacccctcatccgcggcgcatcaccctccatcagtcccagattatctgaaagtgactcagctgagaaaggacaacttgggttccgcttatccttaacacgctacacccgtttagctggatgctgtcagaggcgatggagaaacgcaaaaggctactagacgcaacaatagaattaccatattgtttttcctggtttgaaaggaccagatggacacgaaactgggcaagccaatgaaagtctctggggatcattgggacattgagtgtctatgagaacatattccagacaagaatatagtctaaggtttatgggactccccagtactctccatgtagagtctaactgtaaatccaggagtgcacagaaa

SEQ ID NO: 365638 - DNA, 1269 bp, Homo Sapiens
  misc_feature (97)..(149): n is a, c, g, or t
  misc_feature (530)..(602): n is a, c, g, or t
ggcctgggtggccctgtctgaaacagcgccgctggatgctcccagctggacttcaaccccactcctctcagtccctctccccactgccttccagacnnnnnnnnnnnnnnnnnnnnnnnnnnnnnnnnnnnnnnnnnnnnnnnnnnnnncgcggcgctcaccctcctcagtcccagtttctgaaaggactcagctgagaaaggacaactgggttccgctttccttaaccctacaccctttagctggatgctgtcagaggcgatggagaaacgcaaaggctactagacgcaacaatagaattaccatattgtttttcctggtttgaaaggaccagatggaaagaaactgggcaagccaatgaaagtctctggggatcatgggaattgagtgtctatgaaaaccatattccagacaagaatatagtctaaggtttatgggactccccagtactctccatgtagagtctaatgtagaatccaggagtgcacagaaaagtcactggatgacacagcaagaggcaacattttggnnnnnnnnnnnnnnnnnnnnnnnnnnnnnnnnnnnnnnnnnnnnnnnnnnnnnnnnnnnnnnnnnnnnnnnnnttctcacacttccttttgaaagctattaaaaatctatggcagaaaaatggtcaaggaataggaactacaacttcataaatgaggaaccagaaaaggatagctgggaggcattacatagtcatgtgcgaggtcaaaactgagtcaccaccacaaccaagttccagctggcaagaagaggaaaaataacacagaggagttatgaccagtggttgtaagggatctgggcctaaaaatggcatgcatctcctccactaatatccaattggaaaaaatgtaagtcacatgggcaaaccacctatctgcatggaaggctgggaaatgttgatcggtagggcagccatatgtgtaggaaggagaaaacagaatttggtggatacctagtagtctctgccatacccttgaccagaaatttttcttctaaagaatttaattctaaaagttatagacattcccaaagatatacctgcaagcatcacagctttgtgtataattgcaaaagttgaaatcaacatgaatgcccaaaatagtgaattatttaaacagattattacccatattatgaagaaatactctgcaactcttaaaaataaatgtaatgtgccaggcgcaatgggatatgcctgcaggcccagctacacgggagtacaagcgcaggggatcacttaaa

SEQ ID NO: 365639 - DNA, 629 bp, Homo Sapiens
gcggccgcccacagaggagccatctcagggagctcaggccaccaaaaagaagaaggaagaccggcccccgacccaggagaaccccgagaaaatcgccttcatggtagcgctaggcctggttaccacggaacatttggaagaaatccagagcaagcgacaggagcggaagagaagaagcacagccaaccctgcctacagcggcctcctggagaccgagaggaaacggctggcctccaactatctcaacaaccccctgttcctcacagcgagagccaatgaggacccctgctggaagaacgagatcacccacgatgagcactgtgccgcctgcaagcgaggggccaacctgcagccctgcggcacctgcccgggggcctaccacctcagctgcctggagccgcccctcaagacggcgcccaagggcgggtgggtgtgccccaggtgccagcagaaggccttaaagaaagacgagggtgtgccctggactgggatgctggccatcgtgcactcttatgtcacccacaagacagtcaaagaagaggagaagcagaagctgctgcaacgaggcagtgagctgcagaacgagcaccagcagctggaggagcgggaccggcggctggcgtcagcag

SEQ ID NO: 365640 - DNA, 647 bp, Homo Sapiens
  misc_feature (240)..(240): n is a, c, g, or t
aaggaagttgctattaaaaaaaagtagggtacattatataaaatgttgttagaaaaactagctaaccccatccatagaagatgctggtgagcaattaaaatttaggttaatagaaagatttttttactatgatttttaaaattttacttgaatgaaggctgctccggtccttattatcggattttttttcatgtgttggtttttataagtgtcacagacatgaagcaagatttccctccncccagcaagctccttatgaaatagcttgtattaaaatatgaatctaaacatcgtgctctctatctctaatgacgaaaactgtttgagttaaaaatgtctgtttttgtaaaacaaatgtgttctatatttttgtagattttagattttctactgattggatactccaaatttatcaagttctgcaccacacagaaggagattttgagtgtcaataatgaaacacttaactcattaaaaaaatgatttaagaagactagttaaaggtttattcttgaatctgctagcatggtgtaaagttgagccttttaacatacttcctttgagtgacatgaaattggtgctgttgcttgtggtggtagagaagtatgaaagtattaacttcttctaaaacaaaatcattcagactt

SEQ ID NO: 365641 - DNA, 1039 bp, Homo Sapiens
tgacaggtgagccagataataaccgcagcacgagcgtcgagctcacaggtgaccccaggaaaccagaggcgctccagaggcgttaatggccaactccggtgagccatggagcccctcttatctgggcccaacctcaaataaccattccaagaagggacattgtcaccaagaaccagcatctctggagaaacagttgggctgttgcatcgagtaatgtcactggactcggcctaaggtttcctggaacttccagattcagagaatctgatttagggaaactgtggcagatgagtgggagactggttgcaaggtgtgaccgcaggaatcctggaggaacagagagtaaagcttctaggcatctgaaacttttgcttcatctctgacgctcgcaggactgaagatgggcaaattgtaggcgtttctgctgagcagagttggagccagagatctacttgtgacttgttggccttcttcccacatctgcctcagactggggggggctcagctcctggggtgatatctagcctgcttgtgagctctagcagggataaggagagctgagattggagggaattgtgttgctcctggagggagcccaggcatcattaaacaagccagtaggtcacctggcttccgtggaccaattcatctttcagacaagctttagcagaaatggactcagggaagagactcacacgctttggttaatatctgtgttcccggtgggtgtaataggggattagccccagaagggactgagctaaacagtgttattatgggaaaggacaatggcaattgctgctttcaaccaagcgactaattgcaatccattcctctcttgtttatagtaatctaagggttgggcagttaaaacggcttcaggatagaaagctgtttcccacctctgtttgcttttaacattaaaagggaaatgtgcctctgccccacagttagaggggtgcacgttcctcctggttccttcgcttgtgtttctgtacttaccaaaaatctaccatttcaataaattttgataggagac

SEQ ID NO: 365642 - DNA, 562 bp, Homo Sapiens
  misc_feature (332)..(332): n is a, c, g, or t
  misc_feature (448)..(448): n is a, c, g, or t
  misc_feature (453)..(453): n is a, c, g, or t
  misc_feature (456)..(456): n is a, c, g, or t
  misc_feature (459)..(459): n is a, c, g, or t
  misc_feature (463)..(463): n is a, c, g, or t
cccacatcatgctcagtgctgtttctgaagaccatctagacttttgtgttctctggaacattctactcaccttcagctgcagcacatttcttcagcctctccaccaagctctttaaaatgaaaggcagttactgtcttcccttggacaataatgaatgtatctactgtatgtgcagaccatgtcgagaagtgggtgggttaagaaaaaagaggggtttttgtaaagcctgtttatttttttaagtcagttttgagcatttctattttaccacccttcacatggttttggggaacccaaattgtatcaaggtctcatgcccaaaacaagccanaaagttgttttctttacctttttcccccatgcaccatgatttcaatgattgtttcagtgtcattttaaatgttttcttgtgacatgtactgatgataaaagtcatcttgacaacanccccnccncanaganttatacatgaatcagaaagtatttatttcaattttgtacctttccattttaatacattataatgtattgactcaacggagataatataaacagttcatt

SEQ ID NO: 365643 - DNA, 514 bp, Homo Sapiens
ttaacgcacttggcctccagctccctggacggctgccttggcgttttcaaacacaaagctcctttattttttgggcgagggtgcgtggggcctgccccttggaagggaagggaaggacggtgtcctgtggagaccagactctgcaagtggggagaccacccccgcaagccagtgacaagggagccctgaagttgtgtccacgaagagggagctgaaacaaattcggggctatgaagtgttttaaaaatccattcttcgcagtgtggccaccacaccgccctgagccctcccacggcccatcgtcccgggtgggccgggatgatgccccagtgcggccggtgctcatctccgcccccgggtccgccccctgacaccgtcttactctacctcagacatgaggaggccctccattcctggtttctgtagcttgcattcttgttgtctctgatgcatgccctgccagttagtactgtattttgcattcattaataaaagacaccggtggaaagaaaaa

SEQ ID NO: 365644 - DNA, 1040 bp, Homo Sapiens
  misc_feature (234)..(251): n is a, c, g, or t
  misc_feature (462)..(501): n is a, c, g, or t
  misc_feature (613)..(621): n is a, c, g, or t
  misc_feature (882)..(890): n is a, c, g, or t
  misc_feature (953)..(965): n is a, c, g, or t
tgggattttaaaatcattttattaatccaacagtacaaaagacccccaccaccaccgcattctgccatcactttgttccaaaaagtagtggagtgagagagcgagagggagcagatccagcaaaaacactcccccaggggccattttacaaaatgcggagcaggggaagacaacacaaaaacagcaacagataaatggggcaaacagaacaacaaacacaagagttgagcagcnnnnnnnnnnnnnnnnnnttgccatctacgccgttttagtgtgagggacactgggaacgatgcccagaggctgctctcctcccagcctcaaaggttgtcagctccaccaaagcagggtcttctctcctcatgccaggaactgaaaaaagtgggggtaggggacccctagggtcttttgcccctggatttcttgaagctggggggaatcctaaactttctcccgaggggnnnnnnnnnnnnnnnnnnnnnnnnnnnnnnnnnnnnnnnnatggggaggggaaatgggggggcctttggaaaccgggaaaaaggggcgaaaccgataccaagcgcccttagaggggcccctccctttccagggggcccccggggagccccannnnnnnnnggggcccaggccaaatgtgccttttttaccagatgtccccatgacggcgggccgtttttcacgccccccacggggggccggggccctttttttggggcctcgaaaacggggaaattcagacaatatggggcccaaaagactaaaaacctcccgcccggatgccccccctccgcaggagggtttttttcttccccctacccactctttttgccccgaccaaagagaaatgccccgcccaatatgcttttccgtggggcgccnnnnnnnnngtatccaccgctctggtgggaaaagccacccccggcggcggggaatattgaggcgggcgtttnnnnnnnnnnnnngactaaatttacgccgcccgagggaacgccccccgcggaggtactgggtgcgagtaaggcggggcggttttctat

SEQ ID NO: 365645 - DNA, 382 bp, Homo Sapiens
agaataaagattgtgagatgcccactttagagccaggaaatgtcatttcaattcttatttcttcggagtttttaaaaatggattcactagttgaacagtgtattcagtattgccacaaaaatatgaatgccatagtagctaccccatgcaacatgaactgtattaatgcaaatcttctcacacgtatagctgatctgttctcacacaatgaagttgatgatttaaaggacaaaaaagataaatttaaaagcaaactttcttgtaagaagattgaaagactgtttgatcctgagtacttgaatccagattctcggagtaatgcagcaacattgtatagatgctgtttgtgtaagaaacttttaacaaaagaaactgaaatgag

SEQ ID NO: 365646 - DNA, 682 bp, Homo Sapiens
  misc_feature (328)..(391): n is a, c, g, or t
tccggcaacatcggaaaaagttgtatttaaaaataatatggagaataggggttttaagtaccataaacccatattggccttcccttgtaggtttaccttttagtatataacatgaatatgtagtgccttcctttttaacaataatccaaagtcatagctccaagatattgacctctttctcaatctataacctttgtaggcatgcatttataccagcatgttttataaattatgagtttctatctgtgtccatgaagtcttactagttttcacttaaacttttgtgggttgttaagaagaattaaagtgattcataacttcacgcttnnnnnnnnnnnnnnnnnnnnnnnnnnnnnnnnnnnnnnnnnnnnnnnnnnnnnnnnnnnnnnnnagagtgaaactctgtccttaaataaataaataaagtggttcataacatcagatgaagaaggaggtgagtgatatgttaaatgatcagaaacttggcattacattatttccaggaccatttccctaccaaagctgtgtatttttcatttcttcatggcactgtgctgttaatttctgttaacatttgtgctaaaatggagtgtaatttttacatataagtgttagaattttagctatcttagttgaaacacaaaaagttgttactgatccaataaaattatcaaaggccaaa

SEQ ID NO: 365647 - DNA, 297 bp, Homo Sapiens
  misc_feature (228)..(243): n is a, c, g, or t
cctaaacaaagtttttacactgagcagatgctctgtcatgatggcggttgtgcaattctggtatcctctaaatttgtaagcattcataaaacaggaaaaagtaaactatcattcggaagcacagcccattcctcccattttttgcaatgatgtctggatgttattttaaacagtgtgtctgtgtgttcccaaatccagctggccccaccagctcagattccatttttnnnnnnnnnnnnnnnnaaacgtagtctgcaactctgcctcccggcaattatacatgtgtcagaattgctt

SEQ ID NO: 365648 - DNA, 520 bp, Homo Sapiens
tcgagtcggtacctgctgcagacaacagcagaacagaggcaggtcaggttgtccgctctgattagcagaacgacagccccttcctcctcctccctccttcccatccctactcattagctccctgctcatgggatgcttcccaagcagcccaggcctctagcctccatggctgatgacctcagctttcacactggtgaagtctgtgtacccatactgcagccccatcccatggggcccctgaagacccactgaggaattccgtagggtcttgttcccacgaccggagtgctggctctcacagtgaattttgatgcatttaaaataagattctgatgccagactgttaaaataggcgctggttctgaagcaccgatggaaacagattgatgcagatggaaggaggaagggagactgggcccactgatttccagccccaccatgtgtgctgttttcagatgtgattgaggggtgttctgccctgcctccactgtcacagcctttaataaagatgtgaatcttg

SEQ ID NO: 365649 - DNA, 530 bp, Homo Sapiens
gttgtcttttattagtaaatcaaggcctcatagcacattgttaaataaagtggttgactagtctatgtaacagctcaccaagctactatctcttttaactccttataatgttgcgtcattaaaggtcaaggggtcatgctattaatctcattgctatagaccattaacatgactgaacttttccacaaagtacctatgtttacaatgctataaccctttgacctgctgcggcaacctttaaccacacaaatgtcacaagctagaatcatcagcatggttcttgccatggcaatcaaagagttaagggctgtgcagtgatttgttttgtatttattaatttatatttattttgtttccattcaaggaggggattaggggtggggcagtttttgtctgctgtaagtgtcttaacctagggaagggttaaatggctttttatactattgcatcttctgtatttaccatcaattcattgtgttgtaattaaaagaaactgtcaataaataagagaacagaaaaatggttcatag

SEQ ID NO: 365650 - DNA, 1060 bp, Homo Sapiens
  misc_feature (175)..(224): n is a, c, g, or t
aaaaatcttcaggggtgctaatcctgttgcatcagttgatcatactaacgagaacggtaatgcgacaagatacacattgccttcatctgtacattctgtgataccaggcaaattaccaattacacacagctacttatattttatgaagggcattttttagatgacctcatcctcnnnnnnnnnnnnnnnnnnnnnnnnnnnnnnnnnnnnnnnnnnnnnnnnnncttccacgtaaggaaaagtagtgtaaacagtagcgagaaaatggaaaccacagaggaagatgtattttgcatgtttttcctttcagtgttcttacacgttgtatcactgcattgtggtaatagcttctataaaatctgccatagttggattatgcagctttgcaaaaatttttactagattttgcactaactcatattagctttgtcctaccaacttctggaatttatctaattattgtttttcaaagtttctttccttttaatgtttccctgctatgcaaaacctttcccagacctcagtttcttaaaagaaagatgttgctacagttcccgattctttcttattacaggctcaggtgtacaggttattctgggttaattttatctaatgaagcccattcctttttgtacataaagatgtcacttaaacttatgcttacaaactaaagactaatcgctcaatatgaaaacatgaaaaaatttttgcttaaagtattaagatggaagtagttaaatatggggttattttggtccttttacttttttaaaaaatgttacatattgtatgcactgtgctgatgcaagaattctacattttaatgaattataaaattattctgcatctcatcacatcacagtatttctgtactatttattcatatatataaatatatatgggcttaatcatttaaaatttgttgcagcaagaactttcctacctgtaggcaatagattgctatgtttttaacaaattgtggcaaattctaaacagcaattcttttgtacgtaataggacatttcatcctagaaaaataaagtaatgtttttgacattga

SEQ ID NO: 365651 - DNA, 478 bp, Homo Sapiens
ctgtccctccagaaaaggataacctttggtcccctctgctttggaggaatagaggacagcctgccttgtgcaaatcttttccaagctttcattaaagatcacctctaagcatttccactttacagtggaagcgagcagatgccttcttgctgaactctgacccacataccattcatcttcccaataataatgccaagtgacactcgaacagcaggacaattagatcaaatcctagagcacacccagaggagaaaaaaacagcatgtctaaataccaccaacaaaagtttaggagaacagacttagaggaaggagagaaaaaaaggaaagttcttaaaaagagaaagtgccctgggtgtagtggcaggtttattttctcagtagatccttgaaagaagtagaattgcagcatctctttgcttaagacaagtgagagtaagtctccatccaccaggtaggggagatcagtctcctgaaga

SEQ ID NO: 365652 - DNA, 974 bp, Homo Sapiens
  misc_feature (909)..(909): n is a, c, g, or t
ttttttttcattacttactcagttttatttaggtggacacaacagtgaagaactcaaacatggtttgacctttatctacagacacagcagcctggattttcagcctttcattccttttaaatgaaagtcagcaggctcaaaatgcagagcttggctaagtcacttctgtggaaatatgaaatatagtagtgataaccaccaagggctttcaaattcttgtgttcttctaaggatcctttcctaacaccatgatttgttctcatctttgtggaaatgaaaccaagatggtcttaatttgtaaagtcctttttcctctgttggcagtcttcttacaaaggatgcagcaaaaagaacacatttttctttcaaagttttgaagaaatatagtcattaaaaagaatttaaattatgcctagagcaccactttacagaataccattaaattgtaattacgtgcttttaaaaagccaacttgttaaagaggagctgatggtttcagtttttgtagggaacacttgtaacactgcagaattctacaagggctttctcctctggtgggcagggaaaaaaccactcaagtcatgagaaacttttatagctttcaggaacttgaagaacaactgctgattaaatttcatgctttagtgacgaagtatttttacagctaaaaaaggaacccagaaacataatacatttcatttaaagcaggcagaaaaaccaaccacaaattaatatctattgtattccacatggcctatatatcgtgtcatcgttttaaatggtttcactttatttgtgaaataagccaaatgccacaactccagaaggaccattcatctctcatcccccagataacctcattctgtatgacattccatcatatccctttaaagtttattctaagaatcntgagaccgagcttaaagctcattcctatctgagagcatctgatccgtattccgacgtacactgct

SEQ ID NO: 365653 - DNA, 421 bp, Homo Sapiens
agcagcgagctggagggaacgccaaaggtgtcctgccgggctctggagctcttcgactggctcggcgccgtcttcagtaatgtcgacctaaataatgagcctaataatttcatatcaacctattgctgtcctgagccaagcacagtggtggcaaaagcttatttgtgtacaatcactggcttcatacttccagagaagatctgtctcctattggaacatctctgtcactactttgatgaaccgaagttagctccatgggttacactgtccgttcaaggctttgcagacagccctgtttcttgggaaaaaaatgaacatggttttcgaaaaggaggagaacatttatataactttgtgatttttaataatcaggactattggcttcagatggctgttggggcaaatgatcactgtccaccat

SEQ ID NO: 365654 - DNA, 333 bp, Homo Sapiens
aagttccaggatccatgtgcaggatatgcaggtttgttacatagggaaacgtgtgcctcggtggtttgctgcacctatcaacacatcacctcggtattaagtccagcatgtattagctatttttcctcatgttctcccacccccccccacagcccctgttaaattaatttcttattctccttaatattccatacacattcagattccttctcccctacaaaaatatttgctattttgtccttgctatttctcatacttagatcattcatacactatatttattttttcattaaactattttaaaaccttttaaaagcggggcgggcaaccaac

SEQ ID NO: 365655 - DNA, 678 bp, Homo Sapiens
catacctaacccagcctcctggaatgtcgctgtccgatgattgatgtctttttctcagtccatagttacaattgtttagtatgctaatcagtccagttccctgaggtttaagatcaaatataaattactctgcttttcgactcattcaggtagcattgtacctgaacctgattgctactttttcatcttaaatattatatttcctcatctaatctgccttcccctcatccacagacatttggagaaggaaatgggagggtgtctgttatccctttctctttgctttgtccccgttgttagactggcagcgtcagttgctcggtgggcttggttagagccgtgggtgaggcaggtggctggcggggacagggagaggctgagagggaagtggtggcatttactgctctgacacttccactgtccctgctggggatgctggggccaaggcctgtggggcctgtgaactgcacagccaggagcaaggaacccactaaatactccgtcacctccatgtcccctctacagtgttaaattattacataagcaggtgaaaggtagaaggcgaattatgtgagtaaatatggtctgttttctcttcagcaaaaatgactatttttgtgtgtgactaatttatttttattattgtaaagatacaataaaccggttgaaatatctgca

SEQ ID NO: 365656 - DNA, 668 bp, Homo Sapiens
  misc_feature (64)..(64): n is a, c, g, or t
  misc_feature (74)..(74): n is a, c, g, or t
atgcttcgcgcaccacagggaggccgagaagagtcaagagtgaaaggccgattcgctcgaaggnggtctcaagnggagagcagacatggtctggagactctacccgtagcaggaactcaagacgcgtgtcagcatctagaaatatgtctattatagatgcctttaatctacagacgcgcccttcccgaatgtcactactagaattattcagaggtgattgaggtagatgaatcagatgtggaagaagacatttttcctaccacttcaagacagatcaaaggtggtccagcacatcatccagcaaaatcatgtcccagagtcaagtatcgaaaggggttgattttgaatcaagtgaggatgatgatgatgatccttttatgaacactagttctttaagaagaaatagaagataatatatttaatggcactgagaaacatgcaagatacaggaaaaatgaaaatgttacaagctaagagtttacagtttaagattttaagtattgtttcctgagcataactccataagtaagaaatttctagttcacagacaaacaaaagcattgattcaccctgtttttttaacctgggtgttgtagtaagagctttgtttcaatatcactcttgagtaaagattaaaataaagccaccattttacatttccaaaaaaa

SEQ ID NO: 365657 - DNA, 428 bp, Homo Sapiens
  misc_feature (82)..(83): n is a, c, g, or t
  misc_feature (97)..(117): n is a, c, g, or t
ggaatgaagattgttcctggccgcgacctgagacctccataagtggagggtagagtgatctatgtctcttccccaggaaggnnggaccactcccagnnnnnnnnnnnnnnnnnnnnnaggggagctggggaattcctgccaagcaccttgaatgggaggggcctcacagagggcagggccagggtccagcaggggtggggggttcctgctctgcccctgcccgtccccacccagtcttgccctcccatcctctcatctattcccccgctggagacggaagatcttttattttctattatttataacttcagacttgggccccctgttctttctttcccattaacttgagtgacctgtgtgagagacagacagatgccccacgaggatggctggacaaggacttttactttttattacataaaaatatt

SEQ ID NO: 365658 - DNA, 250 bp, Homo Sapiens
  misc_feature (32)..(32): n is a, c, g, or t
  misc_feature (79)..(79): n is a, c, g, or t
  misc_feature (94)..(95): n is a, c, g, or t
ttgctacttgggcaggcatttgggctactttnttttttctttcatccactttttgtatagttttgaataaaaacttaanaaaggaaaacaaaannagcaagttagttttgatattaagtcaaatactactaaaaaggtaaatctgcagctcctcatcatacaatttagtgaatttttaccttcacttattactttaataaggacataagttcaaaatgtgtcctttatttcaagccatattcattacagg

SEQ ID NO: 365659 - DNA, 431 bp, Homo Sapiens
  misc_feature (67)..(67): n is a, c, g, or t
aatcgccctctccgcatggccctattgatacactttacctaatccatggaaattcctaaccctaaanggaaaacattttccctgcttgtcttagaagaaagtggaataattcccactgattgtgataatggtttcaatttcctacacaatataaatatccagtataaaggaaagcgttaagtcggtaagctagaggattgtgaatatcttttatgtcctctagataaaacacccgattaacagatgttaaaccttttaatgttttgatttgctttaaaaatggccttcctacacattagctccagctaaaaagacacattggagagcttagaggataagtctctggagaagaatttatcacacacaaaagttacaccaacagaataccaagcagaatgatgaggacctgtaaaataccttgtgccctatta

SEQ ID NO: 365660 - DNA, 409 bp, Homo Sapiens
  misc_feature (15)..(15): n is a, c, g, or t
  misc_feature (25)..(25): n is a, c, g, or t
acccctttcccaaanccaggaaatnccaaccccaaagggaaaacatttccccgcctggcccaagaagaaaagtggaataattccccaccgattggggataagggtttccaatttcctacacaatataaatatcccagtataaaggaaagccgttaagtcggtaagcctagaggattgtgaatatcttttatgtccctcctagataaaacacccgattaacagatgttaaaccttttaatgttttgatttgctttaaaaatggccttcctacacattagctccagctaaaaagacacattggagagcttagaggataagtctctggagaagaatttatcacacacaaaagttacaccaacagaataccaagcagaatgatgaggacctgtaaaataccttgtgccctatt

SEQ ID NO: 365661 - DNA, 640 bp, Homo Sapiens
aattaatttattttctctatctattagaatgccctctaaggcctttctttaacacacactgactttttgaagaatgatctttagattgataacttgctatttatggtgactctgtggttaggcttatttaccgttaatctaaagtattcataaagcaccatttattaatcatccttttggatctttcaaaccaaacgtataccaaaaatgtcttcaaaaatgttatggctttgtttgtaattcgggtatattaaaatgttgttttgaaatacagtttatcttaaagaaaatttgacagtaactatattaaggggtacattaagtaatatatttttaattaatggtgtaccattgagagaataagaaatggaagtctattgttttattctttaaatgtgctgtttaaatatatttccatattttaaaatatattaaacagatgctaatttctgctgttcttgatttggttctttatttaaaaggaatacaaaatgtaagtatatcataaattgagacaataagaatatttatcaaatgtaaactgtggatcacatgattctttatgttgttcttaattgccaaaattgttttttgtgttgttaataattatctcactattaaatgtgcaaagcaacaaaaa

SEQ ID NO: 365662 - DNA, 136 bp, Homo Sapiens
ggccaaacccggtggtgggcacctgtagtcccaacaacttgggaggtttaaatgggaggattgctttagcccaggagtttaaaactgcagtgaacccctgcacttcagggtggacaacagagggagtccctgtgtc

SEQ ID NO: 365663 - DNA, 556 bp, Homo Sapiens
gccatgtaactatgcatgtgtgcttagggaaatggaaatgcccaggcctttagggattacttggaaactggccctaagccagcacaaatgctgagacctaaaaagcctttgtggtccactagttagaatagaggcttccatggtgttatgggtcgaattgtgtcccttccacccaaaatcatatgttgaagtcctagcccctagtacctcaaaatgtgcccttatttggaaaatgaggttgttgcagatataattaagatgaggtcttattggcataggcgtggccccctaattcgattgttgtacatataacaaggggaaatctggacacaaagacatgcacataggctaagtaccatgtgaagatgaagccagagactggggtgactgcagcagaggccaagggacaccaaggattgccagcaaaccatcaaaagctgggagcggcaaggaacagatcctcccccacagcccgcggaaggaaccaattctgccaaaatctaggacttctacgcttcctgaactgtgagacaaaaaatttttgttacttaagtcc

SEQ ID NO: 365664 - DNA, 279 bp, Homo Sapiens
acatttcaaatgcagatcacacggaaaggggactaagtacagaataacaaatgtgatttaaaacaaagataacctgctgctgcatataatacaggttgggtttagagcttggagctcaaatgtcaaacagcaggaggaataaaaatgctacttgtgaaaacccaggctgtaggtaaaacttactcttttgttggttgcactggggggttgggactttctcctgaactggccttgaaatcctatcctgacctgcaggcaagtgctctggacaaaacactg

SEQ ID NO: 365665 - DNA, 449 bp, Homo Sapiens
gaattctatctgtatacggccagagaaactttatagagtgtagagaggtgagcgaaaggatgcaaaagcactttgagggctttataataatatgctgcttgaaaaaaaaaatgtgtagttgatactcagtgcatctccagacatagtaaggggttgctctgaccaatcaggtgatcattttttctatcacttcccaggttttatgcaaaaattttgttaaattctataatggtgatatgcatcttttaggaaagatatacatttttaaaaatctattttatgtaagaactgacagaggaatttgctttgtataatgcaggctggctttacaaaagcactgtagcaaatttactacaagtctaaaagtatacatatatgttaatagatatatgtgcaactagatatggacagcagttgtatttttttaaataaatatttttaacaaaatg

SEQ ID NO: 365666 - DNA, 622 bp, Homo Sapiens
taatggatacttaaaaactttatcacaaaggaaacccttcaatttctagcagtaactcgtttggctcaagaactgccaccaaggggggtagacagactctgtggggaatctgggatccactagggtgggttccaaacccatgcccaggtggtctttttcttcttttagagacagggtctcactcaccaggagacaggtccctccacacctcatctcaattaactcactcaccaggagacaggtccctccacacatcatctcaattaactcactcaccaggagccaggtccctccacaccggatctcaattcactcactcaccaggcgccaggtcccgccacacctcatctcaattaactcactcaccaggacccaggtcccgccagacctcatctcaattaactcactcaccaggagccaggtccctccaaacctgatctcaattcactcactcaccaggagccaagtccctccatacctcatctcaattcactcactcaccaggagacaggtccctccacacctcatctcaattcactcactcaccaggagccaagtccctccaaggccttcaagtttctacccaagataccatcatgtctgactagaggcagctttagcg

SEQ ID NO: 365667 - DNA, 998 bp, Homo Sapiens
cggtccggaatttccgggatggaagaccagagcatccaggagcccaaagaggccaactccatgacggcccagaagcagaagaagtgagggcttcgaggctcccgtaggcgccatgccaacagcggcggagatatcttcggggacagctttgccgcctatttcccccgggtgctgaagcaggttcaccaggccctcagcctttcccaggaggccgtgagtgtcatggattctatggttcgtgacatactggaccgcatcgccaccgaggctggtcacctggcccactactccaagtgcgtgaccatcacctcccgggacattcggatggccgtgtgcctgctgctgccggggaagatgggcaagctcgctgagtctcagggcacgaatgccaccctcagaacttcattatgtgcgatatggcaagagagaaagtgaatacgctgatataagaagcaagaaaccttccttccttccagttgtgtgtcagtagaattacagagtgtccacggaaacagctcatgccctagtgtacagtggtgcagccaatgagtgacctgaagtctatgagcaacactcattgtcccaatgtgggacgagtgaccgaagctgaacccacaacagccttcctgtgatattccacgtggtggttaaagaatattagaaaaatattatgaaaatagttgaagagaaatgttatgaaaatagttgaagctgtacttactgcacaaggagaccaagaaaaactcccacaaaatcagctgcaagtaaatccctctggatggtgccgccacatgttcctacaagtccagaacaacccttgccaaaccaaagacacttggcagaaccctgttcctttctagagacagagctgtatacctgttccaaaacaccacatctcactcagtgacttatttctcattatgctaattgttttgctgtaaagtgccaatgtttctgtgaattaagacatacgaataaatttctgaagttacccttgc

SEQ ID NO: 365668 - DNA, 515 bp, Homo Sapiens
ggctatggttcctcttccgcatctgtcagtagttcacttatgttcagtcttagaacctactggaggagtgaagtaatttctctgtctcgtgcagaggcactaaggagctgagttacctcttaatctgggggaatggataataagtggagtacagttatgttaaaggatgttccccccgctcaaaaaaaagtttcaatgtttgttttgcccagtcaaaaatataggtcttttctacatataagaacagtcaccagaaattttcccttttgctaaatgcttaggtatttgctatagctgtttctgatgtcatggattctgaggaagtgtcatttacgtgatgatcttcctttattgatgtcttcatcatgttcagtgttttaaaaatataaattacaaacactctacaaccatacccagatttacttattttatcagaaaaaaaacttgagaaatttgtagatcaaattgagagacaataagtgtacattgttgaataaaaaattttaaagtttctg

SEQ ID NO: 365669 - DNA, 999 bp, Homo Sapiens
  misc_feature (32)..(32): n is a, c, g, or t
  misc_feature (50)..(50): n is a, c, g, or t
  misc_feature (124)..(124): n is a, c, g, or t
  misc_feature (163)..(163): n is a, c, g, or t
  misc_feature (444)..(474): n is a, c, g, or t
gatgactcccaatctgggtgtccccaacgaanccctgccaggaacaatanggctgaaggtcaggtgtgctgcccagtaaagtgagggaggggctggcaggaagggtggggttcctcacactccnccgccctctgcagagctgggctctaccccaaaaggcttncaggccagctgccacagctggaagcagaggccttcgtaggtgatggcctgcatgttgtaactaccccgtcccgctgggctcaaggaacagctcagctaaagccctcgggttccatccgtttaaatctgtggcattttcagagcctcatctgtcagccttaatgtcagtggcaggaagtcataactccagctaaaaattacagagtaaagttccctgattcttaatgtgtaatgtctgccctatgtgtacatacacaatataattatacatctgtgcatatnnnnnnnnnnnnnnnnnnnnnnnnnnnnnnngggggggcgcggcccaaaaattctcccccgggggggcccaagtttccgccggataccccgagcttcctctggttcccaaaggggcccccatatgaggaggagccgaaattaaataagccaaggacagcgggccgcgcaagcgatactaacaagcgcccgcgaacgtgggcaaaacgcggccgacagcccgggggaaccccggggaaaaggaaccactatactgtcgtggggggggtgggccaccacatatgtgggggacacaaaagttacccccttcaacagaagaatttttaaaagagcgtccctaaggggggcacactttatatacaaacacttttctcacagcggtgtgtatctatccgcggtgttgaaaacaccttcagcccgtggcatatatgtgcccgtaggccagcggccttgagaaagaaagattcgtgagcgcctaccccgggcgttgagtgaactctcctgctgaaaccactcttttcattcacccccgggaagccctcgcgtggaacaacccgg

SEQ ID NO: 365670 - DNA, 768 bp, Homo Sapiens
  misc_feature (369)..(369): n is a, c, g, or t
tttgttattatgatctgacatttgttttattaaccattagaaaagatttgaaaaaacgaattccattttaatagtgagacaacacagtagagctaatcatggaatattaatgttttgctattcgggaattactaagggggaaatttgcaggaaactttaaggcaagaatattgcaaataagttgccaaaaatatatgcttatagccatagcaaaatgaagatttagcatgcttgtctttgctcccaaatatttttaaatgcagctttattaaactataatgtttttaaaattaatacttgtgcttatataaaattcagtgatttaagtacatcgatactcatttgggtcacattttcaggcaattactngttcggcttcccaagaatttcattcaatcagcaagtttagttcacacaaacgttaagggcacagagtcatgaaacgaactgattttaattctgaagtgtgttaaagtaatctgctcccctctgccccaaacacatatacatagctgcttattcatacctgtttgctaaaaactcatgtgcacgctcttacgggttaaatataatttgggaaattaatgatgtaaaatgtaaatcataattataattccttttaaggaaattagtatttttctttagttacttcaagccacaatccttaattcaatgatcccagaattctttacaaaaccatccttggtatatgaatatcttagacccaaaaatatctgtgattatgatgaatttatgatgatgaaaaac

SEQ ID NO: 365671 - DNA, 381 bp, Homo Sapiens
  misc_feature (288)..(288): n is a, c, g, or t
  misc_feature (318)..(318): n is a, c, g, or t
  misc_feature (329)..(329): n is a, c, g, or t
aatgtataactgaaatgtattttttcatttataaagtataagttatctttaataacacacatgtacaataaataattcatatatgaaaattctcatcagatagcttcatgctttgtcagtggaagaagccacagcaccagggaaatcagaaggcaatcttagtaactcttctacctcttcttgcagggcttctgctttttcatgcaacagcatctttgctgatgaaacaatttgcttggcttggcgtcttgataaatgatcaattgtccttacgaggcacttcaggantttgcattagctaaggtgtcattaggactnttgtaacctgncactggtataactgtttttggctcggaccctctaaaactccagttaacttcc

SEQ ID NO: 365672 - DNA, 345 bp, Homo Sapiens
ttttttcgtttgataaagaatatgaatgtttataaaccaatattcaaaatagctgcacacatctgttttcacttgaataaaaaaacacattgtgacaaattttataaccttaacttaaaatacatgaatattaacatttactaatatatttacacattttatttacatcatcaacaaatctgatgaaaaagagcatatgtgattattttaacacagcaggttatgaccagtctttgaatattgatccaggaatgtgcactgcatttaattagaaaacatacttttaactttttctgaactcctagggcatatctattcacacaaaatatcgcaaggcctcagttt

SEQ ID NO: 365673 - DNA, 2097 bp, Homo Sapiens
  misc_feature (44)..(80): n is a, c, g, or t
tccgatcactatagggcgactcggggttatcgcggtggcggcgnnnnnnnnnnnnnnnnnnnnnnnnnnnnnnnnnnnnnatcaggccaaatcggccgagctcgaattcgtcgagagcggggctgcgctccgagctgcggagtccgggactggagctgcccgggcgggttcgcgccccgaaggctgagagctggcgctgctcgtgccctgtgtgccagacggcggagctccgcggccggaccccgcggccccgctttgctgccgactggagtttgggggaagaaactctcctgcgccccagaggatttcttcctcggcgaagggacagcgaaagatgagggtggcaggaagagaagggcgctttctgtctgccggggtcgcagcgcgagagggcagtgccatgttcctctccatcctagtggcgctgtgcctgtggctgcacctggcgctgggcgtgcgcggcgcgccctgcgaggcggtgcgcatccctatgtgccggcacatgccctggaacatcacgcggatgcccaaccacctgcaccacagcacgcaggagaacgccatcctggccatcgagcagtacgaggagctggtggacgtgaactgcagcgccgtgctgcgcttcttcctctgtgccatgtacgcgcccatttgcaccctggagttcctgcacgaccctatcaagccgtgcaagtcggtgtgccaacgcgcgcgcgacgactgcgagcccctcatgaagatgtacaaccacagctggcccgaaagcctggcctgcgacgagctgcctgtctatgaccgtggcgtgtgcatctcgcctgaagccatcgtcacggacctcccggaggatgttaagtggatagacatcacaccagacatgatggtacaggaaaggcctcttgatgttgactgtaaacgcctaagccccgatcggtgcaagtgtaaaaaggtgaagccaactttggcaacatatctcagcaaaaactacagctatgttattcatgccaaaataaaagctgtgcagaggagtggctgcaatgaggtcacaacggtggtggatgtaaaagagatcttcaagtcctcatcacccatccctcgaactcaagtcccgctcattacaaattcttcttgccagtgtccacacatcctgccccatcaagatgttctcatcatgtgttacgagtggcgctcaaggatgatgcttcttgaaaattgcttagttgaaaaatggagagatcagcttagtaaaagatccatacagtgggaagagaggctgcaggaacagcggagaacagttcaggacaagaagaaaacagccgggcgcaccagtcgtagtaatccccccaaaccaaagggaaagactcctgctcccaaaccagccagtcccaagaagaacattaaaactaggagtgcccagaagaaaacaaacccgaaaagagtgtgagctaactagtttccaaagcggagacttccgacttccttacaggatgaggctgggcattgcctgggacagcctatgtaaggccatgtgccccttgccctaacaactcactgcagtgctcttcatagacacatcttgcagcatttttcttaaggctatgcttcagtttttctttgtaagccatcacaagccatagtggtaggtttgccctttggtacagaaagtgagttaaagctggtggaaaaggcttattgcattgcattcagagtaacctgtgtgcatactctagaagagtagggaaaataatgcttgttacaattcgaccctaatatgtgcattgtaaaataaatgccatatttcaaacaaaacacgtaatttttttacagtatgttttattaccttttgatatctgttgttgcaatgttagtgatgttttaaaatgtgatcgaaaatataatgcttctaagaaggaacagtagtggaatgaatgtctaaaagatctttatgtgtttatggtctgcagaaggatttttgtgatgaaaggggattttttgaaaaatctagagaagtagcatatggaaaattataatgtgtcttttttacaatgacttcagctctgtttttagctagaaactctaaaaataaaaataataataaag

SEQ ID NO: 365674 - DNA, 688 bp, Homo Sapiens
  misc_feature (554)..(554): n is a, c, g, or t
  misc_feature (581)..(581): n is a, c, g, or t
  misc_feature (608)..(608): n is a, c, g, or t
  misc_feature (624)..(624): n is a, c, g, or t
  misc_feature (637)..(637): n is a, c, g, or t
  misc_feature (668)..(668): n is a, c, g, or t
  misc_feature (677)..(677): n is a, c, g, or t
ggattgtagaaaattagtctttcattgttttcttctgtgaagaatctgttgctatgtactgtatattcagcatttatatttggtttgtttcatagctaatgaggtatttagatatgaacaactgaatacatattgaaataagtgtgctggcttttgtagttttgataaagaccattgcaggcaatggaattgtgccagagaaatctgatttctagtacaaaaggaatacttagccagggcctcaagctcaagatacttattgaaaacatcctcaattgcaataaaaacattataacatgaaaaagagtgattttttgaaccggtgatttaaatgtattgatctgctttgaattttcaagcagccagaattttctagtttaaattggcagagttataacaaaggagagcctcaaatattagacaattgcagtgcggctttctgggcacaggtgtcactgctctgccacctatcactattctttttctgttcagtttttctctcaggtgtttgctggggaaattaacactgggaactgacccttttctgggcagtngaatgtaagctctagctcccccatctnacttattaaaggaaatgtcttcggagntgtaggaaataagggnatttttctggaanaattaaaagtttttacagttggttaaggatnatttccggnagggaaaaggc

SEQ ID NO: 365675 - DNA, 473 bp, Homo Sapiens
tcaatataatatatgttttattaaataaatactattcttcttgtcccatcaacatatactttttaaatttttgcttaatttacaattcgagttaatattttgagaacgtaaggaaagacaaataggtaaatgtcttgttgaaagggttaagatactgacaggacataccttcctgttccatcctatataaaatccactcatgagttggatgccaagtatagatttctgaaactcataaccaccaatcacgataatgcaatcattaaaactcacaccattgcaaggaccaagtataaaatattctgctactattttagatacttcaaaaacatccactactttaaatgaaaagctttaaatgtgtcaatgctatttgctttttaatggaaattaaagtagaatttttctattattctgtttcgatcaactattaacctttaggataattgttttatgtgaaaaaaattagaaat

SEQ ID NO: 365676 - DNA, 447 bp, Homo Sapiens
  misc_feature (200)..(208): n is a, c, g, or t
caggagatatggtaccgacaatgaccaggggaagggtattggacacgcaggcgtcctccttattgaaaacacattatgtcagttgggaattttaaataagcttttagcaaacctaacactaaaagcaaaatagaagaaagctataccattaccataatacatttttcatctcatggctacaatggaattcttgaaaaggnnnnnnnnntcctatctacatataaaaacctgcatgaatgaatcactacatatgcttataatgaggaagagttatgggtcctgagtgtaattttttatcctttcttaaaaagtttctgtattatgcattttgataacactactgatgatccttccacttatatttgaaatgttatgtaccacatttgcacaattaaaacttttcttagcattcaacctagaattgattaaatttatgactgaggcttc

SEQ ID NO: 365677 - DNA, 531 bp, Homo Sapiens
gaaaaaataaagtatgcagagtgtatttgagagaaactaccctaataaccccttttccagttttactttttggtggtgatatagaagttcagcaccgagaacgtcttctttctattgatggctggatctattttcaggcccctgtaaagatagctgtcattttcaagcagctgagagttctcattgattcagttttaagaaaaaagcttgaaaatcccaaagatgtcccttgaaaatgacaagattcctgcagatcattacggaattgataaaaacagagaataactgaaactgaaattcatggtcaactgctttaaaaattaagatgaagatacagtcatgaaattatctgaaaatgggtcatcacattaagtatttcattacttaaaatgttggtactagccattaacttaaaggtggtgggaaaaaagcacatactttaaacatgtataattttctagttcctttttaatgatgattattctgaatgtatttgccactacatttacaataaattctttggtattatgc

SEQ ID NO: 365678 - DNA, 522 bp, Homo Sapiens
ttttttttgcagacaagctgtcacactgtgaattgtcctgtgattctaggtctcctccaagggtcaaaggagactgaggactgcttctagagttttccactaacaggccacgtaagtgtcccgaagattcatggcttctttctacctcccagatcttgaatctgcaccagtaacctctttcctgcagtagcctagatttctggatcacctgaccatcttatctccctgcacgcacacatttataagtcagagctgtcctgcctgggccagtatctgtagcactaaccagttctttcaccaattgtgcaccaaagctcacccatggattcttgatagcaccttttctattctgcatttttcccccacaaaccctctttcctgtgaagacagtatgcccaaggtctccctgcaggtgcctaaatccaggccatgctggaaatcagatgtccatgagttcgaagcagagtttttggatgtggttattgtaaatataagtgcaaaacagaaatgagagacttagtc

SEQ ID NO: 365679 - DNA, 389 bp, Homo Sapiens
aatataataaattagattcccagcgctattctgacatagtgaatgaccttgaaaaatttactaaacatactatgtttgtttctccatgagtaaaatagggatacagggacaaacagtctaatatctcatagaaataccatggagacaaataaaatattttaatataaatatgatattaaagtaaatttctgaagtaatacttttgggtatggcactagtttttcctctgactattttactgtttctttcactctcaatataaaaactatttgataagataaaacgatatattttattgtaattagaatttagacaaatcagctataatgtaaaaatgttaataataattacgttttatctgattaaagttacaatgatcatagcacttt

SEQ ID NO: 365680 - DNA, 769 bp, Homo Sapiens
ttaaatagtctctttcctggcctggcccaggtagaaatatagacctgtcatgaaaactgagagatggggctcaccatatcaataactactgcccctcctcccgccatggcagctcgtgtcatcagtcctcctctacctgctgagatgaaaggagtttcttcacattttgccatgtgtatacaagaatggggtgctgggagggccttgaggttaatgccttggactgtaagatttgtaaaaatcagtgactggaacatggaacactgtggtgtttaaggtttcttccctatatgatattctactcttccagtctaggattatatagcttgagcgaaaaagtgagatgtggctcagcctgagatgagtgggactgatgctagtgttaggagtggactgggacaaggtgaggctgattggcccaagttccgggtccctcctttcttcaagcacccatgtgtctatgacagtcatacaaagaaatagaggggaaagagtatggagagaagtcagtagaggaaaaaaagaaggaagggaagaggggagcagactgttaaccaaccatacaataagggcactgcttgtacccagttcttgggaagccacagtcatcagcaactctaagactaaccaaggctacttgtctcattttgcctccctgccccatccacccagtggctcccaaatatggatggcaatgacctcctcagcaaacagagatttgggcctaccctattaggctcctggggacacagtagcacctttgcagttg

SEQ ID NO: 365681 - DNA, 1747 bp, Homo Sapiens
  misc_feature (1554)..(1565): n is a, c, g, or t
  misc_feature (1568)..(1571): n is a, c, g, or t
  misc_feature (1574)..(1575): n is a, c, g, or t
tagaacgtgctgagatgaaactcagactggattcaatagtcattcaacaagggaggcttgtggatcagaatctgaacaaaattgggaaagatgaaatgcttcaaatgattagacatggagcaacacatgtgtttgcttcaaaggaaagtgagatcactgatgaagatatcgatggtattttggaaagaggtgcaaagaagactgcagagatgaatgaaaagctctccaagatgggcgaaagttcacttagaaactttacaatggatacagagtcaagtgtttataacttcgaaggagaagactatagagaaaaacaaaagattgcattcacagagtggattgaaccacctaaacgagaaagaaaagccaactatgccgttgatgcatatttcagggaagctcttcgtgttagtgaacctaaagcacccaaggctcctcgacctccaaaacaacccaatgttcaggatttccagttctttcctccacgtttatttgaattactggaaaaagaaattctgttttacagaaaaactattgggtacaaggtacctcgaaatcctgagctgcctaacgcagcacaggcacaaaaagaagaacagcttaaaattgatgaagctgaatcccttaatgatgaagagttagaggaaaaagagaagcttctaacacagggatttaccaattggaataagagagattttaaccagtttatcaaagctaatgagaagtggggtcgtgatgatattgaaaatatagcaagagaagtagaaggcaaaactccagaagaagtcattgaatattcagctgtgttttgggaaaggtgcaacgagctccaggacatagagaagattatggctcagattgaaaggggagaggcgagaattcaaagaagaataagcatcaagaaagcacttgacacaaagattggacggtacaaagcaccttttcatcagctgagaatatcatatggtactaacaaaggaaaaaaactatactgaagaagaagatcgttttctgattcgtatgcttcacaaacttggatttgacaaagaaaatgtttatgatgaattgcgacagtgtattcgcaactctcctcagttcagatttgactggtttcttaagtccagaactgcaatggagctccagaggagatgtaataccttaattactttgattgaaagagaaaacatggaactagaagaaaaggagaaggcagagaaaaagaaacgaggaccaaagccttcaacacagaaacgtaaaatggatggcgcacctgatggtcgaggaagaaaaaagaagctgaaactatgaatatgtttttgtttcataatcactaactttaaaccagtagttctttaatttacgggtcttcataagatgtactgtacaatgctcaattgttatgtcatttaaagacatcaggttcatctgtttactgagctagaaacatagtatgtagtttcacttttttaaatgcaacagctgtgctgaaatttttttatcattaacacttgaagtaataaaataggcttcattttattaaaaaaagccaaaaannnnnnnnnnnnaannnnaannaaaaatgtcggccgccctcgggcctcgaagaagctttcaagaacatttcttttgggcccgcgggcccccagaaggtaagttgaacatgggccatacctgtttccctaaggaaatcctgggccatgaacaaaaggcctgggaatccccccccaataaaaaaacgcccgggggg

SEQ ID NO: 365682 - DNA, 462 bp, Homo Sapiens
  misc_feature (109)..(109): n is a, c, g, or t
  misc_feature (145)..(145): n is a, c, g, or t
  misc_feature (209)..(235): n is a, c, g, or t
atgtgtggtgttgacaatatattgatttatcaagctactaagggaaaattctaaatttaaccaaaatgtgtatattttaataaaatgcataaagctttattgtgtgccntttaaaatttaaaaatgggtttataaagaaagtcangaaacaaaagtgtcttacctataaaatatccatagtaatgtaaagcttttacacgagactaccnnnnnnnnnnnnnnnnnnnnnnnnnnngagccttcccatattttgttaaccttaaccagtatctgaagtctgttactttttttccattcttaaatggagatgaataagtgaatttcgccttaagtgtttcaattgtcctttgtagaaaagccagataaatgagttcactttgaattgcattattgtggaaaattcattttcagaataaaacattttaaaaagtacagctaatcgactaataaaatttaaatttg

SEQ ID NO: 365683 - DNA, 440 bp, Homo Sapiens
caggagagctgccaggtaggacggcgggcaaagcgcttcttcaagttcctgcgctggagtcaccacccgagaggcatcgccgtctggcgttggtgtctgagcagaagccgcaggaaccagcgggagcagcaggaggagctgcgggactcgtttgccgagtcacgtaatgatcgggtatcagaaaaagacgtccagcatcctagtccctcaagaaacaaaattaactatttcggtgctgtcctcttggatgataagatccggagtcatcgacttctcataaacacctttcactcatacaatccaatttttaagaagtccaattgttttgatggttttcaatttcacccatttcccaaggacagcctcaccaatcggagctctggtctctggaattaagcatcatcaagctctcctattaataaatttaatttagatctcct

SEQ ID NO: 365684 - DNA, 477 bp, Homo Sapiens
gcctgggggccctgtgatcctctggtttcttccattggggcggagtcgggggtggagggagctggccacaacccactgctctgatgggtggtttgtccaaggatgctgaatgtaatgcctggtcaatgtggaagcccatgaggttgcccagggaagcctccaaaagctgggatgcttgagggtatccaagttgaaaaagacaaaatctgaccatcagccagtgacagtcctggcaaatgaaggtggggcggggcagtgaggggtgggagaaggtgaatgattcattattccaccccgaggtttgctggggtgaggggaagaatcgatgctgctttgggaactgaaggtttttctgttgggaaggccctcttggttttggagagaaagacaagttatgagtagctgctaccctggaacggtgggcagagagcctactaggaaatgtgcagaataaactattttttgaaggaaaaaaaa

SEQ ID NO: 365685 - DNA, 717 bp, Homo Sapiens
catcccagggaaaagggccagccactgggtttgggcaatttctcaggaagctaaatttgtctctcaatggcctcatctttaaggaatgactcagacacagtttccatcaatggatccggaatcagtgggaacagaggcataactggtaagcagaatagcattccacattgggctatgacttgaggagaatcaaggtagctttctcaggcctcgtggacgtcgtggatataaagaatgatcttgtaggagggtataagaaccccagcatgatttcaatggagaaggcccagggccccatcattttcattgttggtcaggatgaccataactggaggagtgagttgtatgcccagtctctgaacggttacgggcccatggaaaggaaaaaccccagatcatctgttaccctgggactgggctttacactgagcctccttacttccccctgtgcccagcttcccttcacaaattactgaacaaacacgtgatatgggttggggaacccagggctcattctaaggcccaggaagatgcctggaagcaaattctagccgccttctgcaaacacctgggaggtacccagaaaacagctgtccctaaattgtaatgcatttgtctgttgttgacatgagagagtcaagatcagattctagtgttcaataaccctatgtgaatcagatgtctcctggataacattaaagccatgtctttgtcatc

SEQ ID NO: 365686 - DNA, 840 bp, Homo Sapiens
  misc_feature (19)..(19): n is a, c, g, or t
  misc_feature (40)..(40): n is a, c, g, or t
  misc_feature (59)..(59): n is a, c, g, or t
  misc_feature (77)..(77): n is a, c, g, or t
  misc_feature (146)..(146): n is a, c, g, or t
  misc_feature (450)..(450): n is a, c, g, or t
tagggggaccccacaatgnccttggaaagtgtggaaggtnggtgttttggtgatttggnggaacagaaccttaaatngccattccggatactcccagacattttcccactaacaaagatatcattttaaaggtagattcccccccnggtacttttatctgtcctttgaaagtgtctgaactttaaaaagtttacattttgtttcaaatattgcttgttctatttctaacattcccataaatatacttgaaatgttatttaaatatattcaaagaaatttgaattcagcttatataataacgcttgaatatctgaattatatatttgaaaaatgcacttgaaatacactggataattacttttgtgatttagattttaatttgttgctggtttttatttaattagatggtaataaatgaagtaaaataaaagttgttgtgtctcactttanattgtttcctatcacaagatgtaatgatgcattttgaaaatcaaacccacttgaatatcttaaatattttgagaaatatgctaatgaaatccttaaaaataaaacattggagaaaagctctttctgtataggtccataagataacaatctactctcagtctctaacttacttgtaagacaattcctttctacaacagaaacaatttaaatctacctttgaaagcttgctcttcttgtagcatttttgataatataagaaaaaaagtctatcatgacagtagagatgactgagttaaaaatctgactaattcagaggaaatggacttaacaaagtcataatggaacttcggaaattatggatggaaactaataaaacgatcctttctggcc

SEQ ID NO: 365687 - DNA, 780 bp, Homo Sapiens
  misc_feature (72)..(91): n is a, c, g, or t
aaatgaggggaggtcctgaggtgactcctcacccctcctcccacctgccctgctgacttcagagaggggagnnnnnnnnnnnnnnnnnnnnctaagaagagaagacacaagtcgaatagtcctgagagtgagacagaccctgaggagaaagctggcagggagagcgatgagaaagaacaagaacaggacaaggacagggagctccaacaggcagagctccctaaccgttccccaggctttggaatcaagaaggagaaggctgggacacgtcagaaagtgagctgagtgagggtgagctggagaggcggcggcggacactcctacagcagctggatgatcaccagtgacccaatgagctgttctctgcctcgggtctgtgtgaggccatggctcctgggccaccctcaccgtctgcctcagacttcttccttagtctggtctgtgtccactttttctaaagtaaccccacccccagcacaccattgttggcacctctcaaggttgctcttggtgttcaagggtcccctactccctggactagtgcagtccttgccctcagccccagaccagagatgggtggtatatgccatgtggggtgggtgatgccagtagataaaagtgtgagagaaggggtctccagggaagagtcacaggctgttggacgcagcctgggtggcagagggcagggtcatcaccctctagcatcagtgcctgctcctgcctgccctggccctgaggctccaccacttcttcctccacccaggacctaatgtacgtgtg

SEQ ID NO: 365688 - DNA, 532 bp, Homo Sapiens
  misc_feature (211)..(211): n is a, c, g, or t
aaaggctgcagtatgtctatattcttgctgtactcattggtagtttcagtatatgtaatgtgagtttaaatagtgaaattgtatctcatattaacatttcaaatgctcatattgaaaatggaaaatagtaaacacgggaattgattttattctggttgtctataatacttcattttaaatgtaaatggccactctgcatttgcaaggcccnggtggttgacatctgtgtggtttgttagatgagacaaaatgaccattaaatgagtttatagattattctgtatcaagataaatctgattccagttaagctataaacttgtgggattttcttgtagccctatagttctgtgacttcatttgctatacgctttaaatgtgttgagcagcctatgaacctaaagacatactgcagtttgttcataaatgtattcagtcttttattctttataattgtgtgtaaatgttaactaaacagtggattcctctcgtgttacagttttgagtgaattattaaagaagttaaaatgcaat

SEQ ID NO: 365689 - DNA, 695 bp, Homo Sapiens
  misc_feature (39)..(39): n is a, c, g, or t
aacaggcaacagaataatgttcagaggttgaacaaatgntaaatgacttatgcgccagcaaaatcagcatcaagaaaaatctggagggcaaggaaagaggcagtagtgcatcgcaccctcctttctccaagtttattttgtcctttcagcttccaaacacagcctgtaaatctcttcaatatacctggatttactaacttttcatcatttgcaccaggtatgaatttcagccctttatttccttctaattttggagatttttctcagaatatctctacacccagtgaacagcagcaacccttagcccagaattcttcaggaaaaacagaatatatagcttttccaaaaccttttgaaagcagttcctctattggagcagagaaaccaaggaataaaaaactgcctgaagaggaggtggaaagcagtaggacaccatggttatatgaacaagaaggtgaagtagagaaaccatttatcaagactggattttcagtgtctgtagaaaaatctacaagtagtaaccgcaaaaatcaattagatacaaacggaagaagacgccagtttgatgaagaatcactggaaagctttagcagtatgcctgatccagtagatccaacaacagtgactaaaacattcaagacaagaaaagcgtctgcacaggccagcctggcatctaaagataaaactcccaagtc

SEQ ID NO: 365690 - DNA, 1172 bp, Homo Sapiens
aggaaaaaaagagaatttcccctgttaggtgtaaaatggcttggagggaaattggttttcacccacggaattttccgcccttgggaggaaaccccgccaaatggactctttaaaaatttttcgaaggggagggcaattcggtgaaattctaatttaaccattttttcaggctccgttttttagttaaaagtgttttaacaaaaacccctgtctcccccccaggcaaaacaccaattcagtcaagccccctgggaactagcgtcatatgatatatttttgggggaaaatgcggatttaaaataaaactttgaaattcaataaacaaatatgtctgagtgagaaaaattgtgttcctttaacacggtttcactttttgaagctctttgcatgggtatttgttaacatatgattctttaaaaacacacaggtctaacaacagatgtctgtctatataaactacaggaaaagtgttagaaatgtttatagagatcctagagctcattttcaaggtttgagaaaagtgacttcaaaatcaataggtgttatttttagtgaatttgttttgaaagataaaagtaaaagcattaaatcagtaatgtgctatataatgtctgaaaatattcctgtagaaagatatcaggtcgttatattatttccctggaattctgaaagaactgcagatactgtcaatagatttgattatagcattcagtctatatgtaaaacccagcattatccagaattaaatgaggctgctttattacttgcttgaaaatgcatgcatacaagcacaggcaaaaacaagggtcagtaagttgccactgaaaaccatgaaatggggataattagttaactccaacaatgtgagttgttttatgtgtatatcagatgacaatattttctgaaaaaatacccataattcactctctataaataaagctgtaattcttggctataagacagcagaccttggtgtgagtatagtcccagaattaatcatcctttgtgcatacaactctttagcaaagcttatcaatttaagcagtctactttggctcagattctaccagcttacagctcagatcagtatctgatgctttatttaattcctgctcagtatatgctaatggagacactttggaatcattctacaccattgaaagataattcat

SEQ ID NO: 365691 - DNA, 495 bp, Homo Sapiens
  misc_feature (316)..(342): n is a, c, g, or t
aacacagacttttttcacttcagttatgtggtatgttgcattttccagtttgttcaatgctttaaagctcaaggatgcctctgctttcaattgtacatgggcctgaagcatcctagcttttggcaagcaggcaggagactcaacaaaaatcaaaataggaacaaggcagactaaatgcagggcacatctgtaaacatattatacatttgaaaattacaatatcagtcaaagtgatacagtttacaggtgaaatgaaactatctggaactggcctaccacaagtttctgaacctggactgatacaataagttatttnnnnnnnnnnnnnnnnnnnnnnnnnnnaaaaaaagttttgtttacatcaagtggaattggcaatccatgcttatacttttaaaatctaagcagggcagaaatccagactaaaaagatagttactctactctatgttgagtccaacagcttctttcatgaactacttgttttaaaagcccc

SEQ ID NO: 365692 - DNA, 586 bp, Homo Sapiens
ttcttattacattaatatcagacatatagaatgtactttgttttactatttgtaagatacaaaggtatataaactgacatacatcagcttgaaacctgagataatgctaaaatgttctaattattttaaatgtttaaagaggacaaccatgtaatgttgctaaacatgaaaaatgtcatcaagtggaataaagaatagctgaagttaacatttgggggaaattgagctgaaaacaaaaatatgagtattttgataccttttctttaccatgagactcttgactatgaagtcaaatttatctaaaggaaaaacaggaattctggagacctgtgtaaaagcagactattatcttcctactgtgagagtactaaaattaaaatacgtttaatgacgttttcctcaatgtaaaagcattgaagtaaatgtttcttttatgttgcagatacatagttgctctagagatcacctttttctttatgcattgtgaatagcagtctgcatcctaagtttaaaatatttgagaatcctctatgggactctctgtaaatgttttaaatactgttgttttcaataaatattttatact

SEQ ID NO: 365693 - DNA, 567 bp, Homo Sapiens
  misc_feature (25)..(25): n is a, c, g, or t
gcgttcgcaaaactgtgaccccagnaccttggccccgccacacagaaacccctgacccagactgtgacatccgactcctaaaatggtcatccgactccagactgtgacccctgaccccaaactgtgacccgaaccccagactgtgccccgaccagactgtgacccttgacatcaaaccgtgacaccccctcctcctcttccaccctcggtcgcttttccctactctgacctaggacacgtccccaacggaagccccgccttcccttgcaccgcgatgaacccaacctccctgaagccaaaacttcccaccctgccgcacctccggaccaccccacttggccaccaagcacatcctcttccaaatccaacccttatttgcgacccttcagtgatgacccagcagacctccaaaaagcctcctctgcccagatctccagccgggtctggggctgggttgcggaggggagggtctgggagtccacacttctccaccaacttcccttcccactctcttattccacattgcagtgtttggaataaaccatgtttttatgcctcctcaaaaaa

SEQ ID NO: 365694 - DNA, 464 bp, Homo Sapiens
cattttagtttgaaccaggcattgtgttaggaatccagggataaagatgaatgaaatgtatttctgttcttcaggagttcacattctagcatatgccttttttcccccagtcatgcactctttttagcagtcttatatgtactagaaaagattttttaaagtttatttaaagctgtgtagatgaaggcttgatctaaaatagtataaggttctccagcttcagtaaaagtttttagtgtttacttaaattagtaatttctcactttctgtctggttaaaatgtcttaaaaagtagaattttcttctttaatccgtttagtagttacctcccttttacttttcaaattcacaaaattacatttctcataaattgtatagtatttaacttataatagttaatatttgtctttttaagatgactgtacatgtaagaaaaaagcttattaaaaacttgatcaaagaaa

SEQ ID NO: 365695 - DNA, 498 bp, Homo Sapiens
gccaggcatcctggccagacaccctagcaggaaggggctcacctgtcacccttaggccagcctgagggcttggtggggacttttggagtcttggaggggaatagcggaaaaaaagctgagctccataggtgccccagccagcctccccagcttaaaggtgctcaagagccccaactgccccctctctctgtgcaggtggccagtgcccctccctgctctgggagcattgctagccttctaccccatccctggaatccacaggggctatcgaggagacccagtgagaatgtagcattttgttcatccccagggtagctgccctggggtctgggcactctgcctctgggagagaggaagaagaaaggggccccattttttaaaaaactgtaccagagcctttggctttatgtgtttatgttcttcacatgcatatgtgtgtatgtgtgtatatctttccccccatcaattggtacaatttttaataaaatcatttaaagc

SEQ ID NO: 365696 - DNA, 547 bp, Homo Sapiens
taccttcacaaaagatttctaaagatttatgtaatgtgttttaaaagcgccagtaaaccatcggatcaattggaaagaaggcaactcttcagcctttgttatctagctgaaaacaaatgacaactttcaaaacattggcagtagttgttgaaaaagacgtctattgttcaaagtttctttctccttaaaggacggtgttccaatgaattcagtagagcccactttcctccactgtggaggaagaatccctaagagatactcaaatgattaaattaaaattggatcatcaaactcaagagaggcataaacttagacacagtcttgcatttttgtctttcctgaactcttctgccattttcctccttcactcgtcctgaaaatctgcaagttacataataaaactttagatatttgtctgacaaagtgtaattactcaactgaataaatgactgagaacaagttacaaaaggaatcatgaatcctggtaaacaataaagaagattcagacactgagggaaaaaaataaagctttttacttaaataatgc

SEQ ID NO: 365697 - DNA, 505 bp, Homo Sapiens
ttttttttaatcaaagtacttatgtgtcaatgccaaagcaacgaagaattcccctttttccttcactattgacagcttcagtttctgtacttactgtgtcatcctatccattcccttccctgagcctggactgctcttccaagggagactaggagtgaagggaggagtcctcccaaagttaccctttaagcttgataattagctccatagccatgctaaagcatgactgtagatccccaagtccctgacacattttcttctaagaaactggttagccaagaaagtaaagacgtaagccctgaagatggcaaaaggtgtcataatctcccaaagtcatctgtatagatgcttcatttaaccctttttcttttgcagacaaagggttaaaaatctcttctttctaccctatatctttaaagagggagttgacaagccccaaatttccttttatggaaaaggccccagggtttctgggccaacaattcacttttttcagtctcttagg

SEQ ID NO: 365698 - DNA, 200 bp, Homo Sapiens
ttcaagaggaaattcgaaagcggtctaacccatagaaggtaggttggtacatctgattattttagatgggtaaataaaaaataatattgtttttagttaatgactccaaactgcctcctccttacatgtaagaactaatgagttattaaaatgtactatctagggtgggagatagaaactttaattttttgtttgctcgt

SEQ ID NO: 365699 - DNA, 317 bp, Homo Sapiens
  misc_feature (137)..(137): n is a, c, g, or t
gcactttgatgctggctgcgcccatttgtgggcctctggcctccccaggccaccttctgagagcacagggagctgtgtgggccagaaaaggagcaggggctttggggccgccaggcgggcgttgcctccccctgaantgggtaactttttctcttccccctccctagcctccagtttccaattctgtaaaatgaggatactggctttttctccttgagttatccttgagattaaacataaatatttaaagtacctagcacatgacaaattaacaaatggtatgtcttaaaataatcactgggcatgatggcatgtac

SEQ ID NO: 365700 - DNA, 643 bp, Homo Sapiens
  misc_feature (197)..(265): n is a, c, g, or t
  misc_feature (403)..(413): n is a, c, g, or t
gccccccgggaaccgcaccgggacaccttttataagccaaacgactcgaggacttccccacgtcccgggacccccccataggagattcagggttcggagcgccccccttcgcgacccaaggtccccaccccccacggtacgggaccctcggacaagggcttcagtccggggacctcccccccatatggcggctactnnnnnnnnnnnnnnnnnnnnnnnnnnnnnnnnnnnnnnnnnnnnnnnnnnnnnnnnnnnnnnnnnnnnncctactacccgcccgcgccgcccccgtactcggagaccgactcgcaggcgtcccgagagcgcaggctcaagaagaacttggccctgagtcgggaaagtttagtcgtctgatctgacgttttctacgtagcttttgtannnnnnnnnnnaatttgaaggaacactgatgaagccctgccatacccctcccgagtctaataaaacgtataatcacaagctctggagagaaccatttgttcggccgcgcggggcgggggaccggggctgctcccgtatgtgtctgtaaagcgccgcgtcccgggggcaccggagtccggggccgggaggaagagacccagcctggcccggcccgcgcccgcgccgccggccggagaacccc

SEQ ID NO: 365701 - DNA, 395 bp, Homo Sapiens
  misc_feature (13)..(13): n is a, c, g, or t
  misc_feature (68)..(68): n is a, c, g, or t
ccacctataatgnacatccctggttcccatattttgggctatgtgggtaggaattgtttacttgtttnggcagcagcagccctagaaagtaagcccagggcttcagatctaagttagtccaaaagctaaatgatttaaagtcaagttgtaatgctaggcataagcactctataatacattaaattataggccgagcaattagggaatgtttctgaaacattaaacttgtatttatgtcactaaaattctaacacaaacttaaaaaatgtgtctcatacatatgctgtactaggcttcatcatgcatttctaaatttgtgtatgatttgaatatatgaaagaatttatacaagagtgttatttaaaattattaaaaataaatgtatataatttgta

SEQ ID NO: 365702 - DNA, 1382 bp, Homo Sapiens
  misc_feature (611)..(646): n is a, c, g, or t
  misc_feature (1228)..(1228): n is a, c, g, or t
gggagagaaacactgaaaagaaggaaagatggttaaacattttcccactcattctgaattaattaatttggagcacaaaattcaaagcatggacatttagaagaaagatgtttggcgtagcagagttaaatctcaaataggctattaaaaaagtctacaacatagcagacctgttttgtggtttggaatattaaaaaacttcatgtaattttattttaaaatttcatagctgtacttcttgaatataaaaaatcatgccagtatttttaaaggcattagagtcaactacacaaagcaggcttgcccagtacatttaaattttttggcacttgccattccaaaatattatgccccaccaaggctgagacagtgaatttgggctgctgtagcctatttttttagattgagaaatgtgtagctgcaaaaataatcatgaaccaatctggatgcctcattatgtcaaccaggtccagatgtgctataatctgtttttacgtatgtaggcccagtcgtcatcagatgcttgcggcaaaaggaaagctgtgtttatatggaagaaagtaaggtgcttggagtttacctggcttatttaatatgcttataacctagtnnnnnnnnnnnnnnnnnnnnnnnnnnnnnnnnnnnntaactgaatttggaggctggagtaatcagattactgctttaatcagaaaccctcattgtgtttctaccggagagagaatgtatttgctgacaaccattaaagtcagaagttttactccaggttattgcaataaagtataatgtttattaaatgcttcatttgtatgtcaaagctttgactctataaacaaattgcttttttccaaaacaaaaagatgtctcaaggttgttttggtgaattttctaaaaagctttcatgtcccagaacttagcctttacctgtgaagtgttactacagccttaatattttcctagtagatctatattagatcaaatagttgcatagcagtatatgttaatttgtgtgttttttagctgtgacacaactgtgtgattaaaaggtatactttagtagacatttataactcaaggataccttcttatttaatcttttcttatttttgtactttatcatgaatgcttttagtgtgtgcataatagctacagtgcatagttgtagacaaagtacattctggggaaacaacatttatatgtagcctttactgtttgatataccaaattnaaaaaaaattgtatctcattacttatactgggacaccattaccaaaataataaaaatcactttcataatcttgttatgaagttttatgttgtagcaaatatagtctaatgtatcactttatttcaactattactatggattattcaattaaaat

SEQ ID NO: 365703 - DNA, 343 bp, Homo Sapiens
  misc_feature (23)..(23): n is a, c, g, or t
  misc_feature (87)..(87): n is a, c, g, or t
  misc_feature (125)..(125): n is a, c, g, or t
  misc_feature (133)..(133): n is a, c, g, or t
ggctcccagagccctggtgcccntctcctctgctgagcgtccacccagggttcacctcacccaaggtctcatttcctttgctgtcantccgttctctgctcaggaccttggcactccctgttcantttgatgntcattttgatcacctatttataggcctggcatgaagcaggcaggccaattagtgttcaagtggattgagttgtaataatgtgagtcaagtcctggtgcttgtgtgttaaagagcagtaagagattttctgcaggtgttagtgaatttcaaacttcacttttctcctttgcacagagctcagcacagtaaaaccaatttcaatgcaagagc

SEQ ID NO: 365704 - DNA, 693 bp, Homo Sapiens
  misc_feature (98)..(106): n is a, c, g, or t
aatagagatagggtcttgccgtgttgcccaggctgatgatcactccacctcggcctcccaaagtgctggaagacagcaaatcttggaagtttattatnnnnnnnnngatatttcggatagattcctttgttgtcatgggcaaaactgtatatccacacaggactgttagactcctagccaataaaatcagactaagtccatagggataaggtaagtgtaaataaatttccatttgggaaagacaggggctatggcccctgtatcaaggtctcaagctgagcactggagaactccaaggaacactgttcatacaggctatggtgtgaaggaattcccctgtaggtatgccatacttcagtctcttaagaagctgattagcatgaaagactggaagctgattatggacaattcagtttgaattattcctttctattttgctttgaactttcctcatacacttaagacatgagtaaatcacattgaaaaacatttgccaattgaatattttaaagattcaagaggtagcatgatattgtgcaatgaacactggcctgacaatgagaagataaaaactcctttccaatgtggccactttatcacttgagtgttttctgagaaatcgtttaagttttctgaggctcagttccctaactcactaaaaaggagaattagcagcctggcatggtggctcat

SEQ ID NO: 365705 - DNA, 373 bp, Homo Sapiens
cttggtacacatttaaataaagtaacccttaacctgtgctgtaaagttcacccttggcatgctgttccaagaacctgggtttgaatcccaatcgttgtgaaacatactcagtattgataaaacctttttaattaagtgatgcagagcagccaaggatatgttgacccagatgtcaaccaggctatttttatacttaaaacatgtcagcagagcataggcagaataaaatggtttaaataccccacagcaaatagagtaactgacaaaccaccaaaaactgaaaccccagacccaccagaaagacaagtgtctagcaatgccttggtacctgatctttttcattcaaataattgtcataggttgttcaaaaaaa

SEQ ID NO: 365706 - DNA, 989 bp, Homo Sapiens
  misc_feature (63)..(63): n is a, c, g, or t
  misc_feature (480)..(510): n is a, c, g, or t
agttgaggctgaaccaggcaccagtcgcaacccggcccggtttgtgcaagctcagggcagtgntgacgtgccagccccctgccacctcgcccccctccagactttcggcagtgacgagcacaagagggaggttgaggtggggctaagagtggctcagcactggcctgaaggcactcctcagctcgaacagcctcagcaacgtgggcacagctaaccacagtgcgtctctctcagctgctgagagctgaacagacgttgggatgacctgccaacagaaaggagctacccactgcaggtctcctctgagctgtactgttgctcaataaagcacctcttcaccttgctcaccttctacttgcccacatacctcattcttcctggactcaggacaagaactcgggacctgccaactagcagggctgaaagagttgcaacataaacagggctgaaacgcaccccttgcttgccaaattgcacgcnnnnnnnnnnnnnnnnnnnnnnnnnnnnnnnctgtggcccttcagggagcccagacctaggagctccccaagccagggctgtgacaccttctttggggcttttgcagtttctggcatccgctaggcttctggataccaacgccattccctcgaaaactcgcgcgcccacccttgttttcccaccgggcacagtcccaccggccaaccattacaacccacggggaagcccttgccccccccacctggtgtgcgcatcatcgctgtagaacaccactttgtttaacgcgcggccaaggtagcgccgaattggcgccccataactttcttgcgtggccccccacgggtcactcccccctatatcactccctccgcggggcgcccgccgcaatgctattatattccccccagcacgttctatatcaagtctctagtaatcatatctcccgctcgcgacacgagaaggccgagggtataacgcaccgttgatcaccaccgaacaagtgcatgccg

SEQ ID NO: 365707 - DNA, 433 bp, Homo Sapiens
cctcgagggatactctagagcggccgcccttttcatattttatgtacctaatataatatatatttgatgtaatttcacattttatgtacagtatataatgtatagtttgggtactttgatattttatgtacactatagaatatatatctggtgtactttgatattttatgtacagaataaaatatatatttgatgtaatttcatattttatatacagtatataatacatgctttgggtactttgatattttttgtacagtatagaatatataccttgggtactttgatattttatgcacagtatataatatatggttttgaactttgatatttcatgtagagtataaaatatatatttcgggtacattgatattatatgtacagtatataatctatatttgatgtactttcatattttatgtacctaatatat

SEQ ID NO: 365708 - DNA, 1076 bp, Homo Sapiens
ggggccctgtgttctataagatcaccacagcaaaagagatggcctggaaaaggctctagctcttaactgtcttgcccctcctttctttggccaaaagaaatatgtgtttgagattgggaagtgtcaaggaacacctggatatttggggagcatcagtggtctctgccactgtaccaacagttaagtcctgtatcaggcttcaaaaagaagaggaagtcattacccaattgttcatttgagaaacaaactccacatgtatcagcaatgtgctcatttcctaaacaagcctattggctgcattactagatatagaatgaaatattttgattctaggtgccccattttaagaaagattgatattgacactgtccagggacatgtagtcagaacatgtaaggatctcccagatttttgtgtcctgaaggttttcaaagacttggaggagagggcaatggtttgtagggtacagaatactcttattctgtgtggttcccaaggagagaactagaaccaatgatggagttttaggatgatttctctcacaatgcaggatatttaatcagcaattagagactttcataaatcaaacataagccagatgacatctatgaagaatattgtaaatattttttgcttagcatgggagattggtctgggtagtctctgcggcctcttttttaaatctggaattttgtatcatgaatgtcaaatgaatatttctttttctttttaaataggacactgatgaaattcaagttaactatcctggaatgtttgaattgatggaagatttacaaggtatgggtgagagtaactgtgcttggaatagaaaagccctgctgcatcgagacacaatgctggcagctgcggcagtgtacagagaaatgtacagaaatgaagatggttcagtacctgctacataccagatctattacatgataggatggaaatatcatgagtcacaggcaagaccagctgaaagaggttccgcaactgtgtcatttggagagctaggaaaaataaacaaccttatgccaccggggaaaaaatcacaataaatatttattcagtgttaa

SEQ ID NO: 365709 - DNA, 696 bp, Homo Sapiens
  misc_feature (97)..(97): n is a, c, g, or t
  misc_feature (575)..(575): n is a, c, g, or t
  misc_feature (581)..(581): n is a, c, g, or t
tcaaaagccaaaggccatgagagctttccctaagttactcctccagcccacccctgacatctttacacagcaattaaaaagactacccctaccttcntggggaccctatctcactccctccagcccttgcacatgtactttcttcttggggaaagaagaatgttctgtctcactgtgccgggccccccattttttaaaaacaagacctttagggtttcagcttttcctgtcttttaaaacaaattagccattttttattctaagaaagggttgtattataaagctgacctactactagcttatcagaaaaaacacgtgggtctcatatctgattctcctatgtagccaaaagtgccatttgtaagtctactaaatgacggatattttctgaagatcttttgcctggaaaacaaatagtgcattaaaaagcttttttggtactctgctggattcagaattattttctccctacctaggtcagtattgatgggtggtatagaatattttatgtggaaaaatactatgtgattgtttactactctgggagaatgttaatttttttccccatgaattangaaatncatacataattttcatggtgtgtatggggttactgtaaagtatttgggtggagaggttattcacgactacacctcaataataaccccaaaatattttttgaatttttccgtaaat

SEQ ID NO: 365710 - DNA, 479 bp, Homo Sapiens
accgtgttagccaggatggtctcaatctcctgacctcgtgatccgcccgcctcagccttccaaaagggctggggttacagggcgtgaaccaccgtgcccggctgaaaacattttacatatatgcgaaatagctacccagtcctgatcgactagagcactgagtgacacacattaaatgttaagtttgaaaagactgtaaaacattcacatatgacagctcttagtgaagtaagagcctctcatattccataattgtttgaaacatccaggagagctaggtcccgtatctcctctagaagtgtgtataggctccttccctttgtttggcgatattcttgatattcctcctgaatgatgtttactttgacttcttgggcaagctgagcttcttccacagatttagttacttctttcactaactcactcttcagcaagggggaactctgatgaataagttctgtatttggtatcttgtatcc

SEQ ID NO: 365711 - DNA, 192 bp, Homo Sapiens
aagcacaagcaaaaaactacctttatatatgatgttattcaaatacatggataagataacacattttatgatgtaaaaagtaatatttaaaaattaaaaggcaagtctttctggtattcagaagtctgaagcaaccactgtccagctctttaaaaagagcacattccattctggtgcacacaaatgtacatt

SEQ ID NO: 365712 - DNA, 372 bp, Homo Sapiens
tcttagctcatcagctattgttaatgttagtgtattgtatgtgtggcacaagacaatttttcttcttccaatgtggcccagggaagacaaaaggttggacacctgtgtaatgactgaaatagtccaggtgaaatgactgtgttttggactggggaaccaaaagaagtggataaattccaaaaatatttagcagatatatccacaggacttggtgatgtagtgggtgaggaagagctggctgcctgaaatgaactcactaatgagcaaggtgtgcatcttgtctgaggacatttgcacattctttacattgttaagaccgctctgcagtatgaattcttccctgtaaagcattcaatctggctgaaggttttt

SEQ ID NO: 365713 - DNA, 399 bp, Homo Sapiens
  misc_feature (24)..(24): n is a, c, g, or t
aaatgggtctctcttgcttcctcncctttacgcctttccttttcttgctccttcttcaaatccctggtgtgtgtgagcatgccctttgcttgccaaaccatatcctttccccagatccacctgtcctgaaactctagtcctccaggatagtgctcctcccccagctccagggctcctggatgtccttcctcaactccctccacccctagacaatcctacctggtcccatctgcctcttttctctccccagcctgccctgtgacccttgcctcttcctgatactcccaagagcaggccccaggggtctgtgtcacatatctctgtgtgattccttctggttgcatccccaatttcatacaaaaagaaaaataaaagtgacctcgttctagcaccaggaaa

SEQ ID NO: 365714 - DNA, 601 bp, Homo Sapiens
cccctgagctgccgaatcattgagcaggtgctagagcggcgaagctggcagggccttgatgaggtggtacggctgctcaactgcagtgactttgcattcacagatatgactaaggaagacaaggcttccagtgagtccctgcgcctcatcttggtggtgttcttgggtggttgtacattctctgagatctcagccctccggttcctgggcagagagaaaggctacaggttcattttcctgacgacagcagtcacaaacagcgctcgccttatggaggcccatgagtgaggtgaaagcctgatgtttttcccggccagtgttgacatcttccctgaacacattcctcagtgagatgcaggcatctggcacccagctgctataaccaagtgtccaccaactacctgctaagagccgggagcatggaacgtgttgggatttagagaacattatctgagaaaagagttcacttcctgctcccaggatatttctcttttctgtttatgaagtacaacccatgctgctaagatgcgagcaggaagaggcatcctttgctaaatcctgtttgaatgtcattgtaaataaagcctctgctctcagatgt

SEQ ID NO: 365715 - DNA, 454 bp, Homo Sapiens
  misc_feature (29)..(29): n is a, c, g, or t
acttcaaaatgcccgcatgaacaactaanggcaaactggaaagttcaggggccgctcttcccccatgtgcctgtcacgctctggtgcagtcaaaggaacgccttcccctcagttgtttcctaagagcagagtctcccgctgcaatctgggtggtaactgccagccttggaggatcgtggccaacgtggacctgcctacggagggtgggctctgacccaagtggggcctccttgtcccaggtctcactgctttgcaccgtggtcagagggactgtcagctgagcttgagctcccctggagccagcagggctgtgatgggcgagtcccggagccccacccagacctgaatgcttctgagagcaaagggaaggactgacgagagatgtatatttaattttttaactgctgcaaacattgtacatccaaattaaaggaaaaaaatggcatccatcaaa

SEQ ID NO: 365716 - DNA, 709 bp, Homo Sapiens
  misc_feature (516)..(579): n is a, c, g, or t
  misc_feature (603)..(603): n is a, c, g, or t
  misc_feature (612)..(612): n is a, c, g, or t
  misc_feature (688)..(688): n is a, c, g, or t
gggccagaggagagtacaggtcgtgctgcagttagttcattgaaaactcatttgctcttggagcagtcaggcagtgactgccttcggctttttttctgctgactaagatctcctatagagagctacaacaatgcccaaaagaaaggctgcaggtcaaggtgatatgaggcaggagccaaagagaagatctgccaggttgtctgctatgctgagtgccagttacaccagaggtgaagcctagaaagaacatcaagttcaaggaaaatgaagacaaaaagtgatatgatggaagaaaacatagatacaagtgcccaagcagttgctgaaaccaagcaagaagcagttgttgaagaagactacaatgaaaatgctaaaaatggagaagccaaaattacagaggcaccagcttctgaaaaagaaattgtggaagtaaaagaagaaaatattgaagatgccacagaaaagggaggagaaaagaaagaagcagtggcagcagaagtaaaaatgacgaagaannnnnnnnnnnnnnnnnnnnnnnnnnnnnnnnnnnnnnnnnnnnnnnnnnnnnnnnnnnnnnnntgataagggggaagaagatggaanagaggatanaatgggaatgagaaaggagagatgcaaagagaaagagatggaaaaaggtgagacgggaaagaatgggaaagatganagagaaggagagatgaaagag

SEQ ID NO: 365717 - DNA, 373 bp, Homo Sapiens
ggtcagcaaggtgacagaggtactattataattcttacttgcagaatgttcaatctacgagtgttcatggaagccaaaaaatattaaaggaaaatgaacaaacctgttaatattattgtacagaaccatggattttttttgaccatcttctaataaacatagcaagtattatgaatacattaaagttttactaacatgaattttaagagtttgcatatttcagaaatgatctggtgtgagtgcatggaaatattgcttaatttttcttcaatcattgagtgaaaaacctttaactttggcctgcaatagtcatttgattattttttcattttgtaaataatgttaagttttgtaataaaatagttatgttctg

SEQ ID NO: 365718 - DNA, 782 bp, Homo Sapiens
  misc_feature (241)..(250): n is a, c, g, or t
  misc_feature (418)..(418): n is a, c, g, or t
  misc_feature (442)..(442): n is a, c, g, or t
attgaatatagaggttctccctggccactgtcagcttttcttgactggccaaaactgcccattcttcctggaatggtatgaaagcttcagcaaaataaataaaagtcagaatctttgctggtccctttaatgctgatttgatagtaaatcaatttcagctgagacataagggctgtcagtctatcatataaacatctttaactatagcctagagaaaagagggttgaagagcaaagcagannnnnnnnnnccttttctatatctgtgttctgaacaacacactgtgataaaggggactagagtggaagattccctatttaaacacatgaagctctgggtcctagcctttttgggttataagccctttgagaatctgataaaagctgtggatcatctcctaggaaaatagaacaaaacnatacatattcacattacacaggtncccagagtatgtggacccccccaaagtccagagattgcccctaggggatctttagattcttgtttagaactgttgattttgaacacaacatacactgtcaaactttacatcagggatccaacataactcagacatagcccaggtagcctgtttctaacacaactgtcataatcctgaaatccaaaattgcactgtgtttgacatgagatagtttaagttccacaaaatccaaatttaccatattattgtttttaaaaaagcagtttagagcaaactgtcactaaacttggataaatgggtcagaaagtacagatttaataaagtcgtacctctaatgttc

SEQ ID NO: 365719 - DNA, 553 bp, Homo Sapiens
  misc_feature (33)..(33): n is a, c, g, or t
  misc_feature (63)..(63): n is a, c, g, or t
  misc_feature (154)..(154): n is a, c, g, or t
aaaatgcccaaaaattggggaaaaaattggggncccctaaaaagcaaaaaccgttttaccccnatggtgaattaaactcaaactaaaaacccaactgttaggaagttaaccttccccccaaaacagcctaaagcccgaaaaacttcctacccancgtaaaagttgaacagaaagcaggcccaacgaaggaggtgtgggaacataaatagccctgaagtgccttgggttacccatggagactggagtgtgtgaaggccacagcctgtgcctaaagagccatggagccctcccctggcccatgtctggggacagatagaacctgttgggggaaatattccctcaccccagggttctttctgcagagcaagggttgcctttgtcctatccctgagcttgctcaacaagagaaacaaggtttcttaagtgttttggttaaagttttcattcttatttgactatgtatatgtaattgtaaagaaacgatcctatgcattgtctttcttttatattcttgtaatattctgaaattaaaattgttttgtttcatatccag

SEQ ID NO: 365720 - DNA, 342 bp, Homo Sapiens
cccatgtgccacacttacagtatacatatatatttatatccacaatttacgaaaccaaaaagttgagtttcccaatggaacccttgttttttaataatcgactttttaaatgtgatcaagactataatattgtacagttattatagggcttttggggaaggggaggatagcgagaagatgctctgggggttttgtttttgcttttccttcagggttttatttttgactgttttgttttcttgttggccatttctgtattgctggcatctgtgctaagctttacagtggcaaaaataatgacatgtagcaaagattttcaaacaaaatattttttccttttgt

SEQ ID NO: 365721 - DNA, 1602 bp, Homo Sapiens; identical to SEQ ID NO: 6533
  misc_feature (291)..(352): n is a, c, g, or t
  misc_feature (372)..(385): n is a, c, g, or t
  misc_feature (736)..(765): n is a, c, g, or t
  misc_feature (1076)..(1076): n is a, c, g, or t
  misc_feature (1081)..(1081): n is a, c, g, or t
  misc_feature (1143)..(1143): n is a, c, g, or t
  misc_feature (1181)..(1181): n is a, c, g, or t
  misc_feature (1237)..(1237): n is a, c, g, or t
  misc_feature (1312)..(1312): n is a, c, g, or t
  misc_feature (1358)..(1358): n is a, c, g, or t
  misc_feature (1417)..(1417): n is a, c, g, or t
  misc_feature (1429)..(1429): n is a, c, g, or t

SEQ ID NO: 365722 - DNA, 778 bp, Homo Sapiens
ggatcctcacccagagatggcaacatctattaagaccaatgcaataccttttcatcttcagcaaatgttgtttcatctgtttttgatccttggcattgtcaaaaacttaactgcaggtccagtgtatatttttccttatttttcccttttagctatctgctaaagtgagtaaatgccacaactgtacttttccaaagaaaaagaactattgacaacttatagcctgtcatgcaggtcatgtttcaaatcaaggctgaaattttcaacagctgtgggaaaaactaaaacacagaaatactgtacagtattagtgtttttttaaagaaattgttagtgcattattgagtatactaaatatctgtgattaaataaattagttctaacttttgattttgggagcccaaaataaagggagtgttgttttcatggttatgccttgtttgtggagtcaagtgttgatatacttgaggcatgttatgtgtcttctaattaatatttttatcaccttgaatttgtgtctcttccaagcattaaagatactatggatcttaaattccttattaaaaaaatgcaagtgtgaatactttgtttagcttacattttaatttattgtggttgaccacattttatggctcctgagtgccttcacccagctacactttaccttgtatctataaaagtgtaatttagagtaaatacattggctgtaaagtcgagatcaggtgctctccaccaaaagcaaaacaaaactgctgaaatgtggcaaggtttctcagtg

SEQ ID NO: 365723 - DNA, 1181 bp, Homo Sapiens
  misc_feature (1109)..(1109): n is a, c, g, or t
  misc_feature (1149)..(1149): n is a, c, g, or t
  misc_feature (1160)..(1160): n is a, c, g, or t
ccggaattctccggatcaggacttaacctccagtggataagtaccagcagctcatcagctctttctaccccacctcctgctgggcagagtccggctcaacaaggctcaggagtgagtggagttcagcaggtcaatggcgtgacagtgggggcactagctagtggaatgcagcctgtaacttccaccattcctgccgtgtctgcagtgggtggaataattggagctttgccaggtaaccaactggcaattaatggcattgtaggagctttaaatggggttatgcagactcctgtcacaatgtcccagaaccctacccctctcacccacacaaccgtaccacctaatgcaacacatccaatgccagctacactgactaacagtgcctcaggactaggattactttctgaccagcaacgacaaatacttattcatcaacagcagtttcagcagttgttaaattctcaacagctcacaccagaacaacatcaagcctttttgtatcagttaatgcaacatcaccaccagcagcaccaccaacctgaacttcagcagctgcagatccctggaccaacacaaatacccataaacaaccttcttgcaggtacacaggcacccccacttcacacagctaccaccaacccatttctcaccatccatggagataatgcaagtcagaaagtagcaagacttagtgataaaactgggcctgtagctcaagagaaaagttgacacctgagaaacatctagaaattgcctatcctgctgttctagcacttcatctggctgcctttgcagtccttttactacagctatgaagaaacgcaacaagaaactcaatgcacaacaaaggattaattgctgcaaggacattcttgtaaggctttgattagttttcttgttgctttgttgcactgaaatggaattcccatgcccctaccccttaccccagttttttgaacatggaaagaaaatttaataactttttaaagtgacataatttacatgcaatatgtttatcaactcaagaatttaatatagttgggtacacaactagttttgtttattaaattgggagatggcaaataggcaaaactaaatacttgctcccntttacaaactacttggatttattgtaccaggttgaaattnggcccttttgntttggggttaccggatggctt

SEQ ID NO: 365724 - DNA, 602 bp, Homo Sapiens
actacatacttccgaggtcacttccttttcactcagtttaaattggtgatggacgttgcttgattgagcttattactctctattttgagaaggtagaaggtaagagggcccatattcattctttgccatgaaatgaatgaattaggaagattgtatttacttaactgttttttaaatacatgtttaatgaaataaactgtaaaatatccagttttgtgtattatatgtacatttgatttttaatagcctttccaaagaaatgagggcatgattattgtacagtaagtacgtgactgatttaatttgatttacagagcggagtgtgttcttataaaaatatttaatgacattggttcttgtcttttgatcttttatttctgaaacactcaaacaccttacaaagtgctgagtaggtaatagtgacccaacttgtttgctaaatgattatttgtttaaatctgtacagttttaagtgttcacttatacaaagagtgtatatactttcaaataatttaaaatgctttatattatttggctagaaattgctgtttttaataaatgtgaattttttaaaaataaagatttttgcttcctaccttgtc

SEQ ID NO: 365725 - DNA, 1054 bp, Homo Sapiens
gtcatcaaaagcagaataatgaatcaaccacgaaataaacaaggaagggacttgtataaatcatcgactgactgcttattcaggctgtcaaaggtgaaggattcatgagtctatataaaggctttttaccatcttggctgagaatgtgatctggtcggatctcacaaggccatccaatgagaccccgcacagcattttctaaagaagaatcgaagcctgaccactttcaccttgggcaagaaggtttggcctttgagttgctattctatgctgaagagcctgcttagaggaggagtaccaggagggagccagcatttcagatctgaagtagacgataggaatgtggaagaacacatacatagtgcttaagaaatacatttaacctgttatgtcagtatttatcaatgaagtttgataattcacttttctgtcattgttaaagcgtacatactgtaaattaaagggaggtgaatggaaattaatgaataaacattttgagtttccctagtgttgaaggaaggtgtactttttcttgtcagaaagataaaaaaaatcaagttgagatgatgtttgaatttcaagaaaagaggctgctttctgtcagtgccctctcattagatctgtgttaattagttagtactccagctgcacatgctaatgacttcctctgacagccacacaccgaatcttgatgaaaaaagagaagagcatttgccttgttacatagtctgttacaagccagatatgttgctagctctcaagagttgtaatatattaagaactacaacttatttgattaaaactcagctgtatagatccttttataaagcaccttttgttaaacatcagcctttcattggtattttaaaagcaaggcagatagatatgaagtcagccaactctgacatgcgtcctttcttatctcccgtacctgacactaggcggctctagagaggctagagagagcactcactaatcacactaaaaactgccaagcggcctggacctcttacttcagttttagccaaaagattcgttgccctaaaaaaagata

SEQ ID NO: 365726 - DNA, 591 bp, Homo Sapiens
aattccatgccaggcgtagaatacactcaaaggccaaaccttcttgcccgaggtgatggtggtcaggcttcgattcttctttagaaaatgctgtgcggggtctcatgggatggccttgtgagatccgaccagatcactttgggacaaaaagaggagtcaaagagaacttgggtttccagaaaaaaataaagtgctgccccctataaatcagtctctgtggaataggtgccttcctaaagaggtagaaataatagggggtatgtgtagcagatgcccatatttcaataatactgaacactgtatctttaagggtagcatctttaggggtttaaaatggactgactccactcatctctctgattttttcataagtaagccagaacaccattgaccaaggggtcattctcagccaagatggcaaaaagcctttatatagactcatgaatccttcaccttgaacagcctgaatcaagcagtcagtcgatgatttatacaaaagtccccttccttgtttatctcgtggttgattcattattctgcttttgatgacatcgggtggtgtcccagaatagaagtaccagtccagaacat

SEQ ID NO: 365727 - DNA, 594 bp, Homo Sapiens
  misc_feature (439)..(448): n is a, c, g, or t
acatgtaaatatactgaaaactgtttttcaggagagaaatatgagttggagggaaggaaaagtggttctacttatgttccaaaatcctcatcagagaaggtatgatgttctcaggtgtggaaaatattttttagttgattgagaatgcaggtttaacagaagagataaggggcataatgactgctggttttccagactggattttcctaccgcaactattaatgttctcagagttgatgaggaccacctttgtgtatacacttgtagttttaaaccttgcattggtaacaaaatgatcaactttaatccaggtagaattcaagatggctgtacttcagttgtatgataaaattaatggttctcatgacttgtgtggcatctaaaaataatgtttttatagcatctctctgccactaaattgttgacttgaattttgggnnnnnnnnnngttggtgttgatatgtatatgtgtgtgtgtatatatgtatttataaacaagtgtgtttgagtaacaagtgagtttcatagtcttcccctacgcatgtgtattccacacacaaatggctgagttatagtcataaaacaatttgcaat

SEQ ID NO: 365728 - DNA, 2391 bp, Homo Sapiens
  misc_feature (1007)..(1007): n is a, c, g, or t
gcagtacctataacgtcctaaggtagcgaggctgggtggcgcgtggttcaggcgggtgtcttcggccgggcttgggaacataaaagtttgtttcaccacgtaagccggacctcgcactccggtcccggtctcgtcgccaagatggtgaagcccaagtacaaaggacggagcaccatcaacccgtccaaggccagcacaaacccagatcgagtgcagggagcaggaggccaaaacatgagggaccgggccaccatccggcgcctgaatatgtataggcaaaaggagcgcaggaacagtcgtggtaaaataattaaacccctgcaatatcaatcaacggtggcttctggcacagtggcaagagtagagccaaatattaaatggtttggaaacacacgtgtgattaagcagtcatcattacaaaaatttcaagaggaaatggatacagttatgaaggatccatacaaagttgtcatgaagcaaagcaagttaccaatgtctcttctccatgatcgaatccggcctcataacttgaaggtgcacattcttgatactgaaagttttgaaactacatttggccctaagtcacagaggaaacgaccaaacttatttgcaagtgatatgcagtctcttatcgaaaatgctgaaatgtccactgagagctatgaccagggcaaggatcgtgatttggtaactgaagacactggtgtgagaaatgaagctcaagaagagatctataaaaagggacagtccaaaagaatatggggtgagctctacaaggtgatagattcatcagatgttgtagttcaagttcttgatgctagagatccaatgggtactcgttcccctcacattgaaacttacctgaagaaggaaaaaccttggaaacacctcatttttgtacttaacaaatgtgaccttgttccaacctgggcaacaaaacggtgggttggctgtcctctcccaggattatccaacacttgctttcccatgcaagccttactaacccngtttggcaagggagcattcattcagcttctgcggcagtttggaaagttgcacactgacaagaaacagatcagtgttgggttcattggctatccaaatggtggcaagagctctgtgataaatacattgcgttctaagaaagtttgcaacgtggctcccattgcaggtgaaacaaaggtctggcagtatattactttgatgcgtcggatattcctgattgactgtccaggtggggggttacccctctgaggactccgagacagacattgtgctaaaaggagttgttcaagtagaaaaaattaagagtcctgaagaccacattggtgctgtacttgaacgagcaaagccagaatatatcagcaaaacatacaagattgattcttgggagaatgctgaggactttcttgagaagctcgctttccggactgggaagttactaaagggtggagagcccgacttgcagactgtgggtaagatggtcctcaatgactggcagaggggccggattcctttctttgtcaagccacccaatgcagagccacttgtggccccccagcttctaccctcctcatctttggaagttgtcccagaagcagcccagaacaatccaggggaggaagtcacagaaactgcaggtgaagggtcagaatccatcattaaggaagaaacagaagagaacagtcactgtgatgctaacacagagaggcagcagattctcacacgagttcggcagaactttggtaaaatcaacgtggtgcctcagttttctggggatgacctggttcctgtggaggtgtcagatcttgaggaagagcttgagagcttttctgatgaagaggaggaggaacaggagcaacaaagagatgatgcggaagagtcttcctcggagcctgaggaggaaaatgtgggaaacgacaccaaagccgttattaaagcactggatgagaagattgccaaatatcagaagtttctagacaaagccaaagccaaaaagttttcagcagtcagaatatccaagggactgagtgaaaagatatttgcaaaacctgaagaacaaagaaaaacactggaagaagatgtagatgacagagcaccttccaaaaagggaaagaagcggaaggcacaaagggaagaggaacaggaacattcaaataaagctcccagggcgcttacatcaaaagaacggaggcgagcagtacgacagcaacggccgaaaaaagttggtgtgcgctactatgaaacacacaacgtgaaaaataggaacaggaacaaaaagaagaccaatgactcagagggacagaaacacaaacgcaaaaaattcagacaaaagcagtaatgtttaaaaggtttttattaaattatacaaaaacaggcagttaaaaaaaa

SEQ ID NO: 365729 - DNA, 830 bp, Homo Sapiens
  misc_feature (273)..(273): n is a, c, g, or t
ggctggtacggtccggaagtatgggatatcgtcgaccacgcgtcgagaaaccctatgggtgtaatgaatgtggaaaatcattctgtgtgaagtcaagaggccagagaaaatgcacaaactgtaggaaactataggaaagcatttactatgaggttatattgtatggagtatatgtaataagaagtagcttctcagtgaacatcagatagtagagaaagtatttttaactgtatccaagtgtgtggatgttttaagttaaaatctaaatttaantatagaacagaggtgttgagttgcaggatatctagcaatttaagaaaatgtggaaaaaatatttttattgagaaatagcattttactttgttaatatctagtttagttcattgtcaagactgctattttctaagagacttctaaagacgccactcaagccaatggctataagtagttcaaaggtttattgcttagccatatgaaaaataagggaagattttttagcaaggggacccacaaacaagagtgctcttgtatgtccagaagaaagagaaagaccatcaatcaggggccatagtacaggagcccaccagcaggatttcgaataatcctagggcagactaaattcagacgacccatctcagaatggtggatcaaagcagcaagtcaatttgcctagtatgcaacttatgagagattagtagaacgacgagtgggtccagattctggtggtttctgccctgccgatgtctaacacatcaagcaggacatctgcctgtgagtgactatcggtcccaactctatttctctcatatgaaacatgtcttccaaagtga

SEQ ID NO: 365730 - DNA, 155 bp, Homo Sapiens
ttaaatttgttcagggggaggggttttgtaacctgaaatttttccctttttcttctgtttaaactatatcaaatcattctattatagtgttatttaatatgtaaattgtattgctatacataaaataaagtatggtttttgatgtaaaacaaaaa

SEQ ID NO: 365731 - DNA, 736 bp, Homo Sapiens
ctcacagcgatacagcaccaattccagttcctactcaaataaggaattatcagcgcatagagcagaatcttacgtctactgccagctcaggcacaaatgtacatggttctccaagatctgcagtggtacgaaggtccaacaccagccccatgggcttcctccggccgggatcatgctccccagtaccagcagacacagcacagacagttggacgaaggctctccactgggtcttctaggccttactcaccttcccctttggttggtaccattcctgagcaattcagtcagtgctgctgtgggcatcctcagggccatgactccaggagtagaaactcctcaggttctccagtgccacaagctcagtccccacagtctctcttatcgggtgctagactgcaagagcgcccccaccactcactgacatctatcagaacaagcagaagctcagaaaacagcacttctgaccccgtgtgcccatcccatactggggctgggtacagctactcgcctcagcccagtcggcctggcagccttggaacttcttcccaccaagcactttggggtcctctcaacggagttctgactggttctttaaaactcctttgccaacaatcattggctctcctactaaggtttgtttattaaacccttttgtaggtcaggaactggtatagtactttatggaaaggattcattatgagaacagcctgggcaacagagtgagactccatctc

SEQ ID NO: 365732 - DNA, 508 bp, Homo Sapiens
  misc_feature (364)..(364): n is a, c, g, or t
  misc_feature (407)..(407): n is a, c, g, or t
  misc_feature (431)..(431): n is a, c, g, or t
  misc_feature (442)..(442): n is a, c, g, or t
  misc_feature (480)..(480): n is a, c, g, or t
tgaccccgtgtgcccatcccatactggggctgggtacagctactcgcctcagcccagtcggcctggcagccttggaacttctcccaccaagcacttggggtcctctccacggagttctgactggttctttaaaactcctttgccaacaatcattggctctcctactaagaccacagctcctttcaaaatccctaaaactcaagcatcttccaacctgttagccttggttactcgtcatggggcctgctgaagaacagtcgaaagatggggaatgagccacgggaatgtgcccattggcctcttagtgcaagggaagtgagagggcagcgggccgaggcaggcaggagcaagggcagtgtttttngggcaggatcttgtttcagttacccggggaagtttattcagantccaacaaggggaaaggacttccncattattgttncgacattcaggggggcaggcacaggacagtttttaaanttacaggaacgacccttggggttttagg

SEQ ID NO: 365733 - DNA, 517 bp, Homo Sapiens
  misc_feature (49)..(49): n is a, c, g, or t
tgttaatccctttattccatttatagtgataatgtgggcttttaagtgncaaaattctgaaatcagcctaaccccttaaaaggttccccccattccctgttgtggacagaaatcccagtatttgacaactccagcccgggcaacaagaacaaaactccatctcaaaaaataaaaatcccaatcccaagtcgaaatcacttcttgttttaaacaagaatgaatcattactgtgtatgttagggtattaaaactgtttcaccagtacagtgaaagttgtttcaacattttaaacaaacagtggttatagactctttctttaaccattgtatattttcttccattcttgtcattggtcaataggggagggtagattagctgctccagaattcaataaagtgtaatatttctaacggtgactttgacctattctgtagtacaactgtaatagctattggtctttcagtgggtttagatttgtgacatcatttgatatctcttaagggaataatatcagact

SEQ ID NO: 365734 - DNA, 1091 bp, Homo Sapiens
tttgtggagttcccatgtgcacgttatgccccaatggtacacggggggcctgaacggtaagcttgtagacccgaaacggttgctaccgttgggtaaatgtcctaatatggttcgtgaaagcgattgtagtgatacttttagggtttaacacaccatggggtttcacatactagataattcctcactggaagtgaaagtatattgacatcatcatcgtgctgaaatgttttgggtcaatacagggtaaccttgtgagctattaaggcatgccattgtagtgtatcaaacattgacttttgcacagtgtgtttaaggaatatccgtgtccgtatgatccagctcaaggggggatggtgtaacagtggcccttctctaagggtaaacgttgtgcaaccttttccgacttaatcctttgttgttagtgtattgtcaacttgcccgtaagtgttgattttctgtagcaactccctgtatgaatggatattaacttggaaccccattcttgttcaagcaagactggctttcggaaaattcaaatttgtagtgtattagttaaatagacacaacgatagaaatcagtgaagggcaaaaaagtctgcagtaatgcacgtagttggtatctcgtttcctgtttacttttcggttcttgctttaagtcctgtttattggtgaattccctcttttgtttattctttttgggttttggttccttttgggtttatgggtgccctgatactccagcagagatcagaaggctacagatccattctatccatccgttatgtggctttgccatcccagcttggagtgtctttacaaagataataacagttgtgttctttgctctcgttttggatgcatagactgaaaaattaaaacaaataacttgtaaaatggcttgttaaaaaatacaattacctctaattagtagtacgcgtaaatgttttacagaatgaaaggcgtgctttttattttcttacttcgttacattggtggcgaaagaagtctgtatgaaaatcagttctttgctgacacaagttccatttgttacaaatgaattctaataaaaatgtcagtgttatgcaaaaaaa

SEQ ID NO: 365735 - DNA, 984 bp, Homo Sapiens
  misc_feature (169)..(265): n is a, c, g, or t
  misc_feature (426)..(462): n is a, c, g, or t
  misc_feature (530)..(612): n is a, c, g, or t
tatctgaaaatggggataaccaaccaagagagctgagagaatatgagtaaagtgctaaaaacactaccaagaacacaataaatgctcagttaattttgggggtgagggtcatataacctagcccaaactgtcgatagcaaaataaaacaagttaggagcagtggctcannnnnnnnnnnnnnnnnnnnnnnnnnnnnnnnnnnnnnnnnnnnnnnnnnnnnnnnnnnnnnnnnnnnnnnnnnnnnnnnnnnnnnnnnnnnnnnnntttaaaaattagccgggtgtggtgaggaacacttgtagtcacagccactcagaaggctaaggagggaggattccttgggttcaggaggtcaaggctgcagcaagccatgatcataccactacactccaatctggacagctgagtgaaaccctgtctcctcnnnnnnnnnnnnnnnnnnnnnnnnnnnnnnnnnnnnnctcacaaaatcagagaacttctccccttctagccaggcatggtggcatctacctgtagtccaactatnnnnnnnnnnnnnnnnnnnnnnnnnnnnnnnnnnnnnnnnnnnnnnnnnnnnnnnnnnnnnnnnnnnnnnnnnnnnnnnnnnnttaaaatgtttaatctttttttaaaaaattgctttggaacttttcccagttacctttacttgtagaaaaagtcttcagttgaggaatatatgcaaatactcttttataagaatttttattaaagacaatgttgatccaaagaccactccccaatcaagtcatcatagacctgtcttaatatgcagttgtagtagcaaataattcctggttctaaggagattgatgttgctaatctctaacaaccataaagtgaatgtacttctacctgatctttaaaatgattattcaattttagatttcaaacatcatttcaatcattgtaaatgaaatatctctgatttcacaatccattattcgataatacaagtaaca

SEQ ID NO: 365736 - DNA, 848 bp, Homo Sapiens
  misc_feature (239)..(350): n is a, c, g, or t
  misc_feature (437)..(440): n is a, c, g, or t
ttgaattatagttttctaagaaaaaatagtttttaataatctaaggtaaatttgttgcaattattagcagcagcataataaggcttttggcgcaaatgaatgttattagctagagttattcaaaaaagaatgaagcacaatttttgctaggacttcttgagaactattcataaaaatgcttttagataataaacaagtataaatgtcaaaatatttttttaaaagtataattggccagnnnnnnnnnnnnnnnnnnnnnnnnnnnnnnnnnnnnnnnnnnnnnnnnnnnnnnnnnnnnnnnnnnnnnnnnnnnnnnnnnnnnnnnnnnnnnnnnnnnnnnnnnnnnnnnnagcctgatgacagagtgggactccatctctttacatatgtatatcttactctcttgatgggacaagttggtagaaataaagattttnnnnttctgttgtgatttcggtgtctgaccaattttctgactcattgtgaaggtgaccagatatgaaggcatatatatgactactcctctgtcccttaggtgtataagacttagctggaatccaaccaaagatttgggctggtctctccatcttaacgttgatgggattcaggacacataaccccaaaacattgcaccctgttatttgagaaaactgcagaagcaaggtttctcataccttccccttaccccttctcccctgaagcaggccataaaccctaagtgactgtcccctgaaagtagatcataaaaaccttcattccatagggtaccctttatcctcacagatacgagacaccaagaagaatctgggacaaataggacttgctaagttctccacagtttattaaca

SEQ ID NO: 365737 - DNA, 685 bp, Homo Sapiens
agcgggtgctggtaaaaacaagagtaacatttttatattaaagttaaataaagttacaactttgaagagagtttctgcaagacatgacacaaagctgctagcagaaaatcaaaacgctgattaaaagaagcacggtatgatgaccaaacataaaaagtgttttataattgttggtgttttaataacaactaatattattactctgatagttaaactaactcgagattctcagagtttatgcccctatgattggattggtttccaaaacaaatgctattatttctctaaagaagaaggagattggaattcaagtaaatacaactgttccactcaacatgccgacctaactataattgacaacatagaagaaatgaattttcttaggcggtataaatgcagttctgatcactggattggactgaagatggcaaaaaatcgaacaggacaatgggtagatggagctacatttaccaaatcgtttggcatgagagggagtgaaggatgtgcctacctcagcgatgatggtgcagcaacagctagatgttacacccgaaagaacaactggatttgcacggaaaagaatacactaagttaatgtctaagataatggggaaaatagaaaataacatcattaagtgtaaaaccagcaaagtacttttttaattaaacaaagttcgagttttgt

SEQ ID NO: 365738 - DNA, 949 bp, Homo Sapiens
  misc_feature (60)..(110): n is a, c, g, or t
atagttatcatatttcgatttatttccatgtaaattggttgttacatgctgagttagtannnnnnnnnnnnnnnnnnnnnnnnnnnnnnnnnnnnnnnnnnnnnnnnnnnactgcagcatattagactacatgatttttaactaaaaatctttggattgtgaaagtaccacttaactccctatttgaaatctggccacaaactcattgccaaacagcatattctatactgaattagattatcatcccacaaaatacaggaatgtgcatttctaagggcataaggtatgttcaacaatatactaatatattttggaaaccactaaatgtcaagcattatccatacaagggtattaacacattaatgttttcattaaaaaaagaaagatctctttcttcatcacattacacatttatagaatagagatctgtcaaataaattactgcaaagtagttcaagctaaaacttataacacttgaatcatataatcgggagcaaataacctttaaaatgaaagacaaatggtgaaatttaagggcatttaatttgcataaatgtaatgttaacagtcttttcctggttacatattttatgcttaatttatatatgtcactctattaggtccttaacactcttataggtcagttttaattttttccaattttattttaccataataagcattatagaagtagtttgtcatatataaaaataaggtaatctcataaaaataattcattgtgactctagaaacaatccagcatcaagaccactacacagtttttgtgttgtcaatgcctgcttcaaaataaacatttgcattttagaatcttgtgtgtctaaactcatgtttagctcttaagctctcagaactccataccagagacttcctccaggttaacagtcattgtagccttggtgtgtggaagtcttaaaacaaaggtcttccc

SEQ ID NO: 365739 - DNA, 684 bp, Homo Sapiens
tagcacgccttagtctaaataaaatataccatgttctaccctttgtgtcccaggctggtcttgaattcctgggatcaagcaatccttcaccttgccctcccaaagtgttgggattataggcatgagccaccaccactggccagaggacaaaattttaataaaggtcttagcttaagcagtaatcctacttcattaagccttcctggggtgcggtacacaccgttaattcagcaaccctcagtacatactaagtatgctcagtgctgtgaaagtggattacaccaaattaagtcattcttatcacacccaatcaaaagtcaagaagccagggataaaagcacctcaggcacataacattaatctagtaatgtaattctctgcacatccagctggtgaaactgcgtgctgtaagctgggaccagctttgtccataactgctgagagaacttgctgaagctctaggaataattttgcctgcccggttgctcaccagttgtagcttgccagctcccaacacccttcctggtgccaataaactttctcaaagagcaatactgacatttcttttgataaaacctccagccttctctgtgttgttccgacataccgaggaccaactggtctacatggatgccctgaacatgcaattctttcttccaaaataaaacattaaatagagaaaaa

SEQ ID NO: 365740 - DNA, 498 bp, Homo Sapiens
  misc_feature (461)..(461): n is a, c, g, or t
  misc_feature (473)..(473): n is a, c, g, or t
gctactgtatttaaaagcatttatttaaaatatgtcaacctccttccaaaagacggaagacacatgagcccattccttatatcatgaggtataaggtaacaacaacgaaaatcctaaatgcaaaaggaccatcagttgcctaaatataaaattcgaactttcggcaaagatatgagtgttatacagaataacagccaataaagaaatacattagtttacaccatttccccatatcatggccccgtccccctgcactcttccctttggaaggctgagttacaaccctgtcccagaagattcagaattttaaatacgtggtctcgctgatcaacatttatttttcctcaaacctcagtactacagctatacaaaactacactttctaaaaatatttggaaacaggatactggatttaattgggttgggctatggaggtagggaaaatacatccgggtaaaggnaaaaaggacccnggtattattaaaataataatggcta

SEQ ID NO: 365741 - DNA, 137 bp, Homo Sapiens
gacgggatggggtttttctctttgtaattatttctttagtttaattaaccttttggttgtttgtgcaatattatatattttaaattataatgcatctccccagagtattttgtagctgggaaaagaaaaaaggaaaa

SEQ ID NO: 365742 - DNA, 524 bp, Homo Sapiens
ttttgcacttggtgtttcggacacgggcagaccgccgctttgctgtttctccactctcttctgaaatcttcttccgttttacccctttcttggatttatctcccccagaaatatcacccacaggagcgcctgtctccaacagaccaggactgtgcagtgggaagctggttgtagccacagaggtgtaggagaccacaggctcggcgacacacacagctgggttggtgctgacagtgcttggctggatcacgttaactggcgtcaccaccatggaggactcaagaggctggctggggtcctgggtagtccgacaaattcaattcctttttgccaaggctgggacgtgggggggctcacaggtggtgaaaatgaattgtacatgggccagcaaagctctctccgaggcactttccaggtgaaagaaaggaatgggctgcacaaagttcaggtccggcttcctcttccccacaatcagcgcttgcctttttttcgcagccccaggcctcatctacaattccctgtgt

SEQ ID NO: 365743 - DNA, 511 bp, Homo Sapiens
tcatcgtcatagctgattccagaggataaaatgacgttcatgggcacctagtcctgagcaagccattctcatgtgttaaaaaatgctgccaaccctcctggagtctgggttctgagacaccacccaggggccaacctgaaagcaggcctttccaaggatcgcaggttgaggcctgctctgttactgattttctgcacagtgtgcaacaccacacagatgcccagtttctaccaaggtctgtggatggcaggataattttgaggaaccccctttttcgctaacactttcttcttttgtttacactcttcacattgtctattgagtctggattcaagatgattgattgtgaatattgttgtgcatgattttgggggtttcctccttgtgaaattttgaggtggcagatttgacattctactttaaactcatcttggtggtacttttcttgactcaccacctaagggggaataaataatgaagaaagaataaaaatagtgttatcagtcaaaaa

SEQ ID NO: 365744 - DNA, 173 bp, Homo Sapiens
ccaattgtgctgagtctcctactagactcgcttcattctagctttctgcttttacctttaccctaatctttttatttttatgctattgtactttatttttgtaagttgctgagatatctgttttgcaacaagatgggctatatctaaataaagacatgatcaaaggtttgatt

SEQ ID NO: 365745 - DNA, 703 bp, Homo Sapiens
  misc_feature (616)..(616): n is a, c, g, or t
  misc_feature (651)..(651): n is a, c, g, or t
  misc_feature (667)..(667): n is a, c, g, or t
gaatctacatttgcaagtttccaataaatttgggacttgggaaagaacataagctttttatatccagatgtgccaaatggttttcatgtaaattggaaaaaaatgccgacagaaggagaggacctgaaacggtcttgcacagttaacaagttcttatacagagacgttacttggattttactgcggacagttaataacagaacaatgcactacagtattagcaagcaaaaaatggccatcactaaggagcactccatcactcttaatcttaccatcatgaatgtttccctgcaagattcaggcacctatgcctgcagagccaggaatgtatacacaggggaagaaatcctccagaagaaagaaattacaatcagaggtgagcactgcaacaaaaaggctgttttctctcggatctccaaatttaaaagcacaaggaatgattgtaccacacaaagtaatgtaaaacattaaaggactcattaaaaagtaacagttgtctcatatcatcttgatttattgtcactgttgctaactttcaggctcggaggagatgctcctcccaaaatgagttcggagatgataggcagtaataatgaggacccccgggccccagctntggggccccccatttcagggccgaggggggcttgntccggggggggccganttggtgcacgtttgggtttgggaggttccctggcat

SEQ ID NO: 365746 - DNA, 465 bp, Homo Sapiens
gtctctcagacaggcgtcctaaagacctctaggctggaagcttgggcttgcaagtggatccgggaccgagggtggtctcttggacaaccccaggaacttggaccaaggcagagccaatcttgcaaactggccatggatggggaagtgcccggtagccagcatgagccacactaggaaagaggaggagggtgcagccaaacttaaggcaccggcaagtgttgtcagcactggaggagaccccgccagtggggtgaggccagccaagtccctgtgttacgaatggtgggccaaggggctgtctgctcggtcccagtaggacaggcagagctccaggctggcaccatggtaggcctccagggaaagagctgggaggcaggaatggcacatctggcaggcttgcccattcctggccctgagaatggagctgtagcctcatggacaataaatggatgtgacaccaaaaaa

SEQ ID NO: 365747 - DNA, 482 bp, Homo Sapiens
  misc_feature (43)..(43): n is a, c, g, or t
  misc_feature (65)..(65): n is a, c, g, or t
acctcccccacccctggccctgccctggccggggagtaaaaancccccactccttttaccttagngggtcctcaactgccgccatttccagaaacaaattttgatttgacactcaggagaataaaaacaagttgagggcagaatgtatttggaaaagcttaagacaaatttactgatattattttatgatcatttaggattacagatcaatttacctccataaatctttgaattgtcactgtgaccacaggatgaaaatcctttattagccattttataggttaaaacaaaaaattgactacacagccgacttccctcagataactatgaagtctattatgagtactgaatgaccaaagaacatggaaaaaatgcatatgaataaatactgaaatgtttatgaaagatatttatgaaagatattaagacttctgtgtttaggtatgcacatatgataaaataaatctaaaaacattaaaaaa

SEQ ID NO: 365748 - DNA, 912 bp, Homo Sapiens
tggtgtggaggggcaacctggactgaggccgaactcccttgggctcaccccacccacccctacctgagcatcagcagtggggggagggcagcatcgcaggggcagggactccctgggtgaggacagaccagccctcccgagcacctggcactcatgggctgaggctgacttctcctggaagaagggcccagagtggaaggaagaggcagagggtagaggtggtggctgggggctcctctgcagagtggggtggccaatggagagggctgcactcacaccgcaacataggactctctctcccttaagaaggcccccttagggtctgggctgccgcccccatcaccctaaaaccagccaaggtagctgaggccccagggcagacaatttcaccagcaggaggaggaggagtccagtgagcttggttgctcacagaaagcaagggagctgtcacagaggaagctgatgaatggaccgctgtggggagactttaaagtagaaccagtgataagggagggcaggatggtggggatgcagaagcagcagccagagagagacggactggggtgcagacggagtgtggaaaacgcataccttgaaatgaagcatccagcagatggggtgagtggatacagctcaggagattctcccaggaatagcagggaggcgtaaagagagacaacgtacagagatagatgaatggaaatgggtaagggaggtgttcattcacatccatctaactgcaaaatacaaaagtaagaagtcattgacatgaagcaacgacgaccaagacgttctcagatctaaaggtgaatgatctcagtcagcctggaaatgcacaaggtggaaaaataacataaaaaagccataagaccttgaagaacatcaatgtcaaagataaattctaaagtccca

SEQ ID NO: 365749 - DNA, 544 bp, Homo Sapiens
  misc_feature (113)..(113): n is a, c, g, or t
  misc_feature (132)..(132): n is a, c, g, or t
  misc_feature (319)..(343): n is a, c, g, or t
ggccttaaaatggcttaggtcagcagacttacagaagaaacagggatattcgaggcccctgcttggaaaagctgatgcctgcttgtaggccttcccccctttccccgcttaancccccattagttgccttcnaccagaaccgaaagaagtttagtctaaaatgaaagcttactactagcctgcaaaatagctccctttgtctgttcttatcagcccagcccagctacttaggtcgtaagtgaaatacttgaagagcccctgagctgactaggattgcaatgcattgtgggctgtgacaaaatgcagcaagacaaccctnnnnnnnnnnnnnnnnnnnnnnnnncctaaagcccctgcctaacaatcaataggtgacgtccaggaaggttgtgaccccatagtactcagcctgtgggaaactgggggaggagcctgcacactagcggacaaattgcttgttgaaactgctgggtgtgcctgtccgtcagacacccgattttgcaagactgactgtttattaaaaatctcactttcgctgttaaaa

SEQ ID NO: 365750 - DNA, 992 bp, Homo Sapiens
  misc_feature (463)..(490): n is a, c, g, or t
ttcaattgctaggaatatttttgcagatttttctttacagtattccataggcaggtccactggaaaactgcagaaaaatgtgagctctcctggtaaatagtatacattttataagctatattttaaaggcctaagaacatggcaagtatttacttttatcttttttttaaaaacactcatgacagaaaacagtttaataatatctcattctaaaataaaacactggttgcagggtcttcaggatgcctattttgccaagaaacttcagtatacaggttagaaatatgcttttgtttttgaacaataatatactggtttgctttaaagaagggactaaatatgactttaaagagacttcaaaatattgagtattttaaaaatttaaaagtaggtcagtttataacgagtaaatacctaacacaccaagaatgtgcagtgaacctcaggcatttaagacaacctnnnnnnnnnnnnnnnnnnnnnnnnnnnnaatcaaagtgtggtcccaaaacaagccaacagctgtatatctcaaaagttaacccaagacaactctgatatttaggttatttgttgagactcattggtactgactggcaagtattctgctttaaagtatcatgtattaaaatgtttagacagcatgtgttttaaagtgataaatgcaaaatgttaagtttgaaatggttaacagtaaattattatgttagtttccaggcacttgaactgtgctacaagtaggggaaaacctactttaaagtatggtaaatgtgtgttttaaacttcctatcaagtgacatacttcatttgattttttgtttaagaagccatggtacttttttcttgagttactttggatatgttttttcaatgccatctgaagattttgtaattgagtagcagtaaatatacagatttacaatgttttaactacagttcatgaatagctggttgtgtaaaactaataaaaaactagactttcacatgtaaaa

SEQ ID NO: 365751 - DNA, 483 bp, Homo Sapiens
  misc_feature (443)..(443): n is a, c, g, or t
ttccacaggggaggatggggatatacctcactgaaagatccagattgggagtatcggggctgagagagagataacaaaaccacaatcgttagttttatcatattgttaaaagactttcaagaaataatacaaactggagatagtagatacacaggctccattctaagaacaaagtctgttagaagcaggaacacttggacaaatatgggatgggagggatgtcaggccgaggttagagtggtgatctctccccaccctttagggcctttggaggtggagaagggatcctgcctgctagcaccacattggaagggatcatctggtccagaacccccatttctatcaactaggagctggggggagtagctagcccagagacttcgggtcagggttcaacaatcagggaagacccagttcctgagggaaacgacagttcaagaagnggttgggaagaaggctgtcctctaaagaaggccgtcctct

SEQ ID NO: 365752 - DNA, 439 bp, Homo Sapiens
  misc_feature (44)..(44): n is a, c, g, or t
  misc_feature (118)..(118): n is a, c, g, or t
  misc_feature (150)..(232): n is a, c, g, or t
gtgcattcctaaaggacaaaagcaaagaagctatttaggaattnacaggccaaagtcttcatttattgcccagtccatttaaagacccatgcaagagcctggtttgtcatccctgccntagcccaatctgaggctaagattggtaaactnnnnnnnnnnnnnnnnnnnnnnnnnnnnnnnnnnnnnnnnnnnnnnnnnnnnnnnnnnnnnnnnnnnnnnnnnnnnnnnnnnnctcatcagttgttacaaggaaaggatgttgaaccaaaaggcagttatttgaggactggctatacactgtttcacgtaaaagttggagttttcattgttctattaacaatgttaaatgaagacttactgtattttgaaaaccatcattaccttctccataccatttggctcccaaatttaaataaacaagagaaaacggtgttcatct

SEQ ID NO: 365753 - DNA, 379 bp, Homo Sapiens
ctcatatcccatccttaagagaagaaatgttataaagtagaactaaatataaattttcagaattaatgcattcaaagtaatatatcaaatccaggactttgttaacttcaggtaaaaacttcattagggtaatatcatctcaattttttcaaatgaaaggattctctaattagaaatttatatgtcagagctgttataaatttatcaacctgtcaaatatgttctggacagctaaatcatttgagatttttggttttttgatttctattccctaacttgtgaagacaatgaaaaatcaggcagaaatatttagtatctagtcagtatctgtagctacactgtataactgttcttcaataaaatggttcatattttatag

SEQ ID NO: 365754 - DNA, 443 bp, Homo Sapiens
  misc_feature (156)..(156): n is a, c, g, or t
  misc_feature (186)..(186): n is a, c, g, or t
tggcaaacatcacataatataagcaaaactatgcgttcactatagttacacacattcttttttgctttatacaagttgtaaacaaatttaagtgaataaaattcttggctaaagacatattccagaactctgacatatacttttcagagttaggancaaaagaaagcatatgtaacttccattagnaccatcatcatatgaaaaagtaaatgagcatatgctgcttttaaattaacatctgtcattttatttaaacacttttttaggttatagctaaaatgatatttatctgaagttttaggaaagaacagaagctgaccatacaaatcttgttcataaccacattggccacttaaattaaaaatataacaaaattgaaaaatagacatataaccaaaaagattctaaatcttgtaaggaaaaaaagaataaagctgccaata

SEQ ID NO: 365755 - DNA, 756 bp, Homo Sapiens
aagcttgttatattaagtagaagaacaataacaaatcagggtttaaaaaatgatttttgtacattgatcatattctgtttctgttttgttcctcacaatatcaatcttattttatattttcttgtgagaacacaacattggttaattgctcagtagtggcagcagtaaggaccaatgtaccccaatcactctctgtattgctgtttccaacggttgttttgaccctatagtttacctactttacatcggacaccaattcagaattcaataaaaatgaaaaactggtctgtcaggagaagtgacttcagattctctgaagttcatggtgcagagaattttattcagcataacctacagaccttaaaaagtaagatatttgacaatgaatctgctgcctgaaataaaaccattaggactcactgggacagaactttcaagttccttcaactgtgaaaagtgtctttttggacaaactatttttccacctccaaaagaaattaacacatggacattttaaagtctttagtataaagaaaatttgtattcaatgtgttaagcattaacatgtattttatttgtgtatccactccatctgatttttctgagccgattttgatttgttccttcattaaaaaaaatctcttaaagttatttagtgtctaaaagtgactgacttaaattatgtggtgccaatctgtaatgtctttgaattcctttttatattaaatgatttaatttactaaattattttatact

SEQ ID NO: 365756 - DNA, 487 bp, Homo Sapiens
  misc_feature (94)..(102): n is a, c, g, or t
  misc_feature (176)..(176): n is a, c, g, or t
tataataccatcagccttatcatttattcgtcatgtatggattgtttcctatatccactatcataaaattatcatttgaaatatttttttatgnnnnnnnnncacttctcagtgaaaaaacaagattacaagggggaataatatttattcagctaaaatagtacttcacaggaaantataggaaaagaaacacttagttccagttttattccaaataatgtacgtcgtaattatactcttgaatttattggataagaaggtctgaggtgggtctgaaattcgatacatgaagtcaggaaaagaaaagaaacttagttctaccttgattacatatgttgttacaaattatcattataaaatgtttaaacaattagtatagtatatcttttgaataattgcttataatatgccttaccataaagaaaattgatgctacattgtgtgaattgtttggttttctttttatattaaaattatgcataaatga

SEQ ID NO: 365757 - DNA, 443 bp, Homo Sapiens
taaaaccacctgccacgggttgtggttcttctaggatcttctatcaatgttctctgaggtccccaggagccatgaagctggggctgactcccagggcaatgggactgcagtgtccttgttctttcttgttctatgcatccatgctctgctccacccctgccccttcactctgcccacacacatccctctagactggccttgtggtcagagcctggagtgcatgggctgctgggggcctgtgggctgcactgggccagaacccctggcaccttcaagactggcctggagccagcaggtaggtgacctttccagggcctgcctatcccagctttctcctccaatccctcccctctcttgcctgggtcaattaaaaaaagcttgtctgttggctgcctggcagggtggagttcaggggcaggtcaggagcccagtgacagctcgga

SEQ ID NO: 365758 - DNA, 896 bp, Homo Sapiens
cgtcctgagttaaggcgagcgccgtaggcgcgtactacagatatccctctacgtcggcctctattgcgcctacccagtctgacatgtttcagagtggattccatagtagatgatatgttatgatcagctctgctctggacgactgtttacaagatcgaagacctggtgaaaacctggaggctatcgtgatctgccgtccagtgaatcctaagatctgcttgtgtgacataattggacatattagcctacactatatttaaaaggctcctcagtggtaaatatctaatacaactgtataatgtgtgtactatgatgttagtgcttgctgcttgcatagattttgcattgtgatctgtagtatgaattatgaaacatagttgtacttagtagtaatgaatatatccttggtaattaatgtgtgccatatgtttattcccatttagtataactataaattatattttaaattatatatttttaggatagttatatttttttggggttctacgacattgaagttggactagtgatttatttgaatgctgaatcctagtataggggaatataatcttatattttaacaggggtcctctatgggaaaataggatgaactttgtttcccagaaattgttaagtgatgaaaaacttcaaaataattttcctgcattttctgctttatttacatgtaaagtgaattccctgaaaattggatttaaaaagcattctccttcaatgtgcctttaccttggagctttaacaacttttctgttaaatatgtagttttttattaaacaatgttattaaataaaaacatttatccactgattttattactgttccaatgtaacacattttctacttcatcactcttctgttaccactcttaaatgtcttaa

SEQ ID NO: 365759 - DNA, 416 bp, Homo Sapiens
aaaaaaagtaaaagttgctgctttctaaaatattaattgccttatatttgaaagtgccattgcaatcgtaagtagactatgtatttcctataatgatgtctgatatttaaataggaaatcagacaaacaatattcagaaagtttaagcatataaactttttatttttaacttgcctaaatccctgtattccaaaacctgctgcatcataataaatatatctatatatatttagcataagacgtgatatttttaatttcttttttaaaaaattatatttgtctcttagagttaaaattttctttatataatattgtcatatgtcatagttttaatacaattcacatgatttctatgtttcttaatgatattttgttgtgtaaaattgatcggattgattaaaaaacaaattctctgg

SEQ ID NO: 365760 - DNA, 456 bp, Homo Sapiens
gcgtggtgatgctagtgggctccagccctcgcacctgtcatacctgtggacgcacacagcccacccgtgtggtgcagggcatgggccagggcactgagggccccggggcagtgtcttgggcctccgcctaccagctggctgccctgagtcccaggcagccgcatcgccaggacaaagcggccacagccatccagtccgcctggaggggctttaagatccgccagcagatgaggcagcagcaaatggcagcgaagatagttcaaagccacctggcgaggccaccatacccggagctgtctgaagaacacagaggcgctcttgggaccagcagacccctcggccagctcacggcacatgcattggcctggcatctaggaccctggctccctgcagtggggacttcgtgggaggcactcatggctctctgggtctaatgaataaagtcctccacagcct

SEQ ID NO: 365761 - DNA, 492 bp, Homo Sapiens
tccccataaataaatgaatggagtttgcaggaaggtgaggatgagcagagatgtgtgtggacatctctgaccatccatcgctgtattcaaatggattgttctattccattctggtctcaggcatgaccacgtccagtgaagacatttgaggcagcacatctcaggacccaggcaatagactggccccaactcaggctggactaaggtgtgattaattctttgttttttgtgtggaacagctcaccttgtcagacagcctcagggcatctctgagacacaggggcagaaaatgacattcatcttttgagtcctcatccatggagtgctgtgtttggggggctgcatctgctgaagcgagaaccccattctgccaccccaccaggatgcccattctccaggacttctccaacttactattagactaaaccagaacaagcaacaaactgtatttatgcaagcaaaattgatgagaaaattatattcaaataaagc

SEQ ID NO: 365762 - DNA, 433 bp, Homo Sapiens
caggtgctacacccttttccagctggatgagaatttgagtgctctgatccctctacagagcttccctgactcattctgaaggagccccattcctgggaaatattccctagaaacttccaaatcccctaagcagaccactgataaaaccatgtagaaaatttgttattttgcaacctcgctggactctcagtctctgagcagtgaatgattcagtgttaaatgtgatgaatactgtattttgtattgtttcaattgcatctcccagataatgtgaaaatggtccaggagaaggccaattcctatacgcagcgtgctttaaaaaataaataagaaacaactctttgagaaacaacaatttctactttgaagtcataccaatgaaaaaatgtatatgcacttataattttcctaataaagttctgtactcaaatgt

SEQ ID NO: 365763 - DNA, 359 bp, Homo Sapiens
ccaaatcgtaagaactggtgaatacggaattgaagtaactcttggggacaatatataatgaattatgattcatattgcattaccttgaaatatgaagtgccatttgaatgtcccagggcttattaatattgaagattttcaacccctgaactgcttttctgcctctgtggaaaactactttgggattcttcagtatttgtagtagtttgatagaaataatgaggaaccatattcattctaggcattgtttatatttgaagttactgagtttgaggaatggcaaattaaatttgcctaacccccaaaataaatgaaatatctcaattataaaagcaacatggccgggcacggtggctcag

SEQ ID NO: 365764 - DNA, 556 bp, Homo Sapiens
ggggtcccggagtgatcctggcagccggtggggaagacaaggagggtttgagcatggcagaaggaaacaccctgatatcagtggattatgaaatttttgggaaggtgcaaggggtgtttttccgtaagcatactcaggctgagggtaaaaagctgggattggtaggctgggtccagaacactgaccggggcacagtgcaaggacaattgcaaggtcccatctccaaggtgcgtcatatgcaggaatggcttgaaacaagaggaagtcctaaatcacacatcgacaaagcaaacttcaacaatgaaaaagtcatcttgaagttggattactcagacttccaaattgtaaaataatggcctgaatttaagttttctaagataaactcagtggtttggtttttattattaatagagatagaactattgtgtgttaatattagcattagtcaataagttattttaatgtcagatttttgaatgttattatatattacctgtatgatggaaggattaccactgtacacaaatctaatcaataaaaacgttagaaccctcaa

SEQ ID NO: 365765 - DNA, 681 bp, Homo Sapiens
aagaggttactgcctcagtcttacctagtccagtctaccccctggagttagaatggccatcctgaagtgaaaagtaatgtcacattactcccttcagtgatttcttgtagaagtgccaatccctgaatgccaccaagatcttaatcttcacatctttaatcttatctctttgactcctctttacaccggagaacggctccagctgttctagctctctttcagttctttgaaccttcccaccttagggtctataaggttccctctgcccaaattgttctactctcccttcttcttcaacacatccttcagtttaagcacttgcttctctcagtttaaactccacttccttagggatgtctctgtgacctccctgtgctggattagcttccctactctatgctcttgtaaaacactatctacttcctttgtcataaactcatcattttcctataaacattaatattgtcctcctgctagaatgtaagctccgtgagagcaaggatcctcctgtttaccctgtacctccaatgtctggcacttgtaggtgctcaaatattcgttgaatgaatgaaaaatccatattgtaattgatgtcctctggccacatagttttaaaattaggtgattgattatatgaccgaatagaactatcaaatgttttcctaataaagtcaatatttc

SEQ ID NO: 365766 - DNA, 645 bp, Homo Sapiens
  misc_feature (570)..(578): n is a, c, g, or t
ccccgaatgtcagccaggcatcaaaatacttgtagaaaaacctgtcacaactgatttgaatgttcctattttctttgactttgatattggcttgtaatgtctcttttcatcatatgtaatatcagtggaacaggcagcgctactcaagtcctaaggattcctcagtgatcagtgatccagggccgttcatgaaccactgggctggatttgactgttgagtgtggcagttaatgcccctcaagaaatcaaaggatgtcttataagtgtcttccaaaaaaaagcaaatgctgaaatcctattggcaaagtaaactgaaattggctgctatattttatataatcatttctgcaaatcccattttttgaatactaatatttgacatggttaattcttattaatttgttggaattgtttattgttaataatgcaaatagataatttttaattatccacaagtaacatttcactgttaatggtttgaaataggtgataagcaaaccaatttgaaataaaatataaacatgtgccattgtattataacactatacactttcttgacagttaaatttnnnnnnnnnttttttttggtagcatgtattgtatatgtttatagtatatgtagtaaataaaaatatggccaaatga

SEQ ID NO: 365767 - DNA, 1608 bp, Homo Sapiens
  misc_feature (1014)..(1014): n is a, c, g, or t
  misc_feature (1124)..(1124): n is a, c, g, or t
tacacacacgcaatgacccacgagaaagggaaaggggaaaacaccaactacccgggcgctgggctttttcgacttttcctttaaaaagaaaaaagtttttcaagctgcgcgggcttcctgtgcgcggccgagcccgggcccagcgccgcctgcagcctcgggaagggagcggatagcggagccccgagccgcccgcagagcaagcgcggggaaccaaggagacgctcctggcactgcagataacttgtctgcatttcaagaacaacctaccagagaccttacctgtcaccttggctctcccacccaatggagatggctctaatggtggcacaaaccaggaaggggaaatctgtggtttaaattctttatgcctcatcctctgagtgctgaaggcttgctgtaggctgtatgctgttaatgctaatcgtgataggggtttttgcctccaactgactcctacatattagcattaacagtgtatgatgcctgttactagcattcacatggaacaaattgctgccgtgggaggatgacaaagaagcatgagtcaccctgctggataaacttagacttcaggctttatcattttccaatctgttaatcataatctggtcactgggatgttcaaccttaaactaagttttgaaagtaaggttattcaaaagattcatcagtagtatcctaaatgcaaacattttcatttaaaatgtcaagcccatgtcggttctcatcattaacagaaaatatattcatgtcattctcaatcgcaggttttggcttgttcattataatgttcataaacacctttgattcaactgttagaaatgtgggctaaacacaaatttctataatatttttgtagttaaaaattagaaggactactaacctccagttatatcatggattgtctggcaacgttttttaaaagatttagaaactggtactttcccccaggtaacgattttctgttcaggcaacttcagtttaaaattaatacttttatttgactcttanagggaaactgaaaggctatgaagctgaatttttttaatgaaatatttttaacagttagcagggtaaataacatctgacagctaatgagatattttttccatacaagatanaaagatttaatcaaaaaatttcatatttgaaatgaagtcccaaatctaagttcaagttcaatagctttagccacataatacggttgtgcgagcagagaatctacctttccaccttctaagcctgtttcttcctccataaaatggggataatactttacaaggttgttgtgaggcttagatgagatagagaattattccataagataatcaagtgctacattaatgttatagttagattaatccaagaactagtcaccctactttattagagaagagaaaagctaatgatttgatttgcaagaatatttaaggtttggatttctatgcagtttttctaaataaccatcacttacaaatatgtaaccaaacgtaattgttagtatatttaatgtaaacttgttttaacaactcttctcaacattttgtccaggttattcactgtaaccaaataaatctcatgagtctttagttgatttaaaaaaaa

SEQ ID NO: 365768 - DNA, 360 bp, Homo Sapiens
  misc_feature (21)..(21): n is a, c, g, or t
  misc_feature (76)..(76): n is a, c, g, or t
ccctaacgcccacgggtgccnggtaacccccgggcctgtaaagcccccaccggaccccgggatcatggcccaaaanaggttacctattgtttggtttccatccttgccttttgccatttttattttttaatttccaaattttaagtgttccctctttggggcaaattcttataaaaatgtttattgtaaagttatatattttgtctacgatgggattatgcacttcccaattgggattttacatctggatttttagtcattccaaaaaacacctaattattaaaacatttatagagtgcctactgtatgcatgagttgagttgcttctgaggtacattttgaatgacagcatattgtaag

SEQ ID NO: 365769 - DNA, 484 bp, Homo Sapiens
  misc_feature (90)..(90): n is a, c, g, or t
  misc_feature (101)..(101): n is a, c, g, or t
  misc_feature (136)..(136): n is a, c, g, or t
aggcttctgccactgcactcaaaaccatgctgtgttgtgacgatttctcagagtagataatgttctcagatgggactgggagctccaagnagagggtagcnagagaatgggggaagatcctcccacaaatatgccntctccattcttccagctgccaaccccacgcctcccaacacacaatcatatatcaggagataaagacaccatccattgtggcagtatggcatcctcgtaaaaaacatgggctctggagtcccacagtcccagacctgaatagcagcactgccactgatggctagctgtgtgaccttggacaagttgtacattctctgtaagccccagctttatcttctgttaaaggagactgagtgtgtctcccatccatggttgtgggatgattcagtggggtcgtgcacttaaaagcgcttgccttagcacagtgccacacatagagtgctcaataaatactatcctagtaaaaaaa

SEQ ID NO: 365770 - DNA, 569 bp, Homo Sapiens
  misc_feature (57)..(57): n is a, c, g, or t
  misc_feature (59)..(59): n is a, c, g, or t
  misc_feature (65)..(65): n is a, c, g, or t
  misc_feature (69)..(69): n is a, c, g, or t
  misc_feature (73)..(73): n is a, c, g, or t
  misc_feature (82)..(82): n is a, c, g, or t
  misc_feature (86)..(87): n is a, c, g, or t
  misc_feature (440)..(440): n is a, c, g, or t
  misc_feature (492)..(492): n is a, c, g, or t
  misc_feature (530)..(530): n is a, c, g, or t
  misc_feature (558)..(558): n is a, c, g, or t
tagagatggggtatcaccatgttgcccagggttggtctcgagctcctggcctcaagnantcttcncgcntcgncctcccaanttgnngggattacaggtgtacgccaccgtgtctggctgatttctctcatttctaatgctagggcagacagacagcactgactacgactgtggagttcagtcttcattattctaaatgacccagcaatctatggcctagataccatatccactctctgtcacagatccatgaagaagcacttctaccagaaagttacattgaaatttgtagataacttgttattttgacattttttatcataattaatgtgggggcccaaacttctgagggtaacagtaattcagccaagccactgagtagatgatatacaaaaagagacaaatgaaaatggactgcgtgaaacattcagattccaagncagcagaaacacaaggacaaggaaggagtaaaggtgttacacacaaagaggncaagcaggggttactcagaaatcgggtcttcctgccancagtttttaatgtcaccgttcagatgcncagttaaactt

SEQ ID NO: 365771 - DNA, 436 bp, Homo Sapiens
aactttaaaacaaacatattgacacaacttctgaggtgattgtacttgtttggtttctaaattaagaggatgtaagagtacatcattcattaaaataactcccaaaatgagtttcccaacacaggaaaacaaactttatattacattttattatttatagtaaaaatataaatcagtacagtatattttcatatattctgaccctgatacaataggtgttagaataatgcagtcaaaataaacttgttaatgagaaaaaagagtggcaatggaatgtttctttacttgaattatttaaactgtttattttcttaggatgaatttgctggataactttggaacattccattcatccttgcttttcactggctatttaatatactgcagagaatgtcataggctttcaaatattgctagacaaaaatgaagaataggg

SEQ ID NO: 365772 - DNA, 886 bp, Homo Sapiens
  misc_feature (30)..(30): n is a, c, g, or t
  misc_feature (599)..(599): n is a, c, g, or t
  misc_feature (602)..(602): n is a, c, g, or t
  misc_feature (604)..(604): n is a, c, g, or t
cctaataaaagtgatgcaacaaataatgcnagccactctcttcctgtaaacagggcttaaacgcaagctgctactctaagtgctgttcagaatttagtggttgaaggactgcgatgtgtagttttgccagaagatctttgccacaaatttctgcaactggcagaatctaatacagtgagaggaatagaaacctgtggaatactctgtggaaaactgacacataatgaatttactattacccatgtaattgtgccaaagcagtctgcgggaccagactattgtgacatggagaatgtagaggaattattcaatgttcaggatcaacatgatctcctcactctaggatggatccatacacatcccactcaaactgcatttttatccagcgttgatcttcacactcactgttcctatcaactcatgttgccagaggccattgccattgtttgctcaccaaagcataaagacactggcatcttcaggctcaccaatgctggcatgcttgaggtttctgcttgtaaaaaaaagggctttcatccacacacccaaggagcccaggctgttcagtatatgcaaacatgtgttggtaaaagacatanaantnattgtgttggatctgaggtgatatgttctgaatgtaagcaccgtcaacatcagacacctactcatggacatgtggttgccggattttcttaagatgtttccagaaatgactgatattttatatttatacattttagatgacaaagcttgatatttattgctgttgcacattttaaagttttctttttgggttgctctgtgtcaagagaggttacatggtgttaaatcggtacctgataatgtacccaaatactatggccagataataaattgtgctgcaaac

SEQ ID NO: 365773 - DNA, 1026 bp, Homo Sapiens
cgtgaccatcccccttcgtcttcagcagtgagggtagggaaggaagaattggatgctgaagacgaagtggagggtgtctggaagagaacagtgggagaaaatgggtggatgagtgatgcaaggttttaatgtgaatcctgaggagaaaaagagagacgtgggagtggggcagccatttgaggtggcatatgggatgcatgttgggtcacgtaagtgaataggaaaagaaagggactgaaagcatttaacaggagacaacctcacaaatctgtgggggtgatgaatgctggtcaaggggccaaggtggaaaagtgaggggaatgcagagttctcaaactggggcactgacagatctcatgtgaaaagttggtttcatgaccgtcatcaaggccagactgtaggatcagagcagatgcaagagcccaggaatatgcggaactaggtccacaggagaatgtgggggatggggacaaatgactcaggttaaatgaaggaaatagcatcactgcatggtaagatggcactgggcatggtaacctcagggacttggcaatggactcgtggtttgagtctattgtgtgggtagaaagatgcttgcaaatagtggaggagtagttaggaaccaatgcagaggaagcaattcagaatgatcactgaatctgagcttctgctgtcacggaaggctaaaaggatagagagatagcttacagctgaaagtatgtacatagagatgaaataaagtaggcaagggagagtctcaaacacagtgggtctcgtagttgtaatgggagtttagatcagtatcagctgggtacatgggacagagtatggccaaggactggagagagctggggtgtttggtgctggagtgtggacttcatttatggaaaacttcatctagaggaaaacaggaggaaaagcagaggaggacagagagtgggacctatgtaagaaggtcttaatttctacacccgggtgttgtgaaggtagtgcaaccaagagggaaagaagaaatgagtgacctgg

SEQ ID NO: 365774 - DNA, 266 bp, Homo Sapiens
ctcggctctaccttgtctgtgtccgacataggtggaacagacaaggtaggatggtttcaaacagcagatggacgcagtacagcatgctggggataaagagactgtggcaatggtggcagcagtgagggtagggaaggaagaattggatgctgaagacgaagtggagggtgtctggaagagaacagtgggagaaaatgggtggatgagtgatgcaagattgtaatgtgactactgaggagaataagacgagacctgggactgggtca

SEQ ID NO: 365775 - DNA, 512 bp, Homo Sapiens
tttaaatcatagtagtactagagtcaaagtttataattgctttggaacaatgggtttacttgaggtgaattcacaatgccttcacttaaaagtaagattctggacttcattatgagctatctgtataccatgtatgaacacagaaaacctttagagaactcttctctaatgatcttcacccaaaaatacatgccacaattttcaaaaacagaacatgtacaattgttggggtttttacattacccttataagattggtttgtgtgatacactaaacgtatatattttaatgacaatagaggaagcagattattactggcattaaagtacaaccatttctagacggttttaaatgccacagagtcccctggttaaaatgtaaagctgcacagcttgcctatgtcatctttatgataaagttaaaacagcaagaggatttaactttcactctacattttactgccaggtttttatatagatcaagtatcgctgcagcattctgaccagcccaga

SEQ ID NO: 365776 - DNA, 244 bp, Homo Sapiens
gcttttctcctggcatcagaaagtggtggcgttttctgtactggattgcaccaaggaagcttttggggaggaaggaaggacattaaattctttccctggtaatgaaaagagccctttatcaatacagtgctgcaatttctggatatcagctacactttgtttttaagtttgtttttgacatgtttatttggcaaattttataatgaagttttaagttgaaaataaaatgtagcaacattttgac

SEQ ID NO: 365777 - DNA, 447 bp, Homo Sapiens
tttcaaggcattttctttcagctgataaggtgtcctcctgaagccaagtaggtggttctggtctccaagtatcgttaagcacaggtgctatgacagaaaaagttcctggggtggaagttttaaaatgaggagttctgaccttaggcatccttaacagtcacaaggtgaaaagtcaaatgaaacagtacaattccttgatgagtgaggtgtcatcctcccaaccacacagaggaccgttttggctatgatcatcctgatggcaagtgaaggagaaatgagtgatagggctttgcgttttcatcccagatgctgtggccctgtgtttcacagcattaagagccataatttccaacctgcacagatcctgaacaacaaatgaataacgatgaatgtctttttggttgtaatttaacaagtcaaataaaataatcattgctgagcacaatc

SEQ ID NO: 365778 - DNA, 459 bp, Homo Sapiens
  misc_feature (306)..(306): n is a, c, g, or t
  misc_feature (389)..(389): n is a, c, g, or t
  misc_feature (406)..(406): n is a, c, g, or t
  misc_feature (422)..(422): n is a, c, g, or t
  misc_feature (436)..(436): n is a, c, g, or t
cttttaaagcaaaaatgtctttattgtttgaagcatgacaaaataaaattgataggacatttcatttcttacttagtcttctcaatggggttataaaaatacaatgccacttagtttttgtaagctcttgaaaatgtccaaaagctcacacttagtatgatattaaaaggcacttataacacacaataaggatacttaggaaacccatctcataggatacaattggaaatttctttgaggaaaaatttctaaatataggaaataaatagggacgggcactatttcttcttttccaaaacacaggantaggcattttccccatgttacctattacacaccataatgtgggggcacctcctcccatttttgttcttggatacgggttggtnatccaggctggaatttnatttggcttgcctttncttccattttaatncccatttggggttaaaattaagg

SEQ ID NO: 365779 - DNA, 347 bp, Homo Sapiens
actggagaaagtgaacactggagtgaagaagcggtctgtacgttggtgaagaacacacatcgattctgcacctggggacccagagcgagatgggtttgttcggtgccagccgaccaagattgactagtttgttggacttaaacgacgatttgctgctgtgaacccagcagggtcgcctccctctgcgtcggccaaattggggagggcatggaagatccagcggaaagttgaaaataaactggaatgatcatcttggcttgggccgcttaggaacaagaaccggagagaagtgattggaaatgaactcttgccctggaataatcttgacaattaaaactgatatgttt

SEQ ID NO: 365780 - DNA, 551 bp, Homo Sapiens
  misc_feature (148)..(200): n is a, c, g, or t
  misc_feature (228)..(244): n is a, c, g, or t
  misc_feature (271)..(281): n is a, c, g, or t
ggttcgcttgaggccaagagttcaaaacaagcctgggcaacactgcaagaccccaactctacaaaaaacgaaaaattagccgggagcggtgatgtgtgcctgtagtcccagctactcaggagactgaggtggaagaatcacttgagcnnnnnnnnnnnnnnnnnnnnnnnnnnnnnnnnnnnnnnnnnnnnnnnnnnnnnctgggtaacagagcaagactccatctcnnnnnnnnnnnnnnnnntgctttgctacataatgaggccaggcnnnnnnnnnnngtcctgtggaaatcatatagacaaacatttgcaaagctgctactgccattgtaccagtgttaaactgtgttctaccttgcatcttttactgatttttatgacagattttatattgtaaccattcgagaactctgtaagtgctatggcttccttaaactacgatttatcatatgctcccggtgtttactttgagactgaatggcaaccagagaatgtaaacaaccaaggtgcatctggttatgttttaaaataaagattaataaaagttaa

SEQ ID NO: 365781 - DNA, 532 bp, Homo Sapiens
tttaagagacagtgtctcgctctgtcatcacctacgctgtcacgtgcagcctcaaactcctggacttgtgatctcccgcctcagcttacctagtagctgggaccacgaatgtccacagatgcactccacctacccggctaattattttttgtataattagctggggtctttaccatcatgcccagggctggtctctaactcctgggaaacattcttattgcaaaggtagattctgctgtcatggttctgttatgaaatttaggccaggcgcagtggctcacgcccggctaaagggaatttttgtagtggtccccagtacagggccagcatttcctatttctgtaacatacagccctataatctttgcaaagctgaagtacacttgaaataggcaaacagaagacaccttttaaacaaataagacccccccaaaacccttcaaatatggtatatgtacacaaaatattcaaataattaaaaattcacaacccctatggattgctaactagtagccacaggaaaaataaagcat

SEQ ID NO: 365782 - DNA, 376 bp, Homo Sapiens
ttttgagaagtatatttctggaaacttaaatggattatattcttattatatagttgggtacgaatgtatctattttcattgtggtaaaagttcttccttttctctttcccaggtcatgttcttcctcaaattttttccatattgtaaaatcaaacttaaatcattagaatacaagtttatgtattctaatgcatgttagaaaattgaataatataggaaacacaaggctgcatgatgaaaagtgcattgttactgtgcagttaaattttggcttctggctttctttagtttgaacaaacgttcttgtctaccccagtagtcacagatgccatctttgcaacagaaagagtggtggtggcaaaatttctagaatgtt

SEQ ID NO: 365783 - DNA, 815 bp, Homo Sapiens
  misc_feature (23)..(23): n is a, c, g, or t
  misc_feature (641)..(655): n is a, c, g, or t
  misc_feature (731)..(731): n is a, c, g, or t
tgtccacaacagcattcaagaanatgctgtgactgcactgacacttgttttgtgtaagtcttggaacacccagcatacagaggctgttgctcattggcaaactgggacctaccccttcatactgattgtcggaacaaaatagagcattgtgatttcatcagctctcactttaatgtgtatacactactggccaaatgtggtgggtggatcttggcaaagtctcttccctgatagcaatgagtctgaggcacaaagaatcaggtgttgtatagaaaagacaaagaacgatgtttcaaaagctgtgggagacaatgactcacagccatgaacataggctttacgatcatccctaaattgagagcaaggtatttattatccgaaaacagagactggagaaagacactacatttgactactgggacattctgggtgcttataaaattttgacatgatattatttttcatgatggaaacttttaaggaataagtgtctacaagaggtggacatggaccatgcttatacaacttaaagctctgaactctgagaggcaaagtctatttgttctctactctcctcacagcctcttgaatcagaccttggccaatccagttactctgttaaagaatcattaaggaaaccnnnnnnnnnnnnnnngccctcagaatatgccctagctgcctcggttgtgtgacacacaccgtggtctctgagtagaggctgtactatcagnataaagaaaaaatagtaacctgagcatcttgtctctcccaggtaattcagaagctggggctatggccagacttctggaacattc

SEQ ID NO: 365784 - DNA, 644 bp, Homo Sapiens
  misc_feature (161)..(191): n is a, c, g, or t
caccactcaatctgggagggctctggtcaacatcacttatgtgtggtgatggacaaaatgcattattattccttaacaatcgtttctagatctgtcttcttgattcacttaaacatatattttgctgcacattttgtatttgtcctgttgatgcagaaggnnnnnnnnnnnnnnnnnnnnnnnnnnnnnnngcttgtaagaaaaatgcaaatgtcccggctccatagcccagaccagttcaatcagagtctctgggagttaggcctgggcatcagtgtttttacatctccacaggggaacaaacacataggcttctgcatggtgataagtgcaattaaggaaataaaggcaggttaacaggagagggaggaatggggagaagagaacattagactcagggaatatttaattctggttttagcattattagaataagactttatacattaactaaagtggagctttaatcactataaaaagcaaaagtatctatagacacagacacttgcctatacagagacataaccacacacactcagaggatagtgaacaaatctgtctttgacttacgacccattttgcaagacttaaagccgaaagaacacattttcagattgttaaataaagtctgattctgactaaaa

SEQ ID NO: 365785 - DNA, 700 bp, Homo Sapiens
  misc_feature (40)..(40): n is a, c, g, or t
ttaccactgaactgtttaatattctagaatttatgttacncagtaaaagatagacaactctgtctgcagttctgggactgggatatgcctgtgcatacacgcatctgctctgttttggtttcacttcactttagttatttgatttggtgtctgcaaaaccctgtgtgcacatttttatgatccttgggacaatttactgccaaccttgcttgaactctaaaatatgcctccagtttcggaaaaccacaaattatttaccaaggaggcaaggaaatggaggtcactgggctcatttcttacataattttcaacttcctttctgaggcctgacatcccccggcagtccacagtgatgtcctcccttagatggattccaataatggggaaagaacagatgaaaaagtggtgaaaagttgcctaactgcctgtgttccctctgccttgccttttccatgctgtgtgcccaggaatcaaagctggaggagcggaagatatacagggagtcccacggagcctcccctgcaagcatcagtacagaagtcgatgataatctggatgcaagcccaggagtgtggagtccactgactcagaagacctgcatctaaggaattggctgttcttatccttaagaatgatgactgtgtttccaattccagtagaccctttgatgcgttctgaataaatattccttttggaattg

SEQ ID NO: 365786 - DNA, 563 bp, Homo Sapiens
caaaactcaatcaaattattaggcacaatgaacttccatcttgtaatgctacaattcagaggcatttaggccaaatatgggtgttctgtgatattatgtattgtgaatatgtgggaagtcttcttaaaggaagattagctcttactggaaaaattaatttatttgtgcataaatatggtgttatttttagtatgtaatgaattccactgattgtcaaaaagaatattctgaatgaaatgaatatggattgaaatagataaaataatttttacaggttttaaaatttttaatgactttttagaattcctaggcttgtcaattaagtcaagaaattgctgagttctgcttattggcagccttcttttaaatgtgataaattattgtttacactgaatttgaaggtaaaaatgttctgttccttttgttacaaactgtgattgaattagtcatgaattaagttgtatagtttggattttggttaatctctaaaatctaattttactgtatttttttccttacctcaagtgtaattttttaaaaaataaaactcgaaacaattctcg

SEQ ID NO: 365787 - DNA, 460 bp, Homo Sapiens
tccgcctttgatcaggcctgcggactgccccctgaatccaagaggacacggcgggcaaagtcctgtgacaagctggaacctgatagaagacggcctcctgaccccacaggaaccagtgagccaggaacagactgacaactgccacaacaccctcctcagccctcgacatgtgcctcgcaaggactcagacccctatccacccccagtccccagggccccctgccagcccctgtcctacaggggcaagacggcaggaccaggcatgggggagctggaggcagggactagaacagagggagccacctggagagacggaggctgtcagtgcctgcctcgatacctctctctgcagagagcttctgggtgggggcttatctcctcccccaggagggtggatctctgtccctctatccccagggactctctcccctcttgtatagaataaaaaaacaaaatcatc

SEQ ID NO: 365788 - DNA, 1312 bp, Homo Sapiens
ttgattagtttccatattatcactaaggaaatcctaggccacacgaacatgaggctcctcttcggtctcctggcccaggctggtgtatgtgactgaagggttccacctgagctgtggtcggtaagtccacaacaggtcctgaaggatttgcggaacttgcttatacactcgggggtcctgggctatgtatggtggaagttggaggagtagagcaccagcccaatgaggatggtgaagaaagacaggagataacatgtcctgaaaacttgtagtggaagagaaacaatccacagaacaggctgtacaagtctgctgtgagcaaggagaggttgactgaagtggcactggttttctttatgacgactggcataaagctgtagagaccaaacatgcaggcactaaagccaacgtagagcagtcctatttgccagtcccagggcaccttcaacagttccttatgctccattatagctaattgaattccactgaaaaatgctccaaagagaccaatcattcccaggaattccactcggctcagagttcggatgatgtattcttcccagacgttagaaataccatagagtgtggctcctcctaagaccagaaggtcccctaccagcttattttcccctgctccctgatgtcttcccacaagcacatctgctcccaccatgcagcccattcccaggatgcagacaacgatgccgatgaaatgcacagccttgtaccggatcagcaggaagaaccaggagagcaaaatcacgactgggatcacaaaacagtccaggagctggatactggtcagagttgtgtattggtaagccttgaccaccagataatttgcttccaggtctatgagtcccaaaatcatgtacttccaccatcttcgtcgtaaaattgccaggaggttttcttctccttgtctgacggctagtgtggtggtatagaccaagaagagaagaatgtaattgaggaaactctggaagactggtgtgttggcgtggaaatcttctgacagatacttgctagtcaagccaattccacaaataaggagggataacacctggcctagggccacagagattaacatctccctgttcagcactttgcggatcctctggcgcacgccagcccgggaggaggcggacaggctcccgccgccgccgctgccctcggccggcaggttctcgatggtggtcaccacatggttcggcggggctggcgacggcggctgcagctgctgctgcggctgctcaggggggatcatcgcggcagaggctgaggcgcggcggcgatcagaacgcagccgggt

SEQ ID NO: 365789 - DNA, 1013 bp, Homo Sapiens
  misc_feature (210)..(326): n is a, c, g, or t
  misc_feature (339)..(392): n is a, c, g, or t
  misc_feature (401)..(401): n is a, c, g, or t
  misc_feature (870)..(905): n is a, c, g, or t
attaactgaacttgcttggagagagccctgaatcctttaactttaatgccatcttaggcctggaagttagagtgagggaaatgagcttggcttctgggactgtgtcaagttgaattttctgtcatttaatttcagatcctagctcatcatcagtgaagtccagcctacttacttgtaactattaacctttctaaaagttttcatcgcctnnnnnnnnnnnnnnnnnnnnnnnnnnnnnnnnnnnnnnnnnnnnnnnnnnnnnnnnnnnnnnnnnnnnnnnnnnnnnnnnnnnnnnnnnnnnnnnnnnnnnnnnnnnnnnnnnnnnncaaaaaaccctannnnnnnnnnnnnnnnnnnnnnnnnnnnnnnnnnnnnnnnnnnnnnnnnnnnnntaacaaacnagctcagcccctcaagaacactataaaaaactaattaaaatcgattccgttggagcccagtgggtcccgggacccatggccaaccagagagatttcctttggaaaacccatgggaaattccgggaccggccaaaaaatgccttggggatttagccacccctccccgggcgtgccaagaggggtcatacccgcacctttttttccaggcgcggggggtgctcgaacgttaaaaaagaagaaattttttgggaatcgtggtctccccggggggaggcaccaaaaaggcaaaataaaagacccggtgttgcgttgccccacccccagaagaaaaaaattcgccggggggcgtggcttccaaactttctttttaacaaaaaattttgcccgcgcccgggcgaacccccgggtcctttaatggggaccgttgtttttaaccccgggagtgggcctcagcgcgccccttcggcannnnnnnnnnnnnnnnnnnnnnnnnnnnnnnnnnnntttttgtgccacaatcggggggggcgcgaagggggagttttaaacaaaatatttgtccccccccgttgtgaaaacaaaaatatccttccccaaaactgttatacaaaa

SEQ ID NO: 365790 - DNA, 431 bp, Homo Sapiens
cgccactccatagccgcagccaggctgcccctgcttctcaggaagggtgtggggttccctccacccatcgccgcctctcgcacacacgtctcatggctgccctgccagctgagcgcatgacctaagcatggtgaggacatggcccttggcggctcctgctcttcctgttgtctccgtccccacactgtctccctcttcccttccatctgtgtctgcacagagcaaacacagcattatctacacaggaatgtagattctttgtctccagcaaagaattcaacccaaactgatttcctctgtttggcttggttgatagcgtgggcttagttggaaatgaagctaaggggcctgagtctaatcttagcaagctgcccatcacagagaagatgccaacgaattatttgctgcataaaacagaatgaaaaagaaaa

SEQ ID NO: 365791 - DNA, 494 bp, Homo Sapiens
ttttttttgtatttctatctgaaatgaaataattgcttttcttccctggtaaaggctggatggattggtaggagatttcatttatcacataaataatcttaatcttaataatttatcagtgtgtttagattttgaatattgggtttcctaaaaattatttttaagcttttaattcttttgtgtgaactattagatagttgcaatagttactgctttctgtaatagttaaatggaagatcagttctaatcatgaagataaaatgacagggaactgggagcttgtgacaggcaggattcctaggattgttaactctcactgtactgtaccttgtttatagcatatttatttcctaaattctccttttctttttgcctaccataactctaacccaaggttcatttcactgcttggcctttatgccagcaaggagggaacctacgtagggtggaaagggaagctattctttgacactttcagaactagttaaaaaaaa

SEQ ID NO: 365792 - DNA, 735 bp, Homo Sapiens
  misc_feature (88)..(110): n is a, c, g, or t
  misc_feature (725)..(725): n is a, c, g, or t
ggtgctctcattcctctctcatggccttgaaatgtattattatgcaaatgtgaattttgatactgaatttaagaagaggttgttggannnnnnnnnnnnnnnnnnnnnnncaaaaaaaaaagtcccacatgtggtcatcgtcgcttctttatgttgtaaggggaattgtaactatgcattctgcaaagggggtggggaggaaagggcaaaaaggggaagggagtagcgttgcatccttgttcttcagtttctgtgtccatggggtccccgtgtcctggaggggaaggggagtgaaagacgaatgtggtaaggtcagcacagtgagataaagacctctgagtcctcttgccactgttgctggcaggtctgatggccaggtaaattccagggggcctgcagttcctgtcaaccaatgtggttcaggattcttgatcctagccgtgcagtgttaatccagtgcagcaatggaactccacaggctccagtgttctctggaaaaagtactcatcctttcctgaattcagagcccttcaagctcaggaaaccacgcttcactcgtgctgacctgaaagttaatctttaggtcgatcttgaaaaactccgcctcctctctcctttataatatttctttcttccttcttaatcatgtgtaagtgaacttactcttagttataaggaactgtcctgctttgtggggaagagggctgttgcttgtcaggcaaaanagtattctct

SEQ ID NO: 365793 - DNA, 537 bp, Homo Sapiens
gcagggggcagagaggagaaagaggcttctgctgggtcctagtacaggcagacagcaggggccttggcaaaggcgatgtccttcagtcatctgtgatacccttcgctctcagctcctcttgcacccgggtcaggtaggtggggtctgggtacccaaacagctggggtccccctgtgcagctggtcttgtggtggatgtcgttccaggtgatgacattcggtctccctgtggtcatggacgtgccgatagtgaaggtgagacgctggtcaaacgccttgcggaacagggtcagcaccttgttgccctcagggcagtccgggaggtaggccacccgtgtggtgccaggataccgaactcctgggtttgggtgttcagccccctggacaccgggcgggaagacgtactggatgacaatggtgccgtacttctcatagctgggcagtaggagggtggcgtccttagagaccagcatccgcccattctggggctggttgcccaccagctgcccatagaagcgccgcacatccgtacgacccg

SEQ ID NO: 365794 - DNA, 818 bp, Homo Sapiens
aattttttgtctcaactggttgaaaacaaagccagcagcctgcacgttgcttcatgttaggtctgtgggggaatgaacatgggagaccaatggccagggaagcaagggaactaatgccccaagataatttcacactaaccgcctcttccctcgaacctgcaccatcaagtcagagcatctggttcttaaaaacctccattattggaaaattctgtattgctcgctggggaaaggcctttacagacccagtaggagagttaacttgcctaggacaacaatattacaacgagacactaggaaagactttatggaggggcaaaagcaataattctgaatcaccacacccaagcccattctctcgtttcccatctttaaaccattcttggtaccaacttgaagctccaaatacctgggcaggcaccctctggcctctactggatctgtgggccacaagcatatcgacaactgccagctaaatggtcaggggcctgtgtactggggacaattaggccgtccttcttcctaatgcccctaaaacagggagaagccttaggataccccatctatgatgaaactaaaaggaaaagcaaaagaggcataactataggagattggaaggacagtgaatggcctcctgaaagaataattcaatattatggcccagccacctgggcaggaagatggaatgtggggataccgcaccccagtttacatgctttaaccgcattattaagattgcaggcagtactaggaaattcattaccaatgaaactgcaggggcctttgaaatcttgcttggcccagcaagcccacaaaaa

SEQ ID NO: 365795 - DNA, 1129 bp, Homo Sapiens
  misc_feature (108)..(161): n is a, c, g, or t
  misc_feature (1012)..(1057): n is a, c, g, or t
  misc_feature (1111)..(1111): n is a, c, g, or t
gagcgggaggcgcagcatcatggcggaccgagacagcggcagcgagcaggatggtgcggcgctgggttcgggcggctccctggggcaccccggctcgggctcaggctnnnnnnnnnnnnnnnnnnnnnnnnnnnnnnnnnnnnnnnnnnnnnnnnnnnnnntgttggggccccaggggggctgcagcacagagacgcaggagctggcctccaagcgggtggacatccagaacaagcgcttctacctggacgtgaagcagaacgccaagggccgcttcctgaagatcgccgaggtgggcgcgggcggcaacaagagccgccttactctctccatgtcagtggccgtggagttccgcgactacctgggcgacttcatcgagcactacgcgcagctgggcccccagccagccgccggacctggcccaggcgcaggacgagccgcgccgggcgctcaaaagcgagttcctggtgcgcgagaaccgcaagtactacatggatctcaaggagaaccagcgcggccgcttcctgcgcatccgccagacggtcaaccgggggcctggcctgggctccacgcagggccagaccattgcgctgcccgcgcaggggctcatcgagttccgtgacgctctggccaagctcatcgacgactacggagtggaggaggagccggccgagctgcccgagggcacctccttgactgtggacaacaagcgcttcttcttcgatgtgggctccaacaagtacggcgtgtttatgcgagtgagcgaggtgaagcccacctatcgcaactccatcaccgtgccctacaaggtgtgggccaagttcggacacaccttctgcaagtactcggaggagatgaagaagattcaagagaagcagagggagaagcgggctgcctgtgagcagcttcaccagcagcaacagcagcagcaggaggagaccgccgctgccaccctgctactgcagggtgaggaagaaggggaagaagattgatcaaactgaatgaaaccccnnnnnnnnnnnnnnnnnnnnnnnnnnnnnnnnnnnnnnnnnnnnnngaaaatatactgtacagaaagagagaaaatagactgtttctcccccggaagganctgaaaaaaatgccgtgt

SEQ ID NO: 365796 - DNA, 647 bp, Homo Sapiens
  misc_feature (47)..(92): n is a, c, g, or t
aactttttaactttttattttctctctttctttacagtatattttcnnnnnnnnnnnnnnnnnnnnnnnnnnnnnnnnnnnnnnnnnnnnnnggggtttcattcagtttgatcaatcttcttccccttcttcctcaccctgcagtagcagggtggcagcggcggtctcaccaaaaaaagaatcatccctacacctttctccatctcttaatctgtcatcttcataatccattctgtcataataaccagattcttgagaacgacttccatggtcataatcaagcactgggttgagactaggaccacgatcatcaaaactatctcttctaaagtgccttttttcttcccaatcatccctaggtactctgtatggtggctcccgtgtagcagatctgccatctctaccataactcaatggtagggccttcttcagttctcctccttttaaagctgtagaaggatttggggcaaattctcaggagtaatcttgtcctctggataacgactcagttcatctaagtctctagcagacagaccaaagctggccaaaatgttactggcctggtctgcatctccacggtgttgagaagataaagggagtgggaaaaggagaggtacctctctcccagcgagcgggacgcggagact

SEQ ID NO: 365797 - DNA, 661 bp, Homo Sapiens
gggacgtaacctttaacaaaggtgacgtactatcgcatttttagagaatgactctaagttctacctggagggcgaggtcctgtcttgtgagtgtgtggcagcatgtgtggagcactaccacatcccacgtgcgtgcccaagccagccagagcctgctgcgtgtcggcacgccctacggcctacactgggcctaggtgatggcagtccatgtggctgccaggccaaggcagtcacaggggccctgaccccaggccacacagacggacatgggcccacatgggagggtgagcaggagcaaggctgtgcattagcctagggcctctgtgatggacatactcgtaggacccagccagtctcatccagcaggtagggttactagggctgaaccaggcgccaggctccagaggacgaagggactctgttgcccacacacgaacttgccctgtcccaatcccagaaacccaggacacaagactgtgcctgggctccaaggacaggaacacctggtccccccatcacactcacccctaagtgggctgggagccaggcagggccagggcagactgggtgggggccggggctggccctgggacccccaggaacgctaagacacaggctccagtaggggctgttgcctccaataaagcagcagtgagctttg

SEQ ID NO: 365798 - DNA, 1031 bp, Homo Sapiens
aacaggatggatggccggcttgagcgcacaatggaggctgtgtgtatggtcatggaagccttcgagaactatgaggagaagttccagtatgacatcgttggacactctggagatggctacaacattggtctggttccaatgaacaaaatccccaaggacaataagcaaagactagaaattctgaagacaatgcatgcccactctcagttctgcatgagtggggaccacacgttagaagggacagaacatgccatcaaggaaattgtcaaagaagaagctgatgagtactttgtcatagtcttgagtgatgcaaatctgtcacgatatggaatacatcctgctaagtttgctcaaatcctcacaagagaccctcaagtaaatgcttttgccatttttattggctctttaggtgatcaagcaaccaggcttcagagaactttaccagctggtcggtctttcgttgccatggataccaaggatatccctcagattttacaacagatcttcacctccaccatgttgtcgagtgtctaagaagtgcccttcatcaccctgatgacaccaggatttgaaataagacaggaataaagagtattctgaaaaaaagaagatatggatgaagtgaacccatgcagtgactggatgattccggcattcctgggtcttcctacacttgctccgtaatgagaattcagaggaagcagccagaaggagacttaaacatggaaagatactccactgatgagttcagaagtgattagggcaagctagttgacctgcacttaatcaaaagttggggtaaaaggaaggtggttaagagaactatgtgttttggtctattttccaaaaaccctgaggggggagaaaaatacttttgctttttgcccttaacaccatccatcctgggtcaccgtttagaaaaaagttggacccccttccaaaacttggagccccttttgaatggtccacaattcccggaaccaccaaggaatgccaaagtttccttgttggccaaaaaaaccccccacccc

SEQ ID NO: 365799 - DNA, 525 bp, Homo Sapiens
gctacttttgcatgacacagcaagcccagtgtcccctttgcaagctgcagagagggaaacagagtcccaggcctgctgggaagagatgctcctgcctcccaccttccagagttgggggcctggcaggctccatggcaggcaccaggtccctagcagcccagaacagctctgactggagccctcaaggcctctggggccagggtctccgtgatcagctcagccctggtgttcctctcttgctgggctgggacctgggacacagccacggcagcaaactcagagaattgaaggtgctggcgccaccctggggcactctgtcttcacagcaggagtgactgtctccagtgctcttggtactcctgtttggctgtggcctggtccctctgggccctgggatcttcttctggcccttgaggcaggtctggagaggcagtctctgtcttcatggaggggtggtcagaggcgggcgggaccaccagcctgtaacgttattattatatgtgacaataaaggtgctctcccccc

SEQ ID NO: 365800 - DNA, 475 bp, Homo Sapiens
taccaccagccccccaactcttttgacccaccagctcttggggaggagcttccttctttcccctgtgtctcctgcaagcttgtccacttccgcactgcccaggcagcccaagagctcagggagccagggaccccaaggggagtccttggacaaggaggcctgggccctgagatcctccacggtcagcgccggggcccggagatggagctgggacgagtgtgtggacaggggggatggctggcccccacgagcagctccaggctggagttctggttcttccaggtggctcccgctgaggcagcggtctctgggggatcccccagctgaaggaggctggcaggagttggcaaaagaaccccctgccctgtccaggtgggaagctgagtcccagtgctgggggactgtggccggggctgatcttgagccttaactggacatgaggggcatgaaaataaagctgaactgcagcctcctg

SEQ ID NO: 365801 - DNA, 890 bp, Homo Sapiens
ctctatgaggatccccggcatacctggaccttctagaagcctcccaggtgattagccatcatatgtctccaagaaaggaagtgttcggcacataatctgccaatgattgctgatgacaatcacaagtgtcagacactgtgttagcaatgacaaggacatggtctctgccttctagtacgtgaggagtctggccttgagcctcaccctgaggctgcagtgtactcaaagttgtaacagaccaggacagagggctgagggtacaggagaaagggtgcccagccttgaagagtcaggagagacatcagtacagttaatacaggctccatggagtggggaggaacaggagggacagacagcagcaggaaactcatctggaaaggtgtgcaagggtcagagcacaggctagtggagagagccaggaaaaggcatgtgggccttgaaagcagacggacccagctcatctaatgactggctgtaaaaccttaggcaaattacatcatttctgaagcttcagagcttcttatatgtggattgggagaaactagttactcacaattcttccttcccaccccacctttcccaaggcccactgtaggcagagaatgctccctatgctgttgctgatgggcttggccctatgcctcatctcagccattggaatatgggtgggagtaagatggggcgagctccaagccaaggccttaagagccaccactttcttccttctagcccccctgtgcctctgtatctgccatgagaagggcatgcctgggagctgctggtccaagaacaaggagtcagagaacagccctgaaatcaacccacagcctgatgcagagtggccccaacccacagacctgtgagcaagaaaaataaatgtttgttgctgt

SEQ ID NO: 365802 - DNA, 299 bp, Homo Sapiens
  misc_feature (26)..(26): n is a, c, g, or t
  misc_feature (34)..(34): n is a, c, g, or t
  misc_feature (77)..(77): n is a, c, g, or t
  misc_feature (187)..(187): n is a, c, g, or t
ccttaggagttttgcccctaccgtantcccaaancgtgtgcctggtttccccaaaatgtcctgtaggctcactcagncccgcagtttatgtgtgtgccttttttcctatgaaaaatgatgtattttgctacttcctgtgcacaaagttttattgtaaatgttttttgtgctttgcatgaacaggggnccacgttgttgcaattgtttcagtagaactggtttgatttctaaaatgttcctgtaacatatcttttatgaacaaatctgaacaatttgtgaaataaaacattgaaaaccag

SEQ ID NO: 365803 - DNA, 1021 bp, Homo Sapiens
gagcgaggcctgggtggcgaattcggcacgagggtcctggaaagcgttgttggcccggttgctctggagccgggtctcgggtctggtggctgccggccctgcggcatctcgccatggggagcacggagagcagcgagggccgcagggtgtccttcggagtggacgaggaggagcgggtccgggtgctgcagggtgtccggctgtctgaaaacgtggtgaaccgcatgaaggagcccagctctccaccccctgctcccacatcttctacctttggccttcaagatggcaacttgagagcccctcacaaagaatccacactgcccaggtcggggagcagtggtggccagcagccctcagggatgaaggagggtgtcaagaggtatgaacaggagcattctgctatccaggataagctcttccaggtggcaaagagggaaagagaggctgccaccaagcactccaaggcatccctgcccacgggcgaaggcagcatcagccatgaggagcagaagtcagtccggctggccagggagctggagagcagagaggcagagctaagacgccgtgacaccttctacaaggagcagctggagcgtattgagaggaagaatgctgagatgtataaactgtcttcagagcaattccatgaggcagcctcaaagatggagagcacaataaagccccgcagggtggagcccgtctgctcagggttgcaggcccagattctccactgctaccgagatcgcccgcatgaggtgctgctgtgctcggacctggtcaaggcataccagcgctgcgtgagcgccgcccacaagggctgaggagcagacatcattccctgccctggcagtgacttggagccctgaagaagggaccaatcatgggaccacagccactgtgccctgccgtttcctgctgggcccctgcatatgcccctgagcctggggctgccacgtgtttaggaaacaaagtatgcgctactgtctgaaaacaaataaagcagatgccttgttttcaaaaa

SEQ ID NO: 365804 - DNA, 554 bp, Homo Sapiens
  misc_feature (189)..(239): n is a, c, g, or t
ggccgcgcacgtcgttgaggccgcacagtacgggcgccgccaccgccgcggacagcagccacgtggcgccgatgagcagcagctgccggcggctcccaccctgccggttgtagcgcagcggcacggccacggccacgaacctgcggggagcgccgagggggcgccggacagcgcacaggccgcggtgannnnnnnnnnnnnnnnnnnnnnnnnnnnnnnnnnnnnnnnnnnnnnnnnnncacctgtccacgctgatggcgcacaggttgaagatggaggcggtgcacagcatgacgtccatggccatgagggcgtcgcacaggcgggggctcagcagccacgcgccaccctggacctgcgcggcgacaccacaggccctgaggtttcccagccaccgcgggcccttgtgacccccccactcttatgggtagttcccagggctgaatacggagaagggggcccggctgtgaaccagaggccagaggaccgggcagggaaacaccccttccccacgcagatctccctttgttttgagttagggtctcgctgtgtca

SEQ ID NO: 365805 - DNA, 493 bp, Homo Sapiens
tggtaagttgcccacataactatctaaatgcaaaagaaagggaatatgtcccacaattacacttgtgcttacaccatgaccagggtgtgggaagagcttaggaccaaaatatttgaggtacagttgaagaaacagggcatatcttccttgaagaagaggaaaccatagtagccataaactttttccaagtaattgaagagttgtcctgcaaaaagaaagaaacacctagtagactatcttggtgagttactggtcagtgaatgcattcataaaatcttgctctgtttgcttgtcaatattggcttagagggattcacaaatctatttgaggtaggactgaatcatcccacaaatccttaaatgtcttctgtgttcaaggcaccatgctagtgcacactgtaggataccaggaaaaattaaaactaatttatgccttcagagacttcacaacttagaagagaaatgaatatgctcagaattaactgtaaaaaaa

SEQ ID NO: 365806 - DNA, 962 bp, Homo Sapiens
cttcttattagacagagctcatagtatttgttttctgctccgaacacttaaaaaatactaagacgtgatagtgaaaatagctttgaaaagaaactacatatggcaaaggtggggaggggggaagatgatgcattctgatcattataaagaatacttttcagggctctatcattttctccctttctctaatcatccagaatatggcgggtgtcccagtgttcaacagtatcatgctaatattccatttgatcggtagtccaagttctttggccagatagtgcaatgttgtgacaccgaccgaagcctttgttctggatctttcttcctattgaaagtggctgctggtggcttcataattttctgttttttttctcacaaagtaaatggtgggcatccatgtttacattgcaccttcccgtgctgtaattggcttgacaaagacaagcaggcttctctgttgagacttattgtgtttttagttttcatagacacttatttaatctttttaaattgtacagcaaggtgctctaagtaatattcgataaaatatatttaatagaaatttgcgtttgatattcatgaacatgaatacatgtatttttttaaggaaataagtattgtgtaacactatggcattgcttctatagcccaaagtataaaaatttctggaatactgacatgtaaagactacagttaattctgacactgtatcttattaaaataggatgatttgcattttgtaaaattatcctgcacatcaagctgcatgccttaaagcggaaactctaggactgtgttcatgggagagcgagttcatctgttcagaacagtgaggcaaggtctgtagtgcttctttaactacctttggaaatactgtacaatgttagaataatttattttgctttacaggagtttgtcatgtattgactttaatattgtattttggtaataaattttttgtt

SEQ ID NO: 365807 - DNA, 544 bp, Homo Sapiens
ttagtgtccgagtttctcttactttaccaccagaatcctagaagagagtaacagcagcagcataacttcttaaaactgtggtgtggcaacctagagtatttctgtttaagatctatatataaatggatgcaaaatagatactttagagccagattcatgtaactctaacacaggttagttttaaaggcactaacctttactttggctttactggtatgcttatccattagttagctggaacattttaaaactttcatatagatttttaaaacttgtttctagagaacatggttttttaaaattaatactttaaaaacattcactgtacattaatttcaacagtaataccggcaccagttttcctttcacttctgtctcgttatccccacaaaacaaaagtaagaaaatccaataagaaaatcccagtattcatgatttcttagttccccataggaggtatttatggttctaggagaaatcaggtgtgaaggaacaagcaaattttagtcttatatttatcttggaagcttcagggcctcaagaa

SEQ ID NO: 365808 - DNA, 579 bp, Homo Sapiens
gcgaccgccccctcccgaaagccctatgtcatggaccccgaccaccggctgctgctgcgcaacaccaaacccctgctgcagagccgcagcgccgcggtggtgatggcggtggcgcagctctacttccacctggcgcccaaggcggaagtgggcgtcatcgccaaggcgctggtgcgcctgctgcgcagccacagtgaggtgcagtacgttgtgctccagaacgtggccaccatgtccatcaagcgccggggtatgtttgagccctacctgaagagcttctacatcaggtccaccgaccccacccagattaagatcctgaagctggaagtgctgaccaacctggccaatgagaccaacattcctactgtcctacgggaattccagacctatattcgcagcatggacaaggactttgtggcagccacaatccagaccatgggacgctgggcaactaacatcggccgagtccgtgacacctgcctcaatggcctggtgcagctgctgtccaaccgtgatgagcttgtggttgcagagtcagtggtcgtcattaagaaattgctacagatgcagccagcacag

SEQ ID NO: 365809 - DNA, 480 bp, Homo Sapiens
gcttgtgcttattaaatagcaagggtgtttactcaggatttggggatcagttgtagccatgttgaatttggcaaactgagctgtgtgccctgaaagccctctttttatttcttcatttccatattgtctgacttacttcacctaggaatacctgagttatccagtccagtgttccctgatgagagtggaagattttcctggagaggcagctgtgcatggccaggtcatctgtcaggatgttgtggtggtgtgtgatcagagcagagggcctttcttttcctgtactgtgctctacttccttatgcatgcttggtttcaaagatgaccgccactttaaaagaaagatttcctcacagctctccagagaactatcatactaaggtgataggaaaggcttctcggatacaagccaacaagtcagtcttctgattacagaaactcctctcacaggttatgtttggaaaggctgttctccattcc

SEQ ID NO: 365810 - DNA, 612 bp, Homo Sapiens
catggcacctgcttgcccatcaatgcgttctcctacagctgtaagtgcttggagggccatggaggtgtcctctgtgatgaagaggaggatctgtttaacccatgccaggcgatcaagtgcaagcatgggaagtgcaggctttcaggtctggggcagccctactgtgaatgcagcagtggatacacgggggacagctgtgatcgagaaatctcttgtcgaggggaaaggataagagattattaccaaaagcagcagggctatgctgcttgccaaacaaccaagaaggtgtcccgattagagtgcagaggtgggtgtgcaggagggcagtgctgtggaccgctgaggagcaagcggcggaaatactctttcgaatgcactgacggctcctcctttgtggacgaggttgagaaagtggtgaagtgcggctgtacgaggtgtgtgtcctaaacacactcccggcagctctgtctttggaaaaggttgtatacttcttgaccatgtgggactaatgaatgcttcatagtggaaatatttgaaatatattgtaaaatacagaacagacttatttttattatgagaataaagactttttttctgcatttggaaaaaaaa

SEQ ID NO: 365811 - DNA, 1104 bp, Homo Sapiens
  misc_feature (52)..(52): n is a, c, g, or t
  misc_feature (216)..(216): n is a, c, g, or t
ccacattgccaccatttgaaggagatgatttaaggatcctggcccaggaaantcaccaaggccagaagcttcctctggcaggcccaatccttcagatcccaactccagaagaaaaatgatgcagaaccaaaggtcactctttcctagagaagtgttctcagaaaagtcatcctgcaaaggaccactcactgagcaaatctcagccccgagggcagngatgggatgaaatgctgtgacctgcaggaaacatgattcctggtaccaggactctctggaagctgaggaaggaaagactttgtcttttgtgtgaggggccattcccgggtcttaatctaactctccagccctgtcccgcagcgcactctactctccagccactagattgtccctctctgggaagccctaaaccaaccccctgcctaaatggtggtgcttcttgcaaaccaaccccctgcctgaacggtgcttcttgccccctctgcctggagactcctgctcatccatcaaggcacagctcaaatgacatcagctccctgggacctatctagagcgaggggcctccagtctttctcttgcagcatcctgaccacgcagacctctcgcactcagcactctatgtcacgccaccttgctcgctgatctaactcttctccttgatggtgagctccttcgggatgagactggtgtcccaggatctgcaggtccccagaagctgccacataggagacacatggtgaacagtgagcaggcggctgagctgtgagagcctagctctggaaagcagctgatggggtggtctccaccctggttcataagaggctaatgcagagtcacagtcagcccatcctgggggaagaagaaacaagtgagcctcagcaccaccctccatccctgcccaaccaaactgaagtgaaggctgctcatctgggttcattttctaaaattaaaaacaatcaattttattctactaataggatcaacatgactttaactgtttgaagtgatcattggcgtgtgtgtgtgtgcataaattttagtgacataaaactttattaacagactcataccataatacagaatttcaataagaaacaacacccatac

SEQ ID NO: 365812 - DNA, 676 bp, Homo Sapiens
  misc_feature (602)..(610): n is a, c, g, or t
taggtagcgaggcctgggtggcgtcaaacacgaggggctgctatcttgattgcttaattggctgttttttccttaccagtattgaccacatcacactgctagagggtgtgattgtgttagaagagttctgtaaggagctggcggcaatcgcatttgtaaaatatcatgcttcctccacaccataaataacatctttcatgtaactgggggaacagaactactgtgtacatttcaccaaaaaagactcagttccacccagccacaagaggataaaaagcctttttaaacgcagtattgctgtaaactggacagaaccattaagaacctattgagtggacattcttggtgaaatgttgtataatgttgttttcattggctttatcataatggttctatatatacaattgcacattgttgaatccaggatacaatcaaaggaacttcaggaaataagcatttctaatgactgtgaaaagctgcaatatttccaatgtcatgactttgatgatatttctgttatattaatgtccttttaggtagcaaggcattttgacattctctgggactcaaatgcttgtattcttttggattaataagtagcnnnnnnnnntcactaattttataactttttaaggtcagaattcttatcaaacaaaatatgaaacctgtaaatgag

SEQ ID NO: 365813 - DNA, 550 bp, Homo Sapiens
aagaaaggcttcattaaggagtgacttatgaaataggtcatatggaatgaatgagaatatcccaggcataagagagaagggcattcctgacagaatgaactgcatatgcaaagtcagggaggtttgaaagcgttgaacttgttccagcaacagtaagaaagaagtttagtgtagcaagagtataggtatatatagagaagtgaggtggagcccattgaagacctatgcaccttgctaaggaggttagaatttcttcttatatggtgagaagcccagagaggttccgaatctaggatatgtaagataggatatatgtgctttaggatgaccattctgtcggctgtttaaaggatggtgtgaagaaaagagagattagagttaggaaatcctttgcattgcttcaaatgggaaataaggacttcaactaagacaggagtgatgggtatggaaaagatggtctagattccagagctcaattccattcagtttgtggaacatttactgacatttaccatatagcaggctgctaaacactgtgatacaaaaaaaa

SEQ ID NO: 365814 - DNA, 934 bp, Homo Sapiens
gaagaagccgcccagatcctgctggctgagttcaacctgggctgttatgtgcaacacactgaacacgtgtacagggtttatgtcacaacttttctgggtttcggaggcaactttgcccggcagcgctacgaagaccttgttctgaatgaaactcttaacaaaaacaggtacatttgatatgggatctgagtttctgaaatataatgtcaggctgcagatattagggagaaatactcacatcctcctaagacagataagtccctgcttcctccttctttttgactacccctgccaatggggtagcatctcttaaagacctctattagcagtcccactctgggtgagggtgcattctgatctttgttattaggactcataaagtacagtagcttattgtgatctcttgctgtttcccatattcagacctaacatcatgggaaaagggagatgaattaaattgccagtttaaaatgtacaatatatagtgtagctgctagcagttccttctgcatggaagtgttcaagacatgtttgttgaattacagaacagttgcatcttttgtgagagttaagttctgtagtatgtctaaaagataaaaagcaagcatagttaaaattaactattaaaatggtctctcatcaaattcataatagtcaatatgtcctacagcatgggacagataacagattcttcatttgagtaccagatgaagtagttagaccttaatgtacaaacagtggtgggatatcttgtatcttggttgttttgaaagtctgtaaaattatttaggttatcatgaagcacagtgaaggaaagcataagagaaagcagagttgttgtgcatcattaaactttacactaatatttctcggcatgaaaacagtttaagtaatagggtgattgattgtggtagcgtaggtagggcaggcacgg

SEQ ID NO: 365815 - DNA, 615 bp, Homo Sapiens
cccatatatttttcttaaaagactatgcagaaaatatttttcctagaaaactttctcaagtataccatcatatttatcacttagtatcaaaatttcacaaaatacaaatttaagcagaacatcctaaagtttaccataattttattgtaatatcagaaatcacataagatatagagttaagcagaaaactgatgaattttcttcagatgatctttaagaatctcaaaagccttgaagtttgctatcttctactgtcttattagaaggataaaaaactttgaatgaaaatccacttcttggaaaagagccagggtttatgcagaggcattcggtatttgtcgtagtgaaaggatcatatttgtctgcaatgacaagtagatcgggcacaggatacactctcaaagcatagtcatatgcccaatacactgggcagacataaagaggtaggggagtcagatgtccttgggataagatagtctttacaaagtgattaggaatagccaaattgctgctaggaaaacggacgcagtttctgcacattttatttactaagtcttcacagaagacagtaatttcctgtgtacagtactgaattctgcaaggattagtagtaaa

SEQ ID NO: 365816 - DNA, 508 bp, Homo Sapiens
caaagtctggccaaaatcctgttcctctccccctgctctaccttctccggcaccaggcagccccttaaaggaggacaaagtgtgtaaagcccgtctgctgtcttcccccaaatcctcagctcagagccttccgcttccagggccaaccccagccccgtttgctgcgttgtgtaagggcttggggtcttagaagctgctctttagcccagatacacatactcttttttgtctttgtgcaataatcagtgttcctggcagagcctgggccaagctgcagcctactgaggaggcagaggccacctcctccagaaagccctcggcctgggccgccgccgtgactctagcactctcagtcgctgtacagtttctatggtgtgaatgaacttccctcctagttgctgatggcgctggtacctgctggcccatggcccgggtgtagagaaaccaagcggcagccaccaccagtgttgttttgaataaaagcccagaagcctatttaagaaaaaaa

SEQ ID NO: 365817 - DNA, 432 bp, Homo Sapiens
gatggaaaagaagacaggggtacaggcaccagtgttacatgtctgacggggaacatctattcttcaaagcttgcagctgtacaagtaggttttagaatgtctgtcagcagtggacatgatcttagagtgggctgtgcagatagacctttccaggtcatgtaattggattaagttaattgcaattaaggtacaggtaactgattaggttagggtacgttccatgtcaggtgaccagaggcagtataaaagggcagcctggaaagcagaggtccctctccgccccttcctccgtcttcctggatgctgcatcgcttccagcggggctgctccagcacctgcccatctcagcgccagccggggaaagaaagtagacgtgtaatttcaggttagtttcactgaacagttgtttgtttcacgcaatccctgaagggc

SEQ ID NO: 365818 - DNA, 1521 bp, Homo Sapiens
  misc_feature (852)..(1025): n is a, c, g, or t
  misc_feature (1041)..(1054): n is a, c, g, or t
  misc_feature (1089)..(1102): n is a, c, g, or t
  misc_feature (1188)..(1198): n is a, c, g, or t
  misc_feature (1281)..(1293): n is a, c, g, or t
  misc_feature (1342)..(1362): n is a, c, g, or t
gtggcaggacagacgtgtgaagcctcggccgtctcggggctggcaggtgtgcgggtgaggaggccccggtggccaagcagagcctgcgtttcatttctcctgcagcactgtgtctagtctgtcttgtgaactctcaccgtgaaaagaggctagaagtccaggatcgctgtaccgctcctgtaattaggtgatgactggatttgacaacttagtcccctcagacaagtaagataccctccaacagcaaattcaatgacttaattggaaaacacacaagctggcatgatgtccggtgatttctgtaagaaatgcctgtaggagaaggtctgtgaagtgtggagggcagtgtcgacgctgcacagcatctgcagattcgcagcctcttctctgccggtgcctctgttcggttctgttacccaaaaacaaagaccaaagaaggccaatctctcatttgaccctgtctttttaatctgcctgttttaaaagttgcgtctgtagtagccgcttgctgtgaagacacatcttgacagtccaagtgattttgtgaccagtgatttgggtcctgttttccgctcttctaagaaaaaacaaaaagaccgtgagttattgcccagcaataatcatgttgttactgtgagttagcaacatgcctgacttccctgatagcattactgttttctagttttgtttattgtatattatgtgtggttttatttggtatttatttgtgttttgaggtcttgcaatgtttttgtgtttctgatgctaataactaaagtttgtaagactgtagaatgcaaaactcggagatgctaaactgtcttattagaggaaaataaatctgattatggnnnnnnnnnnnnnnnnnnnnnnnnnnnnnnnnnnnnnnnnnnnnnnnnnnnnnnnnnnnnnnnnnnnnnnnnnnnnnnnnnnnnnnnnnnnnnnnnnnnnnnnnnnnnnnnnnnnnnnnnnnnnnnnnnnnnnnnnnnnnnnnnnnnnnnnnnnnnnnnnnnnnnnnnnnnnnncaacacacccgtgcgnnnnnnnnnnnnnnacaaaaaaattttctctaacactttttgttggggnnnnnnnnnnnnnnaaaaggggtagatcacgaggcaatcttgtttctccacaaaaaacaaaccgtggcactaaacaaagtagtgtctcttctcccccacnnnnnnnnnnngacccgggcgggaagaaacaccacaccttttttctcacaacacacccccatcgggggtttttccaaggccattcttcttctcnnnnnnnnnnnnnagaggggtgtcatatcccggggcggcctaataattataaagattcttcnnnnnnnnnnnnnnnnnnnnntactatcttagaaaggattgtgtgtggtttaaaatttactaacccccctttctccctgacaaggggggggaagccaccctaaaacaaaggagggggatgaaaaacacattcactttcccggcggcgcgaaccacataccccccgatcccccgcatgggg

SEQ ID NO: 365819 - DNA, 601 bp, Homo Sapiens
gtgtgacatgatttactagatatagcatgtatctatcaatcatgtcacacaaaaaatatttccaaagtgttctctgttcagaaacgtcacaaatgcttctgtttgtcagatcattttgcaacaggttaactaatacttatctacataaaaacctgaaaattggcacaggcaggcattttgaattagtagattacccccatggaacagtattcagaattattttgtcttgtgggctctgaggctctgggaggtagaggtggaccctgacagtccaggtcattaacatccacattcagttgatgcctctcagacacagtccagtactggataccatttatcattctgcaaaatgttgtctacatctttcaggtgctggtcattcttagattagcttcttagctgttctgttgataaacagaagacttcaattttcaggatggatgattccaacatcttccacaagctttcactttcactaaattattttgttataaatttgatctccttcaaaagtgccttgaagtcaattttggttgtaatgtatttgtctctgacgtattcttcaaattctctttgttttttttcctgtcaggggagaaga

SEQ ID NO: 365820 - DNA, 493 bp, Homo Sapiens
  misc_feature (353)..(407): n is a, c, g, or t
  misc_feature (463)..(463): n is a, c, g, or t
  misc_feature (474)..(474): n is a, c, g, or t
gcggccgcggcccggaggccggagggcacctatgcagggaccttgtaagcggagctgggtggctgcgcgagggaccgagtactagagctgcttgcatgcgttactaatacaaacaaatgtgatcaagccacttacctactgaactgctactgttgcctgagaaaaatgtgatttttattctgcttgtatttaaaattgatgaaggaaacaaatgcattcattatactgtaaacaattaggccactggcagcctcctgcgaggaagttcccagggctcccttttgatattcacaaggtcagcctccaagtgtagcttccctcccccttcttggggagggtgggaggccgccagnnnnnnnnnnnnnnnnnnnnnnnnnnnnnnnnnnnnnnnnnnnnnnnnnnnnnnnggaagacgaagcaggggcccgcggtggtctgtggcgagggggctgggctgtgcgtnactgacccttnctttctttccatgggacct

SEQ ID NO: 365821 - DNA, 1013 bp, Homo Sapiens
  misc_feature (112)..(128): n is a, c, g, or t
  misc_feature (184)..(266): n is a, c, g, or t
cccaaccccttgtgggttagggtttattttcggaccaaatggcttgaagcttcagggagtttggaagaccaaggcctgggacaaccatgggggaaaaaccttgtcctttccnnnnnnnnnnnnnnnnntttgggcatggggggcgggtgccctatagccccaggctacttggggagggtgagannnnnnnnnnnnnnnnnnnnnnnnnnnnnnnnnnnnnnnnnnnnnnnnnnnnnnnnnnnnnnnnnnnnnnnnnnnnnnnnnnnagaccccatctcaaaaaaaattaagcaggtatgagggccagaatgtcacaagacagagaggacttgaaagtagggaaaaaagggacaatatttacttttgtcaaaaagtaacaattactttttaaagaagtataacaattataggaaggagagagaaaaaatagttcaagggaagaggccaagttaaggaaaggtttttgtcttgttttgttattgttgatttaagacagagaagacctgcagctatgtagaggtggaggaaagaaactagtaaaaagagaaaccgaagactagaaattaaacagggtggaatatggtcttagatgggaaggaatgaggtcaagaacacaaagagaagcatgtcttagaaaagggggatgcatggctgaaaagaggtaagtcttgaaggtagatgggaagaagttttgggaatggtcatatctaataatttagttttttctctatgaaataggaggcacagtcaactttgacagttctaagaggcttgagaagaataaaacgtttgtaatacctcttccagggaacacaatagtaaaccacttaggaaccagtagaaggattgctaagcagtattaggaagcctgtgtagcatatggccctctcaaataggtagagatgtttttagatatttaagaggaattaacattaacaaaaccaagggacaaagccaagctcaagtcccataaaacatggatattttattccagctctaggaaatgggaaaaa

SEQ ID NO: 365822 - DNA, 454 bp, Homo Sapiens
  misc_feature (256)..(256): n is a, c, g, or t
agctccacagcgcccaggagagagaagacaccagcccacctgtcttgggtgggccatggactttcctgttcagctggagatgggcccagaggacctgtcacagtgtccggccctgcctccatccaggatacacaggctccacctcagagtgaccgtcactgtggagcagccaagcagtccctgggagccttaaacggagctgccaaagtgggaagaggcccacagttccctaaaacacccttccggcgggagaagngggggacccaaaccccacaccccagcgcccagtgcattggcagagccgggtgcaggaagtgctgcctcttgccgagacgtcggacagggcgggggttggggaactctcggctacagcatcttacccttgactgagaacttgggtcctgacttggctcactgaatctctcttgggagaatgcaaaatccttccacctga

SEQ ID NO: 365823 - DNA, 507 bp, Homo Sapiens
  misc_feature (210)..(250): n is a, c, g, or t
taataaaaataaatatgggcacacatgtattaatatacagcacgcatttacaagtttattttccagataaaattgtgctataagaacagctctaccaagacagtctgcaccatttccaagtctcagttaatttacagcaactgctgctttcggagatggctgtgaaaatatggaagttcctctcaagtaggccaagaaacagttctagannnnnnnnnnnnnnnnnnnnnnnnnnnnnnnnnnnnnnnnnagtgagcgtggtgactgcagaggttagtgctgtgaaaagctgggctaaatattctttctgtaaagtcaaacaggattccatcccctgtgaaataacacaaaatttcactctctaaaagcaacagcatgtaaactagaatgaaagaaggaaattatgtacgtatgcctaatattctttgtgaatgtctttcatttaactaaaattatattagaaaccagattgataaataaaaaattcaaagtagttttaattatcct

SEQ ID NO: 365824 - DNA, 252 bp, Homo Sapiens
cctgtagcatgtgatgcctgattaaactcattttcatttgcttttatttctaatatgggaacaatgagagtgaactctaaatataggttgtagtaataaaacatcattagcctaattattagaaaatgctaattaagtaccagcacatagaaacatgaaattgcttagtcattgtacctttgtcagcaattttgacagtcattaatgtttgtcataattttaaataaagtgtctgggtttcagaataccttc

SEQ ID NO: 365825 - DNA, 565 bp, Homo Sapiens
  misc_feature (391)..(473): n is a, c, g, or t
  misc_feature (531)..(531): n is a, c, g, or t
tctcttggtataaaataatgatagagcttttgtcttgaatattcttttgtgttttttaatattgtattacaattgagagcctagatttgtttgcttattgtgcatgtatttacagaccatgcaaaaatccatcatccgtagcctggccttattatccagtgggtctcacataggcatacatttagatcaactcagcaaatacttattgaacatttactgtatgtcgaccactaatgtaggggtgcaaagatgaaaaaagatcctgatgtggcccttagatgttcatagtatggataaattgaaggaaaaccagacactctagtttgtttttggcagaagagtaacttggtaggtcttttggacagaacaagagcaatacacattcaagtannnnnnnnnnnnnnnnnnnnnnnnnnnnnnnnnnnnnnnnnnnnnnnnnnnnnnnnnnnnnnnnnnnnnnnnnnnnnnnnnnnatgtatattccccccaccaagactctgtctcaaaaataagcaaataaataatttttanagctagcactcccagcctatggaccagctagcta

SEQ ID NO: 365826 - DNA, 1245 bp, Homo Sapiens
  misc_feature (164)..(174): n is a, c, g, or t
atgagagtgattttcagagtgattttatatattaaaataaatactttttcccctaatataagaaaaacctttctgaattagaaaaatgtgaaaattgcagctagtgtagtatacaaccactacaaatttactaagaagagaacaaaatacctagttctacgtgnnnnnnnnnnnaaaatttaggtacagaccctcatatttacaaaataaatttggcaaaaataatttctgtactcttgcttcttgtacccaatcactgaggctcctcagcaatatttttacatgctgtattttcccgaatcatataaataagatagcaatagacaattgggattcatgtctacctgtgttcttaatcaagaattgagagggcttggaggttgccattatgactctatcccattcttaagcccacaactcttaagagaagaagaaaaggaagcagtcaaaaagttgtaagaaaatgcactcaggaataacgcatgggcgatgattttttgatgaaccaaagtgatgagttcactgtgttctttgagcagctgtggtggttctttttgcaaagagaagaaacggtggattcacgcccattcggaagttcttggtggtgtgtaaggtctttttcacggtttctcctccagactctactctcttagggattgcaacactgtaagcacctgagcattcagctcaggcaccacacctggcccagatgaggtcaccgggctcagagcagcttccgggagttcagtactgaggaccgtcagatgctctcagggtggaggggaccaagacgtactctcagtgcacctctctcttacattgcttagatgttcccaaagtccatccaggttgttgtgctttgggatctgacgttcttgggtttgcacaataacggttaggatgttcacacccgggagaggaaacgccacaagaggtacacacagagaatcagaggatgaacacaggtgttcttgaaggcaggctcagagctaggtagctaccagcttatccgaacaggaaccttccagcagacctggtacctgaaccagaccatccataaaacctagtctctcacacactccacgtggcctcacaacatccaaaagtgttagcagcgaacatggcttcattcccagaaatggatgcctttaagaccaaacaaagaggccacttgtgcctgactccctccccttcccggccccacgacaggcagaccactcatgtccccactccccgccaccccga

SEQ ID NO: 365827 - DNA, 754 bp, Homo Sapiens
tttttttgacatagttatcaagtgtttattcagaaactatttaaaaaattacatgtgctgggatacatatgagactgtaacaacagtagccccatcttacagatatcctgtttgtcattatcatcattgcttgctgcccacagggataaagacattgtatagagacttgtacagtccatgatttggtcttctgaggtgccagtacacgtggatctgtacaaatgcaactgggtttggttaaacaatcgaaaatcggctacaatagtagtcaaatgaacatgtcattttggttcattaataaaaatactttcaaatattttctaataaaacccaaaacttgcaaacaattctctcggaatggcccaatcaattgccctattttttaaaatacattgggatacaatcagctctgttttcttaaaagaaaatgcagattcaattgggtgggttgcattggcttttaaagatttagccattaaattctccacattttgaatgattgaaaatgccttcctgataccacgtcagttttagaaatgcagatcctaatacagtgtgacacctctgcaaaatcataggctaaatagtgaaggaaagaggaatgctaaatgtgcatataaaaataggtgctacaataaaatatttgtatatttcatcaataagttattttgactaatcaattatggatcatatagctctgtaattttaatgatttgtccacatctatggtgatccctttacaggatcaccgacc

SEQ ID NO: 365828 - DNA, 1021 bp, Homo Sapiens
  misc_feature (197)..(252): n is a, c, g, or t
aatgataatgatttgtcagtgaaaaattgtttcagggcaggaacagggaatgaaatacgtagacattcctctatctcatggggaaactgctaggcaggtcatccagatgtattttctttggggagttgtgaattccttgtgtgtccagctatcactatgtaatgatattttacgttctcagtaatacatatcatcannnnnnnnnnnnnnnnnnnnnnnnnnnnnnnnnnnnnnnnnnnnnnnnnnnnnnnngtacacatgtatatatttatatgtataaaattaaagtgtggaacttgtagtttcctgtcgaagaagcttgcaaattgcaattccatcctagcaagtaaaaagctgaacagactgaaaaagcaagtctccttggatccataaaggaagcgaggtctcagagcaaaccactgtccccagaactggagaaaccggcaggagaatgcagcttcacaaggtaccggagcagaagccctgggcagcagcctctgcccgagcagtgacaggcagggaaacctgagctgtcatcaccagagtgccggaggcgcagagcgggcaagtctggaagttaaagatccacggggaaccatgtcgttgtcccctctcccttcaccttctgggagcttccccgagttctcacagtgaataatggagaaaaaatcccctcgtgcctcctgcagtgggaagaagaaaaagaccattttgaaagagactgccgcactctgctctttcttacgaggtcgcctcccctaaccccaccgcggctttatcagcgcctaacttgactggggggaagggaaactcccacgccaagcccactctagccattctccgggctcacttaaagttgggggccgggaaggaaagaccgaaaaccccttttgtgaatgtttcacctgaaagggtgcaaacctcaccaaaaactcctgaggccctgaattgtttgactttttgaggttaaacctttcccacccggaaaatttaagggccttccttttaaagaaagttgtct

SEQ ID NO: 365829 - DNA, 1351 bp, Homo Sapiens
  misc_feature (1243)..(1251): n is a, c, g, or t
agtaaggttgctccctttttatgttattaaccagtgtcagggagagacagcccattaaaggtgtatttttttcctaataatgtagccattgtaaatcattagaagcccattttaattttgttattatgaaagttatttatcccttagagttcatttgaaaccctcaatataatttgtttttgccaaaaatatgctgctcagtagtgagtcttgaaaattcctttgattttaagatttctaataagatctgagaattaatattttgtcagttgatgtcttatattttattttttataggagagacgataataaagacattgactcagagaaagaagctgccatggaagctgaaattaaagctgcccgagaaagggccattgtccctctggaggctcgaatgaagcagttcaaggacatgctgctagagagaggggtgtctgctttttcaacgtgggagaaggagttgcacaagatagtttttgatccccggtacttacttctcaatcctaaagagagaaaacaggtgtttgatcagtatgtaaagaccagggcagaggaagaacgcagggaaaagaaaaataaaataatgcaagccaaggaagatttcaaaaaaatgatggaagaagcaaaatttaatccaagagcaacttttagtgaatttgcagccaagcatgctaaagattcaagattcaaagcaattgaaaagatgaaagaccgagaagccttgtttaatgagtttgtggccgctgctaggaagaaagagaaagaagattccaagaccacaggtgagaagattaaatcggatttctttgaactattatctaatcatcacttggacagtcagtctccatggagcaaagtaaaagacaaagtacaaagtgatccacgttacaaagcagtagataagtcatccatgagagaaaaccttttcaaccagacattggaaaaataagccagaatttaaaactcccaaaaagaaaagggacttgaaaaggcagccccccacttgaggcaagccttcccaaaacgagaaaagggagggttctaaagggcccgttttcttatccaaccaaaggaaattagattcgagaggacaagaggccgcccccaacccagaaagaaaccttatccccaaattttcaaagctccttcttggtctggacattgggtccgcttccttccccagagagttccatggggccttgaaaaacctcctagaggaacccttcccgcaaaaagaatnnnnnnnnntggtgaaaatcttgggatttctctctttttgggaaaaagcaaaggggaaaacaagaaaaaccctctttttttatgtaaaacccatttttgaaaaccccct

SEQ ID NO: 365830 - DNA, 510 bp, Homo Sapiens
  misc_feature (40)..(40): n is a, c, g, or t
ggcatttaccatcttccatctcccccttcacttttttcangatatgtctacaaacagactccaatctcagtcgccactaaaaataagaacaaaacctaaaccttacagttctttcaaattattaaatcaatttattattcctttctttggcaaaggttccaaatttttactttatatttgtaattttactatttgcattcagtcccagcgcattaatctgaatctgctgtcctaaaatacactggtgaaaacattacttgtacaatctcctatcagaaaactgttcatctactcactgtagtgccctccttgaaatgtgtgtttgttcattcgaactaacaatatttggggatccctgtagtaaacactgtatgaattttacacagtctggccatcaagaaagatcacggagtatattctagatggggaggctactaagtgaataggaatcaccgacgctgggctgtttattaggtacagtaataaacataagtaaaggttgcagtgaaa

SEQ ID NO: 365831 - DNA, 435 bp, Homo Sapiens
cggcgggcgccctgtgagcggccccgatgtggcaggaggcgatgcggcgccgccgctacctgcgggaccgctccgaggaggcggcgggcggcggagacgggctgccgcggtcccgggactggctctacgagtcctactactgcatgagccagcagcacccgctcatcgtcttcctgctgctcatcgtcatgggctcctgcctcgccctgctcgccgtcttcttcgcgctcgggcctggaagttgaagaccatgtggcgctgtctaataacagttccaactgccctggcgattttctttgcgatatttatcctggtctgcatcgagtctgtgtttaagaagctgctgcgcctcttctcgttggtgatatggatatgccttgttgccatgggatacctgttgatgtgttttggaggcaccgtctctccctgggacca

SEQ ID NO: 365832 - DNA, 802 bp, Homo Sapiens
  misc_feature (209)..(209): n is a, c, g, or t
gagaaatactgacaccagttcacagactccattcctaccttcagggacccccagaaaggtgaaaggaccccaggttgtgtgaccagtcacctgatccagccccttcttgtcctggttctcccatcacagaggggccagggcagggcaggagtgggcctgagagcccatggctggtttccacatgcgccatgattaagctcctgcactcngcatttcagtaaagccatcttgtggtacagacagtgctgacatcagaaccttccgtggatccagcctcctacctccgggtacctgctgtgtgggagtcactcccctcccccagccctggatgctcctccagtcatcccagtagctcagggccagcccctgggatgtgtctaagaacatgagtggacaaatagatggactgcccagagcagggtttctgagacttcgctgcaggatatgtcatcgccctgcagaaaactacccccaccctaggaccccccgagttttggggtttgtaagaaattacatgtctcatttattttgaacaggtgaattttgcagtcaaattcttgtgttccattctagtacaaaaatagcattatcttttcaaaagtaacattttgaaattactcgtcaaaataaattgatgctctcaggaagtagctgtgtcaatcactgtatggtttatagatctgcgcttcacaggttaccccagcacggtccccggctgccgggcccagctgatcctatatgtaactctcccctgctcagggccaggtgccttgctgggagcttgcaaagccttcatacccgc

SEQ ID NO: 365833 - DNA, 545 bp, Homo Sapiens
cagtaaccaaggtaatgttttgtctcagcattttaaaaagactccacttaacatttatctcagaatcatgagcctctctctagttgacaattgtcattgttcccccagccccaaattgaaccatacatttattttccaaaacagaaattgtttctgtaaacatatccgaccttcaaaagaagtgtgaggttggatttttcccccttttatttgtcctaagattccaggaggctggcctcccagcccagatagctcagccacctcacctgcctatcattcctgcattcctactttgagggtctcatcatgcccactgggtgttgttcctaagaaactgattgattaaaaaatttcccaaagtgtcctgaagtgtctcttcaaatacatgttgatctgtggagttgattcctttccttctcttggttttagacaaatgtaaacaaagctctgatccttaaaattgctatgctgatagagtggtgagggctggaagcttgatcaagtcctgtttcttcttgacacagactgaataaaaattaaaagaa

SEQ ID NO: 365834 - DNA, 535 bp, Homo Sapiens
ttgattgctggttgagaataaatcatggagagttccaggcctggtgtaatccagatcggaatcaagttaggaagcagagctaaaagccaatctaggagcaattttaatgttgactgggtctgtcgagttcccgagacaccaataacttactgtggagaggagaattacagtttgtgctgaaatacaaggtttgtcgatagaaaaggaatgagggcaggtaaacgttaagtgatcgcctttagaaagccagggaagacttctttggttcgctaaaggagaaatgccctatagcatcttgtcatacaggaaagtcatatttggattttccaaaaagaagctgaggtatgtgcaagaatttgagttactcaaaaacaaagacggtgaactagtgtcctcctgtgcatgtaagcttggactggttggtactggctgcatccagggtccacggcgaagagtagcccaattcattggtgatgtctgcagctggcatagaggggagacacagagacacacatgcaactgcctaccccactcc

SEQ ID NO: 365835 - DNA, 209 bp, Homo Sapiens
gaaggacaagataccttaaagataagttttcgataaagaaaagccttcattttcctgggggaaatgaagcacttgatgccaaggacattagtagagggctagaaagattgcctgtgtgaaagacatatgctatatccaaataataaaacaaacgagatcctggggctcattcatgtgactttcaataaagtatgtagactgtctaataa

SEQ ID NO: 365836 - DNA, 468 bp, Homo Sapiens
  misc_feature (44)..(44): n is a, c, g, or t
  misc_feature (54)..(54): n is a, c, g, or t
  misc_feature (75)..(75): n is a, c, g, or t
aaggacccccccaagggggccctaaaacggggaatggccttggnaaaacccctnaagccccccctattggattanccccccctaccatatttatttaacaatttatccaggggtaaatgggtggtgcccttatgaaaagtataactcgatttccttgacctttgagcatgttttgtgtttcttgtgttttctaaaagaatattagatatggttaattgcattacatctaaaagatttaaaaaattgtgtgtatgctcaggttccccacacccatacccaccctaacccctgtcatttacattggtggcaactttaaatggtaaccaagcaaaagtacattttgataatgagtattgataatcctgaggaaaactagtgagtatatgggagccacctttgacctgtgccaaagcagtttctaatttcatttgctaactataaaataaagaactgagccaaaataatttg

SEQ ID NO: 365837 - DNA, 201 bp, Homo Sapiens
gtttgtttgtttaagtggaggtgggaggaggtagggaagaggtctgaatattaaaatatgtttatgttcatgtgttcataatacgttcctttttctctctgtgtgtgtataaaagtgccttgctcatgaatgcatttttgctattcacttcgaaaggaagcctttccccagcttggcagctgaataaaccaatagcttggt

SEQ ID NO: 365838 - DNA, 435 bp, Homo Sapiens
caagcaaatttattagagtttcagatgaatatatatttttgtaactggcaagtaaatgagtagaacagagctttttgcctaaaaatatttttataagtactcatttacatagtattcattattttaaatgacaaaatatcaaattggttctataaatagtaattgttttgaatatatccatacttaacatcatatgaaacccaaaatttaatgataaatttcaccgggatgtgttattataaaagtcatctttttttcctttgtaaaatatcccatgtaacatagcttccattactccatattttatgtatggttaaaattatcaaagtgcattatgtattttatattgtttatttttgtctgcatgaaagattggaatagtaaccgtgtatgataaatgttaataataataaagtgaaatgtagtatgaccaat

SEQ ID NO: 365839 - DNA, 485 bp, Homo Sapiens
  misc_feature (49)..(49): n is a, c, g, or t
  misc_feature (325)..(325): n is a, c, g, or t
aggtcagaggtcaactccgctcacccatgatggacagccaaaacaaacngccgcaggctcctgtacttatttcctgcgctgaccagtgaagcgccctttcattgtaaaacattgtgctttacctactaccctagccttgtctttaccgagggatgctagtgagtccaagtggtggaaaatatagactgcaaacaagtgcttgttgccccacacggcccagattcacttgaagcagaagttagcatcctgggccagtttgttctctcagaacccagaatctttgagggtaaggttatctgtctgatactgagcagaaacagaatgnatcctggagctttgctttctattgaaggcttttgacggtaataggtggtaacttggtaaaaggctgcctttactgtagctcacccagcatctcttttaccaaccagagagtgtgaaactagtttcatatattacctagttattctttcaaaacaaaacaa

SEQ ID NO: 365840 - DNA, 467 bp, Homo Sapiens
  misc_feature (393)..(419): n is a, c, g, or t
  misc_feature (426)..(426): n is a, c, g, or t
aagatacaaaatgcgtgttatcatccaggcttagttggagtatttgcatttttatttttatcaaaacaaatataattggtggggactggccagtaataatgtgtggcgtctttaagccaagagtaatttttaaattaaaaatgaaaattttaagaggtagcccattaaacaagctactgagttggagaattaggggatgactgtggtggtttgtcgctaaggaggcaacagtagggtccaggcggcggggcacgtagagcagttagcatgatccatggttattccttactcatgaacagtgtcggcgcacctcattatctgtgcatttgtttttcctgggcagtcctgttcagccagttaatccaccagctcttagggaagttaaatacagannnnnnnnnnnnnnnnnnnnnnnnnnnaaaagantttataccacatcttgttaaaagtccctggaatgtgtgtgt

SEQ ID NO: 365841 - DNA, 708 bp, Homo Sapiens
  misc_feature (623)..(623): n is a, c, g, or t
  misc_feature (631)..(631): n is a, c, g, or t
  misc_feature (639)..(639): n is a, c, g, or t
ggaagaggagccactgatggagatgcggctccgggatgcgcctcagcacttctatgcagcactgctgcagctgggcctcaagtacctctttatccttggtattcagattctggcctgtgccttggcagcctccatctttcgcaggcatctcatggtctggaaagtgtttgcccctaagttcatatttgaggctgtgggcttcattgtgagcagcgtgggacttctcctgggcatagctttggtgatgagagtggatggtgctgtgagctcctggttcaggcagctatttctggcccagcagaggtagcctagtctgtgattactggcacttggctacagagagtgctggagaacagtgtagcctggcctgtacaggtactggatgatctgcaagacaggctcagccatactcttactatcatgcagccaggggccgctgacatctaggacttcattattctataattcaggaccacagtggagtatgatccctaactcctgatttggatgcatctgagggacaaggggggcggtctccgaagtggaataaaataggccgggcgtggtgacttgcacctataatcccagcactttggaggcagagggtggaggatttgcttggncccaggangttaaagnccagcctgtgaacataacaagccccgtctctgggtttaaaaaaaagtgtaataaaatgataatataatt

SEQ ID NO: 365842 - DNA, 755 bp, Homo Sapiens
ggacaatcgacctatttgtctggtcattatcttccacaattgacaaacacatacaaacaagtgcttagctctgtacaaagacagaccttacaggagagtgcacactaaagcactagtgtttaaattattttccataatgaaaaaaggacatttctcacattggagttatgtctgtacttctgtcacatgactcacatcacccaagaacatgctaagtctctgtaaattcagtttctattagaaaaaccacaggaatacacattactgtacatacacatgccctgatgcaagctaagataaacactgggatgtggcccttatcaaatcttagagttagcaggataggaagagttgatcttaaagattagaagggaaagaacacagaaacgacctacattccttgggaagggactctgtggttccttccctgaaggactcaattccacttgctccttacacttaactgtcactgatggtcctatcttttcttgaagatattttctatacaatattccctatagtgatccccaaagaaaattcataaatctgattaatggcagtaataactgtgggcatcttctgctaaagtcaccatcattgatgggtccttggtccccaaacctgtgtctcatttttcctttccaaccgtatcttcagttagccttcacaaagatgcaagctttaaaggagctaattagaaacaatgagaaggagaaaagttacaatcattgccttcatcgtgcaaaatcttgccc

SEQ ID NO: 365843 - DNA, 969 bp, Homo Sapiens
  misc_feature (740)..(740): n is a, c, g, or t
tgggtggcgaattcggcacgaggcctgtggccactaaagaggcctccatcaccttccccttcatctttactgatgtcaaggatgccgttgctgaggtggctgaaggcaacgagaaggaaggaggcggccagggcctcgtcccagtgggtcacgacgccctgccagagaccaatgctggtggcctcccctcccaggtcaagggctcccttgccctccccttccctgctgatgtccaaggcaaagatgcctttactgacatcactgaaggcaaagagaaggaaggtggcctggtcaccgcgggtcacgacgcccctctggaggccaatgccgagggccccatcacggttagtgagggctgcatcaccatccccttcgcagtcttcgatgtcataaagcgcaagggcggtggccacgttgcctacggcccccagggcaatggctgcttctcccaaggctattaccagaagaggcagctgaggtccaggttccacaaggcccgctgtgggtgccgccgggaggaagacgagcgccctggccgtgcctgccgtaggccgcacgccgagccctacgaggacttctggatctgggtgtccatgaccgtgtgcgtcttctggctgatgtgcatgtgtcggctgaaccccgggatctacccgcagcaagtgtgacgccccgaagttcaggcaacccttcgcctctgggaccccgcctcgccctctgagacaccccccaaccccgccttntgagatgcccgcccccgcctccggagaccccgcctccacctccgagacccctttctccgagaccccgccccccgcctcagagaccccgcctcacctttgagaccccgcccccgccagcagctcagcccctcctgtctcttgcccctggttttgtgggtctgccctgagctgtgcctgtgtgctccagcctcttcctatgtgtgtaacttcaataaaaccaagcaaagcc

SEQ ID NO: 365844 - DNA, 968 bp, Homo Sapiens
  misc_feature (838)..(838): n is a, c, g, or t
  misc_feature (850)..(850): n is a, c, g, or t
  misc_feature (878)..(878): n is a, c, g, or t
  misc_feature (927)..(927): n is a, c, g, or t
agcggggggcttggcgggagcttccagtcgctcgagagcggagagcggcaccatggccccgcgggggcggcggcggccgcggcctcacaggtctgagagcgcaagacgttcaaagaacactttagaaagaacacattccatgaaagataaagctggtcaaaagtgcaagcctattgacgtgtttgactttcctgataattctgatgtctcaagcattggcaggctgggtgaaaatgagaaagatgaagaaacttatgagacctttgatcctcctttacatagcacagctatatatgctgatgaagaagaattctccaaacattgtggactgtctctctcttcaactcctccaggaaaagaagcaaaaagaagttcagacacttctggaaatgaagcaagtgaaatcgaatctgtaaaaattagtgcaaaaaagccaggaagaaagctcaggcccattagtgatgactctgaaagcattgaagaaagtgatacaaggagaaaagttaaatcagcagagaaaataagtacacaacgtcatgaggttattcgaaccacagcgtcttcagaactttcagagaaaccagctgagtctgtcacttctaaaaagacaggaccccttagtgcccagccctctgttgaaaaagagaacttggcaatagaaagtcaatctgaaaactcagaaaaaagggaagatatctcatgacaaaaggaagaaatcaagaagtaaagccataggtccagatacttctgacattgtgcacatttggtgtccagaaggaatgaaaaccagtgacatccaggagttggatattgttttgcctgaatttgagaaaacccncctagagcatcnaccaagaataggatctaaagtttgttangcagccatcgccacattttatgttatgtttaagaccattctccaatgcnttaagaagccagtgttgccaatctgaaaggaagatgctagt

SEQ ID NO: 365845 - DNA, 666 bp, Homo Sapiens
ccctgtgggtgtctgcaaggggatttgtgtgatgctcacattaatgagatccatggcctcctctctgggcagtgttgctgcaaagtgtgtgtatggggtcagcactgtgactcctactggcctggtcactatggcctgagctccacccaacctcagagctgccagtgtgagtgacactcagggtgggcccccgcctccatgtcctcctggctctgcccccagttactgccctgataacacacgcacctacccacctcactgcagttccattagcaagctaagagccctaagccttcgcctgcaggtgtgaccccagggttcaggtccctggtactcatgtctgttatccctccagtggtacctgtcactgcaaatgctttgtctctgggcaggacggtagccattgtctggtgaggcttggcccacctttctgatttaaaccttgacctttggcactgagcttccttggagctatagccttataatgagtataaggctatagttatcatgactgtggactgagccttgtacttgggtgggtgccgctcactgacttggtcaccagggtcagcatcactttggctagctgaacctgtatatgccctcaggtgggagtttcggaaacaaaagggaaattgattaaacttgtattatacactggaaaaa

SEQ ID NO: 365846 - DNA, 261 bp, Homo Sapiens
cccctcggttaactactttttaattgcaattctaggtaattgtgcatcgtgatgtgattgcttggctattgtctgaatatttccttttaattttttaattaaagactaatgctttgattggatttgccagttcaccggacagtgattaaaactatgtaatgaatataatcggtttcagtgcaactggatggtctgcttttaaatgtgacttaatctgactgcagtaactagtacagttcaataaagggaatccatgcgaaa

SEQ ID NO: 365847 - DNA, 801 bp, Homo Sapiens
agccatcaacacacgacgacatttgcttatgttttgacagtatgataccatctcataaagcttctgctgtcccacattttccatcaccaccattgaacttattctgaatatatctccaaagccgtagtacaaaatacagtctgctttcatgtcatctcgacctgcacgtccactctcttggtaataattttccatggatttactcattgaatgatggataacaaacctcacatctggcttattcaattcccataccaaatgcaacagttgccactactacctgaatttcattggctgaccattttctatgaactgtggtcttatcttctggctccaaattggcatggtaagcacctgcatgaattcccagattctgcaaactaaccgtaacttgttcagagtctttctgagaaaaacaatatatgattcctgattgccctttgtatctcccattaatgagctttacaatatcctcaataaaatcttcagtgtttgagggcttctgccgaacctcataatatagatttggcctattaaaagaagctgtaaaagtaaaacacttttcaatgcacaaaattttctgagcatccgtccaaacgtgatttgttgcagttgcagtcagcccaattagtgatgcgttagggaactgccgctttaagataccaagtgccttataatcaggtctgaaatcatgtccccactgactacagcagtgaacttcatccacagcaattcgagtaaatctccttgcttcataggctttctctagtcttgacataaacattttgctttttgcatttt

SEQ ID NO: 365848 - DNA, 752 bp, Homo Sapiens
  misc_feature (233)..(275): n is a, c, g, or t
ccgactttcgggtttcacggtgaagaagtactaacgcattgatctcagaggcggaggcctgcacttgaccatgtaggtggcagagatcgtgggctggctgtgtccacgtgggagttcacttagcgactcagatatctcaaccaatggctgctttgttgtctgacaagggagaaggtgccacttccgttcagattcattttgctaatctctccactccctgttcagttggttcnnnnnnnnnnnnnnnnnnnnnnnnnnnnnnnnnnnnnnnnnnncctttaaagaggatttctgtctctgggaccctcgctgcacctacccctcccattgcaaagccaacttggactgggaagggcccttcaggtcaccaaacatccacctggagcggcgagctagaggcctgttggcttgtgaaatgagccctcctgccacacggggcctctcccaaaggctcatcccttggccgcccccttcctaaacacaaggatccccagctggactccccaccccctggcttccccacctctccaggtgtcaaaggtgaaccgagtccagtattagctgaatgtcatttcgtacaccacagctcagtcagcccatggccttcgtgaactttgctccaacacactgatgtgtgggcttcccacagcaggactgacttccccctttctgttgtttgcacatgcccctcttactgtactgtcaatagatatttttgagatttatttttaaataaatattcaacttgcaaa

SEQ ID NO: 365849 - DNA, 1450 bp, Homo Sapiens
  misc_feature (69)..(105): n is a, c, g, or t
  misc_feature (1241)..(1241): n is a, c, g, or t
  misc_feature (1281)..(1282): n is a, c, g, or t
  misc_feature (1299)..(1299): n is a, c, g, or t
  misc_feature (1307)..(1308): n is a, c, g, or t
aaacccacacggaactggactgatagactcactatagggcgaaccggagcttaatcgcggtggcggcgnnnnnnnnnnnnnnnnnnnnnnnnnnnnnnnnnnnnnatcaggccaaatcggccgagctcgaattcgtcgagagcgggtcctggaagtgtggctgcattggatagcatgactatctatccgcccgctctgattcataacagcatacggtgcaaatcaaatcgaaatgctaaagtttcccatttatttggtgttggttaaccaggaggctaccagcagacctgaaaatagcaacaccttgttaggatgttaggaagtcagctcccttcccaggatgttggaaccattaaacgagggttttctttctagaatctctggtctgctgctgtgcagatggacctgccggcactgctgtcagaagtgctacgagtccagctgttgccagtcaagtgaggatgaagttgaaattctgggacctttccctgctcagacccctccctggctgatggccagccggagcagtgacaaggatggtgactctgtccacacggccagcgaagtcccgctgaccccacggaccaattccccggatggaagacgctcgtcctcagacacatccaagtctacatacagcctgacgcggaggatttcgagtcttgagtcaagacgtcccagctctccactcatcgatattaaacccatcgagtttggcgttctcagcgccaagaaggagcccatccaaccttcggtgctcagacggacctataaccccgacgactatttcaggaagttcgaaccccacctgtactccctcgactccaacagcgacgatgtggactctctgacagacgaggagatcctgtccaagtaccagctgggcatgctgcacttcagcaactcagtaacgaccttgctgcacaaacacctcaccgtgcggcgtgatcgaggccagggacctgccacctcccatctcccacgatggctcgcgccaggacatggcgcactccaacccctacgtcaagatctgtctcctgccagaccagaagaactcaaagcagaccggggtcaaacgcaagacccagaagcccgtgtttgaggagcgctacaccttcgagatccccttcctggaggcccagaagaggaccctgctcctgaccgtggtggattttgataagttctcccgccactgtgtcattggggaaagtttctgtgccctttgtggtgaagttgaaccntggtcaaggggcggggcacctggttggaaaaggcggctgnnattcccaggttcctcanaaatgaanntgggagcctggggggaaacctgctttctgttcactggaattatcctccccaaggtgctgggcaagaactggaaatgtttggatggtccattccggaggccaaaaccaacctttcctccaaaaacagaaagggggaacccccc

SEQ ID NO: 365850 - DNA, 332 bp, Homo Sapiens
  misc_feature (12)..(12): n is a, c, g, or t
  misc_feature (25)..(25): n is a, c, g, or t
atgtgtctgagnacgagcgtcttcnatccggggaattggtccgtggggtcagcgggacttcgctggccgtgtggacagagtcaccatccttgtcactgctccggctggccatcctataggaagggaagaggtctcagtagctgtccaggaatccccggggactggcatctctgtcccttgggggttaagacccacgatgaaaccgctctcagactcattttatgcaacatggaataatgcaaatttgacagtgtggtgtccttaaactctcaacaacgtcttgctttttgcacaaaatgtgaaatgatatgaagaaatattccccaatttag

SEQ ID NO: 365851 - DNA, 719 bp, Homo Sapiens
gggagtttctggcgcgaacttccgccgttccgaagttgcacggtgaattggcgctatgtctggggacagcagcggccgcgggccagagggccggggccggggccgcgacccgcatcgggatcgcacccgctcccgctcccgctcgcggtcccctttgtcgcccaggtcccgccgcggctctgcgcgggagcgcagagaggccccagagcgcccgagcctggaggacacagagccgtcggattccggggacgagatgatggacccggccagcttggaggcggaggccgaccaaggcctgtgccgccagatccgccatcagtaccgggcgctcatcaactccgtccaacaaaaccgtgaggacatactgaatgccggtgacaaattaacagaggtccttgaagaggctaacactctgtttaatgaagtgtcccgagcaagagaagcagtcctggatgcccactttcttgttttggcttcagatttgggcaaagagaaagcaaagcagctgcgctcagacctgagctcctttgacatgttaagatatgttgaaactctactcacacatatgggtgtaaatccgctagaagctgaagaactcatccgtgatgaagatagtcctgattttgaattcatagtctatgactcctggaagataacaggcagaacagcagaaaacacctttaataaaaccccatacattccactttctgttgggttca

SEQ ID NO: 365852 - DNA, 420 bp, Homo Sapiens
ccatatttaaaaatatctcaaggtttctgttcattatgaaacatcaatatgttttctaccatttgtgaagaaatgaattttccagtttcaagtacctattcaaaattttattaaaaaccagcaaattaattttaatctctagccataaaaacataagtaatagtaagctcctaagcttggacaaaggctggattctcttcactataactgagtggtaatttaaagacaacaatttaatgtcactaattttcaaaattaaatagtttaagctcaatttaattttgctagatatttaacaaaacatacggctcaacctcataacctatatgtgtgtatgtctacatctgtgtatatatcataggatttgagaatcttaacacatgtataaataagtatatataaactccaattttaaatttt

SEQ ID NO: 365853 - DNA, 845 bp, Homo Sapiens
  misc_feature (386)..(406): n is a, c, g, or t
gaaatggactcaggatgcttagcggtttaaaacaaacctgtagataaatcacttgagtgacatagttgcgcaaagatgttaagtttcttaagaaaccttttaataactgagtttagcaaaaagaataaaactatatagctcaatttatttaaaaaaaatctttttgcatgtgtgatgttatcattggcttcatttctttacccaaggtatgtctgttttgccataaatcagcagagtcatttcattctgggtgatcctgacacaccattgctatgttagatttgaaatgacatctctgttaaaagaatcttctatggaaataatggtgccctgcaaaatcttcctctgaactcacaggttagggatcacacaacttacttaatcgnnnnnnnnnnnnnnnnnnnnnccttatatgtcaatggcccatgtcctccgggaaaattagaaaagcaaaatgattacaaagtgctgttagatttcttgtgctgggccagccaagtagaagtggacttgacttggacctttaactattttattacagattggacatttgctgttcagatgttttttaacagagggattatctcagaatcctgtgacctccaggttgttttataatctatttttctctatttaacattcctcagatagataggcaaataggacattccttctgtgtcacagaagtatcgtggtagtggcagtctacagtttatatgattcattgtaactatgagataaagaacaaccagtcatgtggccaaaaggattagatttgattggatgttcacttggagtttactttttgtacatacaagataaaataaatattggatttgtaaaat

SEQ ID NO: 365854 - DNA, 826 bp, Homo Sapiens
gccgcgccggagcggggagggtgttgggggcaggtggagccgggagggcccagctgagaagttcaggttgggggctcagagggcactgcggctaggagcccgtcaaagcctgtcgcccaccggggcgagggcaggtgggagcgcctggccgtgcgtcgcgcgctggttggccagctgacgccccagtgcgcatgcgcgtccgaacagccctgcgggcggagcgactgtcctcccttctggtgtactgggtgggaggtggaactagtcggacaaagccctcgcgtcggacccttgccagaactcaattaatggatgcctcgaagttgacgtacatatatattcagaaatgttttgccacctgagacctatgaggaggttatgtctagagaagatatttccacactggtttcccttttcaagagctttatcgggagctgaagcagtcaatgccttgaggcctttctattttgcagtacatccagatttctttggacagcaccccgtagaaagggatgatacatggaagagttttcaatgccctagtgatttttccttatgatgcatgctgctggaccactcccctacaacatcagttaatgtgtgctccaggaatacaaactgatatgaaaaatgacttatggtagatgtagttaagacagtcaatatattttaacattaagaaaaatacaggtcaggtccttccttatccatgggctttgacatccatgggattcaagcagactcagaactggaccataattcgggggaaacaagatacatctgtacgtacacattgaacaacttctctttcttgtcataattcctg

SEQ ID NO: 365855 - DNA, 800 bp, Homo Sapiens
ggggtcctccctcctggtgtactgggtgggaggtggaactagtcggacaaagccctcgcgtcggacccttgccagaactcaattaatggatgcctcgaagttgacgtacatatatattcagaaatgttttgccacctgagacctatgaggaggttatgtctagagaagatatttccacactggtttcccttttcaagagctttatcgggagctgaagcagtcaatgccttgaggcctttctattttgcagtacatccagatttctttggacagcaccccgtagaaagggaaatcaatgaaaattctcttaaaaggttaagtgtctacctagaaaacctccagaaaccaggcttcaagtctttgaaaccaactcagcttacattttatgtaagagaaacagaccagagttcctccgatggccaggaaccttttagtacttccgtttatctgttgaacatatccaaagcttgaatactaatatgcatacccagcctctcaaagaagctaaaaggatgcatgacaggcccatcaaatgggacaagtcttattactcctttactgggattcaaggaccctgactgaaagaccttgaacaagtctcgagagtgggaaacactctcacgtatgtaaaagtttttatctaactaaactgtatttgcagcttgtgtttatgaccctgatttattggggatggcaaaaaaatttttttattaataaaaagtgtagttccccttttaaaattaaaacccaaattttccaggaaaagaaatacctatcaggcctagtttaatcccgttaat

SEQ ID NO: 365856 - DNA, 412 bp, Homo Sapiens
tctctgggaaaggagatgggagataggaatgagaaacgtctgtgtgctgtatgccctctttaatctttctaaatacctatcttatacatgtgtaagtattcagaaatcagtaaatatttaataatagaaaagtatgtatttctatgctgtatattacaaaaccaacttctaatttatatgtaattcttggtatctgaaatttttatcaaacaatcagtggtgggttcaatgatacatatcagtattatcattttatggcttcatagaattaaaaaatatggatctttcataatttatgtaatcaacctcctctgatggatgtttagcttttttccaactttcagtgtaataataatatttcaaaggagcaaacttctaataaatgtctgcattgttctactacttcggtaaa

SEQ ID NO: 365857 - DNA, 586 bp, Homo Sapiens
  misc_feature (239)..(239): n is a, c, g, or t
gggcattgacgtgcttcagcaccggcttcagggagctgtcgtagcgcacgctcaggttctggatctggatcttcccttggtctggccagttctttgggatcagcgatggtgccaggagcccctcgtagctctctgcctcggttttcaggagcccatggatgcgcttcacagcccccagctggagctccatgtctgccaggttcctcaccatccagttgaggtagttggagaccatttangggcgtaaggtaaggcccaggcccaccaggccagcagagagctccctgtgcagggagttggagatggaggtcaccgctgcgatgagcaccacacatgcaccgatgtactccattcggacttccagccatctgttggcagctgtgaggaagagggaagcaatgttgttggagtctgtgtattcgagaagcttctgctggaaccgggcctcatacctgaaggcccggatggtggtgagtccttctacggtttcggccaagtgtgagagaagtggaagctgggtggtgtcatccagctgctgcaggtcctggacgccacccggaagtacttctggatgaagtagcacacg

SEQ ID NO: 365858 - DNA, 479 bp, Homo Sapiens
  misc_feature (39)..(39): n is a, c, g, or t
  misc_feature (41)..(41): n is a, c, g, or t
  misc_feature (54)..(54): n is a, c, g, or t
  misc_feature (452)..(452): n is a, c, g, or t
cagaatcccgatctactgtccaggggagatgagaatcantnacgtgcttcagcncggcttcagggagctgtcgtagcgcacgctcaggttctggatctggatcttcccttggtctggccagttctttgggatcagcgatggtgctgggggccgggctgggctcagcaccaggcatgggccacagctagtatccgaaagtgccaccccatccccaggctcccttgtggcccccaacccagacacactcctccttggactcttccccacccctctccctgagcctctcacccaggagcccctcgtagctctctgcctcggttttcaggagcccatggatgcgcttcacagcccccagctgggagctccatgtctgccagggttcctcaccatccagttgaggtagttgggagacctgtggggaagcaagccagtgggcaacactccatggtcgnttaagttctgtcctcagccaccagaat

SEQ ID NO: 365859 - DNA, 768 bp, Homo Sapiens
tggaccggtccggaattcctgcgatgatgagggtcctcagcagagactaccccaaccaggaggccatcaccgccatcctcccccacctccttttcaaaatcagcaacgaccaccccgacgaggacgccgtcaactctctctaccccgatttccttctgtcagcctgcaggaagcatcatcattcttccggagggacagaccagcaagacatccccaggagcaaccactctggtaatctagaattcagtggcaggtatgattccagttcattctccattaaatgcccaaacttgctaccattcccaaactttatcgtgttcacaaatcaattggaaatatgttgaaattacataatcctggaccccatttctaaagatttgtattcagatattcttggataaggttgcaagtccttgtatttttaacaagtggttcaaagaattcttatcttttgaaatactgacctccccaacttttttcttaagatgacttgtctcattaaaatgagttggtaatcaggaagtcgcggtgtgctctccctttggtgctctgcctcctgtctttgagtctgccttctcaaacccaaggactctccatctcaggtttctctcaggtttcccgccagaggactctttgctcagtcctgcctcacactagcctctcaggtccagtgtccctgctaaaatgatacttgaaacttggatgctcttatatcttatctaaatcctcaaaaataccttattttgaaattaccccatgcttccaggg

SEQ ID NO: 365860 - DNA, 788 bp, Homo Sapiens
  misc_feature (588)..(588): n is a, c, g, or t
gggaacgcagagttgggagcaactccagagcctccttcaagatgctgctggtcctgctctcagtggtccttctggctctgagctcagctcagagcacagataatgatgtgaactatgaagactttactttcaccataccagatgtagaggactcaagtcagagaccagatcagggaccccagagacctcctcctgaaggactcctacctagaccccctggtgatagtggtaaccaagatgatggtcctcagcagagaccaccaaaaccaggaggccatcaccgccatcctcccccacctccttttcaaaatcagcaacgaccaccccgacgaggacaccgtcaactctctctaccccgatttccttctgtcagcctgcaggaagcatcatcattcttccggagggacagaccagcaagacatccccaggagcaaccactctggtaatctagaattcagtggcagaaaataaataagaagataacttccttcagaaagccatgacattgaaataatgtggtcataactctttcttcagtataccaataaaatattaatagcatgcaaaacaaggaaacggagaaagagnaaaccttgtcggcccccctcgccctcgaaaaactttctagacccatccttttgggcccccgggccccggtagggtaagttgaaacatgttccttagcctttttcctaaggaaaatcctgggccaaggactaggggcctggggaattcctcccccaaataaaaaaacccccccggggcgggcaacccgaagccttttcttg

SEQ ID NO: 365861 - DNA, 1663 bp, Homo Sapiens
ggaaaatgggctcctgcgcgcgcgcactcgccgagtcttccggcgggtccgcccaggggcgttcctgctccgcttgaggagaagcgccaagtgcgcatggggacgctatagcaattcgtttgctgtccttcctctccttcgaagatgacaaggcctaccatcgtttcttcctgcctttgggccgtcaggcagttggttgggacccgctccaaccctcggttcttcctgcaatacagtggatacaatttgtcatggctactctgagtgttataggttcaagttcacttattgcctatgctgtattccataatatacagaaatctccagagataagaccacttttttatctgagcttctgtgacctgctcctgggactttgctggctcacggagacacttctctatggagcttcagtagcaaataaggacatcatctgctataacctacaagcagttggacagatattctacatttcctcatttctctacaccgtcaattacatctggtatttgtacacagagctgaggatgaaacacacccagagtggacagagcacatctccactggtgatagattatacttgtcgagtttgtcaaatggcctttgttttctcaagcctgatacctctgctattgatgacacctgtattctgtctgggaaatactagtgaatgtttccaaaacttcagtcagagccacaagtgtatcttgatgcactcaccaccatcagccatggctgaacttccaccttctgccaacacatctgtctgtagcacactttatttttatggtatcgccattttcctgggcagctttgtactcagcctccttaccattatggtcttacttatccgagcccagacattgtataagaagtttgtgaagtcaactggctttctggggagtgaacagtgggcagtgattcacattgtggaccaacgggtgcgcttctacccagtggccttcttttgctgctggggcccagacgtgtgtggaggaacctgatacttcagacagtcagggctgacaagaaggtttacactttgtgtattcacagctgtcattctaatgatcataaagctgactaagccacaggacaccaagcttcacatggccctttatgttctccaggctctaacggcaacatctcagggtctactcaactgtggagtatatggctggacgcagcacaaattccaccaactaaagcaggaggctcggcgtgatgcagatacccagacaccattattatgctcacagaagagattctatagcaggggcttaaattcactggaatccaccctgacttttcctgccagtacttctaccattttttgaaactacaatactggaacatccaggaactggagttattctacgctaatggattggaaagaatgttgggaaaggacatcttaaatcttttctaactatgccctaaactgcagaactcaaaggaaatatagtgccattgttagtagtcattctagatgaattgggagtatctctccagttattcccagattcactagtgatccttaaagtctctattcagggagaggaagacactttccatctcagagatagactcgtgttaccttgatggatattggatttgtctaagtctcttctagaaaaaataaattctagattattaaaaaaaa

SEQ ID NO: 365862 - DNA, 550 bp, Homo Sapiens
  misc_feature (368)..(368): n is a, c, g, or t
  misc_feature (483)..(483): n is a, c, g, or t
  misc_feature (522)..(522): n is a, c, g, or t
cccaagtgcgcatggggacgctatagcaattcgtttgctgtccttcctctccttcgaagatgacaaggcctaccatcgtttcttcctgcctttgggccgtcagggtttggttgggacccgctccaaccctcggtacagagcaggattcagtataggaggagcccagctgggataggggtggagccacctgttcactgcttcaggattcagaacctgactaggaaggatcggctgctcaagggtagctgggactgaagtccctatgacctttccactagacgctagcattctggaggacagttgggacttgttttctctcccagggtttcttttttctttaaactcctggccctcaagtgatcgtcttngcctcggcctcttcaaagtgtcgggattacaggttcttcctgcaatacagtgggatacaatttgtcatgggtactctgagtgtttatagggtcaagttcaattatttgcccatgntgtaattcctaatttacaggaattttccagaggtaaggnccattttttatctgaggttctgtgaccc

SEQ ID NO: 365863 - DNA, 1244 bp, Homo Sapiens
  misc_feature (1062)..(1078): n is a, c, g, or t
gggccacaagaacaaagaaataaaaaactgcggcagataaaatctgaacagttgtgtaatgaagaaaaggaacaattggacccgaaaccccaagtgtcagggagacccccagtcatcaagcctgaggtggactcaactttttgccacaattatgtgtttcccatacaaacactggactgcaaaaggaaagagttgaaaaaagtgccaaacaacatccctccagatattgttaaacttgacttgtcatacaataaaatcaaccaacttcgacccaaggaatttgaagatgttcatgagctgaagaaattaaacctcagcagcaatggcattgaattcatcgatcctgccgcttttttagggctcacacatttagaagaattagatttatcaaacaacagtctgcaaaactttgactatggcgtattagaagacttgtattttttgaaactcttgtggctcagagataacccttggagatgtgactacaacattcactacctctactactggttaaagcaccactacaatgtccattttaatggcctggaatgcaaaacgcctgaagaatacaaaggatggtctgtgggaaaatatattagaagttactatgaagaatgccccaaagacaagttaccagcatatcctgagtcatttgaccaagacacagaagatgatgaatgggaaaaaaaacatagagatcacaccgcaaagaagcaaagcgtaataattacctatagtaggataaggtaagaaattgttcctgattgtaattagttttgtattttcctatactggtgttagaaaacatatgtttacatttgattaactgtgttgccctatttatgcagggtaatcccagctaaaggaagctttactttaattataagtattattgtgactattatagtaatcaagagaatgctatcatcctgcttgcctgtccatttgtggaacagcatctggtgatatgcaattccacactggtaacctgcagcagttgggtcctaatgatggcattagactttcataatgtcctgtataaatgtttttactgcttttagnnnnnnnnnnnnnnnnncttggttcatgtttacatgcctttcgatagctgtttgtgcatacttaaagatgatcaaaatgattttatacaaatgctgttataataaaatgtcattccctacccctctactttttttcagtaagtcatcttatacattaaataaatttccatttctgaaaaaaaa

SEQ ID NO: 365864 - DNA, 646 bp, Homo Sapiens
  misc_feature (24)..(24): n is a, c, g, or t
tggccatgctcaccagccaggccngtagtgctcagtttgaagttctcatcgggaaagcgctcaccgtagatgctctttcctgggaaaaagacagagcaggtcaggcgcgctggattgcgccaaaccaagcagacattcggggccaggactgagggggcttaacctgtcctctgtgccaggctaggctggagtggactacaaggacataaaagcagcgtccttcctatcttctggcctcagagccaagccatgctgactgaggccaagtggggcatcaggccaggctgatgtggtgaacagctcacagaaggattactttgagaagatagttttgtggcttttaaataaggcgcatgttatcagctccccttagctatggcccaggcctgccacggagggactttggtggagggaagtgccgtgcaggatgcaggggagtcaacagggtcggaactctccagaaaaggaggactgctgtggctgaccagcctgttttcctatgagcacaaaagacacaggcatagctgcagaggagaaagcagccagagatgtgtggggaggggcagaaaagaggggctgccccttggattctggagagtcaaagcctcttaacaaggaatgaacaggaataaaagacagctgtgag

SEQ ID NO: 365865 - DNA, 417 bp, Homo Sapiens
  misc_feature (254)..(282): n is a, c, g, or t
  misc_feature (348)..(358): n is a, c, g, or t
gggtttgtaccgtgcagttcttgctacagttgttaaggagttagggctatgtcccatcaggaggcatctgtaggattttaatctccaaggaattgtgggtgagtcgcaaatagtttgctcagaagtaggcagagtcaaaaaagcaacttcaagtaattgattcctttgtccaaaagagttaaaacattaaagtatatgcgggacttattttgtaatattttagggttttgaaaaaataaaatatggaaatcaannnnnnnnnnnnnnnnnnnnnnnnnnnnnccccccctttccagatgcctcctgattgacctagtacactgggttaaaagggaattaaaaacattnnnnnnnnnnngttcactggttttgattcatctcactccttttgcctggagatcaggccaaacatcaagc

SEQ ID NO: 365866 - DNA, 906 bp, Homo Sapiens
  misc_feature (1)..(1): n is a, c, g, or t
  misc_feature (284)..(284): n is a, c, g, or t
  misc_feature (405)..(405): n is a, c, g, or t
  misc_feature (452)..(452): n is a, c, g, or t
ngcttaaaaaataactgttagaaaacaaacatgtatgtgcataacatgtgtacatatatataaatcaagacttcatggaaattggcatcttgggcactcagtcagtaaaagaatagtgttctcttctgaattattcattgtcttactggtagcttagctttaaggtcctcccccttctagacttttaatttcaagtataaatttctaattttcatagaaaagccttttttaaacattcctatattaggccaaaaataaaatcctagaataaaattattccccanattattcttataaaatcactcatcccaatcataagacccagccagtatttttactacatttcctctcctcatctgtttgtattggtttggtttggtttgatgagtggagacagcctaatangatttagtatttactccataggcctgacagtctaggggaaaaaaaanttatcacttgggtatcttatgaagaaacagctatttttccaagaaccaatattgtgtactcacctcagacataaaaagttatttacctaagtctcttctatctaacagcatagagttacccaaacaaggccaataaagaccctttcaatatccttttcttaaatttggctctaaaatgactgttaataatggtaataaatgtctttttattaaacagacaattttatcttatgcaatttagggaaataaacataaaatctacctttaaatgaagaaaataataatttcccactctaactatggctgattcattccctgagcatgaatcccattttaccctcattgtttttaactataaactgagctgaaatctgctcacaggtgaaactagtattttagatggagaatgatattaccaagtaatcatatttattactttttgtagtaattattt

SEQ ID NO: 365867 - DNA, 452 bp, Homo Sapiens
  misc_feature (45)..(77): n is a, c, g, or t
  misc_feature (157)..(176): n is a, c, g, or t
  misc_feature (214)..(238): n is a, c, g, or t
  misc_feature (375)..(375): n is a, c, g, or t
  misc_feature (412)..(412): n is a, c, g, or t
gtgagtaaattgtctccctttttctatagatcattaggttagagnnnnnnnnnnnnnnnnnnnnnnnnnnnnnnnnnaccacttctgctgttcatggtagtagtggaaggtaaatttggaaatggcattgacataaaatgaaaatgtttacggacannnnnnnnnnnnnnnnnnnnattgtatttggataaagatccacttaaaagttatctgnnnnnnnnnnnnnnnnnnnnnnnnnccccaaagtgtagttatgttttcactattgctgcttctatagagggcattgtgatagagagttacagatgaaacattaaatgccacagtgagtaggaaataattactacaaaaagtaataaatatgattacttgggnaatatccattctccatctaaaatactagttttcaccngtgaggcaggatttccaggcccagtttttaggttaaaaaa

SEQ ID NO: 365868 - DNA, 321 bp, Homo Sapiens
aaccacgcctggccggtaatttctcattgtgaattgattgggtccctgtaagtcacagagcctgtcctgagtcccttcatctgaatgagggtgaaaagactgagttttctgtcccgggtgacaaggacagaatctgtcttgtgaaacaaccagaagaaaattcccctaagaaagccgtctagcggggcagtggacacaacactattctatatcagacaattaaatgtgagggatgaagggtgaaccccaactggtgcgtaataacacttaggattaaaatgaaaatatgcaagttccagtgactttcaaatctggcaacaa

SEQ ID NO: 365869 - DNA, 493 bp, Homo Sapiens
ggcgccacgctccgccatcagctcggtgtccacgggtctgcacagcctgtccaccttccgcggcctcatgaagcgcaggagctccgtgtgactgccccgagggacctggagcacctgggggcgcgggcgggggacccctgctgggaggccaggagactgcccctgctgccttctgcccagtgggaccccgcacaacatccctcaccactctcccccagcacccccatctccgactgtgcctgcttgcaccagccggcaggaggccggcctcctgaggacccctggggcccccatcggagccctgcaaattccgagaaatgtgaaacttggtggggtcagggaggaaaggcagaagctgggaagcctcccttccctttgaaaatctaagaagctcccagtcctcagagaccctgctggtacccagacccccaccttcggaggggacttcatgttccgtgtacgtttgcatctctatttatacctctgtcctgct

SEQ ID NO: 365870 - DNA, 512 bp, Homo Sapiens
  misc_feature (181)..(181): n is a, c, g, or t
tggtgaacagcctgtttgctggaatggacctgacgagccttcagaatctccagaatctccagtcgctccagctggcaggcctcatgggcttccctccaggactggcaacagctgccaccgccggaggcgacgcgaagaaccctgctgctgtgctgcccctgatgctgccaggaatggcggngcctgcccaacgtgtttgggcttgggcgggctgttgaataaccctctgtcagctgctaactggaaacaccactactgcttctagttcaaggagaaccggaagacagcacttcaaaaggagagggagaaagggaaatgaggaatgaaggacgagaacaaagactctgagaaaagcacagatgctgtttcggctgctgactctgcgaatggatctgttggtgctgctactgccccggctggattgccctcaaacccgctagccttcaaccctttcctcctgtccacaatggccccgggcctcttctacccatccatgtatctacctccaggac

SEQ ID NO: 365871 - DNA, 513 bp, Homo Sapiens
tttagggtagaattccagcttttccctgtgcaagaccaatatctgaagcttgtgccttttgctgctttttccttcaaataacaggatcttatgaattagtgctttcattatatttgtgtctattaagtcagactacagttttcaaggtgcttttctattctagggagatctgcagggcacttaacctacattagacctaagaggtctgagggttcttcagaagacaaagaatttctagatactttccttgaggaggtgtcaagggcaatacagacaaaagactgatgtctcctttaacagcttgataagtatctcaggatattctgcaggaatcagttctgtttctacaaagtcctgtattcccattcagcatgatatggctgaatatgtgtgtgctacgtgtgacaatggtgaagacttatctttgccctgagggctgagtgctataacactgctcaagcaataggcttgatagaagtgatgatttggagagatgatctgctttaaaaaaaa

SEQ ID NO: 365872 - DNA, 1113 bp, Homo Sapiens
  misc_feature (188)..(188): n is a, c, g, or t
aaaccaaggcgcatagctgtaaaaattatccttgtaaaaccaacaaccactggtacagtttctgggcttgtttgctttgaagatgatcaaagtaactgggggctatccatttgcagcttacaaaaattgttttcttaacttaagccattccaatttgtagtatttacagagacaactgaagtaagaanaactaaaatcagaaatggaatatcatttacaatttgggatcgatggaccgtacatggaaaagaagatttcaccctcttggatttcataaatgcagtcaaagagaagtatggaattgagccaacaatggtggtacagggagtcaaaatgctttatgttcctgtaatgcctggtcatgcaaaaagattgaagttaacaatgcataaacttgtaaaacctactactgaaaagaaatatgtggatcttactgtgtcatttgctccagacattgatggagatgaagatttgccgggacctccagtaagatactacttcagtcatgacactgattaatacaagttgtcttaacgttactccaggaccacttgattttggaaagagtgcacttaattcagaagctaaagaaaatcagttcataatactatggatttctctttcattaagccttaattttaagggaaacatcagtaagaaactgcactgaagaattataaaacattttggggcatagcatacacttgtctaacggttcacacgtggctatgatcacaagcaactttgaactggaatgctatttacaaaagtttgtgtattaatctgtgtattaatctctctggataaacaagacaggaaaaaaatcatgtatgaccagaacagatatggatgaagaaattgaaacgcaacgaaatgcaactattcaaaaaagtttaatctctatgaactctctttaaggtttagtcttgaagactgattttctatgcaaatagtgtctggcatcctgcacctctgatatgattggcttggagaattaataccactgggaagaagtatggtagtggtggatgaagggtggctatcttaaattgtgcgttaccgttactgtctattaactctggtcgttaaccagtttgtatatccctgtgtccc

SEQ ID NO: 365873 - DNA, 539 bp, Homo Sapiens
gatgttgccatggcatttgtaaactgtcatggcgctagtgggagtgtcttttagcatgctaatgcatgagcagtgaggatgacccgaggtcatttttgttaccatcttggttttggtgggttttggctggttttggccggcttctttaccacttctttttatcagcaaggtctttgtgacctgtacttagtgccgacttcctgtctcatcctgtgagtaagaatgccctaatctctcaggaatgcagcccagtaggtctcaaccttattttacccagcccccattcaagatggaggtgactctggttcaaatgcctctgacacatgtgcctcatgtttgggcatgagacctcactgtgtaggtgcagagaagaccctgcctaaacattgcctacacgttgctcctttttcctgcctcaacttccttaaaatgacaagagcagagcccttttgggagctaacatcaggactccttttctgtactctgctccgttgtgctgctagagccacaagcctattaaactttgcctgaaataaaaa

SEQ ID NO: 365874 - DNA, 1457 bp, Homo Sapiens
  misc_feature (1048)..(1079): n is a, c, g, or t
  misc_feature (1089)..(1089): n is a, c, g, or t
  misc_feature (1380)..(1380): n is a, c, g, or t
  misc_feature (1387)..(1387): n is a, c, g, or t
  misc_feature (1408)..(1408): n is a, c, g, or t
  misc_feature (1444)..(1444): n is a, c, g, or t
agattaaatgcttggcttagaagaatgcaaagcttcactgagcctaataatatggatcccagtgggtgagtggaggtgagttaaagtaaaaaactctgaggcaaatcttacttaactgaagttgtgtttttagtacagaatgccaagttaatatggttaatactgaacaaaaaataatggaagggcaactacagtagcttaagatggcactttaaggaagtgtaggcagaaagtcaagaaattaaaataattatgaatcattatatggcaggcaatatttccagtgaaaatcagagaaaataaactcacatacatgtactgttacagctgatcttagtatgaatattttctattaaagactgttttaaaataagttattaatatttgttgaaatggttccagataacaagaaatatgatgcaataaaacctgataaataaaagcaatataaagattagaatggttttgaataggtagtggaataaaaagttaagttggtagttgcattaaaaaggtcaaacatggggaataattggtagaatgttgtgtatataatatatattgttacgggtgcaataaatattcaggggaaacagagctgctgaaagagaatgaatgcttagaaggaatgttgccttaaaggcttttctaaaactttttaggtaaaggacaaattctgggaggacgaaagataataagtaggactagttacatagagacttaggatgtccatagtctttcaagaaattgcccaacctttgcgagaaggtgttatggtaatatattgatgttgggttaaagcaaattttttcagatagggtagatttttatacatttataaagtaaaggggagtaggaaagattaaagatagatcaaagaaaggaataattgatggaacaactttctggaagagattagagggtatgtgtcttttgaactctggaagacttgattttagagaggataaaggaagaaagtggataattctagaattaaacaccaaaaggttctatgtgtctggcaccatgtgaagcaacttacctattnnnnnnnnnnnnnnnnnnnnnnnnnnnnnnnncctataacangtcctaagagatcaaataatttgtccacgattacacagtcagtatgtagcaaggccagcattcaaatcctcatctgtctatcaaacccatattcccttctattatgctatacggttttcaagttgaaggaaatcaaaccaagaatttctggttttttcactgcgattataaggaaaaatattatttttctgaaatgagacatattgatgtttaaggccttgaggtgacaggtaaaatttgggattatctgtggatggggaaaatgccaaaaagggagggattggggtaaanggtaccnatttaccatctatgcccgggnatttcacttcttcccttgcacagctaggctttaggntggccctgggttt

SEQ ID NO: 365875 - DNA, 884 bp, Homo Sapiens
  misc_feature (78)..(109): n is a, c, g, or t
gaagaaagtggataattctagaattaaacaccaaaaggttctatgtgtctggcaccatgtgaagcaacttacctattnnnnnnnnnnnnnnnnnnnnnnnnnnnnnnnncctataacagtcctaagagatcaaataatttgtccacgattacacagtcagtatgtagcagggccagcattcaaatcctcatctgtctatcaaacccatattcccttctattatgctatactgttttcaagttgaaggaaatcaaaccaagaatttctgttttttcactgcgattataaggaaaaatattatttttctgaaatgagacatattgatgtttaagaccttgaggtgacaggtaaaatttggaatatctgtgatgggaaaatgcaaaaaggaaggaatgggtaaaagatacctattaccatctatgccctggtatttcacttcttccattgcacagcatagactttagattggccatgggattaaaaatttgaggaattctgacaaaaaactaaataggaaaggagtttgttttttaagtagggtatatgatgggtcaaatataaacttactactaacaaaacttttaaacaattccctaaatgccaaacttttataaacaaaaatcaaacaaaccatcaagcaaaagagtccatagccagcagaccaaatgttgaaatctctgggctaatttgtaagatctatgttttaaaactccttagtgaagaggggcaagaaaacctctcctctttttcctctcttggtggaaatgttctgtgttgtggtggttttttcctatactatatgtaatttctatatttgtgtagtgtattgggtattataaaattatacttcttagattccgttaagaatactttctggggtgtga

SEQ ID NO: 365876 - DNA, 565 bp, Homo Sapiens
  misc_feature (39)..(39): n is a, c, g, or t
tatattcaaagatttgttttattaatatgcaataaaggnttagaaattttagttttattccttaattggtaaatatggttaactatggaatatatttacttcctctagtgaatgtcctttatataatgactaatttgggagtaatgtgtgctctgtaagttttgttttaaattgcactgtttttaaagaaactgtaagaggagccaacaaaaatcccaagcaacttcataatcagattatgcctaatcatttagttgagcagtttttgaccaagaatcagaagcccaaggggtacatttattgctttaatctgcactcattgaagtcatttattaccatatactacagctttgtggtaggccattattttcattttcatttttggctcttcagaaacttgaatacttaagcttgtacatgatcttgtgttttgctatcctttttactgtaaaatgtaaatattttaagggatattttgattctaaatatgataaaataatttctcacctattttgtgtgtgtgacttgaaattcagtagtaaaagaatttcttctttaaagcttt

SEQ ID NO: 365877 - DNA, 508 bp, Homo Sapiens
  misc_feature (346)..(346): n is a, c, g, or t
  misc_feature (421)..(421): n is a, c, g, or t
  misc_feature (427)..(427): n is a, c, g, or t
  misc_feature (456)..(456): n is a, c, g, or t
  misc_feature (475)..(475): n is a, c, g, or t
  misc_feature (481)..(481): n is a, c, g, or t
  misc_feature (486)..(486): n is a, c, g, or t
gtcttgttgtgactatcacaggaaaatttattctgtaaaataaaagtatgctgtgcataacaaagatcaaatgctgtactagatttttaagaaaacatttagcacccactatatttttttaaatgtgaggattgtgaacttcccttccagctcaatcttcacaaaattacatatactatacctcagggtaaaatctaactttaaaaagagttacaacatctttcaaataaagcaaattcagtctgtaggaaaataaattatcacttgatattggggtatatctttcttcaatcacttggcacatctgcgggccaggaaactccattcactaaggtaaacgaagganacttcttccttccaagggctgggggaccaaatttcctgtggcaaaaaccttcctgtattaagggggaaacccgtncatttntcccggcaaggggtattggggtttggggngtgtgttaaaaccaaattncaaaanttttnccccatttttttggtacccctt

SEQ ID NO: 365878 - DNA, 652 bp, Homo Sapiens
gacttcaaaagacaaggttccaagctgctacacataccaattctcgttaaagtgtattccatttcttttgtgctttcatattgaccattgtgtgttaatcctttcaattggaagaagagggagacagtgccagttattgcaaactttcacagtccacaggcccgatatgtagccttcaccacccacaggttctgccacttctggggcattatattccatcaagatccaggcacccgccatccacataccagccctggaactcatcccttctcccagacttggaaacgccacctctgcctgaccaatgtcgagccacttcctcatcttgatacatcagccactatcctttccatctttcaggcaactccagcttaatttctcgatggccttgcccttctaaaaggccgttctcttttcccagatgactttttcctatcccctccacagtaactcccctcatccttccagtctcaattcaattgttccttggtggggtggggcggggggagccttcttaaaccctcctccctcacaactgcatgaggtcccttgtctctaatataagctcctgtagcaccatggcacttatcccagttgagattttaaatatatttctgtgtatttgattaaagtttctctcctccaccagaaa

SEQ ID NO: 365879 - DNA, 925 bp, Homo Sapiens
tgcttcccacgtcttaatattattgaacattttcttttcttcctttctgcagtcagatttcagtcaaaagtggaccctgggattctgacagctcttgctttccagtaggttaaactctttttgcctactttccagtgggttccaccgattacgatctgtttatcttggtcattttaaacccacttataccagacctttttagattccagctttgaccatcattattctaatcacatttgtcttcgtaacaataacaattgcttttttcaagtaccttacaaactttctttgcagcatttgattttgttacacagaactccttcacagtcctttctctttcgaggttgaatcgtgttgattttaatttgccatctttgcctttgtctggaattttttccaacaacttctaaatgtaggcatttcttaagcgtctgttcttgtttgtgttttatttcctctcgtacattcgcctcttcagctatttcatctgattcttgaaccactctgtatatggcttttaatagttgatcttcacttttcactccctctttggctttagacctaaatttcccagacagctttccagttgcattatacatgtttgtacatccatgggaaaattcttgagatccattggacaggaaagtgttaatgttaatcttattgaataaagaacatttccatttttgaaaattcttagcaatttgttgtctgtagtgacttcatgaaagttggcacccttttcattggcaaagaacaaatcaggtttccaaatggagtccaacatggaggggtcgaggtctaaagagtcgtcaggatattcactgtacgcgaggcggggatcattccatttctgacgcaagaaagatattcactctgtaatctttcaaagagtgctgatacagtttggatatttgccccttcc

SEQ ID NO: 365880 - DNA, 389 bp, Homo Sapiens
  misc_feature (14)..(14): n is a, c, g, or t
tcctctcccatagnaattgaaaatcctctttaagatcatgtgtgtgtaaatttcacccagtttacccctccccaaccttagccctctcccctgcaactgtggtgctcttgagactgaggtttctgcagccagtaagtcacctgctcctgtccgcaagcttacctaccttgtttggttgggtgattaagctgtcaccccttttcaatgagaatcctttgctttcagtaacgtcctcatatttctttccattcttacctgtgtcatgttctgttgaatacctgcagccgctgcccgcttccaaatccatctgcgtgtagaatgtactgtagattgtaagaatgtaatatatatttataaacttactgactgtaaatataaagtttgcattc

SEQ ID NO: 365881 - DNA, 952 bp, Homo Sapiens
gcggcgtggactttgccgggctcgccacacagccccagacccgtttaggaccgggagaccgaacgcagcgtccagccggggagtttcggcggcgttctccgggcaccgcgcgcgggaagccagacgcagcggggggacacatctcgcggtggcgttgccagagtgaggagttagcaggcaggacttgacgaggctctttggtttttctagtcctcaaccactgaagaagaagcttgatgcttggctgtcagaagacatgaattacgcacggttcatcacggcagcgagcgcagccagaaacccttctcccatccggaccatgagtgagaaacgggctgacatattgagcagaggaccaaaatcgatgatctccttggctggtggcttaccaaatccaaacatgtttccttttaagactgccgtaatcactgtagaaaatggaaagaccatccaatttggagaagagatgatgaagagagcacttcagtattctccgagtgctggaattccagagcttttgtcctggctaaaacagttacaaataaaattgcataatcctcctaccatccattacccacccagtcaaggacaaatggatctatgtgtcacatctggcagccaacaaggtctttgtaaggtgtttgaaatgatcattaatcctggagataatgtcctcctagatgaacctgcttattcaggaactcttcaaagtctgcacccactgggctgcaacattattaatgttgccagtgatgaaagtgggattgttccagattccctaagagacatactttccagatgggaaaccagaagatgcaaagaatccccagaaaaaaacaccccaaatttctttattactgtttccaaatgggcaacaaacctactggaaactcattaaccagtgaacgcaaaagggaaatctatgagccttgcaagaaatttgatttcctcc

SEQ ID NO: 365882 - DNA, 514 bp, Homo Sapiens
ggccgcagagcgcgtgcggcgtggactttgccgggctcgccacacagccccagacccgtttaggaccgggagaccgaacgcagcgtccagccggggagtttcggcggcgttctccgggcaccgcgcgcggaagccagacgcagcggggggacacatctcgcggtgcgttgccagagtgaggagttagcaggcaggacttgacgaggctctttggtttttctagtcctcaaccactgaagaagaagcttgatgcttggctgtcagaagacatgaattacgcacggttcatcacggcagcgagcgcagccagaaacccttctcccatccggaccatgagtgagaaacggggtgaccatctctcctttggggtggggcattcctcgcacagcctctaaggagggttccctagcaagccaccgcttggttgcatccatgcgtacccctgtgcacgctcgcggtgagccaggctctgcgtgcagaaatgagatagacacagcctttgttctcaaagaac

SEQ ID NO: 365883 - DNA, 1222 bp, Homo Sapiens
  misc_feature (255)..(281): n is a, c, g, or t
acaaaatgtcaacatcagcagagatgcccagatctatttatctctaagtatattgaagtgatgctgtttatatgtgtcattttaaaattgtgtgtcagtaaagctacctgtaaaatttcagtccaaaaaaataaagctctcagggagacatgaataaaatcaatgaacattagaaaataaaatatagatgcttaccattaacctaccaactcttaatatccttaaattatgtgatatataaagaggactgttacnnnnnnnnnnnnnnnnnnnnnnnnnnngggcttggcttaattatattggtagtggggggcaaacgtttctctctttccttctctatggactccgtgtgggggtggggttcccgtggttggagagagtagttggctccgtgtgcgcctaaaacattatttactcactaaatggagttttccagtcaattaacaaatatttattaagtccctactatgtcccaggcatagtagggctacaatgggtaagcaagacagagtcccgtgcccccaaagagcttatatctaagggggatataaggggatgattagaatcccattggtgtgccctggtacaggaatcatactatttaaaaataatttgtataaactataatgcttagcacagatggcgagttatctgtgctatgtgaaagctgtgaaatagtgctctaagagttgtcaagagctgtggttttacatcttttcctcattgcaaatttagtgactttctacacactatatggaaataaatgactagcaaataaaacagtcataaatacaaagcagaggttgcactcccccaatcccgagttaacccaggtctgcaataacaccatgttaaaggtgcagatagagacttggctcaaaaaggcttggagatgaggaagattggaatataatgatggttttgtctgttccttaactaaagtgcctctatgtatattcttttctatttgtagcaggataaatttggtctggctcagttttggaactgtattttgaaaatggctttgtcttacagtttaaggaatagacaggtggagggaaagtcacataaaggagcaagtttgtgtagctgtccctcttgccccttttaatcatcctcctttgatatggccatcctggtgggcctcctttgccatttccatttttggtttctttccctgaaaactgtgtgcaggtaattccatgtgccattgttgaaaaga

SEQ ID NO: 365884 - DNA, 540 bp, Homo Sapiens
ttccctaatggaggtggatcctggtgagaggtgattggatcgtgggggccatcccctcttggtacttcactcatgatagtgagttctcatgagatctggcacttcacccctcactctctcttgctcctgctttggccatgtggagtgctcactccccttttgctttctgccatggctgtaagtttcctgaggcgtccccagaagcccatcagataccagtgccatgcttcctgtacagcccatggaactgtgagccaactaaacctcttttatttataaattaccgagtctcaggcactttttatagcaatgcaacaatggactaatacatatactttagcataaaaacatttaaaagagtctgaaactggagtagttaactcagtaaaaataacttggcaataaaacacagaaaaacaatctatttgatcatgtagtgattcctaatgtaaatcctagtacaactgtcaactgataattttaaatgtaatttagatttgtagatggtgtaacattaaagttgtatgatgttaaaaaaaa

SEQ ID NO: 365885 - DNA, 421 bp, Homo Sapiens
  misc_feature (76)..(96): n is a, c, g, or t
tatttaaaatgtaaaaattttattcagtgtacctatatacatcttatttgtaataattattgtgtttattttttcnnnnnnnnnnnnnnnnnnnnnggcattagactacattaggaactagaggtgctacttgcatgctgtatggacagttcacttctctttgtctctgtttattgaactctaaaatgaggtacgggagagaaagtatcctaacgtatcttcactgcctaagagtctattatcatatgtcaacatctatagcaatttgatcctacctagtgacagtaccactgtggttgtcaactctacaatattacagataaagtttaggaagaactttaagaacattaagttggccaagttaaagatctgctgagtgtatgtgattaacaggatgccttttgaaataaaaagatacttc

SEQ ID NO: 365886 - DNA, 538 bp, Homo Sapiens
aatacctaacttagcttagaaagcactctatatagtccgctcccctaccttctcagtctcttctcttgacacttgccctttctctactctgtgtgcaagtcaatcttgacttcttcatgttgcttgaatgctatgctctttccagcctcaggctattgcacatgctgtttcctcaacctggaatatgctgcgctcacatcagcattctgtggctgttcatttttcaggtcttagtttaaatgtcagtttttcagagaagttttcccagactcccagatatccacccctcagccccaacgtgtttagaacccttttgctatatatttcaagatttccctataccttctatttgataacacttaacattgttgtaagtccttgtttcatgtctttcttccctgctagactgcaatctccatgagggtaagtaccatgtcttttctttttccctcttattctctagcccatatttggctcatataggtgctctataaatgtttgttgactcaaaattgagtgattaaaatgtttgacaaaa

SEQ ID NO: 365887 - DNA, 517 bp, Homo Sapiens
agtcatgaagtgggaagagctgagaatcgatcctgttcagactgtgggactagaataaattctgtttagatggtgggacatatagaggcatctgaaatgtcaatcctagttcctcatgccaaataagaaggattgtgttaaagattcctgtaaagcagttaaatctctagcagttagatcacatttccccattccagtcactgagtaacctaccctacccccttgaccctaacataagtctggagttttattttctgaagagcgcaaaaaggagggttattatatgagaggttctgccaacaaaatggaggtcatgggtaatatgggtagcaaaagtaagtaaccatctaaatattgaattctggttgattgttaaaatgctgtgatagtcatttgaaccaatcacaaatattttggttctccccttcttggacatatggtagaatttcaattctatttctgtttaaaattatgtgtagccatgtaatttcctttggctaataaaatgtgagaagtg

SEQ ID NO: 365888 - DNA, 328 bp, Homo Sapiens
  misc_feature (291)..(291): n is a, c, g, or t
tttttttctcttaaaaataattttttattgagagatttacataaaataagcatatgataccaaaaagaaccctagcttaacaaccctaacacaaaaattttcatttattttgaccatgagtcagcaaacttttctgtaaagggccagactgtaaattattttgctttgcaggtctctgtcctaactactaaactctaccactgtaacacaaaagcagccatatacaaaacataaacaaatgagcatagctgggttgcaatcttataaaaacaggacacaggtcctcaattntgatctatcataaaaaaactttaataacactaacttt

SEQ ID NO: 365889 - DNA, 474 bp, Homo Sapiens
tttaacattttaactaaatatagggtgactaaagtattttcttgaaattataaaaataattaaaatataatcaattttatacctgatgcacaccattaatgtactaccacctctgtttatgtgtagtatcttttattcttttccatataaagtctttactagaaaagtcagcaaatataataaatttatacagagttcccgggttttggtttaactggttccaagctactgtatttcaaattgtatttccaaacttttaccacattttgaatgaataaatgagaaagcttgccaatatttccagtaaactgcattgtgttacttttataaaggacgacttttgccttctatttgtatgtttgctgtttggaaaaatttttattttattatgatgaaaaaagctatccatgaagtaaataagtggactaaaatctttttcttaccctcataataaaattacttattttaaatcta

SEQ ID NO: 365890 - DNA, 664 bp, Homo Sapiens
aacagaatattttgaattttattttcttatcaaagatccacaccagaaaaaacatgaaatccattctttctattaaaatataattgaaatataattaaatttataaggttaatgattaaaagtagctattgatgaagaattgaagataaattttaaaaatacaaaatcacttgctttataaaaatagataaaagtgaattccatcagcttactgtaattatttcaaattcttgtcttccagtctagcaccatgcctctctgagactggcttctccattgagtgttatgaaatcaacacactaacatttaggatcaacattatcccctatgattggcattgtcatttatccaacctagattatataaattaacaaccaaaatgcaaatctgtcacattaaaaacttcattgacatacacatgattgattcaaaatgcacatatagcagtttagtattgggattgctactttacttgtaacctctgtttggtcatagttgagaaacaacagaaagttgcaactgtaatattatttttatataaattacttatataaatgattttaataaaaaaagtgtgcattttttgcaaccctgtcttattgcacatttgatctgagtattgaaataatatttgatctgttaaatctaataataaaattattct

SEQ ID NO: 365891 - DNA, 445 bp, Homo Sapiens
aaaaactataaaggctacagatataaatctgaatggcatattgtacatgtagaaatttgtggtgttcactttttatcagaactaaatccggattctggggctggaggacagataaagcagaagttgttaatggttacgaagcaaaggtaaaaggaaactcttaaaataagatttaatatagctatttagcttctatgcaaatgaggaatctgttcccatttttttcatgcatctgtgccatggagatgctctggggaatgagaactgtctaatgtgtctctcacttggatgtttgattttgtcttatttgactttcagaaaatgggatagcatgccctgaggaggtctgtagctatgctaaagagaaacaatatggtagagaaatgagtacaggtaccagttgttctggtaggaatgacaagctagtcattcccttaattattta

SEQ ID NO: 365892 - DNA, 740 bp, Homo Sapiens
  misc_feature (615)..(615): n is a, c, g, or t
  misc_feature (617)..(617): n is a, c, g, or t
tctcagcagttgccctgaggcaagtggaaaggcaggcagtgctctggggtcaccgagaaagtctaaaaacaggaggctgaaggtactgtgatggctttaaaaatggccaccttattaaatagggattgtatcaatattgaaatgaagacaatctttccaactttgggtgtttcacttgctgttttaattgtttgtttttaacactttgtaggtttgtgttttcataatctttaatttgaaactcatgtgtcctcatggatcgtggatgccttcatttcttgagctctcaatgcagacatttaaatggctgcaatcagtagagtgacccgcggatggcataaatgcacctccttttcttggccttggatctatgggtctgggattgtggtcatctcctcaatcctcaaaaagaggctgaatcaatgtggccgtgggtgggaacttacatacagaacccaatgaagaacttgactgtctaaacaagggggcctcgcatggagctgtaaagcatctaacaaatatgaaaaatgtgaagttccaaggtccaagaagaaaaataatgatgtttctgaaagtgatgataaataattacttttaaagtgctgcatatttatnanaattgagagattatttttgtaaatgcaatgtctgtgagctgggatacatgggcagtgcttcagacatttaaaaatcactttttactcctagggagatgccaataaacagaactcttttgtttc

SEQ ID NO: 365893 - DNA, 357 bp, Homo Sapiens
ctgttgggatacgaccagtgtgtaactgcaaatgaaggttggaaaaatttttactgcattaagagtttaccccagagaatttgagagttcattgagtaggaaattttcttctttatgccacagtgactgcagcactagtattcctgatattgaagcataccttgaaaacgtctttggcaattacatatgacccccttacatctgttttcagccactgctttctaagagccatgtagcacattctcttaatccatgtaaaatgatttgagttcctggcgtttaattaacatagaacttttggggaaagttattatatagaagatcacatctataacatagtaatctttaaaataaggg

SEQ ID NO: 365894 - DNA, 453 bp, Homo Sapiens
atgtttgagagaactgttctggctgttatgtaaaggagtgcagggaggggcaggaaaggagacaaggaggccagtatggacactgtgtccagtatggctttccaggctaatcacttagggcagagacccagccttattcatctctacttcctgatgtccatagtggtgtgtcatgaatttttattgaatgaacaaatgaggtgtatgaggagagatggttttctcctgctcagctcttacacagtgataggtttgttccatgggacttatcataggcctggtgattcttgaaagagcatttttcatgactcaaaaatgagctgagaaggagtgttatggccaggtgcggcgtcatgcacctatagtcccagctgctcaggaggctaaggcagaaagaccattcaagcccaggagttccagcctgaagtatgctgtgatcatgcctgtgaataa

SEQ ID NO: 365895 - DNA, 441 bp, Homo Sapiens
gtgccaaaacaaattgactgtatcttaaaaaactactgcataagtaaaattaaaaagcagattgcttctcctgatcttttttgtatttcaaatggaacaaaacttttcttgtaactgtaatttgtaaagtttagatatcagtttacagatgggggaggggagaaggaaggaaatatgggtgaataatatgtgtatgtacatacatatgtgagtctgaggcccaaggatagaatactgtctccaaccttagccagctgtggccatatacttgtagggaagtttccatgcttcttcagctgcttttctgaattaccaaatcactcctgacaacacatattctgccacatgaagacgaactagaatcaatctgataaatctgagatttatcaatcaaatacatcataatttgccaatcatagtaaaatgaaaatagttttgcct

SEQ ID NO: 365896 - DNA, 901 bp, Homo Sapiens
agtgagctacataaaatatttgctattagcataataattttattgtatatcttaacaaaattgtgtattttacgcaggtggcatgccaatggaagtagtctcctatagctgcactgaatcattcttaacactgagagttgcagcaaatgggggacataatttataacttacttttctctctgtatgactcattaggcaatgactgtgtatgtactacaatgtaaatagcacctcctggatggaatagtacgtaactgacatgaccagcagagacaggctaaagacactgagctgaaaaccctggactctattgctaagtcaaggctcctgaatccgttccctctgagcaactgttgctgtggtgctgccttcacaagcactctgctgagcactcagattgaggggctgtgctatccgtcatcagacaagctgcacccagaactgttcagctgacaaactgggagcagtccagaaacacagtaatggctgcatagtgaaaaaaagccaatttagattctttttcatagagagaaaaacataaacacgtgattgaacaaatctcctctattagactaattgggttagatttgatatttaattgctaaaaatacatttagaatataaccttactgtgtcaaggtctcaaagaagaaataattggtatggtataaatgattgaattgtatgctacaaacttctaagctaaaatattttcaatgtatgtaaggataggtggcatacacattatatattattcccccattaagcaaatttataatgagagaaaaacttagtccataaaaacttagtccttaattttacatggcttttattttttatggactaagtttttcagcacagactagacaacttagtccttaattttacatggcttttattt

SEQ ID NO: 365897 - DNA, 647 bp, Homo Sapiens
acgcgtccgggaataactaaaactctttcttttatccagtatatagaaatgagattttgcatttccgaattaggacagcctagatacagatgacatatgtataaagggtagaatttggaattctgtaattgctagaccaagacgacattgtttccatgcatttcctttgcatagcactgaggagggttgtctatggtgctcaaccccctgcttgccaagaaagcattgctttattatagaatgatggcatattacaacccaaagtgaaagactgtcctcattggtgtgtgttgtataaattgtttgcctaaggcctttatctacacaaaaagcaaacaatttgcttggttagttttatatgcctctttgaagtggttaacttggaatgaataaactgctagcaagttaaatcagtacctccactagataaatacttgtttgataacggcaaaatcacatctctactcatcatcctttaacctgctgttaagtgtactaccatgggattagcggtggagttcatggatccatggggaccatgagctcccagtattccccgtacaggaacaatactgggactgcaaaatggccagtgggtgactgccagattacttcttttaaggaggtttttaaaaacacattatccc

SEQ ID NO: 365898 - DNA, 455 bp, Homo Sapiens
cacatttaattttgaacaatggtgtgacagatgattggatgaaatcaaataatttagtaacagtttgaatgaatttcataatctgttttcagagtctactgctcatttaaattcagcctcccacccccatcagttagggctcatacccacagtgtatcataactacatcaattattatagagtacagtgtttccagagcttttaaagcacaggtagtaggtttccagtaaattattttgtgctgctgaatgaaatatggccttaagagtacataaattgctgattgtctttttaaatgacattttcttcaactcactgaggttaagaccagtgatggacactgatctttttcataaccttttcaaaaatgtagccagacaagataggctgttctgtttggaaagggggcggggaccttgattctgtttgaaactattaaaaaggcctcttgtgca

SEQ ID NO: 365899 - DNA, 344 bp, Homo Sapiens
aggcctgtctgtttacatattgtttatggctggcttttgcactgagtagttgcagttgaatagttgtgacagagaccctctgacccacaaaggcaaaaatatttgttctctagtctttttcagaaaaagtttacccatccttcctccagaaaatgtagaatgcttttggaatatgttttagatgtttcatgtacttttctagttcctaggtttaagattttgcacatgtttgttctttactttcttgcaaagagattacttatttatatttcatcggaaaagttgtcctggaggcatttggaggtttatgcagttattctgtattaccaactaattgtttagac

SEQ ID NO: 365900 - DNA, 445 bp, Homo Sapiens
caagatatgagccaagaaaaattaagtattctacataaataaaatttacattaaccaaaatattgcaaaacattttaaaaaatcatttttatattttgcccaaatccacaaagtttgtaaagccaataatgtaaaatctccaaggacttgttaacgaaagagcccacctctaaataatctatggatcaaacaaatctcatgggaatttaaaaaatgcattgaactcaattaaaacaaattcagtatatcaaaatttgtaggatgcagttaaagcaatgcagggaaatttctaatactaaaatgtactaaagagtacagcagaaaaggagaagtttcaaatcaataatcgaagctcactcctcaagaacctagagaaagaagagtaaaatcacccaaaggtaagccaacaaaaggaaataataaagagctgaaatcagtgaaactc

SEQ ID NO: 365901 - DNA, 371 bp, Homo Sapiens
  misc_feature (209)..(238): n is a, c, g, or t
catgacagtgttttattttaaactgtcatataataattcaaaatttgccttaggatagaaatctagtaacctttcagataaggaaagggttgaatttccatattttagaatagaccattatgaaagttttagatgtagaagtaataagcccagtattaaagttttctggttttacctaaatcatgatatgaaaatattcatttggagtnnnnnnnnnnnnnnnnnnnnnnnnnnnnnncctttcagctaaggaatgaattttcatattttagaatagactatcataaaagttttagaaatagaactaattaactaccctattaaattttctagttttatctaaatcatgacatgaaaatatctatttagag

SEQ ID NO: 365902 - DNA, 438 bp, Homo Sapiens
cccaaaagcaggtagtcacctgtgaggctgagtctagggcttttatgggctcagaattggggagtgcatgctgattggtccgtgggcaggcctggaaaaagcaccattcaattggctaaaagacatcgaggaggttcttactctggtcatgtactctacctggaactggaagctcagttttcaggcatcaggctgtctttggcttgaagatcagggttcaacagggacctgttcgtctgcctaggaatttaactgtctcctattgctatcatcgagacaccaaaatgtctacaagtgtaatcatttatcatgacctacatggctgctgatatggtctaaattacccttaagatcccactttaaggtccgtaaaatactgctaagtaaaaatccactgtgacacacttattcctctcttgctgagatgccctgctgcac

SEQ ID NO: 365903 - DNA, 460 bp, Homo Sapiens
ttgtacaatattatatatcaatgaaataagcaaattacagcagtatgccacaatgtggattgatttcatgaatatacgtgaaaaacagcgcagaagaataccatacactatgtgattttaattttataaagttcaaatataggcaaagcaaagcaatagttttatttacacttctgtagataaaaactgtattatacacatgcatatatatgaatgcttaggtggtaaaattataaaggagagtaaagaaatgactgcattatattaagactaaatggctacttttcaaagggagggagaggctggtgatgggaaaggggcatgagtggagtatgtaaggtgcttgcaatgtaatatttcttggcctatgtggtgtttgctttgtgataaatcagtaagctgtagttctttgtttttgcacttttcataagtataatacctaataaacatttaaatattt

SEQ ID NO: 365904 - DNA, 516 bp, Homo Sapiens
gaatgcttattaaaggagatttattaagcatcaaactgtttttcattgtaaattgcagctccttggatctttacatataaggattttgaatccatttattagaaaagaagttaccacaggtaataacctgcattataataagtgtaggaagttagtgcaataaatactgacttaattctgttattaatccagtgaagtaaccctgattgtatttagagcttttaaggaatcttcataaaagataagctgtccatcttttattgtacattttaaattagagaaaattatcaaactgatcttaaatttgcagtgctttatcaaaaaactcatttactctaaaatgcttccaaaagcttataaggcaagacaagtaacaaagtcgtcatttacaaataaggatactgacatttaagaagtgaagtgcttttgatgggtggcaggctactgcaatgcttaagtatttgtttcccactctctacgctctaaaccttcccagatacaattaaagagcaatct

SEQ ID NO: 365905 - DNA, 323 bp, Homo Sapiens
accagagttgaaatccagatgactcttatttgctttttgattacgggccagttattttgcttcagcaagccttgatgtgttagtaaatgaaataattaaagcatatgaacaaaagctgcttttaaatacagactacatttttattttgtatgaatgttggcgcagatgaaattaccagcttttccatttaagcagactaaaggaaagaagtgatcttagaaaggtaatggatattttacacagttttgaaaaatccacattcatcaaatgtggattttaggaatctccaaaagattcacccatttgaagtatctgggccaagc

SEQ ID NO: 365906 - DNA, 256 bp, Homo Sapiens
catgtatgtatgtcttatatccccaattgagaattctatcactgtgagtgatacagcttcagaatcctgaaggctaagctattaggtttgaacaatatgaaattgctggtttgcaactatattatatctacaaaagggcaagttcatatagcttaacctaaaaagtaaaaatcaaatgacatcaggtatgtgcaaaaatgtcataaatggctggtgaatatataagaagttcaacattactaagagccaaaaaaaa

SEQ ID NO: 365907 - DNA, 531 bp, Homo Sapiens
tgagtcttgagggctggtctgttctcgggagctgctctgttgaactctaaaaggaatcttgagccctgggcgagggagtggcctgacctggtggaaagactgcgggcctgcccgtggagtctatgtctggccctgcctagctcagtcaatctcagcagctcatgtctcctcttagaccctcagattcctcatctacagaaggagaaagaagaggagattgaatgatttttaaggtctttatcagcttctaaaagtttgatttgatggttgtaggagcaattgttctttcaaagcaccatcttctaacctcaggaaggaaagcccaggggcccctgggatgtcctgccaaactgggaagacaaagattgtgactgagaaggtgggggcagggcaggagaagggggaagaagggagaatggatcaaccccaggccggggaaagagatgaatgaaggtccacgccagagtgacatgctctaagtaggggaaatcttcctaactagagttcccatgactttggcaacatttgaaa

SEQ ID NO: 365908 - DNA, 606 bp, Homo Sapiens
tccccaaggatgcgcaagacaatttgttaaggcttagcatgcaatcaggcatcccaaattccgtgaaaaccagaaggcaggatgaggaaggaacaggaaccaggcagcagttctgtgcagtggcaccaagtgacagcaagaaggcagcagtactaccaaggcaagattacacccagccaaaaaaaccaccagtctgcagggcagccaattgacactccaggcagagccattcagagctgaagagaaagcactaaaaaaaagtgcagccacttctgtgattaaagacaatgcccatggtactaaagtaccgtcttggagacactggtcatagttgttaaagcttccagccctcccagagaacatctctatgaaaaaaatactggtacagcagccccaggcccaccttctggaggttcaacttttaattttagttgtttcaagtgctgtggaaaagactagacctgatccctcagttcttcatattgccttatgaacactggccagaagggaagcacatccctcccttttgttaatttcctccaatattgctaagacaaggaatttcaaaatgttcaacaaatattaagaaacaaaaaagaaatgaat

SEQ ID NO: 365909 - DNA, 556 bp, Homo Sapiens
aattacaacctcttaaatttaaaaatcatccttaccttgcaggtcatgggctaaatttggctccatgggacatagtttgctgactacttgcctagacattcctttatactgtggctcctcccttaccccctaacttcaattcccattatgctgctacaacccaaagtttctttcttttgtcactctaaaaggctgattcctaattccagagacttctcacttgctgttctgtcttaaacatccttcaccatctttcatagactcacttccttactttgttcagtctttgcacaaacgtttcctttacagacagccatttacataaagtatctctgaatcactgtctatccctgatctcattatttttccattgtactcatgactgtatgaaatcatattacttattcattatctgtcctgtctcctcttctgaaatataaccccatgaaaacctttctttgtcttaaccactgtgccaaaaacagttgatttttggttctgcagttacagcaaagcacataaacatttaccaagataacattgggcacgaagatca

SEQ ID NO: 365910 - DNA, 489 bp, Homo Sapiens
actacttcttaatgttccagtgagagagagcctgaaatctgcagtggtgttgagagcccatctgtcctgctgcaaaggcccaaggaggaagaagttcccaagagaggttccagatgtctcaaatgaatccaaaatccaatcagatgacctaggactgtcatccaactcaagcaataaagaaaccagtaatcacagatgactgcctgccaggtgcttcgtgcattttacacagtattttcaacatgggctttaaagtcagaaaatgagttggaattccagctatgatcatttttagttgtgactttggtaagagtttcaaacacagtatcttctactagtattattattgctactaccctccaactgttccttttactacggtgatgactgtctcattgaatgctacataattctccctaaaaccttatgaagtagatatatatatccactatatcaagaaaagaaaataaataaacaaaaagcaaaatt

SEQ ID NO: 365911 - DNA, 393 bp, Homo Sapiens
agccaataaataagattttatttagaaaaaaatgcaacagaatatccatacctgcacatagttaatcctgctcaaggggtttgctcttataaacatatgggtttgggactcaatttacaaaaacaacttgtatttataagttcatggaaactcagacaagaacaggcagcattaattaagtctgagccaggtgccagctgggggatcaaatccagaagaagcaaacaatctagttagaaagataatgtaagaaaaattaagcaatcatttaacatataaactggaatttacataatttcataaactgtcagtagcttaatggagtcaaagggagtttatgggaggaagaggttaatttagattgagatggtcaaagaagctttttttgaaagg

SEQ ID NO: 365912 - DNA, 471 bp, Homo Sapiens
gagccctcggggcatcccgcagggcacacaccaggtcgccctgggctccccaagcacctcccagacccagcccttgggtgggtcctggcccacaaacccccatgccctgcccctgagatgagccccaccgcccacctgccctccagccctggagacctttctcccccttggccatggctcccatggggaggctgcaggccctccctgggctggaccagaggggacagactgtctctcccctgcgacttctgggggcactggagtccttggcctggttaccttcagcatttatagccctccagtgagttattcctcggagttctcacagagcagcatgcgcctgcggcaaagccctcacctccagcccctggaccacctgactgctgcctcccgcctggcgccaaacacggccaccgcctcttttgttaacaggacagttgatccattaaattaaaaatcattcaatagaaa

SEQ ID NO: 365913 - DNA, 211 bp, Homo Sapiens
cttttgtggcgatttttgatgcccagaggtattttgtgtgtgtatgtgtgatgtctgtttttaaaatgctttggaagctcttcctggtgctgagaacaactctttttccccaagcagttaattttgccaacactatttgggcagttatgtttctctctgctgatttgtgatgttacctttattatatattaaatttctatgagtaaaaaaa

SEQ ID NO: 365914 - DNA, 453 bp, Homo Sapiens
atggaactatccaccagctaggacctagtacagaggaaagttgagatttctgactccaaaggaaggaaggttaagggtcatggtttctcagcactccagatagggtttatcatatagaggaagatgtgtgtatgttgggcattaatctgatagtgatacagtttcagaaagatgattctttgttcatctggccagaggagacacaatactttacctttactcatccttcaatttatcaaaatgttgtattttccttattatttgcactatgtaaatattgttttctcatacaccaaatagtatctgatgattacattttgtattatgtaactttttatttttcctggagttaaactgtgttacttttaaaatttgttagttttttctagccaaatcttcccatgatgtacaaaagctctgtcaaatgttcccaataaataacttatctcttaa

SEQ ID NO: 365915 - DNA, 357 bp, Homo Sapiens
  misc_feature (277)..(286): n is a, c, g, or t
ggtttggagactacacttttattaatgcagcctaaaattaagtttataagcagcaacattaaactattagctgtttgaatacatagctaaaatgtactccctcctcccctaacataaacatgtagccaactcttctcccctcagcctgtacttttccagttgatttttgtttagcctaattgtaggtttcacatttctgcttttttcttttactcatatgaaaacctctggccctttcatcgtggggcatgaaccggccaagacacctgataatagnnnnnnnnnntcatagacaaacatgtagcaaccatcagaccatggtgaatgtaaagaatagaccctcatgaggctgggcgc

SEQ ID NO: 365916 - DNA, 446 bp, Homo Sapiens
gctgtgagccactgcaccagcctacctttttcttcttaacaagttacaaaaagatttattagggaaggaagttgagaatatgtaagtagggaattttgttcttttgtatttttatcaaagtattttagttttcatattgcattaaaaaataatactattgaacagtatactattagtaatcactttttatcatgctgtgtcttcatatagtctgaaagaataatttttcttgttacaaaataatgcatttttattgttgaaaatttagaaaatctatctttatttgcaatcttctgtcagtatttctcagcctttttcatttctgtctacttgaacttgatttgcatcattttttcttgttactccaaaccaatttatgtttctctgggtataaatacaaatttaactatatatagatgcaccagctcttatccttttcaccgttt

SEQ ID NO: 365917 - DNA, 646 bp, Homo Sapiens
taatttttaatattcactttattttcatccctggtgtctaggcctgccctctcccccatttctgggcttctggctgcccgaagccgaggttttgagttactgtctctggctgacaactcaaagtgtggaccttctaggggcttgtaggaggcagggtgtggggtggggatcacaggcagcccagcctctttcccaggctctccaatcccctctaagggggtgggatttgcccttggaacctagacgcctcctttccggctgcacacaccctgcctgctgtttcctctagaaatgcaaaactccatccctgcacactcctagatccctgccgcggaagaaatctttgaaaaatgaagtggcttcctttcaggacaatatcaccatttatagtttcctgctatttacatcatatacaattttatctgagttgggcagagtgcacatgacactaaaaaccaatgcaaaagagaatcagtcacaagattttttatcacagtatcaaccaaaatgctcaatcttacatgaaaaagatattttcccactttgttctttcataactgtgacttcttttcctctgggtgtatatgtcacacatttgtatgcattttcaaatgggctacaatttgtaattccagcttggcttgaa

SEQ ID NO: 365918 - DNA, 434 bp, Homo Sapiens
  misc_feature (35)..(35): n is a, c, g, or t
  misc_feature (59)..(59): n is a, c, g, or t
aagaacaatcttcgcatctgcctttctggactttntgctatgaactaaatatttattcncccagagaaactgctgtatactaggtgttatgaaatataaatttttttatatcaaagacattgtataattacatgaagaccaatggagtaattcatcttaattctaagtattagaaaagctttgttttccttgaagaatggacatatttttttccttctaaaacaatgtaagcaaatgaccttctcattttggttgccagaatgctcagtttgtatccctaactgactgcctgtgtaggttatcataacttgtcctgatctcctagtgctcatttgtatgtgttgttttctattttactgtatcttgttcgccatcttgagtcatttttttacacccaatggagttataataaaatagctattgcctattatgat

SEQ ID NO: 365919 - DNA, 256 bp, Homo Sapiens
  misc_feature (83)..(83): n is a, c, g, or t
tctgcctctttcatcaactgtcagagtgtgaataaaattgccatgattgccaggggtggagcctatgcatattgaaacagctnagccttctgttttccaagatgaatttagctgtcgttattgtcaaatgtcaaaacttgcagaaaacataaatcaatactgatttcctaactggacatcattttttgaggaggccaacttatcatttaatggttagttcattacatcagatactttataccctgaaaaagcagtg

SEQ ID NO: 365920 - DNA, 452 bp, Homo Sapiens
cattgtagtacaggattggagagaggagggcagcttggcataagagaggctctgaagtctggaggaaggtgtcagctcactggccaccagcgggcactgagactgcaaatggaccttccaccatgtccgggggtgtcatgaggaaggaggtgaccacagcccttgaaacgtgagaccaccatttgttggagggagctaatgcccccagagtcctgtcagtcatcttgcagcttcagtcctagctctagattggtgcttgtacagtgcgaggctggtcaggcccattccagctctgtggcctcaccttgcaccaagactgactccctggattttactccctatattttattatttaccaacaattagacaatcttcaccctgcaccaagactgactccctggattttactccctatattttattatttaccaacaattagacaatcttatgtt

SEQ ID NO: 365921 - DNA, 411 bp, Homo Sapiens
cacattttatagttattttaatatttttaacagaaaaacatttgatatgattaataacatcatatctaggtattcttgttaaccaagcaattttgagaaccacaggaccctgtattaatctaaaactttaaaaacagtttcccatcttagaatacaccctgagatgcatgaacagaaaaacctataatggaaaagagaagatttagcagtcttctgcaataatttttacatttaatgctaaaagttgggtcacatgtttcaatcaataaggtaatatacacaaaaaacttattagctcacatctcatattatttagaatgtataacatgaaacagctgggttgaaatcaatctttgctttgtaaactttaaaattaataaggaaaatatacctaccatgtattctcgtctt

SEQ ID NO: 365922 - DNA, 450 bp, Homo Sapiens
tttcacaactcattccaaagatgtgcagcatattctcaaagcatttccaaataagctccaagaaatgtttttggtaatggaagcagaaaacaagcctgtagctcatgactactttggaggaagaacttttggatttgtaaatttagtgtgttaaaaaaatcacttatcacagatgtttggaatcttcccactgatttctgcatggctgcttatttttcttcccttaagtctcagttcatgtcacagagggcttccctgacctctcacacctcaccaccatcaacctgttttctccatagcacctatcacagtctgaattgtcttattatggccttacctatccctaacacccatttaaaaatgtaagcatgaaagaaggaacgttgtctatcttgttcattgctgaatccccagtgcctagaatagtaccaataaatacttgttaaatga

SEQ ID NO: 365923 - DNA, 460 bp, Homo Sapiens
gacggctgacttgtaaccctccccactagccttctgagcatttaaacccagccgtcattctctccccactccacgctccccactcctctgccacgttatgttacggcacaaaattaatttctgcccctgtgattgggccacggttgccaaggtaacagtggagctggagctaacttccttctttcatcctttccaatttttctattccagaagacagtcagaataatgcattctgtactacatcctgccttttgaaacctaaatgagttttcgttgatgaaatgttgccttctctgattcattcacaaaactgtggtggttctgaccacctgtgacgaggggggtcataatacttccagtgatccttttaatttagcaaaatatttgtcggtggagggaagtagataagaatgtattagtgtattttaaagtaataatgattaaagaataactaaatgac

SEQ ID NO: 365924 - DNA, 289 bp, Homo Sapiens
cacatggccaaggccagaatgagggagcctgggaaatgtggtcttttattcccagaggcaatcacgcaggggaaaggggagaaatggacgttggggaagatggctggcagtggctgccacactcctatagaggtaagtgcggtcccgtgtgccggtggggactggcaggaaaggtgagccatgggacagtggcagaagtaagaggaagagatactcagcagaagtgatcaccaacagtaggagaggaaaaagaaaggtgaggctgcaaaaaagaaatgggggctcacac

SEQ ID NO: 365925 - DNA, 445 bp, Homo Sapiens
  misc_feature (178)..(178): n is a, c, g, or t
gagaccagccacgcattccacagctgtgccccagggtccaggggatggggctgggggtggtcggacaaaaccactgcccacacttggagctgggggcagccgaacaacaccactgcccacgccttcctggcgagagacggttccagtctccccggtgctggcgtgggcacgccgtggngacagaagcgcagtcattcggcagaggctcccggctgttctcacattgtcagacccaccgtcaaggtcatttcaacggcccctttgcccggccgggcctcctgagttccctctgagcctcagagcagctcgtacacacagctttgggtttctaatggggatggggtcttcaggcctcagccccttctgggcatttcttccgttacaaaggaaaggaaatgtaccgaacactcgaaacagtgtttaataaatagcagatttctcttcc

SEQ ID NO: 365926 - DNA, 307 bp, Homo Sapiens
ctgcaagggccactcctgccagatttgcagatttagccaggtcggcagggctgcgggtgggccaaagtcatgggcctcattccaagccgtggccgctgcactgaccaccctgggtgtgaaggccactcgcatatagaggtgacaggcgacccctctgttgcctttgctctgcctccctggagggctggggagagcaggtaagtggggccatgggggcacttggcatggtgcatggagcacaggggctggggtcgggtccttccaggccacctgccgagagctaaaacatgtgctttgaacgactgcc

SEQ ID NO: 365927 - DNA, 460 bp, Homo Sapiens
ttacatcagatgcataatgtactctatctgggatattagcttctcggtcttgcagtgttgcctaacacacacagtgatcagcacattttttgagactgcaataatcagaggaatgtaacagtgatgtgggaacaagaggaaataacatggaataataatgtacccatcattgttctgttgtcatccctcctagccagtttggtttcccttagagcctaacaaaagcttcacgaattcaatggaataaaacatggaactgggtgcaaaattaatacatctattcccaagctccatattcatagaaaaaaggaaaatattgactacatagggaacagactttccctgaaagctttgtggatctatgcatatgcttatgtaatcttcaaacaagttgtgcagccttttacaaatgtgtctagcctcatttaatctcaagtaagcctgtggataccacaaagga

SEQ ID NO: 365928 - DNA, 427 bp, Homo Sapiens
tataaattcaagatgagttttattatgactcattataactaattccaacagttgatagaaatcatttaaagaattgtaatactgtttggtaatatgttatgtggaaacatagttagaaaatctttccacttcctcagtctggatttcaggaaatgaaacccccccaatttctccccccaaataattcaagctctgctgtgtaagttataggaaataccctcccctgccagctcatttcctcttattgttcaccttgaatggggccctcagctaccttttcatgcctccctctccctacagatgtatcaagcctggtaaaagccaagggcttccacaggaaaagagctaggtcagagatacccaaggccaccatgaattccccttctgtaagagaatgtgaaggggagtttgagaaaagccagaattt

SEQ ID NO: 365929 - DNA, 401 bp, Homo Sapiens
  misc_feature (78)..(78): n is a, c, g, or t
atactcccggtttccctgcccctcaattgcccttggctttttctggtaatgtgctgtgctccacgaccaagccgaganaaggacctagggtggggaagggagggtctcttgattcctaaccgcccccacatactgctccaccgctgaacttcgggtgccggggaggagaaattgggctgatgtgagctccccgtcacccgccatggagccggctgtgtgtgttcatcagatacagttctcccttaaccttgtcctttctctcctgtgtctcagtctccgtcagtctgtctttctccgctcttctctgacccctgtgaggaacctccttaccctgttctggaatcgctgccagactgtagcttttaatttaataaaaataaagtaaaatatgcaactcttaa

SEQ ID NO: 365930 - DNA, 404 bp, Homo Sapiens
aaagagagaccttcctaagaggactcaacccagcggcctgaggggaccagcctccagcaggacccagaagctcccacagtgcccaagaaggggaggaggaaggggcgacaggcagcctctggccactgcagaccccggaaggtcaaggctgacatcccatccttggaaccagaggggacctcagcctcttagcaggaggctctccttgcttgcactcaccctttcttattgtcttgccctgcatctgggggtctgaatttttgggagcaggcaatatctgaaggtgcaaacaggccctacggctgttccctgcacaactctcatggttttaattgtaccccatcttccacatctttaaagctcatgtgaaaaatgctgcatttttaataaactgatacatttga

SEQ ID NO: 365931 - DNA, 748 bp, Homo Sapiens
ttttccacagggcaaacataaagaataacctgaagaaggtatttctcaaagtgaggtcgaaggccccaaaagaagtctaaggtgggctcactagtgtgcattttaaaccaacttcctaggtgattatttcacattccaaaatccgagaactaatgccctatgggaaacagcaccacttaaaagcaaggccataaacatatttctgacatgagatacagaattctaagtttatgatttgaagtgaatactgctttttgttttaaaacaagtttcaggtgttaagagaaacatattaaataaacatgtggatgtatataaacattttcctttgacgttttcattgctttcagacttatgttatttgaaggaaagagagtatatagctagaaactttggaaaaatgacatttccaatgaaatgcagcatccacccctccaaaaaaagataatttattaaatgcctacaaattttaaaacatttgaaatttaaactagataactttcctaaaatttttactaagattaaaaaactttaagtaatttagataatcatgtttactttttaagtcccttttcattaaaaaatatttaaaataaacaacagaaggatgctatatttggcacccccttaaataaactgctaaacactaatattaataaaaaataatccaaggaactctgcctctgaaatgtattctactatgtgttacatgtgttatccagttaataaaaactcactgaaagagctg

SEQ ID NO: 365932 - DNA, 432 bp, Homo Sapiens
cccgcccgcccccggccccgccgcgctagtcggggaagcggcgcgcctgcatcttgcggaagtagccctcggcctccgcctccgcctcgcgctccgccagccccaggccgcccgcgtggcgccgcagcgtggactcccggctgcccgggcccagcgccccatcggccgcgcccagcgggggcagcccctcgcccgtggccaggttgacggtggccacggccccgaaccgcggctcctcctggtccacgtcgctgaccgacgagccgggggacacgcccgggggcttggccccgcacgcggaagccgcgcgccaggtcccccagctcgtagcccccgtcggcctccgccttggccccgccgcccgccgccttccactcccagggcgcgccgccggccgacaggtgcaccacggggtggtgcggcgcgtgcgcg

SEQ ID NO: 365933 - DNA, 533 bp, Homo Sapiens
ttttattgttcactggtttatttttccaaatgagcatcaggctatttacaaatacgcagccctccaatgacgtgtattaaaatggcaagtctatcactgtttgaaatctaaatgaaaacaaatttattaaggcacatttgatctgagaatttaactttctggtataatgacagattcatttcacttttgtccccaaaacacatgagcaccaaaattgtcaaagaacacttaatatttagtaaaaccagtaaggaatataaaaattaaggaggggaaaaagcgtttccaaaaggaaatctttggagatcggtttactgcaaataaaacagactaaacacactcccgatacacataaataatactaactaacaggtactcaagaaatggcagagctctgaacaacagatattaaataaattaaaggtatttcagatacaaaggataaaacaaaacagtaatgaaagaatgaaaaccatctccacccacataacacagacaggatgaaaggaacaaaaccaaatacattttccccc

SEQ ID NO: 365934 - DNA, 351 bp, Homo Sapiens
agtccagatcacagtatacttactgaagaaatgatttgttcacaggaactagaatcttctacctctcctagtaaacattttccatttggttttctgtttgaacagtcacttcccaaaagctgcacatctgtgtcaaagcaggagtctagcaaaggaagtcataggactggaggacaatgtcacctgcctatcaagtcccatcagcactgttatagttggtcagatgagtcattatctatgacacagtcagaaactacatctgaccagagtgatattgaaggtaggatcagagctctgaaggatgagttgcggaaaagaaaatcagttgtgaaccagctgaagaaggaacag

SEQ ID NO: 365935 - DNA, 417 bp, Homo Sapiens
  misc_feature (99)..(132): n is a, c, g, or t
ggtcgctggaggattaagggacttaatctgctaggaacacctgtacttgaagtggaggaggctagggggccacagttgctgcttcattaacatagaggnnnnnnnnnnnnnnnnnnnnnnnnnnnnnnnnnnagtggattggcagactccttgttgcttaagagtggctttctaggcaggccactggcatctgaattcatcattgacaataaatgtaagaaattggaataaaaaagagagacctgctgttattcgcttttgttctccagtgatttgattaactcagggcaaggctgaatatcagagtgtatcgcactgaagaataataatccattcagtaatgttatagttatcctcaatctaaatatgtcaactgtcattttgctacttttcaaataaaatacttgaaaactgtca

SEQ ID NO: 365936 - DNA, 945 bp, Homo Sapiens
  misc_feature (627)..(660): n is a, c, g, or t
ggtgtataaataaaccaaaggaagtaagcagtcatattgctaatttgctaactcctatctattgaatggtgaagttttaaaaatttccccaggtaagtttaagattcaaacaccatctattgagcacctacattgtgtgccaggtagtaaaataggtgctttcatacacatcgtctcaattcctgtgaggtcagaattatctctgcatttgaaacttgaggaaacatgctcagagtgcaagaagcttccttgcctgagatcacctagaaaggaaccctcagagccggcaactgaatcttggtccctgtgatgtcaagcccattgctctcccactgcagaacatggcctctagattaatgccaccgattcaggaacacctccgacagtcttgaaatacccccatgttgccttgtttgttttttccttctggcttcttctattacagtctcttcattggaagctctgtaggccaaggccagagctgatactgacacggagccaatgcagatagcacatcagatgctaggggtcgctgggaggattaagggacttaatctgctaggaacacctgtacttgaagtggaggaggctagggggccacagttgctgcttcattaacatagaggnnnnnnnnnnnnnnnnnnnnnnnnnnnnnnnnnnagtggattggcagactccttgttgcttaagagtggctttctaggcaggccactggcatctgaattcatcattgacaataaatgtaagaaattggaataaaaaagagagacctgctgttattcgcttttgttctccagtgatttgattaactcagggcaaggctgaatatcagagtgtatcgcactgaagaataataatccattcagtaatgttatagttatcctcaatctaaatatgtcaactgtcattttgctgcttttcaaataaaatacttgaaaactgtca

SEQ ID NO: 365937 - DNA, 358 bp, Homo Sapiens
  misc_feature (59)..(59): n is a, c, g, or t
aatattattcatcaaaagaaatgaagtgatacatgctataacataaatgaaccttgaanaacatgaagagtgaaagaagccagtcacaaagaaccatatattctatgattccatttataggaaatgcctagcataggtagacctatagagacagaaagtagattagtggttgccttgggctggatgcagacagtgactactaaagggtatgttcctacttcttagggtgataaaaatatttgaaattgattattttgatagttgtacaactctgaatatccataaaaccattgaattgtacactttaaatgagtgatttgtatggtatatgaattatatctcaataaagctgttacca

SEQ ID NO: 365938 - DNA, 643 bp, Homo Sapiens
  misc_feature (596)..(596): n is a, c, g, or t
  misc_feature (624)..(624): n is a, c, g, or t
ggacacacactttggttcaggtatccccgacctttccccagaggacgggaaaattaggaaagaccgaaagatagacccaccagtcttcggagcgctctcatctgtgcgtcctgggcagagcgagagacttggcggaatgcgggtaggagaaccggtctcgggttgccgccaggggatccattgcgtgagaggcaggtccgacttatgctgggggcacttggagttgaggaaccacagagtccactgaaccggattaatcttttatccctcagggcttctcaggccctgcatggaggaatccaggagctggacaaagaccaactgaaactagacttgccaaagatgctatttgtggtcacagaaacatagagctggacatgaccttaagaagtcacctgagcagacactgtgatgggcactgtagtagctctattgctcagacttggtttttgtttgacttttgctgctctgaactttaattcctaaaaacactgcatttttaaggaaaaacacaaaatattagcagttataataaataggtattttattgcatgcttttcgtgcatctattaagatgatcatatgggtattctccntttatctgttaatgagatcagttacatncataaactttctaatgaca

SEQ ID NO: 365939 - DNA, 515 bp, Homo Sapiens
aagctcgagttgacaaagtctccatctcccttggaaagtttcttaaagtctttagctttctggctttgcttgtggctatttttctgattttcctataagtaaaagatctcctaaatggaaagatgcacagagtagatttacaatgctccaattcctctcttacagcaatattgccttcacagttataaactgtattcaaatagtaaaggccaccctctcgcttccctggctggccccagggctaccactggtattcctgagcctctcccagctccacttctaatgctagagaatgataactaagacttctgtgcatttgaaggttgttggaaagttacaggttcattttagaaagaaagctgttcttgacagcactctgagccatcatacctctttcccatataaactattttcacagatctcaactaaaaccccttacttcacaaatgattgtgttgtgctgaaatggtgctcttatagtactggcttattaaaagtaaaaaataaacctaaaa

SEQ ID NO: 365940 - DNA, 451 bp, Homo Sapiens
  misc_feature (22)..(22): n is a, c, g, or t
  misc_feature (101)..(101): n is a, c, g, or t
  misc_feature (111)..(111): n is a, c, g, or t
ttcctctaacagggaccagctnttccgctttttgccccacggggttcctctaaccaagaacccagcttcctagcctcgtagagaccaaaaggccgcccccngcctgctggngttcctcccagcaccccagcttgctggctgccctctttcccttctggcctccagctgggtgtgggggggcggagcaaggcgggggacaaacgcagcaccttcttagcgatctaggcctggcaagagctctggccccaaggcctcctcttcccaggggctgccaagtcctggccctggccctggcatatcaccccgcactgtggggccaggcaccactagcctggctcaaatattccccagggagactgctgtgtgctgcccgcctgcctgctggctctcccccagccccacatcccctttggaagagaatgtaaaataaacctggacacaagggaaaaaa

SEQ ID NO: 365941 - DNA, 864 bp, Homo Sapiens
ctggaccggtccggattcccgggatgggaaagcctgggaggactcactaatacattgcagcttcggggcggagctgtgagtcccttgccgcatgtattggactccaagggggccactcagagcctgttgctgagacacttctgttctcgcgggtgtacagcaagtactcagtgactgtgtggtggggggagctggggcccgggcattaatagatgatccacagagctgtcattctaagtctcagtgcagagccataggggttcccagcagagaatggtcactgaggtcagggtgcctccaccacaggaggggccttgacagatgtagaccacttctgactgggacccactaacttctcactgggagcagagttaatcaagtcacagagatgggtaagaaggcaaggggccacttctcaatgtggtgagcggtacaggtgagcagagcacagggctccagcagccggatagggaagggggccccagcccaccctacagctctactccctccatcctgctgcagaccccccattcacacagtgagtcagtaacaggaaggagcccttggactgcggcaatgccattagcgaccccatgggggaaaagggaagtggggaggggaaaagaagaggcgaggcatcctagctccctcaggccggaaggctgcaacagctgcagccagccccccactctgccctcaaccccgtcccggccccaacactccactcacttaatgggtcggtgggccaggagcccgggccaattcaaaaccaccaagggcatctttgagaccttcttccccagatcttactgaaataaggaatgggctaaaaaattttcttaccccttttccaacttcccaagg

SEQ ID NO: 365942 - DNA, 1487 bp, Homo Sapiens
  misc_feature (25)..(26): n is a, c, g, or t
actcccacacccgaacaaaaagcannccgctccacacaaaccgctggtaccggtccggaattctttcgatgccaggggaggttacaggtacctgttctttaagaagaatctttgggcatatacatttttagcctgtgtcattgccccaaatggattcctgtttcaagttcacacctgcagattctaggacctgtgtcctagacttcagggactcagctgtttctagagttcctaccatggagtgggtctggaggacctgcccggtgggggggcagagccctgctccctccgggtcttcctactcttctctctgctctgacgggatttgttgattctctccattttggtgtctttctcttttagatattgtatcaatctttagaaaaggcatagtctacttgttataaatcgttaggatactgcctcccccagggtctaaaattacatattagaggggaaaagctgaacactgaagtcagttctcaacaatttagaaggaaaacctagaaaacatttggcagaaaattacatttcgatgtttttgaatgaatacgagcaagcttttacaacagtgctgatctaaaaatacttagcacttggcctgagatgcctggtgagcattacaggcaaggggaatctggaggtagccgacctgaggacatggcttctgaacctgtcttttgggagtggtatggaaagtggagcgttcaccagtgacctggaaggcccagcacccaccctcctttcccactcttctcatctttgacagagcctgccccagcgctgacgggtcaggaaaacacccaggggaactaggaaagcacttctgccctgaggggcaacctgcccttgcccactcctggctctgctcgcctcggatcagctgaaccttcttgagctggcctctcactgcctccccaaggccccctgcctgccctgtcaggaggcagaaggaagcaggtgtgagggcagtgcaaggagggagcacaacccccagctcccgctccgggctccgacttgtgcacaggcagagcccagaccctggaggaaatcctacctttgaattcaagaacatttggggaattggaaatctctttgcccccaaacccccattctgtcctacctttaatcaggtcctgctcagcagtgagagcagatgaggtgaaaaggccaagaggtttggctcctgcccactgatagcccctctccccgcagtgtttgtgtgtcaagtggcaaagctgttcttcctggtgaccctgattatatccagtaacacatagactgtgcgcataggcctgctttgtctcctctatcctgggctttgtttggctttttagtttggcttttagtttttctgtccctttatttaacgcagcgactagacacacaaagcagttgaattttatatatatatctgtatatgcaccaattataactcaatttgcttgtggtccacacaacaaaaaaaggactgttaaattatcctg

SEQ ID NO: 365943 - DNA, 319 bp, Homo Sapiens
  misc_feature (87)..(138): n is a, c, g, or t
aaagctgttcttcctggtgaccctgattatatccagtaacacatagactgtgcgcataggcctgctttgtctcctctatcctgggcnnnnnnnnnnnnnnnnnnnnnnnnnnnnnnnnnnnnnnnnnnnnnnnnnnnncgcaccgactagacacacaaagcagttgaatttttatatatatatctgtatattgcacaattataaactcattttgcttgtggctccacacacacaaaaaaagacctgttaaaattatacctgttgcttaattacaatatttctgataaccatagcataggacaagggaaaataaaaaaag

SEQ ID NO: 365944 - DNA, 800 bp, Homo Sapiens
aggtggagctaaaacggctaattgatcttgagataagaaataccctttactaaggcaaagatttaattgaaattccaaatgactttataggaaacgaaaggcaattctccagtttgcttgtccttctgccagaaattctgaatgtgcatacacgcatgaaggataatgaatggtcttcaacggctgctatattaggttctctgattcttcatgacctatgtatgtttggataatacaatattgtatacaaatgtggatcgttttgtcaccgatttaatattgccattgttaatttgctgtaacaattggtatacacttgtgttttcagaagctatcctttgaggagaaagtcaaaatgtgttgttagcctacctccactcaggcctcttgctgtgtaatcattattccaggttatgatgtgcatagcttttaaaaactgcgtgtactattattctgctctttcccatactcattgtcatgtattcagaacctaaacttatagcaaaagagccaagcagtagcagtttttgtaaatgtaaaaataattagatccagactttgtttccttcaattttaaaaataaaaaatacctcagtgctatgtttttcagttatcacctgcatttctcaaaaaataacacctgcttcatgtggcacataacttgtaagaatcacattttggattttaaagaaagactattaaatattttaagatcactatcaatgacatttccctttccttttattcaacaatggagcctactgcagtagcgatttttaccttatagcttaggtgctgac

SEQ ID NO: 365945 - DNA, 790 bp, Homo Sapiens
agcggggaggcgcggtggcggagctggagccgcggccacgcggcgggagcacgcggaggccttgctgctggcctgctacctgccccccggcttcctgtcggcgcccgggcagcgcgtgggcatgctggctgaggcggcgcgcacactcgagaagcttggcgatcgccggctgctgcacgactgtcagcagatgctcatgcgcctgggcggtgggaccactgtcacttcaggctagaccccgtgtccccggcctcagcacccatgtctctagccactttggtcccgtgcagcttctgtcctgcgtcgaagctttgaaggccgaaggcagtgcaagagactctggcctccacagttcgacctgcggctgctgtgtgccttcgcggtggaaggcccgaggggcgcgatcttgaccctaagaccggcggccatgatggtgctgacctctggtggccgatcggggcactgcaggggccgagccattttggggggcccccctccttgctctgcaggcaccttagtggcttttttcctcctgtgtacagggaagagaggggtacatttccctgtgctgacggaagccaacttggctttcccggactgcaagcagggctctgccccagaggcctctctctccgtcgtgggagagagacgtgtacatagtgtaggtcagcgtgcttagcctcctgacctgaggctcctgtgctactttgccttttgcaaactttattttcatagattgagaagttttgtacagagaattaaaaatgaaattatttataatctggaaaaa

SEQ ID NO: 365946 - DNA, 613 bp, Homo Sapiens
caggagcagagggaggcccggggaagctctggactcatagcggttcagcacggccacgacacggccacttccagacagagcccctggctgctgggtagggaccgcagcacctcagagaaccctttctggggtcacttctggcaccctctgcaaacctcaagggggagcgtgaggctgggggctgtccatcagggtccaggcacctcctgaaggaacctctcaaagccagccgatcaccggctccagacccacgctgtcagacatctctgtggccaccagaccactgccactctcacgggtgtgatgacatgggacctgcctactggtagtcttctgccttcgtggaattctgcaacttccttcctgcctcggccacagcatgtcagccaagcacctgtcagggtccctccctggcaggacgatgtttagaagctcaacaccgtgctcctgcctcctcttcagacccatcagaacttgctaccatgggtgtgttttaataaataacttcatttctgcagcaaataaataaataaataaatgtagttgcaatattgcctttaaaagcacttttaagcatcaattgtgaaataaaaagcccgagcaaaagccctca

SEQ ID NO: 365947 - DNA, 378 bp, Homo Sapiens
agtctgagtaaataattatgaatcggctctcagaattctccaggctcactgaattctgcaacctctggagagcattttaaatgctagcagaacattttaaataccactgatacccaatgcatcataagcatccactgcaagagaattaccaggaaatttcagtgccacgtggcaaatactcaggcaattacaagcagaaatagtttcagaaattgtttcttcatgtgaaggacggtggaagaccatgccattggatgacaatcacatagaattggtcatgttgacacttatctgcctcatcctggagcacttctgggaagacttcatctgtttaagaaccataatctcagcaccctgagataaaacaacaacaacaac

SEQ ID NO: 365948 - DNA, 422 bp, Homo Sapiens
  misc_feature (50)..(50): n is a, c, g, or t
acagattgttttatttattgtaatcatatgagaaactgacttctatttantttcttctttaggtatttacttggtgtttgcctttgagaaacagcagtgagcacataggcagtagtcccagaggggccgtgttctgtcctgcacaaatttgaacaactcatctcgatatatttgatatttctctgtctgttgattttaattctaaatgtgcaggatgctgccagaaactccaatgtagaaattcaacatttgctgtctgtgacagatgaacttttgcatgtgtatataagaatgagttgggacctctgtctttaaaaatctatttttaggtaatgttctaagaattccatttgcctctatgatcttagctcataaaaatataatatgacttgataaagcaactaaactcttcccacagtgtt

SEQ ID NO: 365949 - DNA, 434 bp, Homo Sapiens
  misc_feature (143)..(163): n is a, c, g, or t
gggacttggaaaatgtggtatattctaagtcaagatgctatgaagttgttatagtttaagggacattcttaagaaggaattacttaagtacattactcttctcatttcaaggacatgaaaaagtaaaggatggtctggcactnnnnnnnnnnnnnnnnnnnnngacttgtactgaatatatgtactttgaagatttacatctataactagaaagtatgctaatccgaggtctggttattaggccagattcttgttcagttattttttaaactaatgttgcctcctttttagtaagattctacgaaagttttttaactattaaagttatttcttaaggggtagctcttatacttcctctgctctctttttcagtttccataaaaagctgttttcttagctattactccaaataaagttctttggtttgcttaaaa

SEQ ID NO: 365950 - DNA, 482 bp, Homo Sapiens
  misc_feature (38)..(38): n is a, c, g, or t
  misc_feature (99)..(99): n is a, c, g, or t
  misc_feature (105)..(105): n is a, c, g, or t
  misc_feature (378)..(387): n is a, c, g, or t
agaatgcattggaatccttagcacaatgaatcagcagnagaaacaattaatgagcttgcagacatgcttatttgcaaattacaccagaggaaaatgganaaatgnaatttttaaaaagtgaagcacacctacaggacctagaaaatagcctcaaaaagggcaagttattggccttaaagagcaggtaggatagggttagaaagtttattcaaaggaataaaaatacagaaattcccaaacctagagaaaggtatcaatataaaagtacaagaaggttatagaacaccaaacagatttaactcaaagattacctcaaggcatttagtagtcaaactcccaaaggtcaagaatgaggaaaggatctgaaaagcagcaagnnnnnnnnnntaacatacaatggagaaccaatacatctagcagcagagttttcagtggaaactcaaaagccagaagagagtgacatgacataaagagctgacaaa

SEQ ID NO: 365951 - DNA, 490 bp, Homo Sapiens
agagtccctcattctgcttcatgtgacatcagcaagactgaactctcctctgcttgctgtgctctgttcttgctggtttgtaagtggcagcaatcataagaggcaggaacacagcttcccatttgtttttcaggtttaagctgtggttttggaaatgacaggaagtaggaaaatgaagcttttggctggcctttgaagaaactggaagtagaggtgacagaatacatgcggattgctctggacctttttggaaaatcactcttttgcccaacacagttggcaaccatcctgggaccgataaaattcctttgcacttcatcagaatttaactttggcttaatctgtcaaagtcacaaccacatctctcaagagtaccatttggccacaagtcaaatacattatcacaaacacattagatgttcctgaatagcattcctaacccatagctgatgtccacattcatcgagcaagatcaaataccaaaagaaaa

SEQ ID NO: 365952 - DNA, 543 bp, Homo Sapiens
aaatatacacatatattttattttaaaaagcacaagaacattatacaagttttaaatttacatttttgcaataaaagttatcaatatatgcattatttgtataacttcatcatggatggaatttgaatcagtggtataaacatgttgcagtcactaaatatagatcatcatcacagtgaaccaaaatgcatagttgttatgaaatgacaaatgaccactaaaaggtgaactcacagcccatacaccaatataataaattaattatacagatatatttttcttcaccatatcattaaaattctcactagccccttaccaaacattagaaaaacacagttctggagccatcctgttgaaccagtgccttcacatactacactaaagaaaataaagtgactcagttgcttgtttgtaagtaaacttcataagcataattgtttgcaatgattaaggtaaatcactaggacatttgaacataatgagaaatccctggggcttggggcagcactgagacatacgctcatctacagtgcaaaaatctga

SEQ ID NO: 365953 - DNA, 883 bp, Homo Sapiens
gaaagcaagcaggaagacaagaatgccatggatgtcattgtgaaggtcatcaaacgctgtgacatcatactcgtgatggaaatcaaggacagcaacaacaggatctgccccatactgatggagaagctgaacagaaattcaaggagaggcataacgtacaactatgtgattagctctcggcttggaagaaacacatataaagaacaatatgcctttctctacaaggaaaagctggtgtctgtgaagaggagttatcactaccatgactatcaggatggagacgcagatgtgttttccagggagccctttgtggtctggttccaatctccccacactgctgtcaaagacttcgtgattatccccctgcacaccaccccagagacatccgttaaggagatcgatgagttggatcaggtctacaccaacgtgaaacacagctgccaaggcgaagaattccatcatcatgggtgacttcaacgccggctgcagctacgtccccaagaaggcctgcaagaacatccgcttgaggactgaccccaggtttgtttggctgatcggggaccaagaggacaccacggtgaagaagagcaccaactgtgcatatgacaggattgtgcttagaggacaagaaatcgtcagttctgttgttcccaagtcaaacagtgtttttgacttccagaaagcttacaacctgactgaagaggaggccctggatgtcagcgaccactttccagttgaatttaaaccacagtcttcaagggccttcaccaacagcaaaaaatctgtcactctaaggaagaaaacaaagagcaaacgctcctagacccaagggtctcatcttattaaccatttcttgcctctaaataaaatgtctctaacagat

SEQ ID NO: 365954 - DNA, 580 bp, Homo Sapiens
caagatcttctgagtactctggggtgtgagtatgtgtgcacacgtgtgtgttggagtgagtgagagaatgtgtctgtgcatgtggccatgctttcctagaatgtcaagtagatatttttacactttgagttttaaagcaattactatcagactgagatcttgtatgccaaactttaatctgcttttatgttttcaggctgaaggtgtgaaaatcctaagaggatttcatattgaatatgtgtacacaatcttaactatcgtggtggaaaacatactactataatttattattatatcttccagataatgttattcatttagaacaaataaggtatattttttagaatcaactttgtaagcactataaaatctttaataagttataaggtctatgatgtgtttactttaaaaattgctgttaaaagcaacacgtattaaatatgtaattatcatctgggttaagagtctgtttttccttcctttgtggtaagtccttagaatatggtactgtggattaatctaatgaaattaacatatgtggttgaagttacccaagaaacgatgaaaagaaactaaatat

SEQ ID NO: 365955 - DNA, 785 bp, Homo Sapiens
  misc_feature (214)..(214): n is a, c, g, or t
aacggctaggtacgaggctgggtgttgaattcggcacgaggctcagtgtggaggacgtgggtgctcccagcctggctcgcaccgtgggccgcctggtggaggtgttcccagacggcaccagccagctgcagctgcagcgctccccagggggcactttcggcttctgcgtggcctctgggaatgggcgcccagactcagggatctacgtgcaggnagatggctgacatgagcatggccaagctgtactcagggctgctgggggtgggcgatgagatcctcgaggtgaacggggccaaggtggcagggctgggcttggctcacattaaggagctcctggcccactcagagagcttgtcaatccgtgtcctgaggcagagacctgtcccacggtgacccagaagtgccgctgccctcactgtcacggcctcggaagccctgaagcactcagggtggttggcaggaacgtgctgcacagagctgctctgtggcggaaacagatcctggcagcatctaaccccttgggctgtggcagggcttctgtggtgggctgcctttgggagacgcaaggagcctgtttgcatattttgtttaaggccatttatccagaactagaaaaagaaacaatgggtctccttccatgtctgagggggtgtcaacatctacttgtacctttgttggcgggggagaagggagattcagtggatcctttggttgatgcctgagagacggctcactctggccctggccggtccaggtcagctccacctgtggaccgagccttccct

SEQ ID NO: 365956 - DNA, 1027 bp, Homo Sapiens
  misc_feature (710)..(725): n is a, c, g, or t
tttcctggctcaagggctttagtcaataagatatgaaaagtatgcccccaaacagacttttcagataggtctgtcgctgtattcctgtattaggaaaacgatcatgtaagtcagctgttaaaaatattctttaacaaattttatattgatatccacacttcagaaaaagaacaggacatttatagctttttcccctgatagctgtgtgtaggaagtgtgccttaagaaaatgaaatgcctgttttgaattttagaattcaaacctagtgctacatagggctcatttttattggaaagatggagtctagctcttggtgactagcattagaataagcagatggattttaataattagtggcgttgggaagttcagtcaattccatttattgaattgatacagaaattaacttaggcacattaagaaattacatgtgttagtacagatttttggcttaaaaaattagtatctttgctttttgatgctggcagtgggtattctcagagttgtgtgtggatttacaagtttatcagcccactcttttcagaaaggtgattgaaatccctgtcatgctacagaaatgaatataaacgatttcaaactagttcttggtttctagatgggtatggtatcatagtcttctttagctttcctttttccagagagattaattatttttctggttcttaatggtcattttcctctaatcttnnnnnnnnnnnnnnnntggagtgggtagtggtggtgaagaggataaaaccccatcaaaaaacaaaagctctgacactgtgtaaccaagatccgcagcgttgctgtgatgctgttccgttctagccagttggtaaagaaagcacagatgactaacagtctaatcttcaaacctgtgctgattctgaaacacaaatggacaaaaatgaaagaaaatcttaccttctacaggcaattaaaaagggaggtttttgcttttaaatgagaaaggaaaatacctttttggtactactgtcattcacttttcttaaaggacccgct

SEQ ID NO: 365957 - DNA, 414 bp, Homo Sapiens
ggatctatatgttatatgtgaatttctataattatataattcctataaggacattaacatattggttatttctaggcgatcttaattgcacacctattgaaataaacctgtagtttcaagaagtggaagaagaagaggtagaagaggcagagaatgagggagaagaagcaaaaactgaaggtctgatgaaggatgacagggctgaaagtcaagcaagcagcttaggacaaaaagtaggcgagagtagtgagcaagtgtctgaagaaaagacaaatgaagcctaatcgtttttctagaaggaaaataaattctaattgataatgaatttcgttcaatattatccttgcttttcatggaaacacagtaacctgtatgctgtgattcctgttcactactgtgtaaagtaaaaactaa

SEQ ID NO: 365958 - DNA, 319 bp, Homo Sapiens
agctgctgtgagtccagctgaggcccaccaggttggtccctccagccctggttaggcactgagggctctggacgggctccaggaaccctgggctgatgggagcagtgagcgggctccgctgccccctgccctgcactggaccaggagtctggagatgcctgggtagccctcagcatttggaggggaacctgttcccgtcggtccccaaatatccccttctttttatggggttaaggaagggaccgagagatcagatagttgctgttttgtaaaatgtaatgtatatgtggtttttagtaaaatagggcacctgtttcac

SEQ ID NO: 365959 - DNA, 455 bp, Homo Sapiens
  misc_feature (347)..(414): n is a, c, g, or t
aaataaaggcccaggtattaattatgaggcttgttctgagttacccctgctagtaagagatacagcaggaattcccaatcctgccccagtaaagtttgtattctccgttctgtgatttctactacatcattaaggcttcatcaaagctactctttccttttaaccactttgccacctttgaaaatgtcttagcatatattttcatattgttattttagctattgattttatgcttattcacacatgtcaatatcctcactatttttttacacaggcatatcttttaaaatacattttgctcctcaggagtgtattacctagttaagaataactggccgggcgcggtnnnnnnnnnnnnnnnnnnnnnnnnnnnnnnnnnnnnnnnnnnnnnnnnnnnnnnnnnnnnnnnnnnnnaccatcctggctaatacggtgaagccctgtctgtactgaaa

SEQ ID NO: 365960 - DNA, 808 bp, Homo Sapiens
tcggcgcgcgcttccccacgcagcagacgacgtgcgccccgggccaggccacctggtgtccgctcgcatgaacgtgcgcggcaccgacggcgcccccgcctactccatctacggccgctcacgttgctcagcgcccttcctcactccgggacctggcaggtacttcccggagcgagcggggaacgcgacgtaccccagtgcgcctcggcacaccattgctccccgaaactggggtgtccaggcggaacagcagagcccaggtcccgcggcctatacggtgccctcgctcttgggtccgcgcgtcatcggcaaagtctccgccccaacttgctccatctacggccgcagagcggctggcagtttcttcgaggacctcagcaagaccccgggcccctgcgcctatcaggtcgtgagtccaggggtctacaagtcccgggccccccagttcacgattctggcgcggacttcgctcccccaagacaacactcggaagccagggcccgcggcctacaacgtggatcaggtggcctggagcccagggtcaagggtcagagtcaggagagtggggagggcctgaggtcggagtgatgggatcagaatccccgggggtccaggggtcccggcgcggagaggatgccggccccgcgaggtcaacggtgtctccgggcccgcagcaccggaagccccgcggctggagtttcgggatccggcactcggactacctggccccgctggtgaccgacgcggacaactgacccgccaggcgggagcggccccacacgtgtttgcttaaagtctgcgagtccgc

SEQ ID NO: 365961 - DNA, 1072 bp, Homo Sapiens
acccacaggtgagtgtgggaacttcctggaagggaagtgctgagatcccgactgggcagcgaggcaagatgggctggactcgggtgctgataacgggccttgtctaggagcttcaggatggcgatgtcagcaatcaagcaggatggggtcattagttgggatgcagaatgatagcagaaatctgtaggctctggatggtcttctcatcccggtcatcatcccggtagaattttccccaaaacaactttcaggtctgctgtcttgatcattggtgaccctcccccaggtcagtaacacagtgggcagccaccaccacagtgcgctcattcaccagggcaccgctgcagactaggaaccacgctcccttgtgtaggctgcacgtcaatgcaccccgctggtcctcactgtagatggctgcctgccaccggccagcgcaacccttgggtctttggagcagtgatgttctcaattttcccgcagatagggatgcaggatggtgcccgcccactccacttcccagtcctcagacatgtcctcctgctgctgcccaggcggcggtagaagggtgagatgcactcatactggagctgggtatgcagatgttggtatcccatgggcagatctccaaagggaagggctggcttcttggtaggggcactctgcagtttctgcttgctgaaggccgctgagtatagctggtgtaatggtgtctcccttgactgaacctgcatcggaagaactctccttctcaccaggtctgaaatctttggttctcggcaggcttttatgcagatgggctgtttccctgaccactctccattctgctggcaagttcttttctcattgccactaagaacataggagttgttacaaaagaaagacaccacggtgccaattttagcatggcgtccgttgataagcccagggccccctgttattttctggtacccattgactgggcccccagggtctgagcagtttctttcttcaaggagattttcacagcgctgcccagtatagcctgccaagcaggcacacttgtaagatccagccttgtcaaggacgcacgtgc

SEQ ID NO: 365962 - DNA, 403 bp, Homo Sapiens
ctggtaactgtagggaaagagcatgactggtgtgttacagctacacacgccccctggtggtatttccagttgtttgtcctcttcatgcaaatgttgccaccttgtgccagctctctcacctagcttccttcatgacgacagtggttgcaattctgctcctctctctgccttcccctgtccttggctccccatgtccagaatctgatcatttactggtgtgcaccctgggatgtgatgtgtgctttgggaggagacaggacccaacagtatctcagctgtcctctggtaatcagtgtgcaccacattacaagcatcctcatcccagtatcctccctattgaaaaagaaatgggaaaggggtggatgtgtcaataaacacaacattgaaggcatctgaaatagaa

SEQ ID NO: 365963 - DNA, 425 bp, Homo Sapiens
gctaagtgtttgctaggggcagcttctggccctgactgcttgtggggtccaaggaaaagcactggcagctcttctgctcagtggctttgtcccctgaagatccacttcaccaattctttaatgcgtgatctctgacttaatggcaaagaaaagtaaaagaacacggcttagtggcaggctgtgatgatcccagaagaggcattaacattcggcttcaggaatgaagcctcattcccggcccaccgtgcggtctcagagtctgagaaccacgagatcaacagcggcgccccctcccggcgcacagtcccgcggacggccgcgcgggggcagcacgcggcccggcccccgagcgcccgcggttgactttgcaaaaaattgggggattttccacactcgcttccctcgtcgttcgtccggcggccgct

SEQ ID NO: 365964 - DNA, 566 bp, Homo Sapiens
  misc_feature (15)..(15): n is a, c, g, or t
  misc_feature (59)..(59): n is a, c, g, or t
  misc_feature (73)..(73): n is a, c, g, or t
  misc_feature (123)..(123): n is a, c, g, or t
gcacaaggggaccanagagggttcctttgaacccccttgccccacccaaaggccttgcnctccggcccttggncaccttgaggaaggtggtttgaatgcaaccagcacttctcctgagctatncgaaaaattctacgactgtgaggaggaggtggagcggctttgcttccctatgaaggcgccttcactgcttgccaagagccccttcctctcttgtttcccaatggaaacggcctcttcagaaggcagatcgggctgtctctttcctgtggaaatagaactgtcgtaaaggtgtagaagggagagaagttgggacaccaagtctgagcttggagtggcagtcgtccaaaccccaggaagagagctctaaagatggggcttcgggggtaggaatccaggatgcttagtttctagaccctgcttgaaagttctagagcctttgaaagggagttagtctagaggcagccacttagaaaggtggaatttgggctttttggacagactgcttccttgaactttgtgttaaaaacagttctgcttctgaaaataaagtttttaatcagaaa

SEQ ID NO: 365965 - DNA, 668 bp, Homo Sapiens
agcgggggcctacaagacagcgcaaatgtggctttgtaagtcaaatagagacaaggaatgtggacagttactaatatctgaaaaccagaaggtggcagcgcaccataagtgcatgctcttttcatctgctttggtatcatcacactctgataatgaaagtcttggtggattttctattgaagatgtccaaaaggaaattaaaagaggcacgaagctgatgtgttctttgtgccattgtcctggagcaacaattggttgtgatgtgaaaacatgtcacaggacataccactaccactgtgcattgcatgataaagctcaaatacgagagaaaccttcacaaggaatttacatggtctattgccgaaaacacaagaaaactgcacataactccgaagctgatttagaagaaagttttaatgaacatgaactggagccctcatcacctaaaagtacaaagaacagtcgcaaaggaaggccaagaaaaactaattttaaagggctgtcagaagataccaggtccaacataactcccatggcaacaggatgaaatggaaagtagtacctatagagataggtctccacacagaagcagcctagtgacacaggcctacatggggattagccatgtaggggaggaagaaatgaagcacgaggaaaactgcataaag

SEQ ID NO: 365966 - DNA, 710 bp, Homo Sapiens
  misc_feature (424)..(437): n is a, c, g, or t
cgcttatttagctttaaaataaaaattaataggcaaagcaatggaatatttgcagtttcacctaaagagcagcataaggaggcgggaatccaaagtgaagttgtttgatatggtctacttcttttttggaatttcctgaccattaattaaagaattggatttgcaagtttgaaaactggaaaagcaagagatgggatgccataatagtaaacagcccttgtgttggatgtaacccaatcccagatttgagtgtgtgttgattatttttttgtcttccacttttctattatgtgtaaatcacttttatttctgcagacattttcctctcagataggatgacattttgttttgtattattttgtctttcctcatgaatgcactgataatattttaaatgctctattttaagatctcttgaatctgnnnnnnnnnnnnnnaatttgggggttctgtaaggtctttatttcccataagtaaatattgccatgggagggggggtggaggtggcaaggaaggggtgaagtgctagtatgcaagtgggcagcaattatttttgtgttaatcagcagtacaatttgatcgttggcatggttaaaaaatggaatataagattagctgttttgtattttgatgaccaattacgctgtattttaacacgatgtatgtctgtttttgtggtgctctagtggtaaataaattatttcgatgat

SEQ ID NO: 365967 - DNA, 632 bp, Homo Sapiens
  misc_feature (396)..(433): n is a, c, g, or t
cctttaaattcccagattgtcaatagacatgtacagtatatgggataaggtggacacaagtgcacatataaataaaatcctcttaagacttttaactattcatttacagtaggagagtatgtagaaatcatcatccacaagtcataattaggttgtgtgcctactgtagttttttccatttctgtattatataaacatttgcatattaaaatttgatttttcccagagacaagtattatatactgtatctatatttaaatcaaactgtggtaatatatttctcagaaaataatgttggggactatagcctgaacatgtggacttgaagcgacatggaggaggaggttgatcccattgtgtataagttaatatgtgataactattgaatcttgtacnnnnnnnnnnnnnnnnnnnnnnnnnnnnnnnnnnnnnntacagtttttattttgaaatacatttgttctctggagaatgtactttatctttttttcctccagtcttttacagatatttaaaagcatttaaatgatgacagcatttacttaaatctttcaggtgctactggattttgcattagtgtgttatgttgtgaaatcctaactttgacataaaaggttttataagtaaaaaaa

SEQ ID NO: 365968 - DNA, 663 bp, Homo Sapiens
catacatattaattacatacttcatgagcaacaggtctttgagtataggataactgattatgtttttacagcaaaaacctttaaattttttcttcttctgtacttatatttactccttgttatgcctagtacagtgtggaccacaggtaagcactcaataaaatgtctgagtaaatgaatagtactaatataagaatatactgagaaaagagataaaagactatcaaacaatgatagaaaagattgttaggaggaagatagcaattgattagtagttgccaaaagtcgttcaatagtgttcccacatcaacaaaagaggacaaacacagacaaagatcaatttttcttttgccgtgcatttctaaagcaaactcccacatcactttctccctctaacttagtaaaagcagaagggcatttttgccccactcctggacaaggtaaattagcatcattacctattcacttcccctctctgcctccactgcccaacagtgacattatcatacacaaaaggaatgtgtggaaagacacatcaagaaatacaattgacttcaatctacattaaaacacattttaccccttgggtctcatatagcaatatattgaacttcctttgccaatttcctcttatttgcaaagcactatctctacaactacatt

SEQ ID NO: 365969 - DNA, 491 bp, Homo Sapiens
  misc_feature (43)..(82): n is a, c, g, or t
gggggggtacatatggggtcttgctatgttaccaaggctggtnnnnnnnnnnnnnnnnnnnnnnnnnnnnnnnnnnnnnnnnatgagccattggtcccggcccttgttcacttctgatgatgtacccaacagccaacctgcttttgctttactggcagagcccactaccccttcaagtaatcaaaattaatcctctggggtctgagtcatttttggggatcctttctcccttgccagtcattggcacagggatgggcatgtgttctggctactgaaacatgagggtaagtttgctgaaaggccttcaaggaaaatttcttatctcttatgaagacaagcatgagggaaaaatagtcctttatattctgctggatgttttcgtaactgcacataatgtctgggactgcagaagccatcttccaaccttgaggggagttagcctatgaagaccatgctgaagatgaaagaaaaatggaaacatatctgggtcc

SEQ ID NO: 365970 - DNA, 473 bp, Homo Sapiens
  misc_feature (77)..(118): n is a, c, g, or t
ttgagggatactttgtccacccaccactgccaaggagaccttagtctatacgccaggttgcaatgtctgaagctttnnnnnnnnnnnnnnnnnnnnnnnnnnnnnnnnnnnnnnnnnntgcttgtaaaggtaggtggtacagctgaggaatggaattttaaatttgtttaatttaaaatttaagacagagattcgattcagttattggaaaatgttttatgtttggaaaaaacctagatgtgtgaaccccacttcctcaacagtgacccgtatgaaatatagatttttctggtgaaaatttagtaactgaattgcgatgttgagatgtactgtaagtgtaaaatatacactggattttaaagacctaatatgaaaaaatgttaaatattttatgattgatttttatattgataatatattgaaatgataatagtttgggtatattgggttaaataaagtaagtatttaaatgt

SEQ ID NO: 365971 - DNA, 375 bp, Homo Sapiens
  misc_feature (44)..(94): n is a, c, g, or t
aaagttggtgcatgcctatggtcccagctactcaagaagctgannnnnnnnnnnnnnnnnnnnnnnnnnnnnnnnnnnnnnnnnnnnnnnnnnntgtgacagagtgagaccctttctttaaaacaaaagaacaaaagaaatgataaatactcaaggtgatgtataatttgaaaaccctgacttgatcattacacattctatgcatgtaacaaaatatcacatgtactccataaatacgtaaaatatcatgtatcaattaaaattttaaaaagaatttacagtaacacagtggagcaaaaaaagaagagcacttcacagagagaatcactggggagactggtatacctgcagtgtgtggaatggctaggaacaaaa

SEQ ID NO: 365972 - DNA, 468 bp, Homo Sapiens
agagggagagagtagcagaaggcttttgatttttctcttgcctgaggcttgaatctgacaaaccttggtgggcactgctcccttaggttcttccccacctcaatctacctgcctagagtagcagctcccagacccagttctgggactgaaggttaacccttcacctgctgtcccttcttaacacccaggcccccagagccagctgggcctgtccagcagccacctgtgggtatttatgagtttcatatgaagtactgtgccccttcccttcctcatcccgaccctgcccgagcttcctgaaggtcctcactgtttgcatatcgctcaggccacctccaaaccccacctaggttttataatgtatattatatatttttttgtgtatttttaaaatccagctgtgatgggttatatcataaatgcagcttggggttggagcaggggccctcaaaggcccagctcctgctc

SEQ ID NO: 365973 - DNA, 354 bp, Homo Sapiens
aggggcccctgccagcgtgctcttttcaaagctcatctttcaattcctgacccttggctccagcccctcgagtgggtgcccactgctcttaggatgaaaaccagtgtcctgttcctgactgctggtgcctatgtggtctggccttgccagcctgtctgacctcatactcaccgctgactgtctgctcaccaagctttggccacgagggccttcttaaattcctcaaatgcccagcccctacccaccccagaaccacctgtctagaactttctttcctccctttggtctggcagtgtctcctcatccctctgctctcagcttattattttattttaaaatatttctttttaaaag

SEQ ID NO: 365974 - DNA, 695 bp, Homo Sapiens
  misc_feature (514)..(603): n is a, c, g, or t
tttccagagtagctgtttaaagtgcattcatgatttttctgatactgatagttttcccacatactatcatattatatttggatgttgccattatcactctaaccataaactggtaatctatttatattcttaatagtatgtgagatttctgtgtattcagtcagattatctatgaatggaaatgaattttcttttaaaatcattattatttctttacttttattaaaataaatacgattatgtcaagtattggggtaatagccagtgtcttagttgtttaaacagtttaatggaaatcagtacaatattttaccattcaactaatatttactttgttgtatgcaagtatgctctataattagggctaacttcttatattttttcaaatcctatcacttcttttgctttgttcatatatcattctcctctgctattttaatgttataattcattctgatttcttgttttaaaccatttctgaaatataatatgcttagctgtggtatattattgnnnnnnnnnnnnnnnnnnnnnnnnnnnnnnnnnnnnnnnnnnnnnnnnnnnnnnnnnnnnnnnnnnnnnnnnnnnnnnnnnnnnnnnnnnatatattaacattcaaaattaagaattttttaaatttttgttattgccattatttgtttattaaaggttagataaaatttggctttaaaccc

SEQ ID NO: 365975 - DNA, 889 bp, Homo Sapiens
agtgatcagcgatgttgagttatttttttaaacgtgtaactctgcttttatcgaacagcttcatcggcacctctagacggctaggagataatactcctccctactactcagacaaacaaatttaacttgcagagaacagacatgcctggttcacacagtgatgctggtggaaagatgagacagaagctctccccaagggccactccatttgtagaaacagattccttcttatcatttgggactaacctctgtccctgtgaccaattaagcctatgataggcttaattaagcctaagataggctcaaggaagttgtgggaatgcctccctgccttacactgctccttaggtctacaactaggaatgcattcttattgtaacatcgtgaagcaagaggaatgaaacagggagaacaggttgaacaaatgaaaatggaaatggtttagaaatcaaaagcatgtgacttcaagaagaacaatcatgcctttcacaggcaaggactgaaaggtcttcaagtgaagagttttattagtaagattaaagaaggtctgaataaacaaaccagcactacacaataaagactgaagatatccctgctgcctctagatgtctacagcatccccaacaggtaagctccagatctggaaaaactcaactctttcatctgctttgtcccagcaaaaacttcatcctagaatttccctacaactctgtaacactagcctgagagccctggctcctagtacactgttggcattccttattgtaaaatatacgaagaacaggctacaagagtcaggaatcaagatcaagatggaaatttctgggaaaagagtgctgatccactctaccttcttagaaactcattctcaagcccaaatgtttctttc

SEQ ID NO: 365976 - DNA, 634 bp, Homo Sapiens
  misc_feature (76)..(76): n is a, c, g, or t
caagacttttaaaagacttgttagccaacttcaagaattaatatttatgtctctgttattgttagttttaagcctntaaggtagaaggcacatagaaataacatctcatctttctgctgaccattttagtgaggttgttccaaagacattcaggtctctacctccagccctgcaaaaatattggacctagcacagaggaatcaggaaaattaatttcagaaactccatttgatttttcttttgctgtgtctttttgagactgtaatatggtacactgtcctctaagggacatcctcattttatctcacctttttgggggtgagagctctagttcatttaactgtactctgcacaatagctaggatgactaagagaacattgcttcaagaaactggtggatttggatttccaaaatatgaaataaggaaaaaaatgtttttatttgtatgaattaaaagatccatgttgaacatttgcaaatatttattaataaacagatgtggtgataaacccaaaacaaatgacaggtgcttattttccactaaacacagacacatgaaatgaaagtttagctagcccactatttgttgtaaattgaaaacgaagtgtgataaaataaatatgtagaaatcaa

SEQ ID NO: 365977 - DNA, 901 bp, Homo Sapiens
  misc_feature (14)..(14): n is a, c, g, or t
  misc_feature (184)..(184): n is a, c, g, or t
  misc_feature (186)..(186): n is a, c, g, or t
ggcgatgcctgagnaaacaatggttttgaatttccacacctgcatttcacaacaggaatccaagctcagccaattttattccattcttcaaggcacaagatatttctgaattataaacattagatataataggtgtataaggagaagtcatcttacatactaattctataatcatttaagctanantagtcaaagcgaaattatacaaatgcagaagctctctttctctacccaactcaccaaatcttggattcagaggcaaaagagaaaaggaaagcacaaaaagaattgcgaaagaggaaaagcagaatgggcaaagacagtgtaaggaaaatggaggtgtgggaaatgtggagcttcactgttgcaaagcatgctacacataaagtatgaatggctgcctgaggagccactgctctagaaggctggctattactgttatgagaacaagcaccataccccatccaccttgtgtgtttggtacgtttctttcttccctgtacttggagttgctgggatgctgctgatgacctctccacctgccacgttaagtccttccaacaaatcaactaaactggaaatgttttaggccgagttcatactccaggatggctaaccctctcttctaccatcttgtactagaccagaagaatctttccaaatattcagaaaacactactctgcatggttacaactctcatcttgggcatttataatgcctaatagaactgggccccaaacactgcatcctgtcactgtgtgcaaacctctttggttactccaacttgagtccataaaataaatacttcatgttctgtaaaatgaatagagtgactgcctttatcaattttatggaattaaaattgtagaacagaataaagcctgttgtattagaactggg

SEQ ID NO: 365978 - DNA, 592 bp, Homo Sapiens
aaactgaagagagagtagttgtcagagtgaagagtttaatcaacagaagtagagtaacatattctttagtagaactcacattatctgcttgaagcacattttgctaatgttttattcagaatgtatcatagatataatgttttaactaataaaatagaatggtttttctctatgaatgaatcacattctttctgccaacatagttttatcctgtctcagtaggatactccataacacaatagcagtacaccactaggctcttaaacgatcaagaacaatttttttcatggtgaaatcaaataacgcagttttggaaacctataaccgcattttgtgcttgaattacgtgccccacactgtggcttaggatacttattggggtataatgaaaatcttactgaaagttaatttcacattcttacaccccaaaatctgcattgccattgatgcatatgcaccacattattatatttccacatcagtttcttgtgtgccaaataagacccatgctatgcatcttggtttccatgaagtgaaaatacatagtaagaatgcgagaaatataaatcaggccaggcacggtggctcacac

SEQ ID NO: 365979 - DNA, 510 bp, Homo Sapiens
cctgccctcagagggcttatactcattgggatcattagctcgactgcagaagcatcaaaacttgatgcaggaattattactaaaagatttgttcgtgaaaaattttgagtatcttatacattccatatggttgttataagttgggaatataaaaagtgaccaaaacatgttaaatgctaacatgaaggtacaaaccataaaatgcagtaggactaggaggttcggaatcccaggggaatctggattgcatgaagaggtgactggcataagctggatcttctcatcttgagattttcttaaggtaagaagagggagaatggccttgctatgaagagggcattgaatagtgaaaatggctgaaacagtgtgggagaggtctagtggaatatgagaccacaaagcaagactggagtcagacttgaagaacttgaaatgccgtattttaaaaggcagagttaatagggcataaagattcaaccaagtgttctacctacttggtggccgagcgtg

SEQ ID NO: 365980 - DNA, 815 bp, Homo Sapiens; identical to SEQ ID NO: 149207

SEQ ID NO: 365981 - DNA, 435 bp, Homo Sapiens
  misc_feature (273)..(327): n is a, c, g, or t
tcagcttcgagccagggggcgggggatcccgagcaaaagccttccgtggacatcaggccccgtggcctcaagggctcccagggcaaacctaattccccccaaaacgtgaagtcggggaagctgcggctacacattccacaaagtgctggcacttacacccacaacccggaaggctgtggaccgattcctctagggtggtgacctcccattagcaaacggtgtcatggtttggaatgttcattatcgccaagaacctggttagaggcataaagnnnnnnnnnnnnnnnnnnnnnnnnnnnnnnnnnnnnnnnnnnnnnnnnnnnnnnnggtgtgttgtacagcagtataatttttcacttatttattccatcagtagatatggtttgtacaatgtacaattgtttcatttcagaaaataaaaatttcaaatcatga

SEQ ID NO: 365982 - DNA, 514 bp, Homo Sapiens
ggtggagaacaggtttggcagttctctaccagtggaccaatcttttcatccccgtgtacctcaccatcagagcaaaaaatattttttggttcccatgattgctttatctactgttgtaacatgaaaggtcacctgcagtggaaatttgaaactacttcaagggtctatgcaacaccgtttgctttccataacgacaatggcagcaatgaaatgttgctggcagcagcatctactgatgggaaagtgtggatcttggaatctcagagtggacaattgcaaagtgtttatgaacttcctggagaagtcttctcttctcctgtggtcctggaatcaatgctcattattgggtgtagagataattatgtttattgtctggatttattgggtggcaatcaaaaataatcaaatacagtccttatttgtataacaaatgtgagatatttgaaaatattttaccattatacatcatgtggacttattttatattaaagaagattatattttggctaagaaa

SEQ ID NO: 365983 - DNA, 674 bp, Homo Sapiens
agcggccgctcgcgatctagaaccatatctatatcggtgctccaaaacagtctggaaacacgcctgtgatccaggattatccactgatttatgaaattattttctgggaaaacacttcaaatgctgagagaaaaattatcgagaaaaaaactgatgttacagttcctaatttgaaaccactgactgtatattgtgtgaaagccagagcacacaccatggatgaaaagctgaataaaagcagtgtttttagtgacgctgtatgtgagaaaacaaaaccaggaaatacctctaaaatttggcttatagttggaatttgtattgcattatttgctctcccgtttgtcatttatgctgcgaaagtcttcttgagatgcatcaattatgtcttctttccatcacttaaaccttcttccagtatagatgagtatttctctgaacagccattgaagaatcttctgctttcaacttctgaggaacaaatcgaaaaatgtttcataattgagaatataagcacaattgctacagtagaagaaactaatcaaactgatgaagatcataaaaaatacagttcccaaactagccaagattcaggaaattattctaatgaagagagaagtgcaaaggaggcagcaaagttgtctgagggcagtcttcggaaaggaggagggtaatat

SEQ ID NO: 365984 - DNA, 742 bp, Homo Sapiens
  misc_feature (93)..(165): n is a, c, g, or t
acttcaaatatggtgatagtcgatcgttatatctttctttgttttctcaactaccaagttagattgcttgtaatgatgccaggcagaagttcnnnnnnnnnnnnnnnnnnnnnnnnnnnnnnnnnnnnnnnnnnnnnnnnnnnnnnnnnnnnnnnnnnnnnnnnngccagacaggaaaaagatctccagagttggggacaaattaactcgcctgtgtttgagcattatcaggtaactcctcaaacaggaaaactgttcttggtcacacactgagccctgacgctgggcttacacattttagatggtcagcagatggaccaaggtgaggggtgctcagatcaggggccggagaggtcgtgtggctcatcggaatccggaacccgcttcgtagtttgtctgccctcgcattgcaagacccacgggcttccaaacagacactaggaacgatcctcagtccttgcagatcttcgatctgcgatcctcctgcctgccttcgggctctgcagaccatagctggctggggcagccggcacccagtgaactgggaccaaagctggccttaggatacatatcctcataccgttcgggtccagggctcatcttcccagctgcacaaactatctgctgtgtgacccccgccaggtaggttccactccaaagtggaaagtagagccgtgctgtcctcagaacccccaagctcctgcagtctgggtcgaaggctaattcacgcaatagcctcact

SEQ ID NO: 365985 - DNA, 478 bp, Homo Sapiens
  misc_feature (21)..(21): n is a, c, g, or t
  misc_feature (42)..(42): n is a, c, g, or t
  misc_feature (152)..(152): n is a, c, g, or t
gggtaaaaaattacatttgcntggaaccccggcctaacgatnccctgtaaaatggcaaactttggcgaaactccacttccccgggtccaaagtgggaaacaggcctgaaaaacaggcctgagcatcctttaatgcatgtgccagaaagaagnagggccctctgcccccacgggcagatgtacacagctgctaacagagaagcccctcatcctgtacgaccagtgcagagaaacgatcccctcgaatgcttcctagtggagttaagaaattttttgttgatcgtgcctttgaactaaggtcatttaagtatacaacagatgttcctctgagggaaacagacttataaagtcaggaacacagaagggacctaatggtttactaggggtggcgcattaagttcatagcaatttaactcctttcaatgctaaacaaaacaatgacgcaatttgatgcgcaataaaaacttgtcaaaacaatc

SEQ ID NO: 365986 - DNA, 624 bp, Homo Sapiens
gaatttagaatacatggtagaggaaagacaggatgagaaccagctgtgactccaataccaactgtagtgacagggactgtagttagtcctactaacctacctcttctaagtttcccttcaggaagagagacccatgggaaccatggaggagttccctgaatgtgtatggggaaatcgatctgtgcagtgcagggggtgacccgtggtagccatggaggtgtcccactcagatctccctacagcagacctgccacaaggggtggagttagcggacagctgtcaagatctgcctcagctttcaagctgaggctacatgcttcccagacagcctctaagcaaaggccaggcactgccatggtacaagggctcaccatttctggccagtatgggactcttcgggagggcaatctttgcaccagcactccctgttttgcaggcctaggctttctcagagctgcactgcagtccaaggctcctcctacccaaatatctttcctggcccctctcctttctcaggttttagtcctacatcacgaactaaaggtgttccttgtctggtcctgttccctctcccttttatgttttataggcgttgcccctaataaaccttttgtatatctgaaa

SEQ ID NO: 365987 - DNA, 944 bp, Homo Sapiens
  misc_feature (858)..(858): n is a, c, g, or t
  misc_feature (865)..(865): n is a, c, g, or t
  misc_feature (869)..(869): n is a, c, g, or t
gggcacaaaccacatggccgatttcaccatttacatttattttcaaaagttactacaaccaaattaattctattagaagaaatgtagacaaattctataaagactatagattgtgacctaagaaagaaatgaggcaaagaaccaaacattgaattaaatgctacatgggtgactaagatctgtttcaagtcagtgataatatagccacttctgggtacttcagtatcagagatcagttctcgtggtttagacagttcctatctatagctgactatccttgtccttgaatatggtgtaactgactattggctctacagttttattgggccacttaagaaatatttccttgaataattattttgagaaaaagtctaaaagtaataaaaataattttaaacacactgtagtaagaaatgactgttggaaaattatgctttcactttctaccatattctcagctatacaaaaccatttattttgaagatttttagactactgttaatttgaaatctgttactcttattgtggaatttgtttttttaaaaaagatgtttctaattggatttttaaaagaagaatggaaattgggtgctattttacaatagaaactaagctttttgtggttcctaatgtcctatgtaaaacttagtgccaaaggaatccaactttgaaagtttcccttcctatcctgctttatattaaaaagccccataagaaaaatgggaaccctggtgaataatataatgaaattggaaaaaaattttaaatggtggaaactttttttccacctgtgagaacctgaacttggaatttttttggaatgaaaaaacaggcttgccgtggataaaggtaaaaccnccaccancacnaacatagtactcgggacaacaaaacgccagaacggacgccattgcgcgagtcggcctcaatcggcactagacgac

SEQ ID NO: 365988 - DNA, 485 bp, Homo Sapiens
  misc_feature (269)..(283): n is a, c, g, or t
tatatgcagaggcccagggaccaggtgtgtttcctctcaccaagaagaaagtacacactgatgagaaactgagaaccaagacaggcatccctgggtggcctttcctgctgacactccacgagctgacccagcagaattctctgtgtaggaagcatcggactttgtccattgaatatgtagcggctgccagagatcacacatcaatgcaaattccagagcctgtctgctatagctcagtgactgtgttgtgattcatagtacattaaaannnnnnnnnnnnnnnaagaatcccacagggcactattaaaatacttctctccttccctgactcatgacactcttcctgacagcagaatgactgtgtgaccttgaacttcacatttcccacattggcccttggattgttcggattaaccccttccactcctcactggctggttcactgtgttctgactagtccataaaaataaagatggaaggagatc

SEQ ID NO: 365989 - DNA, 358 bp, Homo Sapiens
ggtaccagatgttgttatttatcgaggcagatcatatgtttggatcaaaaagagaaactggcaagtagatcttaaaacatacatttctaaacctgagtaacagatgaaaaaataagtctttaaattacattttccattgaaaattcattcaactgtggtgcaagaacttatccaagaacttacaatgtcaatttctgagggatataaatcatatccctcagcacatatgtattttcaaaagaaaacaagtcatcttaaagtaatatattcccatatgctaattgataattgtatagcaaattgaaaattctgagtaaacttaaggtatgtttaacaacaaaataaatatagcatatat

SEQ ID NO: 365990 - DNA, 609 bp, Homo Sapiens
aagtaaccatatggtttattactataatacaaataatatacattaggatttgttagatttgggtcccctaaatccctgaaaaccttgaaggaccaagccttggaaactagcataaaaacagggacttggatagttctataaaggattggggataatgattcaatttctactaaacaaaatacatacagcaggagataatatatcaaaatgcccaagtcattaactatcaaaggtgaccagaaaagtcttgttatatttgaattccagagtttttgactgatattataaatatggaagagattgctggtgccagaaaccgagtgagaaatgtgagtagatgcaataatgaaagcatatttctacaataagtagaagtgatactaacaaaaaaggaactgtctttccacagttgtcacactcataaggcttctcccattgagggttctctggtgtttgataagacctgagctgcgactgaagcccttgctgcattgttcattttgttagtgcacttctccttattgtaggaataaggtgaagcgcttacacaagtttgcagcagaatagtcattccgaaatacttttgtagaaacaactccacggacgcgt

SEQ ID NO: 365991 - DNA, 418 bp, Homo Sapiens
  misc_feature (296)..(304): n is a, c, g, or t
cccgtgacaatggggaaaaaagttctcaaaataaaaaagagaaatatggtagttttaagatgaggatagctaggcagcattttcaggggcacctgtagccatcgtggttgaaggatttgaattgggaaagttcctttgggtttttccaaaaagtgctgttaccttgtatagatatccacctatctattcacatggaccagcaaacgggacttctctctctatcgatataaatgtctagaatgaacactggatgcataaaataaactgatatgttcagacaactattttcaaatagnnnnnnnnngcatctttcttagaagaacttttttgttaatgctaagaggtaaatgctgcttattataacctataatcacagctctgctttgtagaaaaatcaactttctgcaactcatagatc

SEQ ID NO: 365992 - DNA, 677 bp, Homo Sapiens
ccacctcagcactgtcctccatagcctccactacggcagccagcagtgcccacgccaagacaggcagcaaggacagcagcacacagactgacaagagtgccgagctcttctggcccagcatggcctcccttcccagccgcggccggctgagcacgacccctgctcacagccccgtcctgaaacacccagcggccaaagggaccgcagagaaactggagaactctcctggccatgggaagtcgcctgaccacagaggccgggtcagcagcttgctgcacaagcccgagttccctgatggagagatgatggaagtcctcatctaactgccatccctgtggaatttcagtacagaacactgacaaacaaggaaagcggcagagaaagaagaaagacctagaaggttgtagatgggaaatcaggaatgatttgaactgataaagatttcagactcataagaacacattttataaatgttaaacacaaaaactacatgactgaagatagaagagaatgcgatggattttattacacatggtggaagagagaagaggcgtgtaggtttgcaaacaaagttaagaaataggaaactgaatttttcattgtacagaaaatgtatctccttggggagggcctgtgcacccccattctctgattataaacagataaacccaaaaaaa

SEQ ID NO: 365993 - DNA, 1172 bp, Homo Sapiens
ttcaaaagaaggaggtttaatcaacttacagttccacgtggctgggaaggcctcacaatcatggtgaaaggtaagtaggagcaagtcacatcttacatggcatggcagcaggctaagagagagcttgtgtcaggaaactcctgttttttaaaatcattagatctcatgagacccatccactatgacaagaacagcatgggaaatacccatctccattattcagtcatttcccaccaggtacctcccacaataacatgggcacacttgtgggatctacaggcatgagattcgaatggggacacagagccaaaccatactcaggcagcaagggtggtaccactgtatgtaatggcagaggggctgtgggttgtcactgggaattctatcccagagaaatgcacaggtgccactgtctgaagtgttcaagtgggagcagggtagctgtgctggggccgaggtcgggtaggccctacccagtgagaagtagcaggagcaaagacagacatggaaaaaagtctgacaacacctccataaggcagatgtgctgagctgaagacctgctataatccttaagcctctttgctatctacttgatctgagggcattatgggcaggggctatagcaggcaaaaacggcaggcctgtcttatacctatggagagctctgtcccagggaaatgcaatgctgcttctggccccaagttgtccaggctgaggtaggtggctgtgctggaggctcaagccaggaggccctgaccagtgaggagtagaaggggccatgaccaacattaaaaactatatgactgcttttaccagaatgcagcttgccctgtgctggagggcccacaagcagtccttaacaggtcttcattcccctcctgaacctttgaaggcagttcgggtagtggctggagctgcaaatagctagccaaaaccagcaagaatattgtctaattgaccatcttgaggagcctttcattcccagtatgaacatggcagagctagcatccagttggaagagggtccacacatggtgtctcaaagcgccgtactggacgtatccaaggacagtgtgcccttgccttgaagaaggtatacctgagagccacggattgagtccactcggtgctctgaaccctgattgtggccacaaactatggccatccaaaact

SEQ ID NO: 365994 - DNA, 577 bp, Homo Sapiens
  misc_feature (131)..(182): n is a, c, g, or t
  misc_feature (248)..(277): n is a, c, g, or t
agtagtgtgactttgagggtagcattgcagttatgttggaagttgtcctagtttgtaggacatacataataaagtattcagggtggttgggcattgggtcagcactctccaacagttcagggggaaaacannnnnnnnnnnnnnnnnnnnnnnnnnnnnnnnnnnnnnnnnnnnnnnnnnnngtaaaacttcccagattcacatgttcttgcttattgccatcactttctactctagttctggctacnnnnnnnnnnnnnnnnnnnnnnnnnnnnnnctatgaagcataaagtcagagaaatggagattactttggaatcgaaagcaagtagttaaactggtagggtaatagaatatccaaagtccaggaaataaaggcaagccaggaactaagagcagataatcactgcagtgggttgaggaaagatataaaaagcaattgtctaagggtagagcagatagggtggggtacggtaggggcaggagagagtagcaggaagagagacaatgaaagcatgtacaaatacagagtcaaacaaatttcaatgaatctaatgctatttttggcattcatatg

SEQ ID NO: 365995 - DNA, 469 bp, Homo Sapiens
aagaaggctatttgaaaactcaacttgttactgtcagctcactcatatgtaggtagtcactaatttaagaatagcttctattttaaaaatttgtagttttacaaatattttcccaaataatattttatatattgttaggtttctagactagtccacagaagctctgtaaaccctaatgtaaccaaaggataatatacaattaatgtaataactaattgtatttattttaatgtttctataagataatgtctgctgtgagttgggactccccatgtttaagccattggagacagggactccatccggatgaacagtagagaagggagttttggcatcattttcaacagaaaagtgtgctaccctgtcctgtccctgctggtccaccccacagtctgtgtcaggcaccccgacttccatgctgtcttaggattgatgaactgtcataaacttcgttgattgccccccaaat

SEQ ID NO: 365996 - DNA, 446 bp, Homo Sapiens
ccgacacttttttaatgttgtagctgagcactttaacaagttgagcattccatgtttcattcttagaaccttctttaatagagggtcttccctcaacagcctgtgcctctggtctacctttgaccacccctgataactaatatattggtcacaatgactggaatgtgactagtgatctcaggagatggcactgtcctaaagtgctgtcagggtggcaccactgctctctgaacaacttaccttggtcagagggactcaggtttgggacagcacaagctgaaggctggagagtaacttgcatagtaggaccatacctcttcctttcccatcccacccacatatgatagacagcccctctgttgagatatggaggggacagatactggaatcgggggtgggacttgcagttacttaaaattttttaataaactgtgccctgaaaccta

SEQ ID NO: 365997 - DNA, 685 bp, Homo Sapiens
  misc_feature (145)..(195): n is a, c, g, or t
  misc_feature (261)..(390): n is a, c, g, or t
tgtagctgtgcccttatttttatagatagtttgccatttcttgggtttaatgtttaacaaggctatagaagtttaaaatagtggacaaatgtttgtgaatacacttttaaaaaattgttttaaaagagaaaagcggtcttgcttnnnnnnnnnnnnnnnnnnnnnnnnnnnnnnnnnnnnnnnnnnnnnnnnnnnaaatttttgtgctcagatgatccttttcatctcagcctcctgattagctgggactataggcgtgtnnnnnnnnnnnnnnnnnnnnnnnnnnnnnnnnnnnnnnnnnnnnnnnnnnnnnnnnnnnnnnnnnnnnnnnnnnnnnnnnnnnnnnnnnnnnnnnnnnnnnnnnnnnnnnnnnnnnnnnnnnnnnnnnnntgagccaccatgcctggccccatgaatacactactaatattatttgtaaatatgtattttataatgtacaatgcttggaaaattttcagagtattctagtttaaaaaattttttctaattctgtaaattctattacaagtatgttgtttattacaactcattacaactacctaaattttaggtgttaactgtatttaagtaaatgtgttatttttgcatttcatagccagaaaatactgatgttcacttaaagatattcagcaattaaaatgttaaaacttgtacatgcaaaaaa

SEQ ID NO: 365998 - DNA, 486 bp, Homo Sapiens
  misc_feature (56)..(64): n is a, c, g, or t
tcatacaatttctgtggatccacaaaagatcccaaataaccaaagcaattctgagnnnnnnnnntcctggaggcatcatacttcccaatttaaatttatattacaaaacgagagtaatcaaaacaatacagtattggcataagagatacacaggacagtgaaatagccagaaataaatccaaacatgtatggttaatgaatttttgacaagagcaccaaaaagacaaaatgagaaaagggtagtctcttcaataaataggtgctggaatttccacatgcaaaagaatgaaattagactcttacattacaccatacacaaaaatcaatccaaaatggataaaagatctgaatgtaagacctgaagccataaatctagaagaaaacataagggaaaagctccttgacactggctttggcaatgtttccttggatatcacaccaaaacctcaggctacaaaagcaacaataaataaatgaaattatatc

SEQ ID NO: 365999 - DNA, 440 bp, Homo Sapiens
  misc_feature (41)..(113): n is a, c, g, or t
  misc_feature (250)..(283): n is a, c, g, or t
  misc_feature (301)..(358): n is a, c, g, or t
tagggtcagacatcctgcttgttctagctccatcacttgcnnnnnnnnnnnnnnnnnnnnnnnnnnnnnnnnnnnnnnnnnnnnnnnnnnnnnnnnnnnnnnnnnnnnnnnnngtcacatatagcccttggtacaacagctggaccacagaaagcattttttgaaatgttagctgtcactagaattactgccttatttctcctaggagaaggaaagtttcccaggatctaggccagtttgactttgcccnnnnnnnnnnnnnnnnnnnnnnnnnnnnnnnnnngagacagggtctcactcnnnnnnnnnnnnnnnnnnnnnnnnnnnnnnnnnnnnnnnnnnnnnnnnnnnnnnnnnntggactcaggtgatccccctacctcagccttctgagtaactgtgactacgggtgcacaccaccacacctggctaatttatat

SEQ ID NO: 366000 - DNA, 542 bp, Homo Sapiens
accaaatggacttctaccatcttcttataacatgtttgaatagaatctactttcataccaagaaggataaaatactagtttgaaaaaattcccctatcagagcaacatgaattatgcaaaaattacatgaagaacaaacatcaaacttatggtgaggtttgggtggaagaatggtgaaattcattgatgctttacaaaaagtgtatgggaacaacgcacccaaacaatcaggagtttacaaatggataactcattttaagaaggaatgagagaagaagatgaagcctgcaaaagcacaccattcacatcaatttgtgaggaaaaatatcatctcgtttgtgctctaattgaagaggatcaatgtttaacagaagaaacaatagctaattgcctagacatctcaactgattcagcttacacaattccactcaagggatgccaaaacttttgtgcccagatcagctgcagacgagaacaaagctttcaatttcaatggaaattttaaacaagtaggatcaagaccctgaagcatttctttgaag

SEQ ID NO: 366001 - DNA, 527 bp, Homo Sapiens
ccctatttgcgagtccgggtaactgtgtcctggcagagtatcgtggtcctgggcacacaggacccctcagcacactgaggtggagctggggcgaggggagggggtgcgctctgggtaactgaaggtgtgaagggcccagggcctgtttctgggcagtgcaggaagtcccagccccatgcctgtggtgagatcccctgtagggccccccccaccatgggcacttcggggcctctacggtcttccaaagctgtgtcctcatttccactgcagcagaggggcgtccccagctccgtcaaacagccctttctgtttctggagtcctacaagtggaggcccaaatccgttcccatgttgaggcaaggccctggctgttccttcctctctggaaaccgccttgaactcttcctttgggacatgcctcctcgaccagccttgaaggggtgctcctctctcactacctggaaccaaacacccccttcctttgtgtacaagggcaataaagagtagaccttcatcttctttatttt

SEQ ID NO: 366002 - DNA, 953 bp, Homo Sapiens
ctggttcaaagtgatctttctgaggcctacctgcaggcaggtcggtcatggcctcttcccttgccttcttcagcttctccctgacccagggaaactcctgtagggaatctaggaatgtatcaaatgctttagggcccctggaaggtaggatatccagcaggagcattgttttccggaggcctgtggtttgagcattgatttcttgaatatggttttccgtcaagattccttcctggtagaggtactgaagaaccagtccctccaccaatacctctgcacccagctccaggcgaagtgagcggagtacttgtttgtctctggcctccatttctcccccagcacgtgggtcagtacccaggcacgatttgaaggcacagtcacaccacccccggcacccagtggctggggctggttgtgttaagacagtaaagtaaaggcccggaaagacagacagggatgacagacgggggctctcagacacacccggacagtacgaccacggctaggcgacaaccagatcccacactccccctcgcaaccctgtaaagttcaggaggtgacaggtgaggaggggaggtgttcacgtttggccgtgagcgcccattgggaactatttaaaaaggctctgcttcggccgctgaaacccttgtatcaaacaggaagactacgggcggtttctgcggcaacttgacccgctaaagagggagtgctgggaatgaactaaagagcggaccaaggggagagcgggcctccggcactgccgcagccacccagccttggcccggatcggaaatgcggagcaagttagcggggcggggaagcccccgcagggcccaggtcgcagacgctacaatgcaggactttcaaagaaagatggattcctgttacttacgtctgcaaccacgtatctttggggcgggggagaaaaactgcaaccggaatcctgactgtta

SEQ ID NO: 366003 - DNA, 510 bp, Homo Sapiens
  misc_feature (459)..(459): n is a, c, g, or t
  misc_feature (471)..(471): n is a, c, g, or t
  misc_feature (484)..(484): n is a, c, g, or t
aaactttaattaaatgctactttctcatagacttccctagactggtttgcaatctaaggtaataggaaacaaggcattgggcattttgaagaaactgcaggttaagctatggtgccaagcagaagactaaacactgatttgagtgtcaaatctccagcacattctgggatagaggcaggttctcaaatgtttcctagtgttctttccttttcactaattaaattttcccttctctggcgaatccagtgcagtatacaaccccctgattgcctctcttggtcaaatagttgttagaagggaacctgtcaggcacctgtggcttcggcttagattggaaaggtgacagactagctctgattcacctcctcctgagacagcctggacagtggagggatcaactggaaggccgaaacctggtaacagctgcctctgattcctggtggaaatgaccaaccagantcaatccatatnactgggaaagatnaagggaaaaaaatagcttcccctcca

SEQ ID NO: 366004 - DNA, 615 bp, Homo Sapiens
  misc_feature (13)..(13): n is a, c, g, or t
  misc_feature (45)..(45): n is a, c, g, or t
  misc_feature (71)..(71): n is a, c, g, or t
  misc_feature (84)..(84): n is a, c, g, or t
  misc_feature (117)..(117): n is a, c, g, or t
gataggattttgnatggattgccaaaatgccggttatattggatnggctatagtatgtggatatccctttngggaatattaccngctgtaaattatatgagacttgcccagtcaaangctattgggtttaaaaaaattatggcaatctcaagttaatggaatatttttaaatcccacattcagagtttaaaacactggttttcaatgtgttttttagtgttgtcacttgtttatagataaatatataaataacctgtttggatcctggtcctttttaactgttccttggtaattctgagcatttatttgatgacttaatatttttcactacctttggagaacagatgaacattattcaccatgaatggatctatactgtgtggtcatgagttgtgtatacttccataacactgtatttttcttctgtcagtacccttaggatacactttaaaacaccttaaggtctgatgttatggcaacaaactactttttcaaacctaaataggaaccatgtaatttctcaaaagtgattgaacagtttgcccacacttagtttgttggtcttatgtaaaacattggctcaaaataaagtacacactgatttattttactgtt

SEQ ID NO: 366005 - DNA, 454 bp, Homo Sapiens
  misc_feature (408)..(408): n is a, c, g, or t
  misc_feature (436)..(436): n is a, c, g, or t
gactccccctcccctcacgcccgcgacctgcgagctcccggagctggggaaggagcggacgccgcagagtccccgtccctggccatgcaagccggcctggcgaccccttcctccgctcccggattagctcccgcccggcacctgccttgccgcgacactgattgaaattcaagccggcccccgcctctgaccccggccggagcagggagggaaagagtgctgggagcggctttgctcctagaaggaggcccgggagtccaagaccgtggcggtgccaggggacggtcccctgggcgaggagagggaggggctgccccgagggcttccccgccgtctgctgctcgggtctccatccctccggtcctgcgggccggccctgcgaagccctgggaactggagtttcttggngttaacctcccgggctaacctacacatnagggtgaaaaaccgggca

SEQ ID NO: 366006 - DNA, 676 bp, Homo Sapiens
gctttccaaataggaaatttcattatcatatgaaagcactaggatttctcaaactttctcttcaagcatatctccagtttctaacctccaggtttctttgctagaactgaaagttaggaagtgagtgctgaatctgagtacgaggaaagatatgggtacatgtcacgacatcgtactactatgaatcttttatggctctgtccccgtggactccaggtattgaaagctcttatctactaagatgcattaattcaaaatgattcatcttctcattttaaaattaaaaccttataaaatatccatcagagccttacggaaagaatgcgttactactacagccaccgaaaatagctcatgatcccaatgactgcctccaaagacatgtagagtctcagaagtccagtccaggaaccactactccactccagcaacaatgcttcagagaagcttccagcactgaccttcctataggctttgatcttcttcccaggagtacaatactgaaaacatggatatcaccttgaaaaagctcatttgcacacttgattcagcttttccataataccggtattaactgagtctacatagaaaactgagttggtattgattttttaaagatactagttaaaagaaaaaatataaaaagaccctaattattttggtacagcggacgcgt

SEQ ID NO: 366007 - DNA, 585 bp, Homo Sapiens
caggtcacacaacttttattgctgaagaccatcgctgggggctgctgcagacaggaatgtggcctccttcccagtcttgctaacattccccagtgtacccagccccatcagcccctgcccagcctctccagcttgctcttctggggcagtctttcccttgagcggccatggcctgcctgagctgggctaggctgggctgatctgcttggatcctgcctctgagaagcacagcaccacaaaagactctgacgggcccaaggaaggtgaggggagcaggactggcagaggaataggtgccccagaaaaaaggctggggaaggcccaggcttttagctggcgagtccaggcacgttgatgatttgcaggaacagggccaacttagatccttcagcagggctgcctggaaggcatgggaccatgttagctttctctccatagcagtttttatgtcattgctatgtttctgaaacaactgagaaactgaaaggtggagaaagctgagaagaaatcccaaagtcccaggacagctcctgggaatgagagaggcagtccacctggacctccctggggcccctgggagcctac

SEQ ID NO: 366008 - DNA, 444 bp, Homo Sapiens
gctaaagaacgccaggtgctgcgacagtgacaccgggactagaaggcctcggatggagaatgggacgcccagagcaagcaggaaaacgttttgtttggctcaactagcgctgtcgcaaccggaaaactgtcaggccagtgctgctgcggatgtgagaaaccggtgatccgaaggaggagtggcgctgggcgctggactcgctggtgtgaaaatctggctgctctaggacccggcaagcgcgggcaccaggcgaacgccagcgactttgccagacaaatgcatgtcttttttggtcgccattcaaagatgcagccggcagtcagccccggctctgagaaacaagtggaggtgtcagccataaaccctccgttcagggaaaagagagtcgctgcgacggatcgattggccgttgggtggaactttctttggtggcctagtgactag

SEQ ID NO: 366009 - DNA, 483 bp, Homo Sapiens
acgcgtccgagcatagcttggtcctctgcaagcttacaatccaagggttggctcaggctgtattctcatctgagcactctactggggagggtttcaggcttacctgatggttggcggcattcagtccttctagactgtcagactgagggccttggtttttgctggtgcactcagttccttgcttcatatagagtagctcacaatgtagcagcttgtttcactaacacagcaaggaagagtgtttcctagtaagacagacactgtagtcttacctaatacaatcatgaaagtgacatactgtctccttcgccatattctgttagagacaggttacagctttgcccagtggcagtatcctagccaatgaggtttatctgaggcatgattattaaaataattgaaaattttcccaatacaccaaagtgacaacttacaacataggttggcaatggcaatttttgacatgtctacaaagactgaatt

SEQ ID NO: 366010 - DNA, 1024 bp, Homo Sapiens
caagtccccaaagaatggcaggatgccctcagtggaggcagactgtatttaaatgcaattcacctctttggggtctaggaaaagccacccgtaggttcatttgctgggaaacacggtctgcgtgcctgaggcagtggacaccagggttgtggccttggcaagagctgactttctccggaggtctgtctgctgtccggagtggcagccacttcggtgggcaaataggacggtcatctctgggcccaaggacgctgcttcaggctgggacgccttgagggtggctggctgttcaggctttccggaggtgggatgggaggtgtaatgtttggtgggaggagggctgtaattctgaaatctcacggttttgacttgcttttcgatgccatttcttgagttttctggtttcaccaggatggatggtggggcagatgcgggcggttttggcagaggctcactcttgatggggatttctttgtcttccataatgagggagctggccgcggagtggatccgggcctcactgcccctgctgatgcacgtgagggcgggctcccccgtgagggcaggcttggaccccatctccaccaccacggctgagggggaggaggggatcccctgtggctggtagaattggaactgctgaggccgaaggaccatggtggggctgcgtctgagggagcctaccacgagagtggggatcccggactggaggggtctctgcagggatccatctctctgccaccacttactctttctcatgctgctccgccctttccgaagagacccttgtcctaaagtcccagggccggctgtgcttctcacggggttgactatggcagtgggcacaaagacggatttgaagggacggctttgccgtggatcaccttctgaaatgctgccttgggaggacacagaggaggtggataacgtccatgtggtgtagagaccagggctccgggagtctggaaaactagaggtctttcattcttgctgccctcctccggatcccgggaattccggaccg

SEQ ID NO: 366011 - DNA, 244 bp, Homo Sapiens
acgcgtgggccgtgggccaagcacaggccatgccttcatctgcatagggtaccaattcgcctcaacctttgattagccaaggaccaaatccttcattcagataaggggtagctgataggaacctcaaaaggagtacttaaaacccagaaaacattgtaaccgggtccttgggcggcttgctggggctcacacccaccctgtagagtgctttctcactttaataaaatcttgcttttgctattcc

SEQ ID NO: 366012 - DNA, 480 bp, Homo Sapiens
aggcctgtcggacatcagcagtgtgctaaaaacgtgtaagatgtggtcactactcaccgtgtgtcctatctagttgacatgggtggagtcagctaaggggtgaatgttcatatgctcccaattcacgttgaagccctaatccccaaagggatggtattgggggtggggtcttggagaggtgattaggttatgagggtggagccctgatgaatgggattagtgctttataaggagagacaccagagagatgatctctctctccaccatgtgaggacacagtgagaagacagccgtctgcaggcccggaagagagccctcaccaggaaatgaaactgttggcaccttgagacttcccagcttccagaactgtaagaaataaatgtttgttgtttaagcctttcaggctacggctttctgttacagcagcctgaactgagagtccatgccgagtttttgaaataaatgtgaattctgatgtta

SEQ ID NO: 366013 - DNA, 582 bp, Homo Sapiens
  misc_feature (39)..(40): n is a, c, g, or t
  misc_feature (68)..(68): n is a, c, g, or t
atgtacgaggccggcagggtgtgggtgcgccacctgagnncggcaggccccagggtctcctggctgcnctgggtgcaccggtacctgatggaaaacacctcttttgtcttcctggtgtcagccctgctgctggccgtgatctacctcaacatccaggtggtgcggggccagcgcaaggtcatctgcctgctcaaggagcagatcagcaatgagggtgaggacaaaatcttcttaatcaacaagcttcactccatctacgagaggaaggagagggaggagaggagcagggttgggacaaccgaggaggctgcggcaccccctgccctgctcacagatgaacaggatgcctagggggacggcgatgggcctcacgggcccgcccagcaccctgagaccacactgttgcctcccagtgaccctgctgggacaccaggacaaggaagacagtttcgcctctcgaaaagccgcagctgcgcctaggctggagctggaagggtgggtgaatccggcttgggcatccccaatgaactctgccctgcctgggactctatttattctgattaaaggggttttgcaaatggg

SEQ ID NO: 366014 - DNA, 671 bp, Homo Sapiens
  misc_feature (22)..(22): n is a, c, g, or t
  misc_feature (39)..(39): n is a, c, g, or t
  misc_feature (211)..(211): n is a, c, g, or t
atttggccctgcgaccccaganttgcggcacgaggtatnccctgcctcaagggataggcaagcagcatgccctacatggatgactgtggtggcatgagattcagcggttcatcaccctcgtgccctccaacctgccccatgaagcaacccgagacaccattttcagaggatacctcatccccaagggcacagtcgtagtgccaactctggnactctgttttgtatgacaaccaagaatttcctgatccagaaaagtttaagccagaacacttcctgaatgaaaatggaaagttcaagtacagtgactatttcaagccattttccacaggaaaacgagtgtgtgctggagaaggcctggctcgcatggagttgtttcttttgttgtgtgccattttgcagcattttaatttgaagcctctcgttgacccaaaggatatcgacctcagccctatacatattgggtttggctgtatcccaccacgttacaaactctgtgtcattccccgctcatgagtgtgtggaggacaccctgaaccccccgctttcaaacaagatttcgaattgtttgaggtcaggatttctcaaactgattcctttctttgcatatgagtatttgaaaataaatattttcccagaatataaataaatcatcacatgattattttaactat

SEQ ID NO: 366015 - DNA, 503 bp, Homo Sapiens
  misc_feature (320)..(320): n is a, c, g, or t
  misc_feature (361)..(361): n is a, c, g, or t
  misc_feature (391)..(391): n is a, c, g, or t
  misc_feature (429)..(429): n is a, c, g, or t
  misc_feature (437)..(437): n is a, c, g, or t
  misc_feature (475)..(475): n is a, c, g, or t
gatccctgccatcaaggataggcaagagatgccctacatggatgctgtggtgcatgagattcagcggttcatcaccctcgtgccctccaacctgccccatgaagcaacccgagacaccattttcagaggatacctcatccccaagggcacagtcgtagtgccaactctggactctgttttgtatgacaaccaagaatttcctgatccagaaaagtttaagccagaacacttcctgaatgaaaatgggaaagttcaagtacagtgactatttcaaggccatttttccacagggaaaacgagtgtgtgctgggaggaaggcnggggttcgcatgggagttgttttctttttgttgtgtggccnttttgcaggcatttttaattttgaaaggcntttcgttggacccaaagggttattcgaacctcaggccnattacatnttggggtttggctgttattccccaccacgtttacaaantttgtggtcaatttccccgttcaggagt

SEQ ID NO: 366016 - DNA, 834 bp, Homo Sapiens
gaagtttgaacaagagaccaactctgctaaaaactctgttctggtgggaaatgtgagctttatgaaaattagacttccagaaatgaggaaaaacccctttcctagggggatggagggcgccccccagggttaacttcaggaatgtgtgtgtgaacagaagtgcggtggatgaagggaccacttgcttctcgaaaacaacgtctcgcctttgccacaaaatagcgttgggaaaatccaatgattaggacaaaagaagggcccaggaatctctctccagggacagaaagctctttgaatacctgctggcttgatctataccccatagcatgtccccatcctctgcctgtccgttggatgtaattccagatacctgaggccagatgtggacaagaaatccaaacataagacagcggtgaagaaaaaaaccctgaacccggagtttaatgaggtatgaggggctggtgaagcttcatgaaggccattcctctgccccacagcagtgggggtgtggctgggttttcaaaaggtcatggcgggatggggagggtggtcagagacggtggggaggggccgcaccaagccacagacacaggggagctgggggacccctggaaagctcttggcaggacttgtcggatgtagggctggggggagggaagtgttgaggggagtcctgggttcctcatggaggcaacagggcaaagagggggtgaggaagatggggagaaactctgtgtggggcaaggggactcgagacaccctggggccccaggaagtcttccgcccaaggcggcaagtacagctggaaatgcggattccccccaaggaacaaaa

SEQ ID NO: 366017 - DNA, 364 bp, Homo Sapiens
  misc_feature (110)..(152): n is a, c, g, or t
  misc_feature (260)..(260): n is a, c, g, or t
ccttgaaaaattgattttattctgtaattgatttatgggctcccatatttagtatgtaaataatgtcaaatatatgtcatttttttattttaggatcacattgttgatcnnnnnnnnnnnnnnnnnnnnnnnnnnnnnnnnnnnnnnnnnnnccccccacccttttggaagtaagaagcatgctaccactggctaggaatagttgggggagggggtaggaaactgacctacagcaaatggcatgttatcagcgcaaatancaattagcaacattttactgtaccacacatacttgcaatgcggggtatctaaaaacaaacttaagggaaatggagaacagaaaaacattttccccagttaattt

SEQ ID NO: 366018 - DNA, 1015 bp, Homo Sapiens
  misc_feature (52)..(52): n is a, c, g, or t
cacgtttttctaccaaacatactttcaaaagtagaaaatcatggatttaaanaaacttttttgtagggcttgatatgtctaaatgtatcaagtttcaagtgtgctaactttatgaacacttgtctctgttcttaaatgcataacatgatcttaaatttttcagatctttagaaatgttaagcaatgcaaagatttctaccccatctccctccacatctttaaaagccaaaaaccacctaccaaaactccattactgtttgtgaatgaagaattttcatgacttgaaaaccttcctaatgtcccatctttaacacttttttagaaaggagggctcttgttgtgttctttaacctcttttcacaataattaacttcttcatggttgacatcagtactatcctcttaaaaattcaaatgtgaactaacagcatcatttattgaaggcatattatgttaaaattagtgattttcccaaggacaaaatgttaagtggaaaagtcagtactcagattcaggtgtgactcccaggcccaagcatagcctgaaatgaattaagaaggtcaccatattaattttcataaggtgaaagaaaacaagcattatatatttttccacatcagaaaatgttgaagacctaagagactccagtggctggctctgaaccctacagcaagacagtggcagagttggaatggattctggatgtctttgctaaccattaagaaagagttactgaataactttccattactcttaaaaagttactgttcccaagtgtattgagaattcggagatctgaagtaagacagaaatctttgttttcagttgtctttaagcttttgccagtaacatggtcccgagtagaagaaaacataaaactgtaatcctaatcaaattttgcaacatcaaatactatttcaatagtttcaaatactattccaatattgttccagcaatattccaaataatactaagaaatattttaaatgaataaagactaacaatcttcaaaagtt

SEQ ID NO: 366019 - DNA, 850 bp, Homo Sapiens
  misc_feature (778)..(794): n is a, c, g, or t
aaatgaataaccagggagtggaatgcctgcgcttgctcaatgagatcattgctgacttcgatgagttgcttggtgaagaccgatttcaagacattgaaaagattaagaccattggcagcacctacatggccgtgtcaggcctgtcacctgaaaaacagcaatgtgaagacaagtggggacatttgtgtgctctggctgacttctcactcgccctgacagaaagcatacaggagatcaacaagcattcattcaacaattttgaactccggattggcatcagccacggctcagtggtagctggcgttatcggcgctaagaaaccacagtatgacatttggggcaaaactgtgaacctggcaagccgaatggacagcacgggggttagtggccggatccaagtcccagaggagacctatctcatcctgaaggaccagggctttgcctttgattaccgaggggagatctatgtgaagggtatcagtgaacaggaaggaaaaatcaaaacgtactttcttctgggaagagtccaacccaacccattcatcttgcccccaagaagactgcctgggcagtactccctggccgcggttgtcctgggacttgtccagtccctcaataggcaaaggcagaagcagctactcaatgagaacaacaacacaggaatcatcaagggtcattacaaccggcggactttgttgtcacccagcggcacagagcctggagcccaggctgaaggcaccgacaaatctgatttgccataaaagcattttctttctgnnnnnnnnnnnnnnnnngtatttcttttatatataaaataaatatactaataaaaaggtttaattttttttag

SEQ ID NO: 366020 - DNA, 380 bp, Homo Sapiens
ccaggtgcatatgatgcacttacggtctgagaaacactacctcatatccagctcctccgtgctttggggtcgtcacatactcacttctctctggactagctttcctcagatcattgtgtgcctggcttcttctgtccttcaggcctcagctcaagtgaccctccttcaggaagaccttccttgagcaccagtctaaagatgcctccttgtccagtctatactgtcatctcactcttattttgcatgtcacaccctctatttctctcaacaccttttttcaaattgacaaataattgaatatatttatagggggcaatggggcattttgatatctgtatgcattgcagaatgattaaatcaagctaattgacatatccagc

SEQ ID NO: 366021 - DNA, 505 bp, Homo Sapiens
  misc_feature (185)..(185): n is a, c, g, or t
tgttaagcgatgcgtgacggtacttgttgaatgaatgaatctgaacacatctgttgatgttctggtttgggactataatttgttgtctaagtttgagtagaatttgtgactccaaggaggtgggcttaaaaattgtttttggagatagttaattgttgtgctgatgagaagcagctttttctttncattttgatatttcatatgaggcgtattcttacgtcattaaaaagtcttcacacacaccctgcttggatatgcctcagatgcacacaccacaacatgctgagccagtcttccctcccctccagctccctcccctcaagccagctgctccccttgcccctgcccagttcgttttgatggttacagaaatgcctctcacccccagcagctttgaattcttgttatttttaattaatctttgctgcctttctatacaagacataagccaaacaatacaattaaatgacagtccctgcttaaaaaaacccaaagggcggccgct

SEQ ID NO: 366022 - DNA, 279 bp, Homo Sapiens
gaccaatgcacactattgaaactcatcttgctctcttctctaggtgagtaaagcattgttcctttcagtgcctgtgtgagtcatgtctttcttagtgactccaatacctgcaaatcacatagtgggttgacatcctgatgctgctgctcctgatggtaggcaacaagtgttgcttgatagcaggatttataaagaccagaaaatagaggtcctcaatcatttgtattttcttaaatgattatgaggcaaggtcatcaactgagaaaggaaagttggcaa

SEQ ID NO: 366023 - DNA, 283 bp, Homo Sapiens
accgcaacatataatggccctcctgcctctcccagcctgtcccatgagccaccatgcccggcccacgtggggctgtttaaattaaaatcaaattaactgagttcctccattgcattggccacgtttcaagtgtgcagagtgacacatggccagtggctgccatcaccgctgatgtcgccacatccctcatcacaggaatatccctggcagccctgctcccggccctctgccctcctgacgctcccttgtgacttgttagaaaagcgtaggtacagctaaaaaa

SEQ ID NO: 366024 - DNA, 516 bp, Homo Sapiens
caaaaaatatccaacagcactacacataagtacagagtattcacaatagtaatatgttactggaaaggccacttccgaaaagtttacattcacttggaaggctgccttaaagtatatctcttatctatgaccaaatatctggggtacttttagaagttttcagtacacccccttagagaatagcttatgagttatttcacacattcctgagcacatggctgtgtttagaatgatctagtgtaattcatacatgagctgacatacgttgatactttgacgagtaaattgtacagtcaaatgttcattgatttcatgttatttcaaagcattttcttattaaaaatatatctttagttaatcctattttgctatgctttcaagtaaagtaaattcactgtagctaatgatgttacagacttacgtatacccttgtatacctgggacagggctgttttataccaataaacagcaaaatattgtccttactcattcaagaattaaaaggataaattttaa

SEQ ID NO: 366025 - DNA, 452 bp, Homo Sapiens
aatccaaagtattttattctaatgtgatagggaaatgagacctaatgtctcctgattcagtttaaggagagatagatcaacattatgtttcatatgatggctttaatgtatattctgattaggcattttaaagtaacctgttaactcctttttaaagttaataatatcttattgtataatatacatatgtcagacagtatttacaaaacttcttagttgctcagatactataaggaaacaagataagtagagggttgctcagccttagattgataaaaatctacttttagagatgatgtgacattaatccaaccagtctgtgatcagtacatggctgcattcttttgacttcacccccaagctgttatgtctcttcatatataatcttgccctgtgatttgagaaagggtaggttagttatgtgttctgagatcatgtaatgtatattaata

SEQ ID NO: 366026 - DNA, 1564 bp, Homo Sapiens
gcctgggtggcgaattcggcacgaggcacttctgttggatgcctaccgtgtgtggcagcagggccagaagggtgtggcctatgacctgggccgtgtggagaggatcatgtcggagacctacatgctcatcaagcaggtggatgaggaggctgcgctggagcaggctgtgaagttctgccaggtccatcttggggctgccgcccagagacaggcctcgggggacacccccaccactccaaagcaccccaaagacagccgagagaacttctttcctgtgacagtggtgcccacagcccctgaccctgtgccagctgactctgtccagcggcccagtgatgctcacaccaagcctcgccctgcactagctgccgccacaactattatcacctgccctccgtcagcatcagcttccaccctggaccagtccaaggaccctgggcctccccggccacacaggcctgaagctacccccagcatggcctctctgggcccagagggagaagagctggcgagagtggcagagggcaccagcttcccgcctcaggagccacggcacagtccgcaggtgaagatggcccccacaagttccccggcagagccacactgctggccggcagaggctgccctgggcacaggcgctgagcccacctgcagccaggaggggaaactgaggcctgagccgagaagggatggggaggctcaggaggctgcgagtgagactcagcccctgagctctcccccaacagctgccagctccaaggcccccagcagtgggagtgcccagccaccagagggtcacccaggcaagcctgagcccagccgggctaagtcccgcccccatgcccaacatgccaaagctggtcatcccctccgccgcaccaagttcccccctgagatcaccgtcacgcacccacccaacctgctctcccccaaaggcagcatctcggaggagaccaagcagaagctgaagtcagccatcctttctgcccagtgctgctgccaacgtgaggaaggagagcctatgccagccagccctggaggtcctggagacatccagccaggagtcctcgctggagagcgagacaagacgaggacgacgactacatggacatttgaggggccactgcaagaccacaaacgacacagccccaggggaccacgccaaggcctggaatgcaccctgggcaggaccctgggcaggaccagaggcccacatggatgccaactccccaaaacagacacccaggcctgaacagcccacctcctcatggcatcctccctgtacccaggtcaggctgtccacaccacatgggagcccagaggaggaggggcccgccttagccatgtgaaggtggattggtcgccatctgcacgccaggcggcatccttttctatgaagtgttgactttgtaaatctgcccacacccagctggccatatccacccctcgacgccgggatgagccgctctgcctgtgtcacagtggaggggtcctttagggccaggctcacccctcaccctttttttggttgcttttctaataaagatggaacagttaaaaaaaa

SEQ ID NO: 366027 - DNA, 1310 bp, Homo Sapiens
  misc_feature (1020)..(1020): n is a, c, g, or t
aatttggaacttctttaatcatggctatggacagggacagggcaaaagcagtcattgactaggggggacataattaaaaattactttttctgggaataaaaaagctgtctttaacaataaaaattaactccagtaatttcaacttaataaagttttaatttttcccactttcttatcttaaaaggggggatgatggaacattttcacccctaacttaagtaaaaaccagttcaaactgacacctaatggaaactattataggaaaataattctgcaaaggaaagaaaccaaagagagaagtatttaaacaacaacaacaaaaatactttcagttaactatgagtacaggaatcctttaaatttcatcactagcattggcaattattccattctcaacattattcttcctctatgaagcaactgcaataaatttgcacaaaactgaatagaatagcttatttttcaaaagttcttcctcatctcctcaacaaatgccagagtgttacatcttctgtttctcacaaactctgtcaccaggacttcatttctctttcttcctttcaaatcctaaacacttattatttagccaaccagcatgaggccaactttccagagaccacctaggaactagagtatgtagcttctacttttctaatttcccaaggaaacaatgccaccagtagacatattgcattttgttaaatacataacaagcataatatttaaaagccctaaatcaccaactggtagatccctagagaaaaaaggtaattcatggaataatgaaggaaagaacaggagttacatattctcttgctggtgatagaatgtcgaatgcaaagacagcatctgtgttttctttcctacttcaactcattcttaaaatggactcgcccccgggagcttctgagaagggctccacccgttccctgcagacgacaatgttctttgagcgcaaaagctgtgagtatagataccctgggagtaattgtgggatcagacacaatggggtgggattangggtaggcagagggtgtgtgtggagtacccttcactgggaatcctaaatattagaagaaagcgaaaccctagggggggaaccatgagagtgtgcctgcttccttcaagacaccttggttgtcaaccctctccaagggttaaaacggctccttgggggcaaaagccccattggggggaacccccacttccgtggcctggagaaaagggccatccctccccaggggggagaaaaaggatcccggaaactggtaaccttccactctaaaaaggggcgccgtaagaacgcaaca

SEQ ID NO: 366028 - DNA, 790 bp, Homo Sapiens
taggcatggagttactcattgagagttaagaaaacaattgactatgctgaagaaaaagagataggttttaatcaaaattttatcatttttctagctgtcactctacatattggaaatgatgaaatgtatgaaaaggactcaatgtcatattgactcattcataaaagtgtttatagaatgcgtaattgggaaaccctgtttgcagagcccagagtcatgaagaacagaactcaggaaacccatttaagaaaacattgagaatgtatagaaaagacctctatgatggcttctgcattattcagattactcaaagaaaagatgtcagtaatgcaagttaaaataggtattttattgagaaacttgctttgtcagtgagaaagttaacagttacaaatattttcatttaataaaattagcatatttttaattctaaaaatgtctcttaaaagcctttattatctgaaactgcagatcattctgatccagggttttcttttagggtctcccatggaaaaagatattgcagattccattcatgcaaataacagaagtagtatgacttgttcacaaacaaattctccacttgagtttcagttgtctgcatgcatgtgaattaacatctttattactgtaactagaaaaatctcctggtaacagcaatgaggccttagacttacccttgagcattcagagtcataatatggtcttattaaaaaaggaaagttccgcagcaagacaattcagcttaaaaacatccccattccctagtcacaacttaaaattggtatcc

SEQ ID NO: 366029 - DNA, 1270 bp, Homo Sapiens
  misc_feature (1234)..(1234): n is a, c, g, or t
gctgtacggtccggagtttcgggatatcgtcgacccacgcgtcggacctgatggaccccgaattactggtggctgacctacatcaaaggggcctccaccgacagtggcatcgacacggccccctgcatgcctgccaccatcctcggccctgtgcacctggcaggcagcaggtccctgatccacagccgggccgaacagatgaggctgatgctgccgacgtctctgggcctgacgacgagccagccaagttatattctgtgcatggctacgcagtcaaccatctccgaccggcagtgctgacggaagcgcagcatgggccgactcatcagtgcagactatcctctcataccagtggcttcatcaccatatcaggaagcccttcagctcactgttcaaaaagtagtgggtctctggattcatccaaagtctacatcgtgtctcacagcagcggacaacaggttcccgggtccatgtccaagccctaccacagacaaggggcagtgaacaaatatgtcatcggctggaagaaatcggagggcagcccaccgcccgaggagcctgaagtgactgaatgtcccgggatgtatagtgagatggatgtcatgtccacagcaactcagcatcagacagtggtgggagatgctgttgcagagactcaacatgttctgtctaaagaagattttctgaaattgatgcttcctgacagccccttagtggaggaggggcgaagaaagttttcgttctatgggaacctgtctccaaggaggtcgctttaccgcacgctgtctgacgagagcatctgcagcaacaggagggggtcctcctttggcagttcccggagttccgtgcttgaccaggccctgcccaacgacattctgttcagcaccaccccaccctaccacagcacgctgcctccgcgggcccaccccgcacccagcatggggagcctgagaaatgagttctggttctccgatgggtccttatcagataagtccaagtgcgcagatcctggcctgatgcccctcccggacacagccacagggttagattggacccacctcgtggatgctgcacgggcatttgaagaccagagggtggcatccttctgcaccctgacagatatgcagcatgggcaggacctggaaggggcccaagagctgcccttatgtgtagatccaggcagtggcaaagagttcatggacacaactgggggagcgttctccatcaccactgnaccggggaaagtcaatcaagctggaatttaattctt

SEQ ID NO: 366030 - DNA, 409 bp, Homo Sapiens
tggggtctgtcaatctgtgtttggacaagttccccagtgactgtcacacaccatgaagtctgagaaccactgttccaaaccgaggcttctaactggatgttcattcccagccatttggaaggctcacctcaaagccagtgagccagaagccagctccactgatcctgctttccagactggccattctcacaatgttccattaggcaatagggctcttcggggaaattaatagaatgtaggcttcaggaatcatcggaaagctgcagcttccctcgtcagggaagctgacgtctacatcgtcctcagtctagaacaagaataataggtgtaccttagaaaaatgtgctttcagtccatcagtaaaaagccaatattgtaaaatcctattatctttgcttcaagtgttatc

SEQ ID NO: 366031 - DNA, 548 bp, Homo Sapiens
acgcgtccggggcactttgggggcggtggaattcaagacgctctggctgaagattcagaagtatctggagatctattgggaaactgattataaccactcgggcaccatcgatgcccacgagatgaggacagccctcaggaaggcaggtttcaccctcaacagccaggtgcagcagaccattgccctgcggtatgcgtgcagcaagctcggcatcaactttgacagcttcgtggcttgtatgatccgcctggagaccctcttcaaactattcagccttctggacgaagacaaggatggcatggttcagctctctctggccgagtgcctgtgctgcgtgttggtctgacccggggtttcggacatcagtgacactccctgccccactgcttgcttcttgtcaccccttctctacaattttgtgaacatttatgctccagtggcattcactggttgttcatacctttcttgccctgggtctatttcagcagcactgagctatgagctatgtaagccgacccggtgggcccagtggagggaaagcaatcaat

SEQ ID NO: 366032 - DNA, 502 bp, Homo Sapiens
  misc_feature (492)..(492): n is a, c, g, or t
ttttgaaattttgcaatataatgaaaaagacacagtgaatgtctttgcaggatgcaatgaggtcactatagcagaggcggatacttacccagtagtatgcattctccccttcttctttactgtaaaagtccttgatttttagctgagcacacagccatctgacccaaaaggctgcatctgccaacttcccttgcagttaagtggagacacttaccaagtactcaaagagatgtaaccaaaaggtttgggtgctacttctttgcagtgttcttgtccttcctctctgctggctggaatgcaaatgtgatggctagaactcaagcagccctcctggacttcatgttaaagacacatgctgaggatgattgagcaacaagatacaaggagcccagggcatgatgactttggaagggaagatgcccaactagtcctgactgcttacctctggatgtgttttacatgagagaaataaatgtctttctggtttaactnacaaaaaaaa

SEQ ID NO: 366033 - DNA, 517 bp, Homo Sapiens
  misc_feature (413)..(424): n is a, c, g, or t
tttacttagtatgtttattttttgtgtgtctcttgccttcctcccacgttttatttcccctcagagctgtgaatgggcaggtctgtctctggtttggcatcactgagtttttcccatgcattggccccagggctgctaggatgtgagacaaatctccctacaatgggcttgctcccattgtctgtacagtttaatagatgctggcatgtcggaggttacccatgagtcaaaatccgctctccatgcttactcttgacaccccattgaagccactcattgtgtgtgcgtctgggtgtgaagtccagctccgtgtggtcctgtgcttgtactgccctgctttgcagttcctttgcacttactcatcgagtgctgttttgaaatgctgacattatataaacgtaaaagaaaatgtnnnnnnnnnnnncccacacacaaacaaacccatacgatctgtatttgtatatacacgtgtccgtacaagtataactaaataaaaattaaagattttcatcatttt

SEQ ID NO: 366034 - DNA, 818 bp, Homo Sapiens
  misc_feature (245)..(329): n is a, c, g, or t
  misc_feature (587)..(651): n is a, c, g, or t
  misc_feature (797)..(797): n is a, c, g, or t
gatgttgccgaaagtaagaggaggaacgattccatgctaggtacatcgctcgtatatatagggagatgtgctctgctacaagagtttgtgataaataaataaattactatattttgcaagaatcaatattatctttaaagcaatattaggaatgcctttgttctccagatatcgggatatctggacactcccaagtctgggtttgtttagtaaacactattaatttgttcccttagctgtaaacnnnnnnnnnnnnnnnnnnnnnnnnnnnnnnnnnnnnnnnnnnnnnnnnnnnnnnnnnnnnnnnnnnnnnnnnnnnnnnnnnnnnngtttctctggtttgaatgcctctgacagtaccatccagaattctcccagtctcctgggcacactagtaagtcacaggaggttgagttagagtgtttttcactgagccagccatacaataagaccactattgaaggaactgcttaaggaacaaataataggaactgttcagagcataacaggattcattaattcatttatttacctactcagcaaaactttattgaacacccacatgaacccttctgctaaacattgtnnnnnnnnnnnnnnnnnnnnnnnnnnnnnnnnnnnnnnnnnnnnnnnnnnnnnnnnnnnnnnnnntctaaaggttaccaagaagggccagtttgtacaatgaggactccatgaatgtacatcattgagcttcacaagctttcacgtttgtaatctcatttgaactgcacaaccacctcacgagacaacctgtattcccttcttaggttttnaatgtgccccagttcaaaact

SEQ ID NO: 366035 - DNA, 458 bp, Homo Sapiens
  misc_feature (27)..(27): n is a, c, g, or t
  misc_feature (33)..(33): n is a, c, g, or t
  misc_feature (50)..(50): n is a, c, g, or t
  misc_feature (66)..(66): n is a, c, g, or t
  misc_feature (72)..(72): n is a, c, g, or t
  misc_feature (106)..(106): n is a, c, g, or t
  misc_feature (113)..(113): n is a, c, g, or t
aaaccaccgtagaacagcgggtaaacngaaganccacaactaaaaccctnaaggaaggaaaatggnaccctntggggtaaataaatttgggggccccgtgaccccncgttatnggttacagctgaagtgtatgtttttgttcctgtggagaagcccatctggcattatggtaatatattattttaggtaatatttgtactttaacatgttgcataatatatgcttatgtagctttccaggactaacagataaatgtgtaatgaacaaagatatgttgtatgagtcgtcgtttctgtcagatttgtattgtttccaagggaaaagcttgggggaggactcagttcacaaaatgcaaaactcaacgatcagattcacggacccagagcttttccatgtgtttatattgtaaatatttttgatttcatcaaattatttattcattaaaagaaatttttgtg

SEQ ID NO: 366036 - DNA, 545 bp, Homo Sapiens
  misc_feature (393)..(469): n is a, c, g, or t
cattaaaatataagggagaaaagttgtggtttgctacctttctagtggaggcatgcctgcatgtggtagatgataattagacatttgttgagctaaatgtgtgattatggctccccaaaacttcatcccagggaaatgatgataatgtgaataagaggctttcctccagtgggatacctagatgataagtagaagcctatatcctgtttttactcgattgagactttatccataccccttggaagttgtttaatttacctacacccgggctctttacctgcatgttgaaaacagtttggaatggacccaaagaaagttgttactaaggcctttcttttttctctcccagccagtcctctggaatgaggtgttcagttggcctagggttattcnnnnnnnnnnnnnnnnnnnnnnnnnnnnnnnnnnnnnnnnnnnnnnnnnnnnnnnnnnnnnnnnnnnnnnnnnnnnnagttgaacaaaagagcgataggacctatattccctgagcttttattgaccagtggactgtgacttttgatgtaatt

SEQ ID NO: 366037 - DNA, 499 bp, Homo Sapiens
tttactatctagagtctagagctcacagtacagagttttgtgaaatacggtgcctatgagaattttcccatggtacacagaagccacagaggtgccctgaagcacagagccattgttggcatacacggtgctcaccctgggcttctcagacaaaacattctggatgcgaagtacctgtcgagaaaagatcgtttattagtatattatgtgagtaaacacctgtttcatgatgtccttcccaaacattctaggataaatctatttttcagaaatcagaagctaaaatctgtatatcttcaataaattgttcttcttctgatgaaagtactaatgtcatagatatctatgcaccaaagtgaactggctttctgacattagccaaattcctcagggatgacttacacaatttttttagtgcaggcatcccttacagaaggagttaagatgctcttatttagttctcaagtggatggtggtcctccctctgtgggaagaatct

SEQ ID NO: 366038 - DNA, 1075 bp, Homo Sapiens
tggcagaagcctggatccatgtacctgctcttccctaaaatgtagacccaagacagcaagacttttcaaagccaaaaaacggctccttgccttgtagtaggttcttctcctcagaatccaatctagtcagatttctgatctagatgatatcctcatcttacaaagataaggtgacctgccccagcttgtgagaggttctcctatttgggatgttcttctagcacaaacaagcacaaatcgctgaggtcaatagactgtgataccattccttgacgtctaacagaaataactttggccctgttactcctagttgtatctttagggcattaagtaccaggtaacagtggaaggaaagtggtactccaatccctctccaactatcccaatgaaggagatccaagcaattagcaccttcagttggtgctgctcctaagttgtaagcctctaactactatcagctggacaaaagccacatcctatatgccctgttagcacaccaatgtattaatactaaccagccaccctagagctcaattaagcatctggccttaatgcagtaaaccacactcaaaggagacatgaaatattggctgttgtaccaaagaagacaccctctgcatagatatgttgatagagaatgtaacccacagagtccatgcaaagaggaagccagcactaaggggactttctctgaaggccattcatctttggaagcaacaattcccaagtggatataaaccactctacttgatgactaaggtctcaaatgtggtccatgtccccccatgtcccaaactaacccaagcatctgctaactggtctctttaagatcctccattggtagtttgtagctcattatgaaggaaggaggtggtgctggacctgggctaactggcccctgcttctttgcacagtttatacagatgtaatcttcattttcagccatttctggagatacacccacacaaacttgatgaaaccactcatcacagccaccatcacattgtacccagtctacctgtagaaacaagattgggaatgtttaggttacataaacattaagcctagaataaaa

SEQ ID NO: 366039 - DNA, 990 bp, Homo Sapiens
  misc_feature (28)..(28): n is a, c, g, or t
agtcctcaggctgctttccttataaccntttattttcctgcaccttatatcaagaacgttaggcactggttaagaccctgtccccttgcagcagtagagaaaacaggaggaaggagacgggaggtagaaatttggaagctagcagttgaaggccaactcagaaagcgtcaggtggaattccattcctaattgacatcaccatcctctaactgcagcaattctctccagcccttttatgtgctccctacagaaccaagcttccacacagctgaaggaacctgtctgctctcaccccagcttcacagaagatggcagggactggttattactaacctgcctcctagtcttctgaggctccaaatggttttgtcagcaagctgagcttccccacaatcccacagactagaaggggttggaaagaacaagccttagaacaatactgctccccacctctaagggatctgctcctctgagtcccagaagttcaccgccttcatttgatttctgctacaggaagactctgggaatccagctctggacccagcacttcctgatttttgaagtagagagttgacaaccctgttgtcatcaatacaactgtgctaggtgggtgggaaaggaaaatatcttgggctcccaaaatcactaagctaaaaggaaaactcaggatcatggtggatggaagtcaggactagattgcagctccgactcggatggacagagaagcatgtggaggctcatatcatgaatttttgctccagaacgactggaggaataaattacaaaacctgagaggacccacaggccccctgaaggaagcagatggctcctgcaggacccaggagacacaccaaatactgtgttagtatttacttatagaaatgcaaaatggtctggaaagtctcagccatagaatcaaacaagtagaagaaagaaattcagagctcgaacacaaagtcttcaatttgacccaatccaacagaaacaaag

SEQ ID NO: 366040 - DNA, 421 bp, Homo Sapiens
gaagcctattgttctacattcaagaaagtgaaaaggcaaacaaataaggtagtaatttgtcttccttacctgtttgccttttcaactagaagcctattgttctacattcaagaaagtgaaagtggctacacctcttagagaacatttctttaatgatacatcagtgagtatcttttatgggtaataatctacctattttaactagatacaagtatgataagaaagagacctttcagttaactgaagctaagctcatcctgtcttccttacattgctaatatctgacttacaatttactaatatttgtaaggtgtcatttaagtaggtgtggaagcattagcctagattttgactagttctttggtgtcttctgcagctcatagaggcactataatcacaacccccacccgcgcccctcgca

SEQ ID NO: 366041 - DNA, 733 bp, Homo Sapiens
agtgcaaaatgttaccaaatctttcctcctgtgttttcaaaaaaccacatttgatgctttctattttatatgcttttacagaaattctctttaaaaatcaaatatatgcttatcattattttaataaaaacctctgctgagtaaatgaattttataggattgggggaaaaagtttgcaatgaatggtggatgatactgctattcaatagggagctcttaaaaatagagcaaatgcataagacattttttacagttttcaatttgtaagaaaatgatttcattagaggggaaaaaagagagagagaaaaccatcagtcaggatgtgggagaatgcaggctcctgatgagaccagcggagaagacaaactaagtgtatggatgcagattaggcctcagaagatgagggtgtaaaagggatttaatggtggggtggattatagaaatccatgtaacaatgttaaataattatagttccagccgagatcaaagcagtgctgattgaacgccctcaagctgttaacatgaagtatcttgaagggaaaaaaacctgcctcaaagattggtcagtctgggcaaacaatgtctgtgatctgtagaagttccaactgtattgaaagcaccaattctagggaatgaaaaatggaggaggcagcctgttagggaatttcttcttctggagctctcgatcttaaaacggactttttagctatttgtagtttgtttgaaaatgcta

SEQ ID NO: 366042 - DNA, 1508 bp, Homo Sapiens
  misc_feature (66)..(184): n is a, c, g, or t
  misc_feature (1091)..(1193): n is a, c, g, or t
  misc_feature (1195)..(1204): n is a, c, g, or t
  misc_feature (1206)..(1209): n is a, c, g, or t
  misc_feature (1211)..(1228): n is a, c, g, or t
  misc_feature (1230)..(1231): n is a, c, g, or t
  misc_feature (1233)..(1234): n is a, c, g, or t
  misc_feature (1236)..(1237): n is a, c, g, or t
  misc_feature (1239)..(1239): n is a, c, g, or t
  misc_feature (1246)..(1246): n is a, c, g, or t
  misc_feature (1249)..(1283): n is a, c, g, or t
  misc_feature (1342)..(1354): n is a, c, g, or t
gctacactgctatgctcaccctccccacacatgaacactgacacacccatggattcgcacaaagtnnnnnnnnnnnnnnnnnnnnnnnnnnnnnnnnnnnnnnnnnnnnnnnnnnnnnnnnnnnnnnnnnnnnnnnnnnnnnnnnnnnnnnnnnnnnnnnnnnnnnnnnnnnnnnnnnnnnnnncactttatggcaattcttaactgacattcaatgacttacttcttttcttagaaaatttccaccacatttctatccccaagccaacatacaatgtgaaatgaaagccagtgcgtggagtgcagctgctaaaaattttcagcacagggctctttctgactctgctcatgagatggtatcagccacccaatgactggcgtatcttggtcctgtgtctttcttcttatgctgtgttaatgtgtttactttccatttggcagagagacaagagagacacctccaacttcgacaaagagttcaccagacagcctgtggaactgacccccactgataaactcttcatcatgaacttggaccaaaatgaatttgctggcttctcttatactaacccagagtttgtcattaatgtgtaggtgaatgcaaactccatcgttgagcctggggtgtaagacttcaagccaagcgtatgtatcaattctagtcttccaggattcacggtgcacatgctggcattcaacatgtggaaagcttgtcttagagggcttttctttgtatgtgtagcttgctagtttgttttctacatttgaaaatgtttagtttagaataagcgcattatccaattatagaggtacaattttccaaacttccagaaactcatcaaatgaacagacaatgtcaaaactactgtgtctgataccaaaatgcttcagtatttgtaatttttcaagtcagaagctgatgttcctggtaaaagtttttacagttattctataatatcttctttgaatgctaagcatgagcgatatttttaaaaattgtgagtaagctttgcagttactgtgaactattgtctcttggaggaagttttttgtttaagaattgatatgattaaactgaattaatatatgcnnnnnnnnnnnnnnnnnnnnnnnnnnnnnnnnnnnnnnnnnnnnnnnnnnnnnnnnnnnnnnnnnnnnnnnnnnnnnnnnnnnnnnnnnnnnnnnnnnnnnnncnnnnnnnnnntnnnnannnnnnnnnnnnnnnnnngnngnncnncnttaaatnttnnnnnnnnnnnnnnnnnnnnnnnnnnnnnnnnnnnactttttttaaaaaagaaagccgcgcccattatttggggggagaaaatctaaaaaaatnnnnnnnnnnnnncggtttttttttcaaaggcccccctgtaggagaaaaaagaggcttctcttgggtcttcctttaaaaacacttacacccccttttttggggggggagggaacatctgtcacaacacccctccccccatcaaaaaagacttgccctcccccgacgg

SEQ ID NO: 366043 - DNA, 555 bp, Homo Sapiens
gagagccagtattgcttgaggctcttcagtatgcccaggttggcagcactgagaaccgcaggaacggcctgttgttacaaaaaggagattgactcagctgcccttggtgcatctgactgactatgactgctgagagattccaaggacccttaatgccagggctaacctctccatgtgcagtgagacctctggaggaagtgtcatcctctggctttgtgtggtactcattatggtgcagtgcgggcatgaaatgaagacacccaaataggcttacagatacgatatgttttaaatgttcgtatttaacaaaaacatactgacactgtttggaaatggcaacaggaagatagcaaaatgaatactaacattacgaaaagatgaacaggtacatgttccaaggcaggtggctgtgaacttcctctgagtgaaggcatcccctccagcacctttcagcctgctagttaggacgacccgccgccaccctccaggacctccagccctgcactgcctttcctctcttttaaataattcttcattgagttctaatatgtaaaa

SEQ ID NO: 366044 - DNA, 418 bp, Homo Sapiens
  misc_feature (80)..(207): n is a, c, g, or t
gagatcgtgtctcgctcctgttgcgcaggctggagtgcagcctccaaggtggctgggattgtaggcgtgcgccaccacgnnnnnnnnnnnnnnnnnnnnnnnnnnnnnnnnnnnnnnnnnnnnnnnnnnnnnnnnnnnnnnnnnnnnnnnnnnnnnnnnnnnnnnnnnnnnnnnnnnnnnnnnnnnnnnnnnnnnnnnnnnnnnnnntgccttttcatatttccccatctgctttatggatcaactctcaacagtacactttttcttttctttacctaccctatgagtgcaacccagatgtaagagttaatcctcgtcagagaatcattgccttaaacctctcagaaatatgtaattaggaaatcttattttaattttttaaaaattgcttgtatagtttcaaagaataagatctggc

SEQ ID NO: 366045 - DNA, 2909 bp, Homo Sapiens
  misc_feature (2266)..(2266): n is a, c, g, or t
  misc_feature (2271)..(2291): n is a, c, g, or t
  misc_feature (2308)..(2346): n is a, c, g, or t
  misc_feature (2393)..(2467): n is a, c, g, or t
  misc_feature (2511)..(2520): n is a, c, g, or t
  misc_feature (2553)..(2561): n is a, c, g, or t
  misc_feature (2614)..(2622): n is a, c, g, or t
cggtcctaggtagcgaggcctgggtggcgaattcggcacgaggggaaggactggtccgcgctgtccagccttgcccggcagaggactctggaggatgaggaggaacaggagcgcgagcgcaggcggcggcaccgcaacctgagctccaccacggacgatgaggctcccaggctcagccagaatggagaccggcaggcctctgcttctgagagactaccgagcgtggaagaagcagaggtgcccaagccactgcccccagcctccaaagatgaggacgaggacatccagagcatcctcagaacacggcaggagcggaggcagaggcggcaggtggtggaggctgcacaggcccccatccaggagaggctggaggcagaggaggggaggaacagcttgagccctgtgcaggccacacagaaacccctagtctccaagaaggaactggaaatcccacctcgccggagactgagtcgggaacagcggggcccctgggccctggaggaggagagcttggtgggcagggagccagaagagaggaagaaaggggttccagaaaagtccccagtcttggagaagtcctccatgccaaagaagacggcacctgaaaagagcctggtctccgataaaacctccatctctgagaaggtgctggcctcagagaagacatctctatcagagaagatagcagtgtcagagaaaagaaacagctcagagaagaagtctgttctagaaaaaaccagtgtctctgagaagtcgctggccccagggatggcactgggctcaggaaggaggctggtgtctgaaaaagctccatctttgagaaagcactggcctcagagaagagcccactgcagatgctaagccggcccccaaagagggccacagcctcagaagcagcccctggcgcaggagccgccagcctctgggggaagcccagccaccaccaaggagcagagaggaagggccctccctgggaagaacctgccctctttggcaaagcagggggcttcagaccctccgactgtggcctcccgacctcccacccgtcacactccaggtgaaaatccccagcaaggaggaagaggcagatatgtcctcacccacacagcgaaccttacagcagctcccttcaaacgctccagccccaggaccattctcctttcggatgaaacccaagaaagaaaactcggaaaaaaccctaactcgcagtgccagcatgaagctcccagacaacacagtgaagttgggagagaagctggagagataccacacggccatacggagatcagaatctgtcaagtctcggggtctgccttgcactgagttattcgtggatcctgtgggtgtagccagcaagcgccacctctttgagaaggaactggcgggccagagccgagcagaaccagcctccagacggaaggagaacttgagagctctcagggagtagtgacatcaaggctcaacctgatggatcacacaggacccaggaatctggagatcaggaaccccaggaggcacagaaagcatacatctgcaaccgagaggactcaaaggggacagaaatctgactcctcgaaggacgctgaggatgtgacaagccccgccaagacagacctgcaagtcttcgtctcaagggacctccctcatgccaggcccctgcctctcacagcagcaccctttcctctcattgtccctgttccctttttgcctgtggatctgtttggccagggtccctggggtcaggaatatttgcaagactcagccagctccttcccagcccagcctcttggggctgggactttctcaccctgcggcaggcacaacagatgctgggacccagtctctgcccaggtcacagcacaagtgcacatcagcactatggggcctatgtcctgcccagagacctctgctccttcctgctcacatccacagtcagggcacggcgccccctcaagaactccagagtcacctgtctcatcggctcccagcaagtgcctctttgtctatgatgtcccccttctctgaggcctggacccacccatctttgtccctggggcctgctcccagccactgaggcccgctctggccaggggagaaggagctgccgtgcgtcttccctgtgccccgtctccctgcttggttctcccctcccttccctggccggctgccatggccaggagctaagtgcctttttgtgtgcaaccacttaccctttctctgaaaaacctgttctcaggaaggatctgataaactcatttactctcangtgannnnnnnnnnnnnnnnnnnnnaaaaaaaactcgaggcnnnnnnnnnnnnnnnnnnnnnnnnnnnnnnnnnnnnnnncatggtcatagctgtttcctgacccaggctttctgtacaaagtggtnnnnnnnnnnnnnnnnnnnnnnnnnnnnnnnnnnnnnnnnnnnnnnnnnnnnnnnnnnnnnnnnnnnnnnnnnnngttgcagtacccgggaatttaaacccgccctagtggagcgggcnnnnnnnnnnggggatccaaagggatctttcctggaagatccnnnnnnnnncggcgaagtaattccgcctggttggcaaaccaaaaaaaccaacggctaccaannnnnnnnntttggtttggccggaatcaaaaaacttacccaacttccttttttccccaaagggaacttgggctttccgccaaaagccgcaaaatacccaaaaacgtgggtcctttccaaagggtaccccggcaatttaggggccaccacccttcaaaaaactcttggaaaacccccgcctcaaaaaacctcggccttgggtaaaccccggttaccccgggggcttgcttcgccacggggggcaaataaatacgggggcccttaaccgggggtggggccccccagaacaatatattt

SEQ ID NO: 366046 - DNA, 467 bp, Homo Sapiens
  misc_feature (110)..(110): n is a, c, g, or t
agtcattgaactatgttatcagaaactaagtttgtatattatttgtgaaaaacatgtatttctgaatcagtccgctaatatgattgtgcagtattagcttgcttttgccngctgtgttaatgtcatatatttgccttaccttttgggttcaattatctacataattgtgaaatttaacaagttataataaagccatgacaaccaaagttttagaaaacattaaacattttaaatgcacgtttaaaaaacgtgttgaatgtaacccccctatttttgtgtgcaaacactaaattttattgctttatgttttgacctttataaaggtgttattctgctgcccagttttgtaattctcaaaaatagtgccaggtcttctatagcttttttcagaattcatgggcttacaagtactgtatgcatctttaaaaagaaaaggaatgttataaaataaaaggatttatttcttt

SEQ ID NO: 366047 - DNA, 648 bp, Homo Sapiens
  misc_feature (142)..(142): n is a, c, g, or t
  misc_feature (217)..(217): n is a, c, g, or t
cccacaccgtggtggctggccgggctcttcaaaccccaagttcgttcctcacggccattcatgcagtccatggccaggaagaacgagtggccccctggacaagatgtgtctgtctgtcgaggtgacaaaaaaaacgagaggnacatgccgctcctccgcgagagggctcctacgtgtacggactcttcatggaaggggctcgctgggacacccaganctggagtcatcgctgaagcgcggctgaaagagctgaccccggccatgcctgtcatcttcatcaaggccattcctgtggaccgcatggagaccaagaacatctatgagtgtcccgtgtacaaaacacgcatccgcggccccacctatgtctggacctttaacttgaagaccaaagagaaggcagcgaagtggatcctggcagccgtggcgctgctcctacaggtttagctcgctcctgcctcacagcccacactccctggggctggaccacaactcagcccttcacctgtgcacctgtgacttattctttacaggaactggtggtggtttttcgttctcttaaataatcaggtgctttgtaaccaagcacatcggaaccagagggtggaggttggtgtggaagaggtggggcagattaaagccagtggagcc
